United States Patent Application Publication US 2014/0057251 A1 - sequence listing, part 46

SEQ ID NO: 53821 - DNA, 909 bp, Cannabis sativa
aggtttggaaaaatcatatgttcatttatatttccggttgacaaaattttattattaatgcattcctctatgacatttacattgaattttcattctaagtggatttattgttctagctcatcactttgctcattttcctttctcattttacttactttcttgtttagtttttagcttagtttaaattatcacttcttgtttgttttacctaaattgtttagtattgattttttcataattaatttctaatcaatccttgtggagacgatactcttttacttatcattgtattacttgtttatgactacgtgcacttgcgtatatctaattttagcacaacaagtttttgccgccgttgccggggattgatttagagattttttttctggttaaaatcaattgcttttcaatttgttcttttacttttcttgttttcttttacgtttgcttgttttgtttgagtttttcttgcaaggtacttaagatgtctcatcaacaagtacttactaatttcattcaacatgactcggagcctttacatagagcattgtggagatataaggatttgctaatgtggtttcctaaccatggtttgtctagagagtgtgtacttgaagtcttctttaatgggttgcatgcaagcacaagagaatgggtagaaggaggagatggtaccaccaaattctaccaactatctatcaatgaagcctattggatgttagaggatatgacggagtatgatgagtgttgttggaattcttcatcaaccaaccaagtttggtagaacacctctagccatatggagaaaactttttatagtgacactcaaggaccatgggaagatgatttattaggagatggaatatcaatgatgagtgcattcatggagaaggtgaatgcatacatgga

SEQ ID NO: 53822 - DNA, 3320 bp, Cannabis sativa
aaaaaaaaaaaaaaaaagtactctcttctaaaaatatagaaaagtaaaaagtggaagagttcaaccttttgtcgctagtttatgtcatatttatagtgataaatgacacctaaaattgagctccaatagtttgaaaataaagagaaaacattaattagtttccttataaaaactcatcaaatgacaaaattctgtttgaataggtatagaaagtctgcgtccctcttcgtctgaagcttggccttcttggatatcagcttcttccggtgaactccaaaagagcccttagctcttgcatgagtaaggctgaattttaacaaggcctgaaacaaaaagaaaaaccaagttagaagtagaagaaaacctggctggccagcctcttagttgtgcacttctggctgaccagcttcccatctgtgcaaccctggccagccagtccctaagtggtgcacacctagctggccagccactgcaatgcaacaatttgcgtaaaatcaaatatacaacttacatatgttatgtccaggaggccgctggacgtcaagcactccaactcctaaagctccccatcaatgataggcaaagtcctattaatatagttttgagcgacatcagtattcctctgactaatggatgaataggccccctagccagacctctgagccccttgttcaaaggcctgcatgggggtgaagtcctccttgaaggagggtccatgatcactggttgattagctagagtaggcccaagaggagggggcggcagtggagattgagtggtgttggaagatatgatggtccaagccaccttggccataagacaacttgaggaagcatcgccagaaggctctcctgcaagatccctcattccctcattctagaagccatgtctacaaaagaaaagtagcaaatttagaatacaagttacaagtattaaatgcaagaaaaagtaaaaaaaaaatggtattaacaactaccattcaagggaggatcatccttagaggagaaattgtctaagtcactatcactaatggttgccttgcccttgcctctagaagcacgcgtggacgagtaggcctaacagaatcctgacctctaggccaaatcaacaaagaagcatcaccaagtgtatgcatgtccctaggcaagtctcctctactaccgaggcattatttaggcatctagatgagtctgcaactccctcaacactagacttagaaggacacataccatatctcctaaagttggtctcacaagccaacctaagtatattcctcctctcaatagggagacacaagatgtaattaactctatccctcattcagagagtgtgaatggagcgtgagtaattcagcaccctctaaaaagcagtgattgacttatgggatgtcctaggaaatgaagtaagtccgggaacatcctcaaacttttgacaaagctgtgctattaatgttgcccaaccactggtagcccaactagctaaaatagaagtatccagactggcttgcattaaaatggacttcagctcaaagaaatactcgatctcatagggtgagggttgaggccaacccaattttgcatacaggacgaacattgtcgaaaggtactttataccctttggagtgatctgagttggacaaaacctaaagtaaagggctatgtcttgaaagtaggggtgaagaagtagcactgctccctgctcaatatgacgctctgaccaggccatctatttgaatgctaggcgatgtgctagttggtctctggtgggcctatcacatcgaacttctcctacaagtcctactgtgttgactcatcaagcctattggcagagatagaggacaggggagatatccaccgatataaatcgtctccgtggttgaggatgtgggggttagcagcctcctccataacatggttgtatctcaatctcaaaaagacgactaagactgttcaaaggtcagccagactcatcgtaagaacccaaggggctgttcaaaaatatattacaagtcttatagtatgcataacctcctcaaccttggactcaatgtctgccccgattgaggcctcctcatcttggctagccacgggctgctcgaccacaagttcttcaacctggccggcccctggctccccagcatatcgaggttgtgcaacctcctcaatagcaccaaccctgcctctggtcgtcagcatagcaatgtgagggtcctggggtggtgccctacgacatgttttcttggtcgtcaccataatggaccctgcgtatttggcaatagaaacaacaatctctacgataagaagatctctcgctgaagaagttgctcgactaatgggtaaggtgtcagtcacaccatcttggacaatataagtccaagaactaggaatgaatttcctccaccctaggttcagctcctagataaatcgaccgtataattcactgcctattcgcttcgtatagcggtgatgctagaccttaagttttggagaaccattactgaccttgagatcactcgaggaactactagaaggatcagctagacaatggttttcaaaaagagaaggctgagtaaatattcgttagtgcagttatcacctccccaatagtcactcgggatcatctacatgtaaaagataaggggaggtgagcaaacaaacaagaataagatttagacaagactctagttaaccatacctatgagtactagacagataattccattgtacaaggctgggtattagcgaagtacgattttaagtgtaataacttggataaacattgagtcttaagtagattatttagcagcaatatactcaccctaaagtgccatacacagttcctaagagaaccacgtatgggacaagggttgtccaggtttgcaaggccataacaagattcttgctaaggtcacaataggacaaaaaactagccaactcctaaggaccgaagccctgggccggttagggtcccaaggcatttagccagccaaggttctttgacccatgctagaactggctagggtcacatgacccatgcaagagccgaccagggttctaggtgaaaccctagaaatttccactctcatgaaaagcaccatgggctggccaggtcaaaaacaagaccccatagttggtcagggtgtctaatggatcaaaatatgtgtctttccaagactcaaacgcgttcatcatgttctttgtgacttaaagagtcaagaatcacaacgaatctaaagattaaatattttacatcaagaaatcatatattatgcatcctaaaactatcatgcatatcaaaatactaaaaagactacaatctaa

SEQ ID NO: 53823 - DNA, 1333 bp, Cannabis sativa
ctggaggagcgcaggggccctcatcgtcctcctcgggctgactatgaaatttgtatatatcttccttatgttattgttattattattattttttttatttctgtccttcccctcacttctaaaaaaatttcttctttctcttaaggggagactttttatggcccgtccccaggccttttctttttaagattctctttcttgaacaatctatgtctaaatatatttaatctttcaattttcttatgtttgtcctgtttatatttgcccgtatgatatgccttaatgcccccctaagtgacatgaaaagcagtttttaagtcacttagtcttacaaaattaaataagaggttgcatatatttgttcggtacaaattcttttacaaatataaactttgtttttaactattgataatactttcggaggtggtcagcattccaggtcctaggcactgtggttccgtccattctatttagcttgtaggtctcaaagccgatttcatcctcaatttcatatggcccttttgaatttgacccaagtacccccacttcgggtttttgagtggctggaagactctttctaggactagatcgccaatggtgaatttcctatctttgactttggcgttgaagtgtttagccacctttctgtggtaagctgccatccgtacttgagactcatcccggagttcgtcaatttgatccaatgcttcttgtaataaagctttgtttgttgtcggatcatatgtcacccttctgtgggatgggaacaaggtttccaccaggaccatagcttcacagtcgtacaccactgagaatggtgagtgttcgcttgtggttcttgggggggtccggtatgcccataatactcttggcaattcttcaagccagttgttcttgcagaccagcagcttcttctttaaggtgacctttaggattttgttgacggcttctgcttgtccatttgtttgtggccttgccaccgcagagaagcttttaacgactccatgttggttgcagaggttggtaaattctttgcagtcaaactactttccattgtctgagactattttatgaggcaagtcgtatcgacacacgatgtttttgataacaaagtctaatgtttttttagcagttatggtcttcataggatcggcttctgaagctacatgtattgagtatactaaggagtgtatccccctctgttgttgcttatccttagtccggtggctaccctttgaagacctcttacttcgggagctctgaagaggtcctgttaggctggtggcaggcatagactgagatggaacttgacccttcatccctgaggggttgc

SEQ ID NO: 53824 - DNA, 1857 bp, Cannabis sativa
acaaaatcgaggtggatatcaaggaaactcatcaagaggctacaggggcaatcgaggaggccgtggaaactatggcaatcgagggggaaggggaaacagaccaatctgccagttatgtggcagagctggccatacgggtctcaaatgttatcataggttcgatattacattcaatggccctcccccaaaccaaggatcatcattgactgcacctaatgactcaccccaagctctattattcgaaactgcagcaacaaatgacacctcaggagcatggtacctggacagtggggcaactcaccacatctccaatacatccgaaactctcaccaactcaacagactacaaaggcaaggcaaaagtggtagttggtaatggttctaatctctccataaataaaattggttgttcttccattcccaccaaatttcctcacaaatctttacttctcaaagatattttacatgtcccaagtcttaccaagaacctgttaagtatatctcaattcactaagcacaataatgtaaccattgaatttgatgatgtttgttgtcttgttaaggacaagaacacgaagcaagcacttcttcggggtaccctaactgaaggtctttaccgacttcaagtgccacattccccacccacaagtcaacctgttgaacaacctcccaagatcacagtcaaaccagctatatacaatttcactacaagtagcaatcctgtccatgacaagtccaagacatcctctgtatggcactgtcgtttaggacatccttcaagcaaaattctagcaaaagttctatcccaagtctccccaaatactaaatgtaacaatgttcctttttgtaatgcttgccaagtagggaagttacatcatttttcttttacacaaactgaaaataaaacctctatgccctttgaattaattctttctgatgtatggggaccctcattttatccttccaaggatggatacaaatattatctcagctttgttgatgactatactcggtttgtatggctctttcctatgaaaaacaagtctgaagccacatctttatttgtccatttcaatgcttatgttgaacgaatgtttcaacaaaaaataaagagtgtccaaatggacctaggaaaagaatatgaacccttgtataaattgttcaccaccctaggcattgtaagacgaaactcatgcccacacacacatcaacaacaaggtcgagtagaacgtaaacatcgacatgttgtggatattggtcttacccttcttgcccaagctgaaatgccattaactttttggtgggaggcattcacatcagctgcctatttaattaataggcttcctgttcccaacctcaactaccaaatcccatataaaatgctattccaccatgccccagattataatcttttaaaggtttttggctgcacatgctttcccttattaaggccctatgaaaatcacaaagtatccttccgctcttccaaatgtctttttcttgggtattgtcacaactcaaagggatatagatgtctccactctagtggtcgcatctatattgcccgaagtgtaacattcaatgaaaccgagtttccatacaaaagtctattttccccatccaaacctacaactcaaactcacaccactctcctagatcccaatgattttcgtgtcccacatactcatcacaacaccattatcacacctacacagccccagtcaaccaacaatttgagtcataccccctccccaaccatttctgagtcaaccaaccataataatacatcaaaccagtcatcacaccagcacaccgattctgccacttcatccgaagctcccccagtaacacataacat

SEQ ID NO: 53825 - DNA, 555 bp, Cannabis sativa
aatgtttaaaaaaagtggtaaaaatgatagagggtaaaaataaaagaagacaatataaaaaaagtatagagtgtagttttctcttaattttcaaagggatatgttcataaatacccaaaaaaaaactcaaaaaagaaaatatataaaagtatagttgtatgaaattttaaatatttttacagtttataattttttatttacgaagaagtacgaactattgatatctttatattattttttattattttttttgttagttttatgttgtttggttttctttctcttgttgttttcaaaggaaattgtaaaatagtaattaaaaaattatttaattgtaaaaatgttaaaattttacttcatcatcgaatttggcggtcggtttcggtttttgaaataaaaacatggttaaactaaaaaactaccaaaattgccataaatcgcaataaaacgcccaaaattgccaaaaactgcccaaaaccgtccaaaaccgccaaaaattgtacagtcgattttatacggttataatttctaaacggtcggttataaaattataaa

SEQ ID NO: 53826 - DNA, 959 bp, Cannabis sativa
agtttctttacctccttgaaaaaagaattatgttttccaattgaagagcttttgcaaaactttatctctgacatgttggacgagagtcttcttagtccttcccatgaaacatgacaaacttagatgtttctcatggtaggagactctccaaatttgaagtatgctatctatctcccttattaagtccttggtattcccatggcttatatagaaagtcgacttagcaaaattaaccacttgacttaaagctttagcataaatatatagtatcatccaaaattttatccacctaacatggcatgtccacgtaagccaagacagagtacatgtggaatacagccttgccaatagcaagacaaagtctccttacaaggtatggtaaaactgtcaagtaacaagcaaaaggaattaagtgagttgtcgaggagctataccactatgtttggtcggtcaaggggagtctatagatccggccaggatgagtttatatggccgtccagggtttgagcacaggctagccaaccaaaaggttatttttagaccaaggaaggatctgtttgaccaaggagcctgatctatggaaggcaaaggtgtacaaaggctggcctctacctcaaaatactggcctccatctatagaggcttgccactaataaggttggccatcaccaaggcgagccatctcctactaaggctggccagcacctacaaagtctggcctcctcttgccaatgctggcaggaacatgacttgcaagatcctggcaggcacatggccagccatacccttgcaggcacatggccaccctaacattagcaggcacatggccgaccagaccctagtaggagcatagccagccataggctgacacatgtgcgccatattttaatgcataaaattattttaccaatttaatcttaaataagatttattatttatttttcaataaataataattga

SEQ ID NO: 53827 - DNA, 648 bp, Cannabis sativa
atttaggagttgtaattttatgcatgagaggtatatatattattggtatataataatatatgtgtaactaatcatatttagtgtatatgataaaaataatagtgataatgatggagaaaatgtactcatcagtttttgaatggagttttggaatttttttttcatcagtagtttttatatcattttatgagatgagaaagtgaactattagagttacacttatgagagttatcttgtcatagcaagaacaaatggatcaaaggtggatacaaacttgtaaaatgagtcataattagaatagcaattttagactcaagtcaaaattagtagttttaattcattgtgactagtaccaaaaaaaatccgagatgggtctgggccacgttacacaaaggggtatcaatatcagaaatgtgagattttaactatttcgattaaaatgattgttagtgcatgaaaactactttctctctcaacgagtcaaacagaaacgtgatgcacaacagtcttggttttctccctacgaaatttcaagatttttcgagatgtgtacactgagattttaacagaacactaacgagtgtaagagtaaggaaaaaaacttgttaaaatttaccctgaaaataagaatattttcaatttttgaat

SEQ ID NO: 53828 - DNA, 1443 bp, Cannabis sativa
caagatgaaggaatcaatgtggtgttcttggtttccttttagtaattttctaggagaaggtttcagagtaaaagatccaaaaaaaaaaggtctcaaaaagaagaagtccaaaggaagagatccctttctcaacctccacttgatgtatatatagactagagggtttgttagtgatccctcatacatcgggatatctcattaacaaatcccgtatacttctcttttttatgaataaaatattacaaataaataaatatcaataacaatcgccttgtatctaggcaatatcccaccaatattggacaattagttattttcggttgaggatgcacaaatttgaaatggagcgcttgacacatgcattttggactgtcgatgctcgcgcacaatgctacataggctgtggcggtgtgctccaccaaccctcgcttagccgcatttttcaattctcgagtaaaatgcaccagctttccttgtaagctaattttggacccgataacttcagaattgagtcatggctctgacacacactttaatcgtttcaaaattatctttccaatgcaagttgaaccgggtcatttggataaaaattgagagagttatgctaattttactgaaggcactttatgttgtcttgtactagttgtgagcattgccatggccaaatggcagaggtcggctatgcatgttctcggacccctcggggtgtgttttgacttacttttttttatggtgagtcatattttggaggtctcgggacccaaaaacgtcattccaacgtccgaaaccctaaaaggtgactactgccactagttgggcccggataatggcacatgtcacccatggcttgtgggaaaccatgggtggtgtctcttacttttatttggtacatggatgttgaaaatataatttggtcaataatttcctcttcttggtgtagtaaccgacttgtgccacttcactatagcagcggtctccaattttggaaagcactgccattctcttatggcacaggtcacctaaggcgactcctaggccgaaagtgacttttctcaattgtcccttactccttgatgtcgagggaacccgtttggacaattttcctcccatagtttgcgaggagtgacctatgcccttctcttatggcactggtcacctaaggcgaatcctaggccggaaatgacttttctcaattgtcccttactccttgatgtcgagggaacccattcaaacacatttccctccatggttcgcaaggagtgacctgtgccattctaccatggcagaggtttccaaaattggagagcactcccatttccttatgacaaaggtcacctaaggtgactcctaggtcgaaattgacttttctcacttgtcccttgctcttttattttgaaggaacccgttcaaacacatttccttccatggttcgcgaggagtgac

SEQ ID NO: 53829 - DNA, 610 bp, Cannabis sativa
tacacaaaaagagaaatctataaaaaaaattagcatagaatgccaaatatgaaatcctaaaaaataaaaaattgcaagtatatgtatattgtacttcatgaaaatatatatcatggtataagaacacgaaaacctaaacttataacataagaaaaataaaatacatatattactgaattaacaacaaacacataaacttataacataagcgagaaaggatttgagttataaaatgaaatcatataatggaaatatatagggagatgaggagatgcactactaaagagagtaataaaagagggagatagattcaaggcccgtcctgaaaatatatggacccaagacgaattaaattttgggactctaaaaaatatataaaaaaaatattagagaagagtgttatgagatttaaacccatgaccttgaacattatgtcatccagctcaactaactaaactataaaaatttattacttataatatacttaaattttacttaaaaaatttaaataaaagcctaataatttttttttttattttcttattttggcccccgaaaagtgtgggccctaggcacgggcctagcccgcctatgcctaggaccggccctg

SEQ ID NO: 53830 - DNA, 923 bp, Cannabis sativa
cccctaaactaagttaccacccccgggtagatgacttaccatcgaggggcaggtgactatctaagccactttgggggtagttacatatctcacccctgtgggtacttatccaccctaggggtggttgcttaaacataccctggggatagtactcaatctcatctttatacatagaacatacctcatggagggtgaaaattttacatattccttagtaattaattagtctcaggtaatctcgtgacacgtgtcatcatactcgccacatcactcttatcaaaatttaaaactttttttttaggtaaaatggtaacatttttattagcaaattgcatcaaaatttaaaaacttttgatgtgtttacttatggcatcaaagaataagaataaataatagaattcattacattgtttacttctctaattttgttaaagaatgaggataaaatatgtgggtctcacactaatttaggattgagaattaagattagcagtcccacgagattggttggattgccactccctttcttttttaaaattatgaaatatcatttttactctcatttaattattttattaattaaatttttttaaaaaaatatcccaaaaaaaaaacattaacaaagagtatttcgtaagttaaaataatttactccgattctaaaataatgtaaacaggtcaatggaaatacttcttattctaattcgtattcgtagtattcaatttttcttaaaaaaattgtcttgctaggtgatcttcgtttattgtttgatatggctcgctaggatatacttttaaatattttagctaaaggttgaaatatgttagcttgcagatgctcgataggtgtagagtatgaatattatacatatacattcatcatggatataacttttagactttatttgttatatagcatgatt

SEQ ID NO: 53831 - DNA, 570 bp, Cannabis sativa
aaccaaattcaagctatgcacatgcagtcctgtgtataagttatatatgtattgggaagaatcatgtaaatagttacattcaaaagctaaagatatagcttatcaagactaggaaaaagatataaataaagggttatttacaaaaaaaaaaaaaacgtaaggtaaaaaaggaaagtttgatatatatagtatccaatttaattaattgcatgcagtagtatttaaaaatatgagataaattattatataaataaaaagaaatactgttatcaaaatcaaggttctcctatgtatagagaataaattgctcatttgtaaacatagataaaatccttcaaatcatgtagtgctgttagtttatatataacaagttgtggaatgaatatatactcatctcattcactaaaaaaaacttagaactcatatatatgttatgtatatattatattttacttctatataatcaaaactaattttctaataaagaaaataatttttttttttttatgaaaaaactagtttcttattccatgtaatttcttaataaagtatgagagagagagagagaga

SEQ ID NO: 53832 - DNA, 870 bp, Cannabis sativa
agaaatttcaatatgtggtgtaattatctcttctatatatattccatattccatatatatggaatttttaagccacatattgaaattttttaacttttttattttttttactatggggctcaaaaatatcgtgtactgtgttaagttttcacggttattttttagttgtttgactgttcttttaattgttttgttttgttgttttataaaaaaatagtatttttcaaaaaaaaaaatcgtgtgatagtaaaattataaaattatactaaaaatttaatatttttgtaaaaagccctatatatactagagagttagccatcagattttgatattatgaatcgatttgtacgtagatgttgaatttttttattattattacagcaaatctttaagaaaaagtttgtatcgagtaaaatatatacttcgattgtgtgttatttattgtaaaatgattataatgactatggaaaatgataatgataatagaaaatataccactttttaaaaatactataattataatctcacacattattatttaatatatgtcttttttttttaacaacaatgatattttagctttaactttatattaaaaaaaaaataaatagcatcaatgctaaggtataacatctatgtaaatttctagagagacattcatctctatttaatagtataaagggtaaatactattttggaccttatgttttacaaaaattacaaattaggccctctattttgttaaatgataaaatggactctgtatttattaaaattttataaataggatcctgaattaattttttgtaaaaataaaacttaataataatctattctagagatgttatgataaaactggttatatttttt

SEQ ID NO: 53833 - DNA, 1771 bp, Cannabis sativa
  modified_base (1492)..(1512): a, c, t, g, unknown or other
atactctatatatagtctaacagtaatactcacttttttttatgttattgagattatttgtgagttgtttgtttgcttcttttatgttatctacactatttgttaatttttaattgatttacatatttaactagtgttgttatctagttgtatgttagttgttattaagttgtttagccaatctaaaaaataagtatatgtttagtttttctcagtacatatattttttttgagttagagtgatagtgttttataattgtttttaagttttttttttttgggtgaaattattggatttgtagttttttatgtttttttttttaattttttcaggttattggtttgtatttttttagatgtctcaagccaatttaatttacatattaaagaagagttgttatacaattattagtttgttcttatttattagttgtttgaacagtagaaaactaaaaatatattgagtttttttatcgatacatgtattataattgtttatgtactgtgtttacatttctttaaagttgtcgaaaatatttattgatgttaaattgatttacatattaaaatagtgttgttgtgtagatgtatgttttttatttcttagctggttaaaaaaaatttaaagtcaatttttctaattttttttatatatatggtaataactttgatcaaaataataataataataataataataataaatgaaagtatactatttaaaagtattttattttacttaaatcattatacaatttattaaaatattttttaaatacataacacaaccagcaaatagtttatttctagtcccctagctaacaactcaagagaaataaatttatttccaagatgaagtatcaaatcttacaaatgagtatatctttaagttttttcattaggtaatttgtagttttttttttttttttttttttgagattgtttgattgtgtctttcgagttatctgcactattttgttgatgtccaattaaattgtatatctaattagtattgttatatagttgctattagttgttattattgtttgaccaataaaataatgagtatattttttttatatgcctacatatatttttgagttgatatatttgtgttttgtagttttttttattttttttatgttattttttagttgacgtagcgtagcgtgttgatgctaaattaatttttatattgcagtgagttattatttagttgtttgtttgttattatctagttgtttataagggaaaaataaatatatatattaagtttttatagtacatttattaagattatttttgtgtgactgagtatgacaagataaatacaataagtgattaaaatttattaaaaagaaatactatttttgtgttgttttgtatatttattttaagttgtaagtggtattaacagaattttttaataatttaaattattttttgaaccatgtaaactgtatatatgtcctataataataataataataannnnnnnnnnnnnnnnnnnnntaatataataataagatacataaagcaataactatttaataaactaaataatatttaacataaaataattttttatattttcttgaaataaattatttggcaaaagtaatatttgtcagaattttgaaatttcatattttggctctaataaaataccccatatcaaaatttagactccttcattttttgtacaaattgattacactaatttaaaaagattcctaaaatactcctaaaataaacttttcactctctctct

SEQ ID NO: 53834 - DNA, 1249 bp, Cannabis sativa
taaatcagcatcttagtatatttttttaatatttctcgcgttcttctattaatgttgagtgaggcatacgcgagataactatcacaacatgccaattatgaagtggaccatgttgaatgtgtagtctttagtctttcaacatagtcacggtatgtggtcaatgagctgcaagttctttggataattcattatctaccctttccaaacaattaagttgtgtattttgtgtatctcgagatggactttatttgttcgtctcgctggtctcatcaattggtagttattattcgtgtctcgccattatctttaggagggtgagtttgaatatttctaccaactatacttcccgaggtaagttgtctaaatgcatttattattacataattcgagttggttcatattctagctatactacacttgttagcactatattgctacttgaaatatgggtatgacaattgtcccctaaaaattactttttaaaataaaaatgaatttttaatttgcttagggtacgatcgtatttttccaatttaagaactacatattttattttggtagttcaagacttcaaggtatatcatttgttcatttattatggtgacctctctttttccaatattcccattcgttcgatcaacaattattatgattgaatggttttcatcatttgggtataaaaaccaaaatcccttctatttcgacattatcatccccgaagctcttagaattcaaaaaaacctcaaaccaattttctccctaaaattgcattccctcactatctcttacatttttcctccgagtttcgagtgatttcatctctcacgcccagaatcaagtgagttcgggtcctcaacatcatgagttttcatcaagaaatttttcgaaactcaaatttttacgccaaaccagtaagtggcttctctgtcactaatcttagggttatgtgatttccaggtcttgggttttaactgtgcactattttttaagagttttttggggcactatactttgtgacaacaccatatccaatttcaatcgagaacttgcatacccagaccctttagaattacattatccccaatttcaagtcgtagtttttaaaccacaaattcataaacctaagtccatacacaaaatcaatgataaaaaaaattagagaaaacattattatgaccaaccaagaagaggtatccacctactataagcgattcttaaatgaagtcataaagggtagacgttaggggtg

SEQ ID NO: 53835 - DNA, 1138 bp, Cannabis sativa
aaatttgacataaagtttatgttctcgtagttgttgtaaaattatccatagatgtaacaccctactgcttagacatgctacattgactttctaattattgtgcacacctttgtcaatgaaagggtttcttgaaaaatgtgttaaatttaaaattttaaataaaactttaaactttataaatataaacatccatacaaaaattcgggatctcgttactaaaatttatattcaaattacactttacaaacatgtcgcacaacgattacaaaataaggtctaagtcgtctcgagaccaaactctccaagtctaacaatcctaatgtgtacaatcacccttgagctctggagtcactggtgcttagccttagcttttcctttacctacacatgtaaataatatatgtgagtcgacaaactcagtaagaaaagcatataacataatatatatcactaacttgtatttaggtgctcatacacctatttacaaggcttcagatgcatcaagaacgctcttgcttttggtatgacagatcataatattagccactactagcattataatcgtgatgtgggctcaacacgttggttgtattgttatgatagcatcaatctatacccgaaagtactattggccataatattattcttaacaagtactatactcgtactgctgactcagttatatagttggtaccactatgatagtgtcaattaatactttatatggaattaaataccagtcacacccagcactatactcgtatggctgacccgacactataatttgtgtgactatggtactaattcatgcatttcgaccactacaagcactataattgtgctgcagacctgacactattgtttgtgccaccatgatatcaatgcatataacacataacgtagtatgaaatttacatacatacacatatacatatacatatttaataattattttatctggattcttgattcaagtgtgttcgtcagcctgaatgaaaaatcacgtgttgaacggacgccatgtcacaatcacgtaaatcgggtaaacaacttgttaagcctatccagaaacctaaactcaaaactagaagttttcctatcaataaaactgcctaaaaaacggcaagttgtttctgtaa

SEQ ID NO: 53836 - DNA, 1234 bp, Cannabis sativa
gtacgaccgaatagaatggaattttcttgaagctatgctccgaaagcttgggtttgaggattggtggactcggctacttttgaattgtgtctcttctgcatgttatacagtggttcatggcaaacatgagattggtccaatagttccttcaagaggtataagataaggggatccactatccccttacctttttatcttatgtgctgagggcctttcagcgaccattcgtcggtttgaatcacggggtctgctacatggatgtaaagttgcatatggtgcaactcgtatttcacacatgttatttgcagatgacaactatctatactgtaaggcaacaatagaggaagcaacaagaattcaggaagtattgagtacatttgaagaagcatcaggacagaagggtaatttctccaaatcttctatttttttagtactaatacaaccatggtaatgcgtaacaacattagtcaaaggctcgacatgaccattgcgggaactaatagtctatatttgggtctcccaagtaccatgtctcgcaataagacggttgtccttggctacttaaaagaaagagttcgtaaaagaattgaagggtgggaaaccaaatatctttcacgtgctgggaaagagattttaatcaaaacggtggcccaaactctcccgagttatgctatgagtgtgttcttactaccacttgacattacccgagagatggagtgaacaatgacaaaattctggtggcaatcttcaaacaagtccgggaaaggaatccactggctctcatgggaccgattgtgcaaacacaagaagaaaggaggaatgggattcagaaacctcagagattttaacttgtcactacttgggaagcaaggctggcggctcatttcacaaccggattcacttgttgcaaggatctttaaggctcgatactatcctactagttcttatttggaagcaccactagggaacaatcctagctatgtttggcgtagtgtttgggaagcacaacaacttgttaggaaaggccttctttggtgtgtagggaatggagcaagtatcagtatccttaatgaaccttggctaccttgtgttgagaacccatatgtttctacctctcatcctagcctatctcatgggaaagtgaataatctcatggatatggatggcacaggttgggatttggaaatattggaagatctttttgaagaaagtatgaatataagtatatatgtat

SEQ ID NO: 53837 - DNA, 1690 bp, Cannabis sativa
cattctatacctgtttctctatcacaaatctccctacaaaaagaaacaaatagtaagaacataatactagtaaaaaaaaatattagataagattaaatttatctccaactcgaacacttcaaaagagaatttattcaaacttgttaaatttttggcaactacatcaaataaaattttaacataacatactaataaacattaacataacccaacactactatacataacaaaacaaagcaccattaaatcaattacaatacgaataaaatagattacaaaatttatgttaataaaatagtatactaaatattattattaatattataaaaataaatattatttaaacaaactcagcaagttattttgattgtttttttaaaagttatttttattgttgttattattatataatataaaagtaattactatcacactaacatattattgggtatttctataatagacactctaaaattagtcatatccatgcacccctaaaatcttgaatagtgattggttattatattgaggtacatggtattttggtggaatattatacattgtatagttatttatttgaaaagaatttatttatttatttatttttttgagggaatgatagatggatttattaagatattgaaaactgaagagttatttggctatcgttatcaggtttaaagatttaagggagagactctgaacagatttttttttttatcttataatcgattttagtgcataaaagtgaggggtttattttgagttgaagaaattatttctctagaattgatgatggattgaaggcagaatttgtggtatcgtggagttacatgccattttaagtggaattaataatataaggatgtttatcttttcttcattaatctgtattgtgccttgggttagtatttttgtctttaaaaattaaatgtgtccatagacttcgagaggtctaaatctccatttcaaaatccaataagcttcaattataaaaaaaaaaattggaaaagccttaaaaatcttgttctgtctttttccaagaaagagacaaagagccatgattctgcaccataaacgcattattagaaaactatttgaatcattaaagtttagaattaaataactgaatttaaatacaaagaaaaccattcacctagagaataaaaaaacttcagtaattctaaaagaaccatgagtagtttaccagctgttgcaatgatgaagacaaaagagatgacaggccaagcatgagtcggatcaaatggccgcgtttgaaaaaatgaccaaatggcagaggactgagaaggatagcttaggtaggggtggtgaggggattatttttcattttgttaaaaaaaattaaagtaattgttgaaccaattaaataataatttaggatgtgtatcagtgcaccccctataatctaaatttgattcaatacaccaaagcctataatattctcttttcatttctcacctgtaaccaatcaaattgcaatctaggagaagtaaggatgtgtctctttaaagggtgtctatgaaagaattttcccatattatttatctgttggatagtaacaaaaattgattttataataactgtttagagaaattctacaatgcacccccttaaaatagatacattgatgcacccttgtctgttttagcacccgaaataattttttagt

SEQ ID NO: 53838 - DNA, 2649 bp, Cannabis sativa
  modified_base (1891)..(1899): a, c, t, g, unknown or other
tgcggcataccaaacgaaccctaaaatgcaaccaaacaaaagaatgaaatgaagattatttcttttttattctattccattttattacttctaaccaaacgcaacctaagttttatgtttcagctaatatattcttactttaaaatttgatttgagaattaagatggacacatcaagtaattctttcacatgaactttttttttcctgtgactatcagccttatcaaagggagtagaactattagataaatatacgcagaactcatgaagggtatacttagtggaagaaaatactgatgagttgaggcgttagctatagaaaatggtcttcttgttctgatgatatggtttacaacttcataatttctatgttttttttttgtctttgatttgatttatgtttttgcccttaggcattaaaatctgttgtttgaccatatatataattcatttagtttttgaatttgagttcatacattggccaaaatcactcaattcatctttttaatccacgttgtaacctgtttgtaccagacctcagcatcgcgatagaagttcagccgtaaggaatgaagaagcggagcgcccacttctcaacggtcttctggtccaacatatgtcagactgaactacctttgaatcttccctgatgactgtacttctcactgcttgtttcttagttctttcttcccactttctctttgctcatcttcttttatcttaggcatttagggtagttattcattaatgattggtctccttgcatggaggggtttctttagacccaagcgtctgaagtttgtatcatatagaaatgtagtcatagaagttgaaaaactaacaatagcagaattctaataattaggttatatcaaagacaacataaacctggctgagtcgattgcctaggtttgcaatttattggaattattatacattcaaaaggcttggaagtgattaaagtgcttcgtttttagttgatgccttcattagacttggtttacagtccccggtataatgttgacttgaaaagaataaacgaataaataaaaataaaaaaaaaatctagtaataaatatactttaatcactttactttttatttcccctatttttttttaattggtttgttaaattttaattgcctatatatgtaatgatcaagagggttgttaaagagctcaaattatttgtctaaaccctaaaggaaagaaaagaaagaaaagaaaatgtgtatcccttctattgtttggtaagtagggaagaaagaaaatagtggtaaaagtaaaattactattcgataatttcatatttatttttttaaatgaatttgaagggtaaataagtgtttatccaaaattttggtttgatggcgtggacactatttttgacacgtgacacgaaagaaataatatcgggagtcccacatcttaggatagtgcagtgttacctgcacactagaggcacttaagtaagtaccaagatccatcaaagtcgtttttgaatgctatcctttaacaaaaaggttaccatgaccctaatacaatgaactataaagttgaggatgtcacgtggacatcccagggctcaacttgggaccagcatcagtgcagggcgcccatgttgacatcctgtgcgccatctcgcatcagtttcggttgccaaaaacttcttaggggcaatttgcttagccattttcttaagatacatgagagacatgccctagccaagttttagactttcgagataagtttatgagaaacgccactcgggcaccaagaagccctaatgggcaactaggtagacgtctagtcaatctgggtgcaccatggctcaagtttaggtttctagggacatccttggaccatgattcctcaaatctatcaaagaannnnnnnnngacatgatatttcatcaacgacatctcgaaggagcccatccataactattggcgcccaggttaacattccaacttgggcacaaatttcatttcaccaagaaatgcccgtgcaaatttgacaaaattgaaattcgtggagcatttttcaccaaaaagaagattggacatcaacgagattaatttgagagatgttgcccccacttgagtgcccagctcatgccccgaggccactatgggtgcccaggttgatgtatctcaacttaaggcactctggaactcttatttttgtccacgaagaagatagatgtgcttttgggaagcaaacgaagccatctaagccccagatgaaaagacgagtgcccagggtgacaacaccctagacactaggtcccaagttaacgtggcctcacttctggtggttccatccatccaattgctattctgtctcggccattcttcttggtgcatcaccaggcggcagtgtgcaagcacgatggcgcacattggcactcaggttgacattggcctagggctcagtgttatgtccttcaaatagcagttttgctccagaaattggtcttattttgttcctaaaataatttatggatccttctacaactcaatatcatatgtgcatgtgtcatgcgcaagtctaccgacatccatgtgcactagtagtacccaggtgtcacctagttgtcactagtgattcaccgggcatcacttgtgcatattaagtaaaattgctaa

SEQ ID NO: 53839 - DNA, 696 bp, Cannabis sativa
tattgcggaagaaaaagaaaaacattaaaaggattttattgaattgattgaatgctgattacagggagaaaagcctttaaataggcaaaaaggaagtaacaggtaacagaactccttaaatcaaggagaaccgaaaaaccagggatctgcacttatgtaatacattgaccatctaagccaaacatatacgaacaggtatatgaatttaacagccacttaacagagtaaataataacagagtaatatagtagtcttagtagtcttgttacatttctatagaagtaagaaactaacatactaccactaattattcaaaaaaaaaataaataaataaatactaccactcaacaacaacaatagagaaaaatacaagaaaaagagagcacaaaattgaaaaaccaagagtaagaaatttaaacacacaccaacaaaaagatacacacattgctaataagaaataaaaatacaacctttaagccctaacataaaacgaaaggaaattgacagagttcacttgagatcccatggcatgcccttttggtaagatcaatcacaaactcttcccatagttttttcggctgcaggtatgtgtttctaacacgaacaggcagagaaaaaagcaaagaactatggaaaaagggaagggcaaggaatggatactgaagaagaaggaacagatgagaagaagagggaatg

SEQ ID NO: 53840 - DNA, 824 bp, Cannabis sativa
tggggggagtctccggcccatacaaactttagatttttctagattgatttgctgccatgataatcttgtgtatcgttgaaggatttgtttcatggtatcacacttcgcttcccgcccatccaagaacacaaaattatcgtcaacaaaaaatagatgggacactttcactccatttcgcccaaaccgcacccatttatacttccagcccgctcagccgcatgaataagacaagagaggccttccgaataaataagaaaaaggtatggggataccgaatcaccttggagaagaccccaggtaggttgaaagttcttgatctgttccccattaataagaaccgaaaaggagacactggttacacaatgcatggtcttctcaatccatccctccacatagcccaatcccttcatcgtggttatcaagaagccccattcgacccgatcatatgccttcaacatgtctagctttaaggccgatttcttaccatttccaaacctctttgtcttcatacaatggaggctctcgaaaccgatgatagcgttatcttggattaaccgaccccccacaaaggcgctttgctcttccaaaatagcttgatggaggctattcttcatatgattttgtctaaagtaaatatgaaatgtcacaataatattttagaaaaataattttttttcttaaatagattaaatcatcaagattattattaattttatttattagtagagaatatggcaatagacattattacatttattaaatatataattttgtctaaagtaaatatgaaatttcacaataatattttagaaacataatttttt

SEQ ID NO: 53841 - DNA, 3247 bp, Cannabis sativa
aggtaaggagaaagaagtgaatcccaatttggtgggggaaggaattgaatataacaataacaagtaagaccaatgtatatgaccaaaaaggtctccaatggctggtgtaaattttgtgctaaatttggtgcgaaaaaagagtcaatcctatatttgacctgaattttacagttatgttccaatgtacttgggataaaataaactttattttaataaaaagttgtaaaaaaatcaacaaaaatattaaattttgattgaaaatatataaaaattatatagaatatataaattgtaatatcccataaatctaattatgagttattaggatttattatatatattatggattaattaggtagtaatgagtagaattatgatcttactaacttaatttgacataaattataaattttgctataagtggataaataagcgtaatttattaattgcggggaattatttaaaatatgtggatatgatgtaagttatttgtgaaataaaaatattttcagattcggcgatcctggagattcgattagaggctaaaaatattacaatagttttagttagtaatattgataggattattgggataagttgatttcagaattaccgaaagtattttgaggtactcggagttgaccaaatactctaggataaaatatttgttagtgattaaaaaatagcaagataactattataaataaatttttattaataatatttatattattattaataatataacaaaattttaaaacttattatacttaagatatatattttttaaaaacataaacatacgaacgaaactctccttctttggtgcgacaaaaccctcaccttcactatccgatttttttttaattttaatttgtaacctagtgattctaagctccggtagtaacgggatagtaaatcattgaagatgaaaagcttaagataagaattgattttgttttaagttgaaaacaattagttttatatagtggcttatggagattctaacttcatggaattgttcttgagtagctatgtgactagtttcgatgtttacttgtcgaatttgaggtaattttgagttagaaataaagtttagaactttttatagcttaagtctaaacattaatggcgttttctatttaaggacttgattttaatttctattatgttatgattcttgtatctatggtatatatgtaccctgtgaagtttgtaatgagttggatagattttaatttctatttaatttcttgtatctagtgagtgtgaaatttaggatttttgacccttgccattacgaattggtccaccgcttggtgcaaccggttaaccggtttgttgggaagcggttaaccgtttctaagaatttcaaggaaattagaaaacgtgtttttgtcataacttttcattcgggtatccattttagacgttctatataccattttgaagcctgggacaagctctacaatatggtgtatgttttagagccaaaatataagttttattttattgtatttataccgtgaggttcggtaggaaccctaggttgtcctttgcgaatattaaatagtattttaggataagcacttattgaattaccgttgttgtgacatagggccgagatcatcaaaaatgtttctccacttggattggctgacacgcatgaatctagaataaaggtaagaaaaatatattgtattgcatagcatgttatgttgcaatgcaattattattgttgagaattgattgatattaagattaagacacaattattattgttacgtaatgaaaagattgcatgttaggtaatgataaaaaggttgtcttattaggcaatgatgtaaagattgcctgatcaagcaatgtgacatgcgggctcacttgattaggtgatgcgatatatggatgtcaagctatgacgtgagcttgcctgattatgcaatatgatatatggataccgagagaggtattcaggttgtgtctatgaggcaaccgttataaagtcatgactataaactgaaactgttgttaggtttgttcctgttaacagtgcctgattagggacgggtgacagtaacatgtgagtgccacgatacgacacagactgaaaccgttattaggttcttcctatggcaatgcctgattaggcatgagcggcagtgacatgtgagtgtcaggctatagcatgggctcgtcttattaggcgatgtgatacatgggtgccaggttaaggcacgcactaacttgattaggtgatgcagttatgcaatatatgggttccaagctatgacacgagcttgcttgattaagaaatgcaatacaagattatcatatcaaagcatcgacttgcctaattacgcagtgtgatgtaataaagatggttactttatgaggtaacatatataattatattattaaatgaatatgacttctattattagtataatggttttgtattaccgaatatctatattggcatttaattatgacagagttagtaataatttagattttatcttatgagtaatgtgtgatcgtctgattctaattatcttagtataaataatgatatttgaataatgaattatatgattattgttattacttttctaatcgagttcttgtgactcacgggtgctatgtggtgcaggtaataggtagagacgtttggacaaccatgagttaggaatcttctccaccaaatatacatatcaacttattcggcaagtggtgctgagttgttaggaactgtatttcaaatattctgaacttttaaatatattttataatattattatgatggcatgtcttacaacattttaattaggagatccccaatcctaaaaaggggactatgccatgatttcatgatttaaattagttggtaaaattttaatttatatattcttcattctattttaatttatataatgatatacacgcatacacgtgcaatgcatgagtggttgcactagtatacattaggggtgtttgcagtgcgggtggtgtgttttttgactattttttcaaaccaacttaacttacatatatgaattttctaatttctcaaactacacccgcaccgcaaaactaaaaaatcatagaaatcacaccgcaaaaaatagtacggtgcggtttttgcagtttttacagtttggactatcactatttaaactattacaacaaagtttgagcaacacttgtcaataatacaataatacaataaaaaatttgaaaaaaaaac

SEQ ID NO: 53842 - DNA, 1054 bp, Cannabis sativa
aagttctgtctctgcatcttttatcaaatcataaaattcttttgccttcacatttggttcatcctcttcaccgtgaaagttatcattattttcaatttcacattcaacgtctctagtattttatccaaagacgtcatgtataacttcttgcatatcaatagtaggaggatcactaatagtgtcaatgttctgtggagaatgtgaagaagtttctccgtgtaatatccatttagtgtacttattcataaattcattgcatattagatgttcaaatgcgattgatcgagtgacaggattaataaggccacacttcacacaagggcatacaatttttccttcaagacttccatttttaaatgcaaaatcaagaaataaattaactctgttttgatatgaaacactcaatctagattgtgtcatccaactcttatccataatttatcttttgaaattttttattcacacctattaaaacccttaatgttagtttgtatatataaattttgaaaagaaaacatgaacgaaaaaataaattaattagaaaaaataaacataaaaagaaacaaaagaagacatagaaagaaacatagcaatacataaaaaactaaaataataaaataaaaattataagtagaataatattattacctctatgaagtttgtttttcacttcaagaataaagaaaatattgttgtatgtttttagaagaaagctactgatgaaaactttcgaccaaatataaatatatatagttttctaagataggatttttttttttaaaaaaaagatttgttataaatatgatttttatttattttttttatttgaaataaaaatatcttactaaattttaaattagatattatcatttattaaaaattatttatgtttatatatatacccacgtgagattttaaatttaaatatataataatattaaaaattaattatgttgaattctattttaataagtatgtatatattttaaattaaatgttatcattccactattatagttatgattttttcctgaaaaatagtattatatgttac

SEQ ID NO: 53843 - DNA, 1409 bp, Cannabis sativa
caattttaataaaattatttgagtttttaggtatttaattatgtaaaatatatttttgtaatatgataatatttaaaaatattatttacaaattgtaatttttttttgttaggccctactttttaaaattagaacaggacctctaaaatatttgagacggcactgataataatctagtttatgataaaacaaaaataaatttataaatataaatatttatccatttttatgctttaattttccattaccaattaataaagtgagaatacgttttatttgtttaattatttatcaaaaaaattcagtgaaataagtaataaaacacaacttacaaccaatgttctcatataaatttgtaaataaatataacagtagcataaagggcaaaattgaaaagataaaatattcttcaatatagttatagtaaatatataataagaataaaattgtcaattaaattatagacacttagcatatgaatttgtaaataaacataataataacataaaagtttgtaaataaacataacaatagcataaaagacaaaatagaaaagataaaatctatttatttatgtattcttcaatatagttatagtagatatacaataagggggtaaaattgtcaattaaattatataaacacttagcatatgaatttgtaaataaacataacaatagcataaaagacaaaatagaaaaaataaaatctatttatttatgcattcttcaatatagttatagtagatatataaaaagggtaaaattgtcaattaaattatagacatcaacaccacacttttataatagtaagatatagaaatagtgattggttataaatattctataaaaattattatataaaagtatataaaactcgatactaaattatactaataataatataatatattaaataatactacacaccattaatactttttagtattttacatgtataatatacatattggagaattgattgtacggactatgaactatatgcattatttttgtatcaatatatatagggatagaattttgtcccgttattgtatttttgggtatacaatccgtgattgtactgcaggcgttagattgagtttagtcattaatgaaatggttgttattaatttgtagtcattaatccgtgatattcatatttattatattggaaaccggttatgtgaaattaataaaatattaattatttggtattttttaaaaaaaaaataaaaaggtgacatgacatgacatgattgatgtctgatagactgataatatattataatttttaataacacgtcaaattatattgtacttttttttaaaaaaaatatatactgtaaatcttaatttcaactcttattcattaacttcttcaatatattttttataaatgttaaaata

SEQ ID NO: 53844 - DNA, 1749 bp, Cannabis sativa
gagctatatcatggaggagtgaccaatagcatccaccatggcagcagaatttagttgcgtgttatgaggcatccaatcacggtatatggctgaggaactttgtcaccaagctccacattgtggatggaatagaatttaatgaccgcatgttagaatatggattagtaaaggtaattatcatcaattattgatatttttataattatttatgattttattatgttgtgggtcctatcttagaaataggaattagagttataatttctcaattctaaagattttattaaactctaagagaattatttatgaaaaatatgaacaatgcaatttttatgatttttgctcggcgacgatgaaaaatgcattggatgcccgttagagtcacatgggtaagtttagaaccaatttcttagtgggacaaacatttgagatatttcgaataccggtgattggcgaagattagtaatgtatgtgattagtaaagcatgttaggaagcataatagtttataattatttatttgagtgcattgcctttaaatccataaattatggcagatagaataaatttgatcactgtctaacctgcacgatgtaagggttcgcgggctaagtcctagtgtagggacgtccaacaaaatgcaaaagtcaggatgatgaggtcaagactggacgcggtcaaggaagttaaaatcatctgagcccccgtggacgcagtagaggccgtggaaggtttcaaaggggtggttatgagaatccatcactagctcctcagaactaggaacaaagattggcaggaatgcaagcccggattaattatcaagaagaggagattcagaggatgagacaataaggtcctcctacagtgccatcaccacaggtattggctgctcaaacaatttgtttttggtagctaaataaagcctttatatgaggttttagaaggtggcacttctagcttttcttaaaagcttgaatgatacgaaagtcaaagtacaactcatagtgtttgagaggatcctaaactttatgggtatcaccgggaatgattgggtgacctgcttacgttttagttctaggaggaccatcatgtgtgctggagttggtgtccctcatccaagatgtcaatactatggcctagaaagagattcatgatctgttcaatgctaggtattataacaaggcagcgagggagtattttagtaactaactacacaaaaaagtttgatcgttaagtcaagttggttacgggtgaagtatctatgaatttcagtaaggaagggaaacacttggaaaatttaaatgccacgattaaatataatctggtaatcactacaaatgacacaatgactgatgttgagatagttgaaaggctttacgattcgagagtgcagtgaaatttctttaggttccccacgagactccatgtgttggtggaacccctactctctctacttttggatatagtagggataatggtgattccactactaattagaaaagtaagactaccccatgcggtggtttgagacagaacaaaaggttccaagggaaccaaggtagaggtggatgccagggttattcttaccctgaatgcccacattgtaggaaacatcatttcagggagtgcaatcagaaaacatgcttctagtgtggcatggttgagaattttaagaaagatttccctcagccaacgaaagaagagcagaagcaggaagcaaaacccatacttgctcaggtgtttgttatca

SEQ ID NO: 53845 - DNA, 1459 bp, Cannabis sativa
gtgacagttttgatatctttgttgagccatgggaacttatcctggaagatgaatcctgagagttcaataaatagtaatttttcttttggtcttaattgtactgcatagcaagttatattgcaatgtaattaatattattgagaatggtgaagagcagtttttgtggtagtgtaatagttgactttatggtgcatagcagtttttgtcgttaaagagtttcaattatggtcttttacttgtttagtatagtgacacatgttatacatataattaatgatgaaatcgaattttatgtttctggaaatgagaaagataaggtgctcaaataatgatatattcttctaagtgttatgcctattacctacaaagacattgtttcaattgaaatgtgtacctaaatcttggaacaacttgatatctgatcattcttttattcaatctcaattacaaaggacaaaattcactatctcagaattcatcgttattagagcaccgtatctttctcatttcctgaaaacaaaatcaaatttcatcattaattatatgtataacatgtgtcactataataacaagtaaaacaccataattgaaactctttaacaacaaaaactgttatgcaccatacagtgaaatattgccctaccacaaaaactgctatgcaccattctcaataatattaattacattgcaatataacttgctatgcagtacaattaagaccaaaaggaaaattactttatattgaactctcagaattcatcttctcaaggaaaattcccatggctcaacaaagctttcaaaattgtcacatacattcctgttgatgaagaaggctttatattcaaacagaaaatcttcaattttctccctaaggatgttgtggtattgtcatcgtgtcaaggtctcattttttgcaagagttgcttccctactcaagatataacaatctacatttgtaatccattaaacaaggaaatgactaaattgagttgggatacacttgaaaatgacagcattatatctttagcttttgatccatctcagaatcccatacacatttttacagaattgaagttagtgacaattgaggcatttgagattggagaagaagaacaaaagtgcttcacattcgaaatatactcttcaagaaccaaagaatggttgaaatcaagaaatatttgaaatcaaaagaacaaaattatgttattgttgcattgaaaaatcactcttgatttcaaccattcatttgttcttgaagagtatatttcgaatgtgaagtacttttcttcttcttctccaatctcaaatgcatcaactctcactaacttaaattctataaaaatgtgtataggattctgagatggatcaaaagctaaagatataatgttgtcatttcaaactgcatcccaactcagtttggtcatttccttgtttaatggattggaaatgtagattattt

SEQ ID NO: 53846 - DNA, 925 bp, Cannabis sativa
  modified_base (899)..(899): a, c, t, g, unknown or other
aggtttcactccatgatttgtacgctactattactttcttgcaatcatcactatcttaatacttggttaatcactctaaaactcgttttaccctcagttatgtagtctattatttaataaacaacccactttgtgatccaactttcaccaatcactcgaatgtatgtccattaaattataattcaatttataagcctttcccccaatgtgggtgagtatgcctttccatcattgttaaataaggtcatcttttcccataacatcaatagtctccttatataccagattgagcatccagtcgaatataaaagtattttccatcattaccgtgttaccatatgtaatccaggtaattttccttaccttagtgatatcactactctccttggcgttcttttataggttaccctggtaatgtccctacttcaagccttgattgggcccttatagtcacagaataagggcccttatacaagagtgcatcactttaactgcttcctagactgatgactcgccccagagaccaatccaagcgttttcaatgttcgcacgctttgttctggttcgcacgctttatggggaaacttcctaaatgaaatcaccctaggtcaaggacacttaaccgtggagttcgtttatggtgggctaccaaataaggatactttttgttaatataggcagtcccaaataattcattcaagtcctcaacactatgatgtctaatgtctacataatctcgaaatcactacatacaacatttccccatccaatgtggattgtacaactcctggtctttcctttgcatatcacgggactctaattgtcacagcttgtctcatgccctctggaagtgaatagatccacccacataatcgttgctgtaaagcccgcttagttantttggaaattagcagttatttatgtt

SEQ ID NO: 53847 - DNA, 903 bp, Cannabis sativa
aacaaaaatatataatgctatatgatgaagcatgggaggaagtggttgaggtggggctagtttacatgagaatcttggtcaaagaagaaaattatattctagattatgatgctccaaatcttagattcactgctaactggggttttgaaaatttaacaacaaaactataatcgacccactatacatatatatacatatatttatgtatatcaagacattatcttattgaattatttgtttctgctctgatgtcaacgtaactacatggaatccacaaaataagataaagaaaacttgaaaaggtaaaaagagggccctaaataatacttaaagaatcaatttcttatatattgaggaaatagtgaagtgctactttaattattgaatcaaaaagggttttgattaactataatttagtgcatacaaaatgtttgtttgttcatgagcaattaaatgattttttttcttaaactttttgttaaaaaagttgtggtcactttggtttggatatacaaatgtaattatatgtataatgaggtgaagggtttatatatatatattaaaataacttaaaggtatgtgtgtgtgggtagtggatcatggtttaattccaaagaatatgcttagaaattttcctattatttttctctcccatgatttttctttctttttattaaaaatgtttataaagtgaatatggatgaaatttttaaatactatagattaatatgacacatttatttactgttaggaattagtttttattaaacttgaaagtgtttccaatttagaacaagtcgtccggaagtactttgatatagagtcattttcctttgtggcatttcgcttccgggatcaaggtggtacgggagtgcactgggctatgtttcacaatgcctatct

SEQ ID NO: 53848 - DNA, 1105 bp, Cannabis sativa
ggatggcggttcacaaagatcttggaggccttggttttcgtcgtctacatgattttcatcttgcaatgcttgctaagcaaggatggcggctacttgtctcaccaaactctcttgttagccatctttacaaaacaaagtacctttctcgatttgattttcttgctgctgaacttggtaacaacccaagctttgtctggaggagtatatggcaagcaaaagacattgttaagcttgatgccagacgtattataggatcagggactaccacaagcattctctctcatccttggttacctgacaactccaatcagtttgtcacaacaactcacccgagtctgcataataagatggtaaaatccctcttcaaaattgatagcttttcatgggaccgtgagattgtttctgatatatttaatgtgtgagatgcatctttgatttttgggctgcctatatatgtcactgctggtgatgattgctggtcatggataggagaaagcaatgacactttctcgatgaaaagtgcttattatttgctacagaaatcaacaaacaagcaagatggtgctaataattctgggttctagcgcacactttggtagctaaaaatccctccaaaagtcaataacttcatgtggagggtagtttcgaatgcctttcccacttgtttacagcttgttaccaagcatgtagatatctctccgaattgccccatatgtaaaagccaaccagaatcgatttctcatgccatcatcagctgctctttcgctcaatcttgctagaatcatatgcaccccacggtaaatactgctgctaataccacagtaggaatgtggctatgcaatgtgttccaagcttctgatatggaaacaaagtgtcgaatcattatgctatgttgggcaatatggaaagcatgcaacaatctggtttggaataaaaaaagaacttctcctcaacaagtttcttcattagcattagttactcttgatcaatggtgcaaagcttaagataaataaaacttattgtcattggctcttggaaccaatggctctaaggttgagcaatggactaaacccggatctaatacaatcaagattaatgttaatgc

SEQ ID NO: 53849 - DNA, 924 bp, Cannabis sativa
aggcgatgtgggattgcacaagttacccagtatttccccttacggatcacgagactactgactgtcacataaaaattgacttgattaatgggagtgatcaatctaggaacatattttttgaaaaatattattcatatttttaaagttttacctgaagtattagattgactatgattcacaacaacccttaaatttaatagttattgagaatccacagttaataattgaaaatccacatgtcattgataacattctaatagatcagattctttagtagttgcttacaaattgctaaacaacatacatgttgaatcatttattctttaagagagtttgttgattcatccttaagatgacttattagaacaacaaaatcaataatttttagtgattacattatgtacaataagagttcaactacaacaatagtttgcgacacaaattaaaatgtggaatgtaaagaattaaaattgtggtacaattttccatgaataaagaaataaatatcctacagagcaatgaattctattttcagtaaagtttcctaatgggggtggagaacattacgcaaagcttttcacaaataaatactcactaggtaacatagagaaacataaagatataaaacaagactcattgcaaagaggttcatcttgaagaaggaatcaattacaaggagaattagtctcacttgtctttataaaagattttattatagtaatctttgattttgttgctcattttaattctgaaacagtgaactagaggagaaagatacatgcaaccataagattttcctttggtagtggtgaatatatgcaagcttaaagagttacctatagattaaaataaacatctcacaatttgtattttcattatgttatctcttcttttagttttgaaagaattatggattaattaaat

SEQ ID NO: 53850 - DNA, 1299 bp, Cannabis sativa
caagatttaggctgatatactaatgatcatcgttgtggtatgaataactctttcatggtaaacgacacactaatgaaagatgtttattatatatcggcccagttatacataataaaattatacacattatcttaactacatgtctatccacatatgtgatcagaataaaaatcacacacacacactagaagtatagtgtatcgtaaactgtactgagcagttccatattaaagattcctaatactttaatacactaataacttgtgttattcatgtcgtataatcttaattcccttgcacgtccttacaagattatacttcctccatatgaataaggaatttttagatatctaataattatactattataattaatgtatcatttatcttataatcgtatttcatatattcttcaatatattatccattaattacttgcttttaaggcataaatcccaacaatctctcacttacactaaaagtaagtacaacatattttgactcttatagacgttgtatctcaattattcaggctaagtcatgtgaacgagactccccatataatgtagtttcagatcccgaagaccaccacatcatcattggataaatatacaaaatttgattctagcatatttagtttattcattcttttatttccttcaagttgatgttgtttgattgatcatttgatattttcaatattaaatatcatttttttaaaactattattttaaaattgattaatctagaaccctgcatcagtcacatctaattgattttattaattactataattattaaattgaatagattacatgattaatcaaatcaatgtttggaatgaataatttcatttcacatcttttcttatttttaatcacttgtcacaattaattgattcttttatttaagattgcataattagtaagaatatttatttttcatttctcaaataataccttaaaatatatatattcttaaattaattttttttcttaatcttaaattattataagtctttacaaatgaatcacctcttgattgatctttcaaatatactatcagcatacttaatactctcactcaattagatagttccttatttatctactgtctttgatcatttaattacgactactcttaatttatgatttaaaatttattacttgtctaatctcattgtataagtatccctaaatttcaacaattaaataattattggaagaggtttcaatggttacatttttattgtaaccatcatggttacattttttaaagccattagattactattaaatg

SEQ ID NO: 53851 - DNA, 1259 bp, Cannabis sativa
atccaatgtttggcggtcggttgtcattggattggatcgatttatgcacacccctaatcagttatatgatatttatatttaaatttaaattataaatttgaattaattaaatataatcttttatttcaaaggattaaataaaaaagtttgttatataactttaatgttatgaaaaatccaacacgtaagtatacgtatcgtttataagtaataaactcacaagagtgaggtcgacccaacaaatactgtagttaattaccaaacaattgaattcctaattctatttggtgacaataaaaataaaagaatatgttatatttctactaaaaagaaaacaaagaaataaataattaaggtgaaattaacaatgattaaagcttagagtaattaatttttattgtatctactttatatagtttaatttaatttaaggaatattattatgctcatattttgagcactaaatatggacatgacaaatttcatttaagtctaaaagaatgaaggagacaataaatgcgaggaatgaatgaatgtcccgcctcgggaataagctgctatttaaaagatgtgatgacctcgtggggtactatcagtacaataatttacgagaatgacatgattacaagttaaatcctcatgactaggctgagataaacgaggcaagtgaatagcaggaaagaatgagttaagtggaaaaggtagataacgagttctttcaaatcttgcaactcattgacccacatagtcgtgagtatgttgaaagatggccatggggaggccgatcctcgggtcgctcaactcaaccaaaatgtggctgaattacaacaacagttgcgggactttctcaataagcaacatgaacaatttttaaccctagttcgtggaaaattggaggaacatcgaaagccagcgcattgagcaagaacagcaaggagctaatctgtctcaacggattagaaaacttatcactctaatcgcgaaactacttcacgtagaggtatttttgagttggtgaaagagactccccatcaacaaattggtcacatggggactaatgctcaaggcaaaacccttaatgcttagaacgccaccactacacctggtaatcgagcaagcacttagcaaacactaggcgtggagacctcccagagggaaggtaccttcgaccatgagcccgaaaggactcaagcttgaggatgccaaaatgggccctccacttaatattgaacggcctcgcaacaatgagagaaccaaca

SEQ ID NO: 53852 - DNA, 2785 bp, Cannabis sativa
tatatatattccatttgtccatatcatcattaacttataatgatccattaattaatattattaatatttaattcatcacttccttaacgtacaaagaatctaatttacacttgttccccatggatataactatgattctagcttattaattaatttctcaagtttcaaaaatgtgtatatatatatactaactaaactaattgtcttttgataattaattttcaattgtagattatatatcatgatttgttaatattgtttaggtttattgatatatataagtagtactagtactacatgcatgtacatgtataaattaactaattaatcagataattataatataacataacgtactatatattaactaaacatgatagtaatggattaataaaattattaatggatacgtatgcatgtacatacactataaaatttttacttatatatcacaataaaacttgtgagcactaaaaataaaaatattataactaattataaattatcatttttatactgtgattaaaaagtacatggatataagtattaattagtattataattaaatgtatttttaactaatcacaatacctgttatgactaaaattaaattaatgacaatttaatttaattactatattttagttataagtgataactatttgttacaactaaaactcacatttaaacacaaaaaaatttaggttgtgacatgatataaatcatctttatacgtatagaacaagttgaagtacttttggaattcaaatcaagcccactatatatcaaatattacagttaattaagtgtttaatttttttttttttttttttttgaaacggcattgtttttcgttaacgtacagttaattaacctctttttatcattgttttattttttattttttttcaaattttttctcttgtcattatcgcgtcattaattaatgtgacgaatctataatcatataaatcaacaaataaatagcaacactagttcattggaagcaggatcgatcttattcttgattatattattaacctttttatttttattttttttttaaaaaagggacctttttatcaataacatataaatatatataaaccatattatatataaatatcaaaaacaaaaaaaatatatatttatttatacatagaaatgcgattttacttatttggttattagatacaaatatatatttgagatgtaatacatgaaatatattaggaatctttagctacaaacaaggctaattgtatttgtcggactgtctacttgcaatatatatagatataaatataagatcatgttgatatatatatatatatatataaacatatatatagatacattaaaatacatgtacagaagtatatttaactatatgccttaaaaagaaaaaaaatatggacaaaataacttaactagcttgacctttacaattcgttgcacgaggtcaattttatttatattaattaattaatcaattagttaattaagagcttttatatataccaaattggacttataattgcagaagcagtaacatcagttttagagtaaggtttccagcaacacaatatatatatatatgaaaaatattatataacaaataatgttactttcgcgatgctttaaacatacatttattatattgatgaatttaattagtcaaatcaataatatattacttataatttaaaaattaattagcagaaaaaaatgtgagtccgtcatcgatctttaaacgattttagcttctaaggttgttggtgagatcgatcagtttattagtttcatatatttatgatattttatatatatagaagagatctgttaattaattattaattatatatatagtatatcaaccatattcatgaacctcaatcaattattattaatatatattacaaaacattaattaattaattaattctgatgttctcattaattaaatcatgtatatatttatatgtatacagtagacatatcaattgactgtctgcttcttgttgttatatataaaaatacatgcgttagaaaactgaaactgataatattaaaattaaattgatgatcctttttttttaaataataataatgtgatgtgaccctacatgaaaaccaaattataatttatgtacgtacaagaaattaacactatactgaacctatatatatatataattagttttgaaatgaaatcataatcttataaatattcttaattagcattatatttcttgcgtaataattttaattatttaatagtacgtataaatccaaaaatatatatgatataatgttcccaaataatgaaaacaacaatcatgatgtcttatacatcaaatgaccaaaacaaaagaacatataaattaattattgatcaggatgagttacattgaatttatatatatgcattatttgacaattaatatagtagcatttgaaatgtcctctcgatcattttgtgaaaaatttctatgtaataaaataaaccacactaattaattaatatttaagatcgactttgagcatgtatatatgtgcgttaaaacataggggaaaaataagcaaaaataaatttacatattatatatatattccttttgtagactaatattgttccatataatcataccactatataataataatatacatatatatatatatatatatacttgtcacatggaatatgtctaacatacatatatgtaataagtaccagacagtacttgggtgctaccttttttttttctattattattattat

SEQ ID NO: 53853 - DNA, 2149 bp, Cannabis sativa
tgctttactaggtacattgttttattgaattcttataatatgtgagcttgaaatttgttgttaatacaagtttcttttttaaatcttgctaggatgatttttatcattttgtatatgatactatacactgattttacttgatactatatgctcaaattacatgtttcaatcattacaagttccagttgaacaattcaataaagtgtctttctttttccgatagagatttgttctctatcaacgaaagaaatctgtcaatctgacaactcaaagtgcaaatcaatttccaaacttgtgagaggcttggttcccaatagagctaggccactaattaatagccttagagttacccctattcctagaacaagtattatcttatcttttgttttttcctctccattttctttagaacaagtcactggaacactttttgcatcatctttttgctaatactttaacttaacaagcacttgaccactgtattaatgttgatgtattggatttcactgctagactcacatatccatttgtggattaattgctaagtgtttttttttgttccttctttagcggctatccaccatccaaacccgatcttcaacacatggagagaaaatgtggaggaattcctttgaagttttgtcatgtggagcaaggacgagtgagtttcatttcctttgacaaagtggagcttcctatcctaccatgacatgcagttctatgctggtgtgaaacacatttgaagaccttcaactaatctgagcacaatttgatttctagtttcttcagcataactacaagggtgtactcctcacaggattgattggtaagtcatgcccctgtttggttagaatggatgaaaggaaaagcaatggtattggaatttctgcacgtaattttcatatcagtcaaagcgggtcatgaatatataatcacccatatttggtggactcttcatcagaatttctcaatccccatttaggaaaggatttaaaaatggaccaattatattggcttgacaagaagcacaaatcattttgttgagatttcttctcaaaaatttcccatatttaagatgcatgatgcattgtccacctttataattgtttatgggcagtgattatggtatattaggtctgttcgatttgaggaatagaatggtttatttatggaactccaccataaggtgctaaaacactgccctcttctcctcattctgtacttggtacttgggcttgggtatgaccctttcaccactgatttcaaagtggtaaaggtttcatgtcgagacaggaatggtgttgttggcaatcttaatttgtttaaagagggtaaccaagttgggatttatagtttgagaagcaattcttggaaaacaatggcaatgcctgacatattttcagatttgaatcatatactgttcttacataactatttatatgtctctgggttgctccattgttgttaatgaggatattcattgaaagatttgttatggaaatacaactgattatcacgaatcatctttggggatagtttcctgtgatataagtatagagaaatttaagctatataagtcaccagctcaaattgtaaaaggatctcatgttaggaagctagctaacttttctgggtgtctttctttttcactatggatgaatttaaaatagttgaggtttgggtgatgaagaaatatggtgacccgaaatcttggttcaaatacttgtctgttagtttaattgatattttaccaaatttggtttgtccatattctagttcctttcgggtaagttttttcagcaatggcattcttgtaatttcctgcattgaagctggtattgatatgatacttaagagtaaggggcatgaaaatatgtgtccaaggcttggtgcctcagacttgactacatatgttgagagtatttttcaagataaaaagggtgataattgttcttttgtatcatgcttctctcctttgaaggtgattttcaactgtacaagaggtgagatttttccaaaatgtaaagacagcagtgttcactaagtgcgcttgagattttaccaaaaccaaatttatgatgctgcctacaaattctggaatgaagctgtaagtagtgtagtatagatgacactttgttggttgctaatg

SEQ ID NO: 53854 - DNA, 845 bp, Cannabis sativa
tggaggtgctgcttacggaacctctcatacaatggtttaattcggtttactacagcaaccaatcctgcctgcatagcaagggaaggagccacctacatttatggagcaagcattgcaagagcaccctgctgcttgaggcgtctaattttttcctctagctcgttgattctggcttacattgcagcaaacctattttctcattcttgtgcagcctgcggtgggttaacatcacctcaaccgcatgccctggctctagtgcctctacctgggccacaaacatttgggagaaattgaactccctaactgccactagacccgaccgagttaccctgactcctggtgttttgcctggcatccatactattagaacagcctgcgtaacaaagagctaacctagtcaggtcgcgatcaagaataacttactaattaccgcttattttggaaatttaaaacatgtgcctattcaactatcaggctactaacaagcttcctaacaagcttttcttaaaacatactataaatgtaaactactaacgcaattaaggcttactaaaccatgagtcgagctgatcagtgatgatgattgtacatgtcgtgacaatcttcgaaagacaacctggcagctttgataccaaattttctcaccctactagtttaggcgtgttaacgtgatttttaacttaattgtgcagctcgttgctaaatcaacgagtttattaaaaatcgtgataaattaaaactatattttactaattatatttaccaaaatatcatacttgaattaaactgggatcccagttacaaaaatatttataaaagttttacagtgaatattacaaaagttt

SEQ ID NO: 53855 - DNA, 1278 bp, Cannabis sativa
  modified_base (1238)..(1245): a, c, t, g, unknown or other
aaaaaaaatcaatatattaaaaactatatataattttttaaatttcttaattaaaacagaataaaataattatgaaaattattctaatttgtgttgatataaaattaattaaaattaatttccatcaaaaataaaaattttcttttaattaaatgtcaaaaatatctaaaatttaagtatctttaatttaaaggaaaaattcaacgtaaatattaattttctattgaattaaatacttagataaatacaaactagtttacttagaaatcaattatctagaattatttcttaagctaagtgtatatttcccgaattaatccaaaaataatctattacaagactaatttcaaatatttttagaattagttttggtttccaataagttttattagattaaactaatataattacccttatacagttatttaaataagacaattgggcattcataattggagttgttcatgtgagggagggttgggttcagtatgttgtatccactactattcccacataactctcacacaaggcccaaaagagaagaatttaacctttatttaaatttcttttattcattgaataggcctaattctaattaggcctagataaatctatcaatgtgatcaaatttcattagcaaccctagtccatttaaatatccaaaattaaatgggctcatatatgcatttaagcccataagcaaaacataggcttacatatatcacatatttggatagacctatcatgtttctaagttatgtcccagatgagagaaaaattataaatttacctattcaaaattatttaattaatttatcaacaagtgactttgcttaatttagatcaaaatatctattaaaaagttaatcaagtcatttaaatctactatcccaaattttgtccttctgacgaggcatgcttacgtggacaaaattggtgccacgtggcagtacaactcaccaataagaaggccaagtcaacatctaagaaaacgaagaccccgacacttaaacgggcatcaagtgacaaaccagctccctcacaggagctggccggcaacccttggcttgccctatggccggccaaccttgggactgcaccatggccggccagcctaccctccatagggaccttggtcggctaagaagtgtcctgcagggtctcatgtgcacttctacacattgacattaactcttggactacgaatttggccctaaaagtgttggaatttattttannnnnnnnttagatctactcataagtatgttatttaacacc

SEQ ID NO: 53856 - DNA, 1213 bp, Cannabis sativa
  modified_base (699)..(701): a, c, t, g, unknown or other
tatattaattaataattaaggttgctttcaagccaataacaaactgcccaaaccgatgggacttgtgtgtgtatattattattttttccctataattatttatacaaaattaattaagtcaatgaaagcttacttttctttttatttatgtttattaaatgggtatcattagtggtcacttatgttgggtaatgaaaatgacttcttcattatttcataggagacttaataagggttttattaacatgattacatattatagtaatttgcgatctaaatatttgttgttaatttttagttataaataaataataaatttaacttttggcgataataataattaaattatatttttaaaatatcatttacatattaagttattaataactacatgttattttttattagtatatttaaataaattttaaataaaaaataaaaatttaacgacctgaagtggactatcatgtggtcattgaaagtttcaaaaatataacttagatattattactgcgaaaaattaaacttaagtatttatttattattgaaaattaaatttaagtatttacactacaaatcactcatatatataagttatatattttgtttcctattttgtaaaattcggaatgcattaatgttttgttacataaactatttttttttttttgaataaaaagtttcattaaaatcaggccnnngcctgaacaatgtcacacaagaaaaaaggagcattcagctcattaaagcatattatatatatagctgaacatatttcatacccaaacaaaacaaaattgtttctattatatatataatgtatataaatatatacatatacatatatatgcgcttatacatattatatacttacattaatattaactttttttttgagaaaatattaatattaactttataaagcatcattataaaaaattacaatctttagtcacaactttttagtcacaacataatatttttgtaactaaatgtgatttttaatcacaacaaaatattacttgcgactaaaatttagtatttaggtacaagttgtcactaatttagttttaatcacaacaagtatcgtgactaaaaatatatttagtcacaataaattataattagtcataactattttacttttattcacaaattttattgtggctgaaagtaaaatttattgtagtgcatatatatttatatatatata

SEQ ID NO: 53857 - DNA, 826 bp, Cannabis sativa
cgtatagtgagaaagtgctgttttcttcttcttcttttaagtgggttcagattttgttgattatcatgaacaaagttatgaattttgacatttttaattgactgaaaatttacgatttttaaatcgtataagcaaagggggttttgatatgatgggtatttctgatttgtgggatcaatttggatttgtttaggggagctgttaagttggaacttcgttgccccaaaagtgttgagggaattgcagccgaccctgaaccagattggagttttgatgatcttttaacagaacttaatgcattggatacaaaacttagttgctattccaaaattccaatgccattcactaaagtgcaatcacggtaagtatgtctgtttgtgatttagataactgcttggtgcaaatgtgtttttttactaagctttcagctataaattgtgtatgtatagtcaactttcaaattggaagagtgtagagagaagttctaggccatttgtaatgcgtgtccttgacgatgaggtggatgacattgaccccaagatcaaagctctctttctgctaatcggtttaattttaacgacctttatgttaggtatacatttttaactggccttgattgcttttctttttatacttttccatgtttgtatcaatcgaagtcttctgtcttgcatccctgtcctgtcatctgaaagctttatttaactgttatgccatatcacattgtttgttggagatttcactagttcctattagtactttgtattttcttgtttatttcttagtgatgatgatgactctaagaatgagtcagctcttgaaattc

SEQ ID NO: 53858 - DNA, 1166 bp, Cannabis sativa
aaaatgttcaaaaattctaaaattttttaataaactatatttaaaaaataattaaaaaataattattaaaataaaataaaatatgttgaaaattattctaatttaagttgatctgaaattaataaatttccaacttaaatataactttctatttaattaaatgtattaaaataggattatataattaagtatattgaaataaattaacttaattattaattctagattaataaaatattctaatttaagttcatctaaagttaattaagaattaatttttaacttaaatatattttttctatttaattaaatacttgaaaaataaaaattaatttactagaaataacatatataatttatttcattaaacgaagtgtgtttctctaaattaatattaaaataatctaatgaaaaattaatttcatttattttaaaaattaattatgttgctaatcaattttaaattttgttaaactaaaataattagtcttatataattatttatataaggtaaatgggccttcacaaatggggtggttaatgtgaggaagaattaggttcaatatgttgtacccattactagtatggccccctaactctcacacaaggtccaaaaaagaggaatgtaacctttgagtaaataatttactagttaaataagcctaatactaactgagccttaatgaaactatcaaagtgatcattttatttttagcaacctaatcaaattatatatccaaaaataaatggtttcctacatgtatctaagcacaataacaaacatataggctcacatcagcattgatctggatgtgccctaccatattactaggtttaagacaaatgaaagaaaattataaaattacatgcaataactatttatttgatttattgataattaactatggttgatttggatcattggatccattaataagttaatcatagtcatttcaattaaataaataataggtctgctttaaaaaaataaaatttaaataaacaaacagacgaacttgcaaaaaataagaaaaaatggttaaaggattttattcaatttatatttaataaaaatataaaataatacaccctcctttcaaaaatttagggttgtcacaaccctaatatctattgaaaaaaaattaaataactatcaaaatttatgt

SEQ ID NO: 53859 - DNA, 1256 bp, Cannabis sativa
atttggggtgaaccttgtaaaactctctgtgtttgttatctctctcaccctaatctttgcacttgtgtattgcttcattttctgcataattttcttcatggatctgctgaaaatcagagttgattctctctgattttctctcaagttttttgctaaacttttgccctaagtttttctctgtgtttctcgaaggctgttcagacacaaagaacaaattagtaaagtaaaggaaacaataaaataacatataaaatcttatacgtgtcaattgtgtgtggatccaaaattcagaacaagaaaggtcaaaattgaccttgtgaaataacctgtgtgtgtgtgtgagttgtgtaggatatatctgtaatttcctacaactaacttgtatttatactagattaatattacaagcaatgatggtaacattacacattacaatcaaatccttatatgtcataaatccttaacactaattaatctacaaatagaactaacacgatgtgggaaggatgtaaggacattggtttaaaaagtttgaaattaattcgtgttaggtattgggcaatacatcaccgtttcattttttaatcgcttactaattttcttatatagtgtgggaagcacctaaagtataattacctactaaataagaaccacgttgacacattgttagtatttgtaatgaaattggataaagtgtgtcagttttattttaaaataaattagcaatgaaaggtagttgattcatgttatatatagtattttatttccacatattatcaatgtaggactaactctaatacacccttctcacatttggacttgagtgtaagcaaaataaaaaagctttaagagacataccacagggttggagacatcgaatatttttaatttaactctcataccatgttaaaattacaagatatgatgtataaggttccatctcaaaattataccacacctaaaaactgactactgctcgaaatataaatatgtaatataatcttatgcatatatcgtatatgtttttcataatgaaaaaaagatgtatttctcccgttggtttaaatgcattatataggcaatgcactgaaggtagtaacgggaagaaagacgttacttgaagggaacttagaatattggatcgtaagaatgatgctaaaaatcagacttctgtttaccaattaattaaacacatttttaaaagaaactattttaattaattaaataaataaataataatttaataaataattttt

SEQ ID NO: 53860 - DNA, 994 bp, Cannabis sativa
atgcaacacaaagttgcaaatcttttaaagtgcctgaatgtgggagttgcttaagtaacctgctaaggacagccgagttgggatgacccaacttttgatgccaagtattaacatcttgactgatagtagacataaagacattagaatggccaatataattggaataagaaggagaatctttattaatgtctaaatgagaattacaatggtgcactgtattaacagtgaacttattacaattcgaaatggcattaacaggacaacttgactcatctaagtgggaagtggtggtgagattgcattgcagagtatacggggaattcttggatgctcctagcacatacaatccatctctaactggtccttttgagaagaattgccccagttgacttgtccttgacaaaacaacaactcttgtgaaattcaagaaagatatcattatcattagtgagttcagagacactaactaaattctttttcttttgagggactttaaggacagaatttagatgaaggacattagagtgataagatggtaaggatgtagagccaacatgagaaattagaagcttcttaccatcacctatagcaatagcttcagtcccattgtaagtcgtggtggagtcaagaggttcagacccagttgacacatgagccgtggcccctgtatcagcaaaccaaatatggtcatcaccaaaatcaggtaaaagagcagaggaatatacctgagggtcattatccatgtccacttcagtaacataggctcgaggattggcagctcctggtttagggggaacccaatttttatcaaaacggtagtggcaaaccggtgcagagtggccatacttcaaacaaatttgacatatcagtcgagcttgaggtggtatgtatggacaggtattccctttagctagaaatcttgaggagaactcagagttgtttcctcgaacagttggcgggttacactgattgttattgtttcttgaagaaccaa

SEQ ID NO: 53861 - DNA, 1003 bp, Cannabis sativa
tgatggtatgaccccaggtttctttcaacgttgttggagcattgtaggtttggacattatcagtcttgttaggagtttcatgagaacatgagaccttccacaaggtctaaatgatactaacatggttcttatcccgaaagtcaagaatccatcctcaatgactgatcttagaccaatctctctctgtaatatgttatacaagataatctctaaagtgcttgccaatcgtcttaaagaagtcctaccacaactgatctcaacaaaccaaagtacttttgttcatggaaggttgattactgataatattatgatttcttatgaggtgatgcattatctaaagagaaagagccgtggtaaagaaggttttatgacacttagtctcgactttagcgaagcctacgatcgtgtggagtggcaatttttaaaggatatgatgtgcaaaatgagttttagtcatcactggataaatctgattttgagttgtgtctcctctgtccgctataaagttcttaatagtggaagagaaatgggacctataattcccacaagaggtattcgccaaggtgatccactttcttcttacctatttctaatttgtgctgagggtttctcagctttgatcaaacagtttgaaagtattggacacctcagaggttgtaaggttgctaatggtgctcccattatctcgcatatgttgtttgtcgacgatagttacgtatactgccgagctaatgagagagaagcctctaatgtgatctgattgctcaagatctttgaataagcttcaagttagattgtgaactttaataaatcctcaatattctacagcaacaacactgaccataatactagagatcacatatgtcaattgatgcaaatgcaagaagctgatggaacaagtttgtacttggggcttccatccctagtggggagaaacaagaaggcaatcttgggatttataaaggacaagctgcagaagagggtactgttgggttttatgccc

SEQ ID NO: 53862 - DNA, 1004 bp, Cannabis sativa
  modified_base (645)..(647): a, c, t, g, unknown or other
taattcgtaaagtaaattatgattctatatatatatattcacctttctctttgtcctcctcttccatcctcttcttttcaaaataaattgatactcaggtaagaccactctcaccatttctacattatattttaaaattgatcactaaaatttactgacattattttacattaattttttatggtgcattaacttctttattttttttttctatattatttaaataatatattttttaatatatataatatacataacaaaataaaataaaatactatttatattattaaaatattttaaaaagaaaaatagtatttcattacatgtaaaagaagttgcattatttgcttattttttacaattctctactctaaaatgaaaagaaaaaaaaaaaaaaattgtacatcatgtaagtgctttaagtttagtttgattaagtatcacttaaaataagttataagttaattagacactaactacaaaaaaatttttaatttttatttttagtcacaacaaaacttatgattatagtattgttaacatagtagcaaataatcataattatatgtttcaaaagtttaagtctcgtgagttgtcaatacactagatttagactaacatgataatcaacgataaggtatactnnnaccttggataagtgttatgtcattttcagggcattggcaaagtatgtcagtatcgaatgtatggatcgtatacatcggattggaccgatattgaacttggataagatatcataaacttagcgttatatctttctaagtcaatatcactggttgatcttagatctatagatcttaatcctgaaatggttagattcgatcttaattgtattatttatggtcttagagttgttcattataagctcagttagctgaacacttacatcttaggaacatgatagtttaattgagtgagagcgctaatcatagatatagagaatctatagcttctataagtatttagaagtcaaacaatgattt

SEQ ID NO: 53863 - DNA, 1214 bp, Cannabis sativa
catgtagaaggtgatcaatcttaaacatgaaattacacacaaatatagataatttcataaacaagattaaaggaatggcaattatcattaactaagcaaaaactttaatcaacattcatcttcttcccccattgggaatttagttcataaaaatcatattaacatccataattaaatctagaacagaaattaacataaggaaattcaagagttaagaaagaactagttggtgatttcgctccggatcatcacaatagcttcctctcctccttcattcacttttcggggttgaattctgataatattagtcataaaatttgagtctcttatataggaattcggcttgctacctctaaatggcgaaaattcaaaacttgtcaaaaatcccgtgtttccctcctggtcgcgactacataatgccctagtcgcgactataggcaaattagaaaaaacacccattcttccaaaacctcctagtcgcgactatggtctggagtggttgcgactactggagccaaattggtagcttcagcagatttttctccagaatgtcccgtcttttcaccaattgataaaattcgaactgtaatgcatcgggaacctgaaataaggaaaaccaagcgtaaatccattccaaaaggcaacattaactgagaaaatgcttatgaaattgacccgaaacttaggctaaaaatagcctagaaaaattccctcaaacttgatccttactcgcccttgagtaagaccaagactactactaactatgctaactaataattataatgttgttggctcatgttccatttccttccattgattaaactagattttcaactctaaaaactctaacaattaattgggatgctcatcttatcacacaatgcacaaacacaaattgacttcctaattgaaacaatattataatggttcactttatccgatcattccacaaactaatagccaatatgcttgcatgcttacctctctccactaatgttgacaacattcttttcggaatcaataggagttgctaggtaagaatttagggcttagatattcgaaaaatgaaaggcgtttttggctaaagatatcataagcacgtttaacacccaaaagcttctcacaattttaagatttttcccgaagtgttcccacaactaaccatgattgaggaaattttttttttcactagttacaattactcacatataaca

SEQ ID NO: 53864 - DNA, 513 bp, Cannabis sativa
atattagactttccttattaaaattggacaaaaaatttttaaatctaacaatctcaataattcaagaaaatttttaacaactttaaaaatttagtaaatataattttgtacatgtaaaaattcggaaacaaatttcaattaccctatataatacatacacatatttatacaacttagtacatatatatgatgaaattttacatgctatatataaccaagagacagttctattgatcatatagatgtatatatattataataatatctaaatgtccttaacagttctcaaaagacacacacattggttaattatcattttctaatttctaccaagttgaaaatattgtgagttgaaattttcagatttcagctgcaattgacttgaaggtttcatcagtcatcactttaattatttgctcatgcatgcaataatacccaatttaatattgtaacttgtaactatattatatataattatatataaatatagtgaacatattcggaatctatttt

SEQ ID NO: 53865 - DNA, 709 bp, Cannabis sativa
gaaaaggaaactactaactgactaaacaaacaaaaccataaacctacaacaaatagagaatttaggtcagcctatctctgatggcacagagggtaaggcgccattctcactagacaagtcaatccatccaaagcagttgttttgatttgcccatttagccaccgaatgggccacaccattgcagctcctcgggatccaggagacttcccacagagtaaaatgagccattgaagtgataaaactcgccacctgatcctgaatgttatgacaaagagttccaatttcctgcaatttagtatttagagcagagatcgcgttcgaggaatcactctgaaaaatcatcttcttgtacccttgctttaacgcttccttggttcccttacacagcaccatgatctctccgataaggggctcactcacagccaaccggaaggtaaagcaattgatgaaactcccagcttcatttctgaaaaccgcagcccccgcagcctccgcagcctagtatttcccaatagatacatccgtattacacatcacccatccgggagggcgggtgagccattcaaagatgccaacttgttgtgttcgcgcatcctccgtgatttctataaatcttgtattgatgtgttggaggatggtgtgaagaggggtaggcattcctccatgagacaagttgtttctttcacgccatatgctttcaaagattatg

SEQ ID NO: 53866 - DNA, 609 bp, Cannabis sativa
tttgcattgaacataaaatctcatgtaaacaacacacataataatattacttgaaagaaaaattgtggccaacaatagaatctttacttgctagttgccacataaaaaatcatgtattttgtcttgtatcataagtatccaaattaacaatatagacagaaagtaacgacaagaagctccacattcaaagttttgataaaaaaaaatctgcaaaaatattactttttttttttccttttacacaataatagagacaaatgacctacattgataggtaagaaaaagacagctactgaattaatatgtttgtccgaaagagtttattaaatttataaccccttacatataggcgatgaactataatagcgatctcatgatattggttcttcaaacaagcacaaataaaaatactgaaatatctaatttgtttacgagcatccatataaataaatctatcagtattagaaatcaaatcatcaaaagtcccagatcatcacatatcatcaagatcagttcaatcagtcaagaataaaaagtaaataaatcaaagaaatacacaaaagggtatcactaattttttgatgacttttctgggtcttcttcaattta

SEQ ID NO: 53867 - DNA, 672 bp, Cannabis sativa
gtttgggaaaccttgatatatttttatcactctttttgtgtgagattgttgttttaagaattttattgttgtccttttttcggttcattgtcaaattgacacgtgtccccttacaggccattcttcttgctaatagttttgctacgtaccacttttagacctatcacccttgaacgccataaggtccctcacttctttcactgtgggtttgatatattttgtactgtatattatacttattattatacttagcggagctaactttgaggaatcttcatggatctcacatagtaatgagtcgggaacatggattcctcaattcaggcaccaacttttttcttcatctttatttttgcatgtcccctttagtatcattaaattatcaattccttcattaaaccaccatcataggccattggtgtggtttaaattttactagaaatcttgaattcatgttcttttcttgtctaacattatgtttggtaggaaggggagatgggtggatgctgagtggtagagggagagtgatggaaggagacactaaatcaattgtttggcaggaggaagaggatagatggagagagacaatctccctctaaacctttaaaatttaatccatctaaatttggaaggattgtaaaaaaagacaaaatatattttgcaaaatataat

SEQ ID NO: 53868 - DNA, 722 bp, Cannabis sativa
cagcctttggaaaagcctttacgatttgggaattcttgtttgggattcttgttatggggagagaagtttgtagataatatatccagtaatcaattttctaatagagatattggttatgacatcagtgaaacaattagttaaaactttgtggttttaaaagtttaatgcagaatttatcattgacaagatcataattatttgcattatcattttctgggtatctctcgttcttgaatatgttagtgcatgaagttctttcaaataagggaaaaaaatcatctgtcatcaacggtctctattctgtcccaccaattaattacagtcacctcattaatttaatttaattatttaataaaaaattatgttaattttaacagttaaactaacagaattggtattctctctccatattaatggctaacttttctcttttcaaaaatatcaaaagtcttttattaattaacctccaacgttataaaaattcaagtatatatataaacttacattttataatattaatttattaaatatctttcataatcaaatatctttttttagtttcttctccaaaacattcattcattttcttatgggattttggggagaaaataaaaaaagtaagtataatatgctatagatatcatagattgtattgatatttattaatttctactaataaaataaaatattctatcaaaatatttattttttttattgttttt

SEQ ID NO: 53869 - DNA, 962 bp, Cannabis sativa
acagtataataaattatttaaatgactataaataatttcataaataatcataattaactgctaatttccaaattaaactaagcgggctttccattgagccagacaattttcaatcgtcttatgtggctccgcgatagcaaaaaactcgaccagtgattcaggtcttcgagcttgcagttccttccagaaatcggttcttagcaggacacctattatcaacatacacactagcaaagactcgggagccttctctagttttgttacctcggcattaaaacgtttaaagtagtcttgtaaagactcacccagttcttgcttgatattagccagagtgttatagggtggcctataggtcatcgtggcttgaaaatacgtgaggaaaaagttgacaaaggtctcccatgttgagatagatgccttgggcaattggctaaaccaatcgtgggcatagtcctccagagtcgccgcaagaatgcgacacttcgcaagttgggtacctgatccacttcaataatagtattaaatttttctaagtaatctataggattagtggtacctttatattttagagactcggataaccggaatcccttgggtaaccgagcttgttgcacttctgcggtgaaaggagaagtcccatgcagcttgtatatgggctttctctgctgctcgaacatctttaaagcctgtaggagcataccttgatttatacctccggttaaggcagtattttcctgtgtcatcgcaggtgtcgttatcaccgcaccgatatttgttgggatattggatctagttgtcgcaactggtgaggtatgcgggttggtatgattgttaacaccttgatcgcccacctgggaatcacgaggctcttcactgttccgaggcttctcagagcgtgccctgaaaatagtgttaagatgatcgcaaagatcacacatatgcacctggtaccgccctccttg

SEQ ID NO: 53870 - DNA, 568 bp, Cannabis sativa
ttagtttcaaggcttagttgaagttgttgttagggttttatttggaatttttacattatatattgatttttttttttttattgtgggagggaattattttcaaaaatactttgtattttttgtattgtgtattatattaaattttcactgttgttttaattgtcctgttttattgttttacggttgttttataaaaaaatagtatttttgttaagattttcatgtggttataaagttgtaaatttttgtctaaaatctagtatttttataaaagtccctttttattctgcaccatcgagttgttctcgagtggtatatgtttctttttttcattttcattgtaataatgtattttttgtggtgttggctttaggtcgtttattgttgtctatttagtttggtcatctttttatgtgttttttgcaacttgcttccatctcacctgttggactttgcaccttgaaactaagagtaacaacttgtgtttacgagttattttcgtatcatgtcaagacttaaatattacaagcaaataataaattcaaattcagtataaactagttgacat

SEQ ID NO: 53871 - DNA, 1760 bp, Cannabis sativa
tggtctgggttgcgagtgtcaagatccggtgagggcttaggactaggtcaggtccaggtcccggtcccggtcctagtccaggttcaagtgttaggtctcaggtcctagtcctagtcaaggtctcggtccaggttttggtatgagtttgagttatggtctgggtttggttatcgtcttagatttgggtcctagtcataatttccagtttttattgtgggtctgagtttggttccgagtccgggtctatgtccaagtttatgtcagggtctgagtcttagttcgagtccgagtacgggtttttcgaatctcggtctgggtctagatctgagtcaaggtcaaggttcgggtcttggttctgggtcccatgttcgtgtctgggtctgcgtctacgtctgggcctaggtcccgtgtttcaatcgcggtctaggtctgcgtcggtatttgggttcgggtatgggttcgtgtccattttaaggtccgaattccaatttaggtcaagggcttcgtctgggtctcggatcctgtcccgagttcgtgttcaggttctggttcgagcctcagttctagtctcggtccaggactgggtctgaacccgagttctgcgctaggttcggtctagttctgagtccgggtaaaggtccaggtcatggtcccggtcctgttacatggtcctgatcacgttctttttcaagttttggttttgggtcccaggtttgggcctgggtctatgtccttttccagcttcgggtccttgttcgagtccctaatcaacacatcgactatgggtcatgtccaagccccggttctctaatcattggacaagatctgcatcccaatcacgggtaatagtcttgtttcaattcatgtcctaggtcagggtttaggtttttgtcttggtccaggaccgagactgggatccagttctgggtcctgagtcatgttcaatgttctggtctgaattcaggtcttggttcgggtcccgagtcccggttcgggtttggatttagattttggaccgaatcccagggtgggtctttgaccgagtctcggtcttggtccggttacagtttttggtctaggttaatgtccttgtcatgtcttattcttgggtcgtggtccgcttctagtttcgattccagtttcaagtcacgggatacgggtttgggtcgagtttggatccgagtctgggtttgggtcatgatttgggtctgaggcaaggttcaggtccgggtttcagtctcaggtagggttcgaggctgggtctgggtccaggtcccagtcccattcaaagatcttggtcccgttctaattcatgtttcggttttggttcacgagtgtgggtcttggtctgggaatgtgtcagggtcttagtttgagttcgagtttgggtttaggttctagtctatgtccttgatcataacagcgagtactggtagggtccaagcatcgagtcccggatcccaggtctcgatgtgggtcctatgtctaggtttgggtcttgggtcgggtcctcgatcctcatccatgttctgagaccaagttctggtcctagtttaggggcccaattcccaggtctgggtcccccatctaagtttaggtcctgggtcctggtccgggtccaagtttgtgttcaggttcgggctcgggatcaggtcgaacttgaacttcagaaccgatcccaaacccagactcggacccatacctagaccgggatcaaaacttgggaccttgatctggactgagacctagacaaaaatctg

SEQ ID NO: 53872 - DNA, 840 bp, Cannabis sativa
actcgaaaatccatctctctacaggagtgttatcggtgctctgcaatatctaagtcacactcgacctgacatttcatttgatgtcaacaagttaagtcaattcctcaagagtccaacttcagttcattggggggctgctaaaagagtgctgagataccttaagggcactatacatcatggcgttcatattgcaccgagtgacaacctaagccttcaaggtttctctgatacggattgggcctgctgccctgatgatcgaagatcagtggtagggtattgtgtgttccttggtgaatcactaatctcgtggtcgtcaaagaagcaaacggttgtctcacgcttcagcaccgagtcggagtacagatcgctagcacaccttgctgctgaactgacatggctgcaggaacttttgaaagagatgaagtatgaaatgccaacgacaccaataatttggtgtgataacatgagtgctagcgctttggcctctaatcctgtatatcatgcgcgtaccaaacacattgaactcgatgtacatttcgtaagagacaaagtgttgcagaagaagcttgaaattcgttacatcccgtcgcacgatcagatcgctgactgcttaacaaagagtctaacaccaagccgctttcaattcctagttaacaagctcagcctgacagagtcaccacttcgcttgaggggtggagttaaaggaatcgagtaataacagagaggggcatttcagactttcctcttggtcctgaattataggaatgctgatgtaatagaattaactctgattttgcgaatctttaccgttagcataggaatatataatattccttttct

SEQ ID NO: 53873 - DNA, 1356 bp, Cannabis sativa
tatatataaatatatatgtattattagctaattaacctaccttcgagtttcatgatatgaagaattgttaccactgaactgaaccctatacatattaatcaacttttattgcattggtaacattcactacaagaaatgttatttttgctagcacatttttgtgctggcaaaagttagtattgcgctggtaaaataaaatttacttgtgatgtgttggcaaaagagggttggcaaatcaatgttggtattagaacttttgccaacataaaatgaaaagcgctggcaaaaataatttttcttagcgcgtaaatccgctagtaaagttagattttagccactgcaaatgtacgctggtaaaactttgacttttttaccagtacagtttatgaaatgcgctggtaaaagttattcttaccaacacagtagcgaactgtgctggtaaaagtgacatttcttgtagagattataaaaaaaactttaatttcatctttttggaatgaagataatatatatatagtacgtatatatatatatatagtgtgttcatctgatatatatatatatatatatatataaacaaaaatagacgtttatttatatatatcacacattattatatcatataatataatgagaaaaatgttaaagaagagttatggtatctagtactttttatgaggtatatcttgttactattatagtgtaatttaataatatagagtctcatttattttaatttaactaatcataaaatatcataaaagtgctaataagtagtttaatacccgtaacaaactctaatataattaataatgttcaattataatgaaacttaatcattagtactaattatatattagatcataatgtcattaattataagagtttttttttgttggtacataaatacatataacatacgtagaatgtagagaacacgttgattgttttgtttgttggaagttattaagtatattaatatgagttatgagtaaattgtgtcaaaactttcaatagttttactttgtttgtaattaactcccatattctaaatttttacgacaaaattctaaaaactatgatatcattatgatatcattagtaatttacaatttttatccaaatttaattattaattgtcatgttgaattgtatacagtgcatgtgacataattttattgatccacataaataattatattagcaaaattaaaataaaaaaaattaaaaaatatatttttttttaccatatatcatatttttttgaaaaaaatattttttttttcattcttcttcttcagtctaaatactatcaccaccactattcacagtcaccgtaaacaccaccaccaatca

SEQ ID NO: 53874 - DNA, 828 bp, Cannabis sativa
tcaaatttaatacaaattttactttttcgatgattggagatagtctaaacatttatccaaaaatgaacattattattaggcgtcatagtgctcaaccttcaataggtaacgccctataattaattaacgatattttttaaaaactattttcataagttatacgaaatttaatatttaattacactaataaagatatactaccaaaataatactacatatcagtgtaattctctaattttttgtttgggaacaagtataaacgtaatttctctcaaaaaaaattgaccgtttgaaacgaaaatagaggattatcttcactcaacaagacaacaacagcttttaatatacattggaaaaacacgtgtgaagttgtccacgcgtgtgaggataatttggtactttatgataatataaaagtacggaaaaaagattgtctgataaatattaattaaaattaaatgatgataatatttattatttatgcaaaaagcaccaaagagctgctctttgccatgattgctggagcgttccacccacttcacacgtgtcatgtcctttcacttttacttttactttaattcatcctctgctcccaggtacatacttaattctatacaccctacctttatctcctatccaaatttataattcttgtggtattggtaccccaccattagtttgtatgctttaaaacttgggtttaaggtcaatagaaggagctaggggctaggagctaggagttagagaggaggagggggaagaagtcgctcgtatgaattgttgttacggttacagtatgtagtgctcagcttgcaattggcaaagtgg

SEQ ID NO: 53875 - DNA, 1262 bp, Cannabis sativa
tttggtctttgacttgagaattaagctctattaaagaaaatttgtgtctttatttgaggagcttatcagggatctaaattggctctatgatcaacaaatgaaaaatattcaaattttgattaatttacctcacttattcagtataaaaagttgagtcatttcaaggatgaattctttgtatttttatagtgtatgactaattattctaagttcttatcagataaaggacaatgggttttgaatatggtatggtacatattatttgatagaatagatgaagacataaatctttctaaagataccagtttaatatatccaatgaaaggataaaacatgtagactcaaatgagcaaattctgtacataaatgtaactttcacaagtaattaaacaagttcctttttatggtcaaagtatatgatttacaaaattgtttccgtactaaattatgttagttcttctatgatttaaaatcaattcaaccacgaagtgagatcaataaagatgtcttctgtgcaaggaattgtgagtcctcccatcgaatgttgatgtccccgaattcttattcagccatgcttagcaattcttgaaatgcaagctcacttaggtacgaaagagtactaaataacggtttctttttctctgctccttttgaaatgatcttggacttcacatcagcatctttattggccaaaaagtgatctttcgagagccttcttagactgaacaaaaccaggaaatgaaaaagccatgtcgatcttcctatgtattttattgactatttccgtaatcagtggtgctgttagcaattgttctgctatttccgtaagcttatcattagaagtttaagcgagaaagggttcttcattgcaggaaattgtgagagcttcaattggatgatcaaatccaaattcttgtttgaacttgtcatacgaccttctattgtatcaagaatagccaaactttgagtgttgacttagcaaggcaatagttatatatgaacagatgttttcgtgagtacatttaccaatttgaggaagatttcttcaaatttcgagtcactgacttaatgatcattttctcactaatttataattgtaaacaagacacataaatggtcttttgttttggtcctttcttttcctttgcaagctgagtatatatgaggtaaaaataaattctacacataaatcatggaagaaaaagtgaagttgtataatttatatcattcttggagactttacttttggtctccaaggaaaa

SEQ ID NO: 53876 - DNA, 1877 bp, Cannabis sativa
acgtaattttgaatttaatcaaagataaaccattacttattataaaataaaaagttaaaagataataatttaaagtttttaatttaacttttttataaaacacaaattaattattacagctggccggttgtgccataaaattatggaagccattatcatgtaatcttacatttttgttttgtttttttttctttaaataaattataatgttatatacaagttcaaatattaagaaatctcaataaaagaagagagctcattaaattatacaagttttacatgttgagttaattcatacgtagtcatattgaccgtctgacaaatataatgaattaggaacattctagaaaaactgaacataaaatttgctaaatcctttaacaaagaactaaattcatttatgaaaaaaaaaaacgtttagaaaatacattaacaaccgctaaacaatcaaactctataaaatttaaagatgaaccaacaataaatgcccaattcaatactactagtaaagctaaaaaaaatctctttattgattgagcaagtacagagaaacattacagtcgagaagattctctggaaaggattctctcaagtgtttatctctcacactcaacccaagaacttcttcatctacagaaggtcttcatacaaataccaatttcttaatctctctttacacagtacttctctctctctctctacctctcaatcttttcctttctcaatctctccttctcacatctgtgaaattactcttcgtccgatctttcttcttttacccaaggtggtatttataggctttaggatatggatcataaatgtcagtggctgcattgagctgagttgttaagttagttatgccttaacaaacttaacaacctcctcataacaagatctccacgtcagcgttggtcaaggtgcttctagatgagatgtaagcttccgggcaagctgaagcgtacgcagaaaggacttttcggataggagtaagccagctggagttgactatccgaagctctcttctaggatggacaagctaggttccgaaattcctttccaaatgacaaccaaccttcagtgagtacgaaaccgaagacttttttatttagaggaattataccacatagtaattacaaagaaacaaactgtaagaagattggtgacagcaagagaagctcagcaaagtggatctcacccccgaccggctgtgtaaaaattaatatggatgcagtttgtgattcttctaaagacagatgtagtagttgctattgtgagagatgaaggtggaaattgtttggaaggtaagggggatttcttttgagaggccttatgacaaccttactagcaataagagaggggatacaattggggtttgatgtgaatttggaagccttttctattgagtctaactgtgcttaggccatatctctcctttcctctcctcttggtgattactatcgtgactaaaatggacttttatggagcattcttgatctcattccgagtcaattgctttggtggttttacttttatttttagagaagctaatttgttgctcattttctagccaaacatactcttgtaattagagttagaactatttggaaaagggaccttcccaatgtggcaaattctacttgggtaggagcttatgtaagttgtttccctttgtggagattccactttcaaataataataataatgatgtaaatttatagtaaaataaattattggagatttattaaatgttataaaagattatttctttattcaaaacaaatgaaagagttaattacctgtgttataataattatataatatgtaaccaataactaacttaaccgtcaatgtaattgattaattaattcccaatccaa

SEQ ID NO: 53877 - DNA, 1716 bp, Cannabis sativa
  modified_base (1681)..(1691): a, c, t, g, unknown or other
taattttttttttttatgaatcagaaagtttgtattgctcacaacaaaatttttacaaacaaatagcaccctaagaagggcctaaaataataaaattgtacaattattcctattccttgatactctattttccaatcatttcatgtgttctttacaagctttgaaaccattcagtatcctctacagatacttttcttggccatactgcattgattctatatgtaacaacttgttttactcctgttattaccttttttacatccggctttgagttttcccacacaaaaagattccgagctctccaaattgtatacaccagacagcttatggcagcagctagtacatttttcttgaaattgctaagctttgatcttccaatccacctggtcaaagcaagcaaatagtctgctgctatgttccaagacagccaggtttttatcccttgcaaacatgctgcagtgaacctgcaagtaaagaataggtggtctgtattctcagaatgactctcacacagttcacagtgttctcttgttgccaatcccattgctttcaatctgtccttagttctaagtcttttttggattgccaaccacataataaagcagtgtttaggagtgtttaaccttccccatacctgccgagaccagtagacttttttttgggttgggcaaagtaccttgtagccttcctcaatctgatagtgttgagtaaataactgctatccagcttttcctttaaagtgttctttcaagttaacaaggcttctccaatacaaactacaatgatttgaagccttgtaactccaccaatctctatccttgatatagacactatgtatccatctcatccataagctatcctgtttttgagcaattgaccatatatacttccccattgcagctcggttccattcctgtattttcctaaatccaatgccaccagcagttttagattgacacagtgattcccatgctactaaccatggcctgttgattaagcttggtctttccataggaaggctctacaaattgattcaagttgcctcaccactttcttgggaaaaatcatcacttggcaccaatatgtatgaatagccatcaacacagagttgattagaaccacccttgctgcaaaggataggttccttgaactccatgctcttattctcgcagttattttttcagccaatgcaatgcactcattcccggatatctttttagcacatattgacactaggtaaaaggcatatccttcagagtaaaaccagaagccatttgtattctgttaacctcctcctgaggcatattgctacagtacattgtcgatttctgaggactaggttgcaaaccagatgtcatagtgaataatttcaaaccctccagcatgtaatagatacttttgaactctcctttgcagaataacaaaacatcatctgcaaaggccaggtgattcagtttcatagcagagcatctttcatgatacttgaagtccttcttatcccccactttcttgaggattctggtcaggtattccattccaatgacaaagagtagaggagacaatgggtctccttgccttaggccccgtcttgactcaaaaaatccttgagtagatccattgaacatgatagagaatctaggtcttctgacacaattcattactgttgcccctgattttgccnnnnnnnnnnngaccaaccggacagggacacgtgga

SEQ ID NO: 53878 - DNA, 1348 bp, Cannabis sativa
atagactctaatgaactaaggcacaattgcgatcccaaggaacaagatgacatccatgagctataggttgcaggttggaggttgcaggtggtggtcttgtgccttgtacatttgtctagtgtcaagtggtccggagttgtaggggtagtgttgtgtgtacccttggtctggatgtcaggatgcaggtgtggtgcctccactactcataccctctaggtaatagaacttgcaggaggcgtggttgtactccctttgcatgcacgcctcgtcctttgtatgcatgtcccgtctttgcgatcatacctctgttgcattcttccccaatacttgggaaaacttcactaagtataattgtgtcatcgagaagagtattgtcgagtgacatgcatgtaagtattggccaagtgtcttgcatgctatcttggttgaatgacttgcatggtgcattggcgagtgacatgcaagcttaatgcatggttgagtgacttgcaagctgcatggtcgagtgactagcaagcttaatggttgagtgactttgcaagacttgtgcatgactgagtgacttgcaagcttcatggctgagtgacttgcaagatgcgtggtcgagtgacttgcatgcttcatggtcgactgacttgcaagctttatggttgagtgacttgcaagcttcatggccgagtgacttgcatcatggtcgagtgacttgcaagctacatggccgagtgacttgcaagcttcatgttcaagcgacttgcaagcttcatggtcgagtgactccttgtgcatgtcgagtgactagcaattgagcatgtcgagttacatattcttgtgcatgtcgagggacatgtacttgagcatgcttgactgagtgattcctccttgtgcatgatgagtgacatgcacttgagtatgttagttccagtgactcctccctatgtatgccaagtggcatgcaattgagtatgcctgtgacatgctcgtgagcatgctgtgtgacgtgctattgtggatgttgagtgacatgcacgagcatgcatggccgagtgatttctccctgtgcatgtcgagtgacatttctcaatgcatgccaaataacttttgagcacttagagaagcaaatgcaactatgcatccagagcaactctttgagtgcatccccgctaatctcccaattagtagtcgactaatcttgagggttaatcttgctaatttttaaggttaacaaaactaaaattataattaacaaattttgaatattattatatatatatttttaaaaaaataacactcaaattaaatattttttaacaaaatactaccaaaataaaaactaataatataattaagg

SEQ ID NO: 53879 - DNA, 852 bp, Cannabis sativa
tgaaggagttcaccagggtaagtctttcttaatacttccctttaatcttccatacttagctcaaatgctaaagttttttccttgtgcaggccggtcttaagttggcctgcacttattcctgggctaagtctgctgcttccaagaacacagctctgtctgacaccctgagggcagtggcaaacttggccaggaaggatgctgaagaagccagggcagaagttggagctatttggttggaattgtgtgaagcgaacaagaagttgtttgccgcttagaagaaaatcactgtgttgactaatgatctcgaggttgctgaccgttttgaggagaccatcaagaccttatctgttgaggtaaacattattttggatgagaggacttcccttccagcagttcttcatcggatgaaggaggaaaaggaaaccaaggaggaggagctttcggctgaggtggacaggttgaaggagaaggtcaatgccttggagacagtcggtctggagctcttctttgatttttggaagtctaatcctcaggcctatttcgactacttgggtgatgctaaggacgtgtacgttgaattctgcgcgtcccaagtggcctacggcaaaactgaggcggctgcttcaacctccggtcaggctgctgatgcacctcttgttcaaacaacagatcctcctgctctggttggcccagaagaaccgaaccaagagcctgggagtctagctacttaaacacttctctttttatctctttatttttatatatcttattcagcctctggacctttcctaagacatcatgaccggccaagaggtctttaaacatggaattatttttcattttttggacaac

SEQ ID NO: 53880 - DNA, 2206 bp, Cannabis sativa
tatgtttcttataaaattttctttttgtgagttttctaaaaaaaattaatttttaattctctccatctctataccattcgattatatctgttaatttacaaattgtcagttttcttatatctagcattttgttatatatttataccattgtgttgcctaaaaattatatctaacattcatgaataaagatttatctttttgtaagttctttaattattttttaaaaaatattttcatccttatacattttgattatatattttattttgcttttttctatagatttgatctaacatcttctttttctctagatattttttatgtttgtctaattttttttgttggagtaaaggaaaaattttatacaactatcatcaaaccatacatactgtagcagctaccaaccagcatacaaacaaattgatgtgacattgtttggtttctataaaagtttttatataatatataaatttcataatattttttattaacttctcatattctttaggtaccttaattgttgggagttgggagttagaagtgttttatagattttaaaatattaatttttttaatattttttttaaaattatcttgataccgcatttggtaaatagatttcacattgcttttattatactctttttaatttatcaacaaaaacattttctctttctcttattttgtggaaaaatatcatttaatttaaatttaaatatgaatataattagatatttatttaggataattaatttttattacattataaaacatctttctgaaaaaaaaaatataacaataataaaaaatatcaatatataaataaattaatggtaaattatttgaataattgttcaaatctatatatatatatctattctatataaaatgtagctatataacagaattcttggtttatgagaaattatagggtgacttttttcttaagttttttattaaaaaataatatttttttttggctgaggttaaatggaaattgtcatttatacgattgagattggaagtttagaatcccaaaaatacgattaacttttctccctctttcacaatcagacgacatcaaatctctgaaatgctcttttgatctccgccacttctccctcttctcctttgacattaatatgaggttaaataatatatttttttggctgagtttacattcgattgggtttattgtgatttcaagcttccgattctgatctgtgaaatgctcctttgatctccgccacttcatcgctccactcttattggccaataatggtgatctacggcacagtaactcctttgatttcaggtaatatgcctttattcttttttgttgataaaaatccctctttatctccaaatagtgcgagtggagatgaatcctcctatgagaaaagccttccttccatctctatgaaatattcttcatcttcgctttgtgattttattcgctacttcccaattgaaattttcttagattttagtttaaaatgtgcctggattcttttggaaaatatatggttaatgttttaaatgactattttcttttaacaaattacatagtagacattgataactggaagtttctttgaaagatatacttaggatgtaccatgtagaatgttaagctggtgtttcccgggtgccttgcctgagcaatagttgaataacactagatgtttaaattatcagattgtacattaaagggtttaaaactaagtaaatattatttgtttttgtataatccaaagctgattcctctaataccaacactgtttatcataggactagaatcttacagatgactttattctatttagtgaagacttgtctaaatgcaataatattagtatttacaactattttattttggttttacagatattttattctagatcttccatcttgttccgttgaaggagcccaaaaggactttattgataaaatctatcttatattaacatgagctttgattaggtaaacaagcaatatccaatagctacatgtgattatttgttgtgcttgattttatgctccctataactgctatatttaagttgaaattctgtatggatacttgatatttagataattaatgagaccggtcatcattaaggctaccctactttgaacataattttgtgagtctgtccatattgatattgttgggttttgtgccctaaataaaatcctttacaat

SEQ ID NO: 53881 - DNA, 539 bp, Cannabis sativa
aaggtgaacaaagtgaccactgaagacaatgcagcaaacatcctcaccaaagctctacctacttctaagttctgtcactgtttgaagctactgaatgtaatggaagtttaggcagtgttcaatcatttatgtagttgcttagtttctttgcatattacttgtcaaaggtagagatttgttagaattgtatgcctaagtaatatgacacctaagcaaccggttttaactaaattttcaagttagttaatctagttagttagtgtagagttaatcatgtaacatacaaagtcattgtttatctcctattgtatgttgacgacattcttatagataaacaaaattaaagttatgttgaacaaggaattcgaaatgaatgtccttggttcagcaatgaggattttaggtattgacatcattagagacagatcaaagagaactctcaaactgtctcaaagtggttacatatctaaaatccttcacaggtttagtttcaaccaagaaaaatctatcaaaactccctacactccactattcaaact

SEQ ID NO: 53882 - DNA, 2232 bp, Cannabis sativa
ctcaacaggcttgtccttcttctttttcgtcttcttcttcttcttcttcttgttcttttttttctcaacatttttggcatgattagatccttctggtgaaacttcctcaaccatgccattgggatttagcttttgtgtttccatttcctctgttgatacaaaattcatagcaaatatcttaactatagacattttaggcaccatgaaaataggattttatacacaattcacacacaaatatcaaaagggcatcaataaaaattctccaaaactctgaatttcaagaatattgcaataaatacaaacaaaaggataatcacaaacctagtttattcaggaaacgtttcccatttatatgtttccagatatgttcctcggacttattaactgtatctccagttatattgcataccagcttcgaactaagaaagttccaaacaaaataaagtgaaatagcttcatggtttctcaaataaattaaaaaaagaaaagaaaaagaaagtgaactttatgaattgggcaaagaagaatcaaataccgtgaaagagggtcttgcttgaaaacgttaagaggaggcttcttgtgggagacagcatagtcgatgagccctaaacgacaccgtttgctgttggagtaggagtccttgtctttgtccaaaacttcatgacctgtctcaacacacttgaagcggccattatcgagaactttgaaagttggagaacccagtaggttggttccttctttctcttcagccatgtctatttctacttgaattggcaaaaggagcagatgggttagggcctcgaatagaaggctaagttgacaactacccgtctaaagtatagtcttatattgttcaaaaaaaaaagtagtcttataattacctctttatattattctcaatttttataaactcagaaaaggagagttaagtatatggttagtaattaagctaaattttctgctaaaataaatacaatgagataaaatgcacacagatattaattggatcatgcttatgaaatccctctcaattgtacgaaaaatgaacaaggtaaatgattaccactaaatgatgaactccaactactgtgctaacagttgcaaaagctaaaggagaaaaagcttcaaagaaaaaacaggttgtgaaaacaaaagaagccatttcaggatcagccaagaggctaaaggtcagggaaaaggctgtgcttaatgatgtgatatctaaatatacacaaaaatcttccattgattttaaggaagagagcttagttagtggaatgtgattgtgaaagattttagctaagagttttattacctacatttttgtatatctaatttcagattagacttgggtaataggtaactttgtatgtttattaataatgacaatgatccttaatattttttttatatatatcataataaatataatcattatggttaatttgacgctattttggtacattactagctaagttttgaagtgtaagctctttactgtaaaggaagctaattacaataatccaatagtgcttctatttcttcttcaaagtctagagtctagatattcaaatatgttgaagatgaccagttcattaattagttctatgaataaaactcttaaaaagatcatgaaacatatcaatttattaatatcttttataagatatgattagctagtcattttatgaattagtttgatattgtaacactcttttaatctcatgtatgaactagaactctaaatatcaaagactaataatcttgaatacaagtaaaaattagggaaaattaatctgaaaatcaaaattaaatacctgttgaagcttggagaagcaaataccaaatacttgctaatgatccattcctgcttaaaattaattcagtcccaactcttaaaaattcaaactcatatatatttgcagcaataaacagaaaattaaacaaaattagttgaaagaagttatcaatactaaaagtttagaactaaaaaaggcataaaagtcttaacctaagtgactgagattattaataaaagtacctggtggagccaagtgccgactgactgcggagagcaacgaagaatcagagaagagagaaatttaggggagaaggtgcctgtgagtgtgagattgagatttgagaagagagtgacggccaaacagtttagcagcttttctaaaagggtttctttcattttatataatttttaactaaatctttctcact

SEQ ID NO: 53883 - DNA, 947 bp, Cannabis sativa
tatatatatatatatttttgacatcttttgttatcacattcaccaaacactgaatttcatggtgaaaagtccactttcaccccaaaaccaaacaccacctttctattttattttttctttttaatgaaaattctaacatcaaattttcaatggtggggctaaactagtacgaaaattgtactgaattgaaagaaaattaatatatatatatttttcattatcaaagtggtctcatcttctctcttatttttaaattattttgaagaattttatagtttggtagttggaaaaaaaaaaaaaagttgactcctccactaaaattaattagtagtatggtttataatatgactgattttaattttaaaatgtgataaaaattgttaaaatattatacatttagatcgaatatcactaattaaatttgtcattttatgtcataaaaaatgtctttatcattcttaattagattcttatttctttttagcatttttagttagttaaaacgttataaatatcaattcttttaaaggaaaaattacgtttaacacaatttttgagattttttattgctatattatcaataaaagtaataattacaaatttttaaaagattaatttatggcataaatatttaaatttaattcttgtatgcagataaatacttaaatttaatttttgatagtaataatatttaagttatatttttggaattttcgtaagtattcacaaccgttaagttgagtatcaagttattattcacgtgtcgttttcttattaatatatttaaattaatttttaaatgaaaaataaaaatttaaatatctagaccaatcaataactgtcacataactattgacttgatacttaactgtaaaaaattaaacttaaatatttatctaatataattgataacaaacataaaatttgtatacgttgcaaaaaaaaaa

SEQ ID NO: 53884 - DNA, 752 bp, Cannabis sativa
aacgatggtggttgtcacccccctctcaagttgggtcttgggggtcacctaactatgatggttggggtgacaaccacccaagttgaggggctcatatattttcagggctggccctgttgatgcccttcttttctaatgtctttatttctatcttttgtcttctttattgcgattctctactattattattagtagcagaagtttttgtgtcttacataaaactcatgattgcatagggtaagagataggctttcttatataatgtattaattttattattttattaattttatagtaaaatcacaataaattaaggttgcgcatataaatctaattgatttttttaagaaaaaaataaatatgattgatttattactataattattaaaaatgtagttatgaataataaatatattatttatatcttattatatactatgacagcataaaaaaattcgtataaccattgatatgtatcctttttttttacattaatgacactataatatataatattaaataaggtgttttattggagtttactattttattattttttttttgtcttttataataaatgtgggttaatctgtaaaataaaataaattatttggagaaatgtcaaatatctatatatatatatctctttacccaaattttaacgacgatgacgtgttaagagtagcaccgcgtggcacaaaaatactcggactaaattaatgaagaaggtgtaaagtcatggctgttgagat

SEQ ID NO: 53885 - DNA, 1512 bp, Cannabis sativa
  modified_base (1146)..(1154): a, c, t, g, unknown or other
  modified_base (1451)..(1456): a, c, t, g, unknown or other
ttttttttttttttaagaaaaaaaaaagatgtcttcaggtgggtttggtggtaattctggtaaccaggttctagcttctgaaaaattttgagattaaggagggtcatggtcttggtgttgaggcatggttgttttaccatttttgtttagttgctcaacagttgttttataatgactgactttatactttttcccctatttgtttttatatatatacttagatgggtacaacaggtgtttttgttgattctaatattcaagttgtggaagatcattcaattctcattgaccaaactcttcttgttgaaaagaggaaatctaagaaaccaatagctttgacgtctccctttatggagtttgactcttcgatttcaagttctaaagatagttctgattatggagttgttaagtacgttgatggtttgtgtcctcttgattataaaattggagaaggtgtagaccataaagacgagaataattttaactttgtcttggtgaaggtcggcgaacaaataaagaccagtatgtgttttatttagtcttttttttcatttttatttttgttttttaatctttcagccatgacaaggacaatgtttacttgaagggcaaggataagattgttccaccttttcgttttggcgtggaagatgttgcatccaagatgtggttccataagcttgcatatcctggccaatgttaactgattctgtaagttgtttttatattttgtttttgctgaccttttttaaaattataattttattggttttaatgattttttttttttgttgtttagttgttcatatttttcagtttttttacatatgttctttgttttattctttctcatttagatatcattttttactatcttcagaaaaaaggaaagtatgcaaaggaaccgaaagttaagttcacaaccactgattgtttattcaacgaaatcattaatgcattgtataaaaaatttctggcaaagaaaaaagatcattctttgataactgttcagcatgccattattaatgatatcagaggtaaacagattttgtgtggtgcaccttggcatttgtgcgatcatgttttgtttatcattagattcttgctcgtttgaatgttgaggaaaggcgtatgtacatgtacaannnnnnnnngactgctatgaaagatagtgccgctatgaaaacttgtcagccatttttggtgctattgtcgcacttttttgctttgtttgatgagtttaaaaaggataacaaaccggtttctttaggcccttttgatgtggttaaggttgatagattacctcaacaaaacttgacgtaatttgtttaaagttttttatttttaagtgttgttttgttttttctaggtattttcccttttttttttctgtttttctgatgttattattatgttgtttttgttgggaatattttaccaagatctagatnnnnnnacaagtatgttgattaacatcctgaatatgagttctctaaaataatgaaataaaca

SEQ ID NO: 53886 - DNA, 654 bp, Cannabis sativa
  modified_base (36)..(49): a, c, t, g, unknown or other
aaataaatattgggtttatgccgcttacaaacttannnnnnnnnnnnnntatgccgctatttacccttttatttattatagcatgaaataactcaaaagctactagtatattatttgttattaaacaatccgacaagaaagagctttgtgtttcagagattaccaaagggaatctagcaactagaacttttgtaacaagcttggagataacattgcaaagacttatgggtctgtactctttcatgcgttgaggcttcttaagttttggaatgagagtgatggtggtttgatttaagcctgaaggatcaactccattattgagaacactcaacacagccgaggttacaagatcacccaccatggaccaattttattggtaaaacatgacagacatgccatcaattctgtggattttatccggtctcatggtttttaaggccatttcaacttcagctttcaggaaaggccttataaggttctcatttaagtcatccgaaaccagagtaggaatgtaaccaagggtggttataagggcttgttcatctatatttgtggccaaaaaagatcaaaaaagtgatctcaaacaatagcattgatatccgccttagatttcactttttggcctgcctcattgtagagaaatgtgattttgtt

SEQ ID NO: 53887 - DNA, 707 bp, Cannabis sativa
ctagtattttcctcttttggtccaatgataataataatcagcaatgcttcctcagggtaaatacattagtagcgtaccttattacaccatccatttgcatttcatactttacaaagatgcaatgtttcgtcgattttacttttttttttttggcatcctagctagtcatgcatctatctactaacatattaaatttcatttctatttttgtatataattgcctctaaggtgaagagatgttttttttaagacaataatatatatgcatcattaatatgccaccacccaccccactttctaggttatcaacatagatcatcgttttaataattgtgccacgatgaaaattaataatattacttttgttatctatacttactgattctccactgtaataaattaatatgtacatcaaccagtgtctgaagtaatatagtatatgttatgagattaagtgtactttgtggcaacccttttgatcaatactttctgcaagagagttaattaccaccttactacatatttttttacttttttttaatatatatatatatatatgtatgtgtgtcaatatgtaacgtttaattggttttattttataaaaacgaattgaattttgttaatcttcttttaatgaaatttgttagaataaatttattttaagtttgtatattacattttttagaatagtaaatttagatatatta

SEQ ID NO: 53888 - DNA, 1443 bp, Cannabis sativa
tttgtatattttttttttaattttatataaaattttagtaaacatattattttagtaatatatcaaaataaatattaatttttatatttacacatttcgctttatgttttttttttttttcagaaaatcaattaaaagtaataataaattaaaattataaacatatatatttattttgtcaatattcataaaattatatagaattatgtaattatttctttttcgcacatcttttgtaatattatacatttatttacttgtatataaataaaaattggccttacctttatctaaaatgacaattgatgaatacacgtgatggcacgtggttgactttgtggaaatcttctcctccttcctccatcctttctttgaatttcgtaggcataaaatctatgaccatctcattgagtgtcttgatgttttttagtccatctgggactctcctcaatctcgtacaaaaatatatacttaaataggcaagtgtaggcaatgcactctcctccaccttccactctttcaagttagctaacgcattaagctgaagagattcaagtcgagggaaacctcctcttgagcacaccatctcatcccccgtaaagctatgatagtcaatgctaaggactcttaattttggtagcttttctaatgttggcattggatcatccttaagttggagattcttcaaagttagcttgatgagatttggagagaattggttgagttgtggtaatcttattataggcaactctagtgtaagcttataaatgtgaggacagattaatatcataggaacaatatctaccttagtggtgccacgcagattattcacttgtaaagacaaaatacgagtgaatgtgagagattggggattgtgtaagaatgtctcaaaatttccattcacgcaaatttttaatttcttgagactctccaactgtagaagatcactcagtagaaaatccttggtaccaatacctaccaatgtttgtaaatttctcgacttagttgatctcaagaaattaccaaattttatgccacgagcaaatggagggttaaaatacagatgcctcagttgctccaacttgcacattgaacttggtatgttaagactcaagattgatactctcaaagtctgcaagcatcttaaattgccaaaagaagatggaatctctttaatacgccaactaggaatactcaataaccttagatggatcaagtttccaatatctttaggcaacttcaaagtagatttgggatccacaggccgatgaccaataatcaaaactctaagcttcaaaaagtgattgcatacatatctcaattctctttttctattctcaactcctccatgtagagcaaggcacctgagagagccatctatttttctaagcatatgaataaaatcaccaccattagtatttctattatcatagatggaaactc

SEQ ID NO: 53889 - DNA, 882 bp, Cannabis sativa
tctcaacataatatatatatatagcttaaatatagactaatgaaagaaagataatacctcttgaagtctatcagggtattcttatttcttttcgtaaaattaatgatcatccaattcaagaacttttattgaagaatccacacatttatcttccaagtcagtctcaacactcatgaatagagtatactattatatcttatttggatgaattaatttatgtattacattgcgtacttaattcatgagatactgtaactaagacagggttgttcaatttcacacacaccttgtatgggtgtatgtgtgtgtgtgtggctgtgtgtgagagagaataggattaaaaaaatcaattcttatttttcttttctttttcagttgtattccgtctgttaataggctttttctctgtcattaatttatgatattatatatcctatatatagtgttatatcaaaattctttatttaaaataaaagaaaatatttaatttgatttgaattacaatccaaattcaaatataaatatgtaatatctgaataacaaatatcagtcacatcttttattttaattattacctacacgtatgggtcatattttaaggttcaaaattgattttttaattttgccataaataagatttattatttatttcaccaataaattataattaattaattctcattaatcttttatttcacaaggattaaaataatatatttctctctttaatataatattatatttaactagataatatagtttcatctaattgccataattaattaaaataatagtttcacaaattattattttacccttaagaatttatttcccatagaagttaattctcactcgaacttcattcatcaaataaaatcttcc

SEQ ID NO: 53890 - DNA, 646 bp, Cannabis sativa
ctaagaccattgagtgatgccatgcctcaaatgtagggctgatatttctcatcatgacttcgaatgatgattatcgatctaggagattgcatctagaccattggatcatttattaatactaaaaaatggtactttgagttgtgagccaatttttgataggaaataagaaaaattcgatattattatgatacatgcatttaaagagttttgaaaggattttacaacacacttagaatcatgtcaatccaagtcgcaatgaatgagatggccaaaacactgggagctgatctaatactagcacccaaattaatgtcttaacgctcaagttgacattagatgtcaacttgtacacatataactcccttaagcttgttcttagcatattttgagatgtcaaggtgatattggtgcatcatcaagctaattttatgacttgcttatgatattttagagaaaaatgtgatcgacgcacttggtgatctaaagctcagttgtgcaccaagtgacgatcggaggccacctgggcgcaagtatgtcacccccctcaaattcatgggattgtcacccccaaaccttgaatttttatttttaccttaatttaattattttttctaattatacgaaattaaaaaaaatccaaataaat

SEQ ID NO: 53891 - DNA, 754 bp, Cannabis sativa
tgacaatataaatttaactaattattatatatatacaataattattcactatgaaaaatttattattgtcctttcaaaatataattaatctatatatacacataaaaactaatttattataacaaaaaaaatactaattatatatttttaatataatttagaacaacaaataagatacgaaagacataaatgcataatgcacccttatttccactaaaaattcctccaattatactatatatattttagccgtaatttctcatcatcttctctaaatctataagcatcaaggttctataataaaaactaatcattggctttctctcaatcatacttatctcatatcattatatattttattaattttaaaagtttgataatattctacacaagtaagttaattaaaaaaaaaaaaaggtaattagtaaatgaatgatataatagtatgaaataagggtgcaagatataatattatgttattatatctgagtaacttaattattattatcattattactactaatatttttttaaaaaaaaataatttcaaaaaataccaccaataaataaaaaaattgaaaagaaaacaacttaatagatacaaattgtttaacaataaataatatcaatgaatatttaccatctttcaaaaaaaaaaaatcaatatttaccaaaatactttttactcttatccattcttatttctcatatataatattttaatgtattatactgttatcttcgacccaaaacc

SEQ ID NO: 53892 - DNA, 1133 bp, Cannabis sativa
  modified_base (695)..(696): a, c, t, g, unknown or other
  modified_base (822)..(826): a, c, t, g, unknown or other
  modified_base (1005)..(1009): a, c, t, g, unknown or other
gaaatattctagatagtaatttctcataactaattaatattttctaatatttaattaagttgaaaaaaatatttaagttgaaaatcaattttagaccaacttaaattatgatatttttattaaaactgaaatagaattgataattatgttgattttatttgtttctatttcataaaatttaattaaataagcaaaatatatttaatttgaatttctttttaattaattttggaccaacttaaattagaatattttattagatattaaattagaattaatatttaagttgattttattctagatacttgattaattctattttaatgaatttgattaattagaaaattgtatttaagtaagaaatttttcaatttccgatcaacttaaactagaataatttgcagaatatattttattttattttaataattatttctccacaaattttgaattgcattgattttaatgtagatattttgaaatttttttaattttaaaaattagattaaagctgaaaattaatttattaattaattttagataaacttaaatcgagtaattttcatcaataatttaattaaaataaatagattaaaatatattatattttaattagaaagttagtaattagtttatgaattatctatatagatattttctaggtagactgttggtatttttctagatatatttanntaaatagaaaattaatatttaagctgttttattctagacacttaaatatttgatatttttcttaagagatttaattaaataggaaaattatatctatgttaaaaattaatttatttaattttagannnnnataaattagaataatttttctattcttattttattttatgaatttcgaaaatttatttttttaatacattagatttcgaattctatcatatatatttaaagaaaattaaatttgagttgaaaattaatttaattaattttggaccaacataaattatgtaattttcataatatttattnnnnnattaatactaaggatggaaaataactttttatttttcagattttcctagggtataattttataaatattaaatcaaaatttatatttagagttatctaaataagtaattttaattaaataaata

SEQ ID NO: 53893 - DNA, 811 bp, Cannabis sativa
ttgtttaatgtcttttgattctacataataattggaccatgtccaatgcatacatattccaataatgcaaatgcatgcttagacttaaaaagcaaaatggtaaattttgaaatagcaaaaattaatcaaatgctaaagtttaaaattcaagaagaagaagacactttttttttttttttaaattaataaatatgagtacatttgtttaataataaaactaaaactaatcaattgctaaatatgattacattagatattatatttgcattggaggatgattgtactatgctaaattacaatgttggagacattgatctaacaatgtgttagagatgttctgaagtaattaataaagataatcattgtcacaaaatattgaactaaaagaaagactacatctctaataattcattgccacacacacacataaatattttatgttataggccggctgtacaatatataagatatttggtagttgccaacatattggacacaattagtggcactgattacatatatttgttaaaattagattatagaaatgatatacatgcttataataattaagtaaaattattaaaccatataattaaactaataaacataaaaggttctttcatctataatatattccacatttccaccatctccaaaataatctaaatctgaacagaagttataacttaagaatatctagaagactaataatatgaaccaaaagcacctatgtttaaagaaaataaagataaaggaaaagaaaaagataaagggattttatgggttctaaaggaataaagttgataaagca

SEQ ID NO: 53894 - DNA, 1193 bp, Cannabis sativa
  modified_base (573)..(587): a, c, t, g, unknown or other
tttagatcaataatatttcaacacatagtaattttaaaaacgtaaacggttcagttaaaattaggactaacggacaaataaaaaacatgaccttaaggactattaccgctatttttggagaaaaagaaaaaagttttattagttttaacactttagttagtgggaaagtacttattagtggaaaaagacaaatacttattcttttaaaattaatagtttgggttgctccaataatttttatgtgggctgctatgtaaatttttgttgcgatcaatttaaattttttcattaattgttatgtgagtttctataagagaaaagaacatactaatataaataaataataaaaaaaatcaacaaacataatattgtttttctctttatttagagatttcagttgcctaatatatatttttatatatatattgcccaaaccatgaaaggttctaaaaaaaaacaaattacatgaatgtatgatcaaaaaaactagagtctcaatctcaacaagtactacaacataatattactacataagtatattttgggtacaaaacttattattattattattannnnnnnnnnnnnnnttattattattaatattattatatattgaaaaacacaaaatattattattattatatatatatatatatattatggccatgaaaaatcttttttccaattaatttcatcatcactaaaaaagaagccattttcagtaaccaaccaagaacacttccttaacagactacatcgacgaacatctctagaaaccttaaaagcatcgaacttcttcctcttccgatcccatttcatcgtacaaacaaagtgaggattaccccacatgtcagttctcactctccagctgaaatcatctctctcctgcaacgcgcgtccaccgagatcgctctgttccgaggcacaccagatcactagaggcaaagatgagttgtcgctaaaaccgtttatgattcttatgtcgtattctaacaaacccaccggaccagaaaacgacacgaaaattatcaaaacggcaactgagactattatgcttattattaagcttctcagttggttttgctttaggatcttcattatcaaacgacaccgttttcttctcaatataatatatattattatgactatagtagtactactagtttgaacatctatggttttgtgtatatata

SEQ ID NO: 53895 - DNA, 6012 bp, Cannabis sativa
  modified_base (2084)..(2086): a, c, t, g, unknown or other
  modified_base (4116)..(4122): a, c, t, g, unknown or other
aattccggttaatcatacataaattccccttaagtaatttttaaagaacaaaactttgtaattacttaatataaatgattctctttattcataactaaactttaaagtttgcattagtaattcgagttacatcatttattaattagtagtaaggtcgcaaatgttctactttccaatagctctttattagcgagccatctagtcgagccaatttataaactctgactctaactactgcttcaatgacatatggaccctcccaattcgggttgaacactcctacagatgcatctctcatatttgcaaagactctccttagcaccaagtatccaaaattgaatagtcttttcttgacttttttgttgaagtatcttgtaactcggtgctggtatgctgcgttggtgattcgtgactcagctcgtttttcttcaagtagatccaaggaaaattttaaaggttcctagttttcttcttgattataaaactctcttctattagtcgatatgttcacttcaacaggcagcattgcttccgagccaaatgctagctcgtcaacccagagtacccgaggtagctcgtcaacccatcagccttttgcaacttctaccttcctcttgataatatcctttagggttttattaacgccttccagttgtccattttcctgaggccttgttactgacgagaagctttcgataattttattcctctcgcacaattcagtgaacaagtcaccatcaaattgggttccattatcggatactatcttcatgggaattccaaacctatagataatgttcttgatgacaaagtaaatgactttcttgtaggttatggaaacgagggactcggcctccatccatttagtgaagaagtcgacagttactaccgcatacttagctcctccttgcctagtgggtaatgccccaattaggtcgatcccccatatagaaaatgggtagggcgcggtcatcattctaagtgctgttggcgatatgcgaggtatatttgaaaacctctgccatttatcacatttcttgacaaacttgtgtgtgtcctcattaatcgtgggccagtaatatccttgtctaataatccttttagacagagtttgccaacctgcatgatccccacggaagccttcatgaatttctctaatgatttcatttgctatcgtggggagaacacatcgaagtagtggcattgaataccctgttctatatagtttgccttcgatcaatgtgtagcgaggtgctgaatacaatagttttcgcgcctcttttttgtcatttggaagttgtccgtcgagtaaataattgataatatgggtcatccatgttggagagctcgctcagcatctctaccggaactagattcaattcattgaggtcattttgcgaggccagttttgctaatgcatcgtcgttggagtttagttctctcggaatttgcttgattttaaagtaatcaaatctttccaagttcttccaaactttctataaatactttgccatttttaagcctttggcctggtattctccaagcaccttgttcacgatcaactgtgaatccctatcacaaatgagatttttgactttcaacgcctcaactatctttaagccggtgatcaaggcttcgtactcaacctaattattggatgcgtcaaattggaatctaagagggtagtgaaacttaaagccttatggcgatattaatattacccttacacccgtaccctattcattggatgcgccatccacatataaattccaggtttctgcgtctcactaatcaggtggaatttatgctggagttataccttctatcaagaagtcagctaaagcttgggccttgatggatgtctgaggatagtatgttatgtccaacttcctctgttcaatcgaccattttatcaatcttctagaagcatctggttttgataaaacttgtctcaagggctgatcggttaacacatttatagggtgagcctggaattatggtcgtagtttgtgagacacatggactaggcataacgcgagtttttctagagggggatattgggattctgcccctagtaacctttnnnttacatagtaaataggttgctggtgcgtgccctcttcacgcactatagctgcactaatcgcgtctttcgagatggctaaatagagaaacaacgtctctccagttattggttttgccaaaactggaggcgttgtgagatgcctttttatgttctgaaaggcctcttcgtactcttttgtccactcaaactttttgttgcctcgcgatatgtcgaacaatggcacacacttatcagttgacttcgaaatgaatctgttaagtcaagccattcttcctgtcagggcttgtacttcattaggcttcgtcggtgatggcatgtttattaatgccttaatttttttttaggattcgcctcaataccccttgcgttaactatgaatcccgaaattttcctgaggaaactccaaaggaacattttttcaagtttagcttcatgttatacttctttaatatcttaaagcatttcgcaatgtctgaagtatgatccttacttttgattgattttaccaacatatcatcgacgtaaacctccatgttttgccctatttggtttgccaacatttcgttcaccaatcgctgatatgttgccctagcattttttagtctgaatggcatgactttataataatagagtcccatgttggttacgaagcttatatgttcttaatctggaacgtacatttttatcttgttatatcaagaatatgcgtccataaatgacataagcttgtgcgcaagagttgcatccactaactggtcgaacctaggaagtgggaaacaatctttcggacaggccttgttcagatcagagaagtcaatacaagttctccaagttccattgggctttgggacaagaacaggattggctatccacaagagataaaacacctcgcgtataaattcgttggctaacaacttgtccacttcctgttttagtgctcctagcctctcgcaatccaagggtctccatttctatcgcttctctgggtaacttggatcaacatttaaatgatggtagataatattatggtcgatccctatcatatctccgtggctccaggcgaacgaatctttgttcgccttcaaaaagcttattagctgcaatttaagctgctcgtccaggatctttccaatgtatatacattttgtgggatttcctgggtcgagaataacctcttccaattctttaattggttttagcaggtttctttcatcttgaacttgggtgtcaagatcttcatctttttgttcagttttttctaccaagatcgccatcaactgatgaccgacttttctgtgttgtagctctatgcaatagaaatcatgagccagcatctggttgccacgcaccacttccacgccttctagcatttggaattttaaggataggtgcttgatcgaactgattgcctctagtcctatcagtactggacgacccaataatatgttgtaagctgagggtaggtcaacaaccaagaagtcttgcataacagttcagataaagatgccttacctaaggttaatgcgagctcgattatgccaaggcttgcgatgctgtctccggtgaatccgcaaatgttcaccatgcaaggccttaatttggcttttctgagccccattttctttagggtctcattataaaggatatttaccgagctcccgttgtgtattaagactctcttgatccttttattggtgagttgaatggttatcaccaatggatcgacatgaggatatctcacatttttctcatcttcctgcgtgaatgtaatgggaggttcctcggttttcaccttcttggaaggttctggggaaaagatcgactgcacattctttatctctttaacatatcttttctgggcattgttgcttgccctgcgatatgtggccctcccgaaataaccaggatgtcctctccttccacaagaataggttgtaacccctggttgtttgggttattgggcagactgagctggttgtatccctgaccctgtcttttcacgtaatgtttaaaatggcctcgagcgatgnnnnnnnctatctcatctttcaattggtgacctttgttggtcgaattcccaatatccttaagcaatgtacaatatttgttaggatctcttttgctccttgaattcttcataggctcaggttcgccgaaggctaccttctgcccatgtgcgaggtaaatattctcctgagtttcattaagctcagtataaatagtacacactagcatgtatttgtcattcttcttttgtttctttctatccttcgatggttccttaagtccatcctttctcttcagaccagaagcccacgagttaccaattctcgtggaagcagtacctattgaaacattgttgggtttgcttctcaagcttgttttcaacaagttcatttccttttgggcttcttccttctggacaaacacctgagccctttcgttgaacttaatgatgcttctcaccggacgtctttgtaagtcatcccgtaactcgcccctacggttaatggatcggtagagatccctgcctgaaaggctgtaagttgcgtgtttccatccaaatttctaaccctagcagtagccgtgctaaaatgacttaagtatgccttaagtgtctcgccgggctactgctttatattagttagcgaggcagcttcgaatcatctatccctagcggcctgaaattgcttcttgaaatccctggacaactgctactaggaagttattgaatgatgagtaaacttgttaaaccagctactcactgctccaacaagcgagccggggaacaaaatacagcgtaaattgttcgtcacattactcgctcgcattattatgttaaagttattcaaatgcgagaccagttctgtggttccatcataagacgagacatacggatttatgaatcctgatggaaaagaggtattcataatatctgggtgatacggctcaagctcctcgtcatagtcgtatccagatagtttccctaattcccccacttgatatctcctgaacttgtcctccacctcgtttatccgcaattgtattggatcctcttgctttggaccaagctgttggcgaaggtcaggtttcttctgattcaagtgctctcgctgatccggtttggagtaattgctggctgatcctgtcttactcatagatcgtgtcctactcattgacttcttcttttagtggctcgcagatttactggttcccatactttctcgatcattagctcattgagtactttctcctgttcgagttgatcgacaatgggttctcgatcgcctcgaagtcacgcttgcttcctcacgctctgttctttccttctgagagcagtttgttgtatttcctccatcacggtccgtacgagtcctcactctatgggtttgggaagaacgttggtgatttctagtaggtgatctctgttctcccgattgagtcccaagatactcctccttttgatgagggatttctcattcattagttttcgattgtctcccatctggttgttcatcctgattttcagggggtatctcattttccccgcgttgttcttctcaggccctttcctgtctcctggttcgtgagccacgaggtctgcctcatggtcttctcactccaggtttagattgatttgagcattcttcccctgtgccaccctagccgatgctgcatcgcgttttaactctgtgatttgccgctgtaacttttccagatggcgcctcaagcagcgggtttccgtttcataggctctttctccaagagattgagcacctccacgattgtgctcttcatccctcattttggggttttgatcattcccacggtgagctctcctcgagtgtgttgttcgtgtactgagacttatgtcgggtcgagttctccgggaatgagtagttcgtgcactggggccaccctcaggt

SEQ ID NO: 53896 - DNA, 1497 bp, Cannabis sativa
ggtaaaataaattccaacatttttgctgaactaaattggaaacagcctaagttgacaaaatgtcaacctaggtgttgggcacaactccaggcgtcaacctgggtgctaggaccaagtttttcccctttaaaagttccctttggtccctagaaatagttgattctcaatattttttgaagtaaaaaacgatgtttgaaagaatttttgtaaaaccccttttttatggcccaagttggaaaattgtcaacgtgggtgtagggctagccctaggtgctgggccctgttatatatgcccaagaattgttgttattcctctatatgcccaggttgtattctgggttgcaggtttgtgaaattttagctcccagaccttaggttacatttctccatatattcattgtacaaaatacttattgtagtatgttgaattcaagttatttaagtttaaacttccatcattgagatctcaaagtcaacttgggcgtagggctatgatccctcccaagttgactgctatgagttgggtctactcaactctgtgatgtcataattcatgccatgtgtcaaacattaatgtctacggggaaagtttctaggttaacatttgccaccaagtcaatttcacacttgtgtgggagttgacttgatgacatgaaccaagctcgttacactcaaaactacttgatgggcatcaattttaacattcttaagcacatgtatctgttcttcaagcattcccagctgaattagaactttgaacactttttattagtccttgggaatttttaaaatccattaacaaagataaagaggaaaaatcttatcttttttttcatttaccttttatctctctctttgaaaatttgaaattttcttattttttgttatgccattagtattaatttgtttggaatcctaatacttgttgaacatgcaattcaaaattatagggagaaaggaagacgagaaaagacttttgccttttttcttatcgtttatctttttcctttagtttcttaaatctctccctagttccaatcgcatgaggaatttttgttcccttttatatttgtattcctattccttgtttgatagtaattcaaaattggtttgaaaaaagagaatggaaaagatataatatatctttaacttatcatttacctcttccttaggaagctttaaatttaaaagactacaattagctttaggattaggaaattggactcaactataaataagtgagttgaaaaaacaatttttttcacaattccttcttccctccacatgcctatagtatttagtgagcgcctcaagatttcatcttcatcgagccttcaagccttcttcacttcaaggtagaaaaataatttttttccttgacaccaaatttatttatttattttttatgattttttcttcttctattcttttattgatcttattccaaggaatcataaactccaaaaaaccttggaaataatttttccaaacctctca

SEQ ID NO: 53897 - DNA, 1201 bp, Cannabis sativa
gagatgaaagaggggagttgtaccgttactttgcccatggccccaatggtcaacagtacgagtactttcctcgagtacatggagaggaattgaacctaagtgaacaattcaattctctttgcacttaagatcctactgaagactacttggagggaagtagccactacaatgctcataatgagcactctcacagcgattcgtcccaagacgatcctgagttcattttggaggcctcactagagttgccttcacgagcctgtggtcaggagacaactacaagacctaggtcgattggagtacaagaacgacctggaagacaaagagacttgcgtgaattattgaataagaggagaataatggatgtgggaacttctagagaagaccatatccgagtaacagaagctccatctgggatgcagaccaccactcatggggtcaatcaggcaaaatttgataccttgactgctttagtgaaggggatcacgacacctaagttgtatgaattcgagctttatagagaacaacgctcgccactctccaaatgaatcaaagctcttcccattcctctgaaaacccttcctggcattaatacaccgagaaggaagatccactttctcacatccactactataatatcctaagattaaggaaatggattagtgaaccctaactagtcgattatgtattattatgaaattatattattatataatctattatatgtgaattaatttgataagtgacatgttaagactccgttggtgagccaggggcatttttgtaattttgtccaaagaagggtaaaattgtaattttaatattatgacgtgcttgtggactatattattatatagtttacttgttttttcccatttcaggtattttctgacaagtcagcgcggtataatcataattgggtattttgggtcgaactggttcggggccgaaatacattttcaggattttatattggcattttattgatatatgaatattctgaaagttatttgaataatgtggtatgtgaaggaaatgacaacattgctcttttatgcatgtttatgtggtgtttggccctaggggcattttggtctttttttttaccatttagtgtattttcaataaaatggaatttggaggaaattaaatgtttatttttctaattttctttggcaagaattgacctctctctctctctctc

SEQ ID NO: 53898 - DNA, 1065 bp, Cannabis sativa
tcatccttcattgtatatttcaaatacattcaataaacaaatcaaatctggtttttcaattccagcaaaccattttgtcatatatgtcatcttgcaaaacaaaggaaattgccctttatctcaaacaataacttcactgaaaatgcatttgacttaatacatttggacatttggggccacttccatgtcaatagcatagaaggatataggtatttccttacaattgttgatgatgcatctcgatttacttggacatttatgcttaaaactaaagctgaagcacaaactgtttttcccatgttatataacatggtttgcacgcaatacaataccccaattaaagcaattcgatctgataatgctaaagaacttgcaatgtctgctttttatgcttctaaaggtataattcactaccactcttgtgttgaacgtccccaacaaaactctgttgttgaacaaaaacatcaacaaatacttaacattgcccgggctttatgctttcaatctcatttgccccttgtttattggggatatctaatttccactaccacatatttaatgaatagaacaccttctgctctatttcatggcagcacctcatacgaaaaacttcattcaaaactccccatttatgatcatcttcgggtttttggatgcttagcatacgcttctacccttacctccactgggaataaattctctccaagaagtcgtgcatccgtctttattggatatccacatggaatgaaggcttatacccttcttgacatccaaacaaaacaaatatatcattcaagggatgtcattttccatgaaaatgtgtttccttttcttaatcaaggttccaacgataacattgatatgttttttcaacaacattgcataccagctcacatagccattactcacaccaacaaggaaacaaaaatagcaattgatatcccctcggtttccccctcagcagtcacagctggcccttacaacattgtacctgacgtttcagcaaattctaatgtcaataaaccagctggtgttgttcccacatcatcaaccaatattgagcat

SEQ ID NO: 53899 - DNA, 987 bp, Cannabis sativa
tttctaaggccttccttgaattttcagctaggtgagggcctccaatcatgatctctagcctgcttgcaattggcccagactagagaggtgcattacccccagctggtgcttcaggtcatacataccactgaatagtagcatgtttttgtctgatgagaaattctatctaatcctgcaacttattacactcattagtgtcatgatcctaattattgtggtagcgaccgaatttgttcatgtctctcttccctgactctttgaagggaagaggtttgcgatacgatattgttgactatgtagtcatatagatctccgctcttggggccaagagaatggagtaggtggtgaagcgaggctcatactctcgtaagggcttgcctctagtcttaggattctttcaactgggggagttgcctgtcttaggattgttgttttcttttttccctctgttttatcctcctttcttcccattctttgtgccttaataacaagggcttcagaatctcgtgatttcttcttgccacccttcgagcccttggctcgggtgatgacttcttctagtttgataaagctatctgctctatctaagaagtcattcatggtgtttgctgccttgagatgaaggtcagaccacataggactcatctccttgagcccagttgctagtgccattacccttgcgtcctcactaagacttttggtcttaattagcagttgccttaaagaatcattggatgtagtccttgagaggattcgtctccctattgcttgacatccaccaaatcattgggttcgatttggcatttttggggaggagcaaatttgttgccaaaagcatccactagatctttccatgagttaattgatcaagggaagagcttaaggtaccacaactaagctaggcttgtcagtgtagcaagggagattttgcacctgacatcatctctcacaccttggagatcggtctgcactttgaagtagtggatg

SEQ ID NO: 53900 - DNA, 1296 bp, Cannabis sativa
  modified_base (1203)..(1206): a, c, t, g, unknown or other
gggtatagaatatatagatttaaaaaagtagtaataataataaaaacaaaactaattctgtgatgaatcataaaaagaattaaaaaaggcaaacattgagagaagagtagggatctgggtgggaaattgagaaagcaaagcaaggacaaaagctacactaacactatctatctgtaatagtggaaatggattttttttttaggtaaatattatttttttactttatgtttttgtaaaagttattaattaaacactttgttttgttaaataataaaatgaatcttgtattttttttaaaattatacaaatagaaccctaaattgattatttgtcaaaataaaacttaataataatctaatttagaaatgttacgacaaaattgattatatttttttatatctgtgttcgtgttagaaattgtcttaaaattgttcatattaaaaattaaaattgttaaaaattaagctcaatgtctattttagaaaatataagatctattttactatttaacaatatagatggtcaaattagtaatttttgcaaaacacagagtctaaaataatatttactttttttttagtattactattagatattagtgtgtattttttaaaggtggtgcttcacaaatgattagcgatattttttaagaattattttttaaaattatataagatttgatacttaattacactaatagtagtatgataccgagtgctagacactaataacatattttaagaattcttatttttatttggggctttttttaatgatcctctgtgatgtcaccctacctttgttactgtacatctctcacctgatttcaagtgtcatggtctcccattcctttctattaatatctattatcactattcactagtctactctacaatatcagccattggatttggatgggctccaaacatgtctccctattggattctgttcatttttgttttcttttcaagttttggtttttgggaaaagaatagaaataacaaaataaaaaatgatgcttttatgataagtaacattgaaatttttagactttgatatgaaaaatatgtaatgcaagtcttttgttagtattgtcaaatctctagtactatatggacattgtttgttatgatgattacatctaattttagtttggttgtaattattttaaaaaatttattaaaaattagagtaatttgcggnnnnaatacctaagttttatgccgagtagcagataaatacttaagtcctatttttggcggtaaaaataccttccgtcactactctggaacttcc

SEQ ID NO: 53901 - DNA, 1738 bp, Cannabis sativa
tggtaaaatatttccaacagaactggacttggaactcaacatgaaagttttagatctcgttcttagctttccagaacatcttgaatcgtccaactctgagcaataccgagagagttatggccaaaatactatcagttatcacagcaggaaatttctggaaaataaaagaaaaaaagatagtttttcaagtagggttgcgattttttttttaatctttttttaaagatgagttatcttttcttttagggagatatttcttaatactataaatagaatcctaattctaagaggattcatctatcttttcaagcactataaataagacctcttaggttatgaatttattaattctaaagctacaaattagagagagaaactcagggagagagcaaggaagaggcggagatcagcttcgaagtgttcttcattctagttcttttcttctccttctaatcttattaaatattatgattttcattataatgtctaattcagagtagttttcttttagttaagggttatttcaaaactcgaaacatgaattcttaatttcattattgaatgttaatttctagtttccaccatatcaaattgcttctatttttctatgtcaatgctatgattattgttttgatcttgtttagatgatcactatattaggttttactttaatctaccgtcatcttaggattactattcacctaatagtctaggattctaagtgtttgtgacaaattataatttttatttgtgatgaagaatagaacctacgttaaataaattatatgcttcattgatttgttgcttagattaatctatctccataaaactcaatgctttatctaagttaaataaattgtatgcttttgtggatttactgcttaggtaaaagaattaattattgagtgcttcgccttgattccatacaatagggagattgagataattgactgctttagcattatctgcgggattaatagtttgattggaaactgaaaattacattcattaataggaatcatgaacgattgtcaagggtggcaaataacctttaactagtttctcatatcgtattctcaatttttctttatttttatcttttttttatgctatttaattacaacttaaaacttccctttaatttctgtttgatagtggataataaattaatcatagtcctcgtgggatcgacccttacttacaattatactaaaataatttgaggtattagaattaaaatattagtaaatttgttgtggcttacgacacgcatcacctacattgctggcttgcataatagttttaaaattactcaaatggctcacgagatccatagtaccatcatatggggacatatgagggtttttgaatcatcttgggtatggtgtgtttattatgtcaggatggaaatattttagttcctcatccaagtcatatctgggtaattttaggataaggatattacctcttaatgtctatcaggaaatccttgcatcttttcatataattgttcgatcatcaaatccaaagctttgtgggcttgatgaagaatccacaccaaattttctagatcaacctcaacacttaagatgagaatgagcttatatatcttataagatgaatgagcttttttaattacagtgtattctcaacttatgaaacactataatagagattgggaaaatcacacaaccacacacatagtagtgtgttgcgtgtagatatatatatatatata

SEQ ID NO: 53902 - DNA, 868 bp, Cannabis sativa
acaaaaaatctatttttttcctatatttttaatgtaacgactgaaaaaaaaaaaactgtcgctgaaaaaaactaaaaaacgtaaccaacctataaggcaccgtcacctatagtatagggcatggtttaaaccgttggaaagtccacattagtgacggttttgaaccatcgcctattctgtccgttttgcgatgatcgtataagcgacggttatagaaactgacggaaatactttaaacgactgtttaaaaatgttagaaaaaatcatttttgtagtagtgatgtctaccattgtaacattttaaggaaatttgccacatgaattgtctatttttttaatagttaatatgaataatagatagattacagatgagtatatgtgaggacataaattaaaaaattttgaaatgtggaataacacattataaagtattgtattatattatattgtatattagtaatacttaatttgagtcagcataaaaattttagacaactattctaataagctaattttgattcccattcttattattaattattaaaaaaaaataacaattacctactatagtaagttatcttaatgtttagttttattttttataaaataaaataatgattcttttcttatttatactttacctatgaatagatattttaaaaaattactgttgaataaattttttatatataatgcacatatttttataaatatacacacaaccataaaaatacatatatattatttatacgtactctatatatatatatagatttaatataaaaagttataaacattaaaaaaaaatatagatatatatatacataaatacacaaaactatacccaaatcaaagtatacataaataa

SEQ ID NO: 53903 - DNA, 841 bp, Cannabis sativa
tttattatatataacataaatgattaaacatataataatataaagttatatacttaattgttagtttcaaagtcatatatattgtgttgtgcttcggtagaatctgatatttttaatttttattgactttgaaaccaaaaaaaaagtttggccggtttgggtgggttaacccgaccaaaccgcccaaatcgttggtcggtttacagattttatttttttaaattggacgggttgcacttaaattttagcaacccaaactttagattgggttagaatatatatataggatgaactgcccaaactgaccgatgtacaaccttaactagtactatcatagccatcactatcttctccatcaaaaactacatctgtatttccacttttctttgagatattgtctttcaagattgggaaatcttttctcaaatgacttgatttgttacaaagaaaacatcttatcttgaacttggcattttgactttcctttgtttgcattgctttgttccctattttctttctttgaaccctttcaccaaacaaagagcccttcaccagcattgtcttcttgcttgtctacctttctcttcatcttctttaacattaaagcactatgaacttcctctaatgtcaaagattctctaccatacatcatggcatcaacaaaatagtcatagctttttgttagaagagaattcaacacaatgattgcttggtcttcatcctccaccttgatcccaatattctttaaatctaggatcactttattgaaataatccaaattcttatcccaatttttgtcctcctaacgtggcagtgcttacgtagacaaaatcagtgtcac

SEQ ID NO: 53904 - DNA, 1586 bp, Cannabis sativa
taaaatagtcttcccgactaattaataaaaattttgctctttatttttacaattaccaagcaatctttcttgatagttatttcaccatcttttgcaaaatagccacaaccacgagtatccaaagctcccaaagagattaagctcctccttaatattagaacatgtatcacatcaattaatattctcacaataccatcaaacatcttaaccttaacaattcctactagaacatctttagagctagaatcatagtttaaaataggataaccatcatatgccttataagtgtcaaatcactccttatatgggcacatgaggaatgaacaacgagaatccaaaatctaagagagaaaaattttcatcaactatgacaaagagaacatcagtcacgttcaaaacattcaccaacaacatttgttgaatctgatgtgtcttcacatattcttgattcctagctcattgcttcaaggtgtttggtcaactcttcacaatttcgcctaacacgtgcttttttggaacaatagttgaactccacttgcctccaagagcgtgaatgaggctgattatctcttctgtcatcatatctttatctcaatgtactcctaccatgacttgattttgacactgtcacaagagattgataaatatgagacataccacttggttacttgatcatattatctgtctccaaaagagtaaagcagtctttccaactaaaagtgtagtcattagtgtctcatatgattttgctaatgaagccaaaaaataataattttatcttcttcatcaaatttgacctctacacttaacaattgagttatgaacttattaaatctatttatatgatccctacaatcatctccttcaatcattttcaactcatataactgcttctttaaatataatttattgttaattaagaattttgacatataaaatttttctaactttttccattactcaaatagaaatgtttcatttaatacactatacttttattcaaaattcaaacttaaatgaatagtacttatcgctttttgcctgtaactcctcacaatcttcatcagtcatacactcatgcttttttccctacaatgccttttggggttcttgttgtaccaacacatcttttactatgctctgtcataaactgaaattgttattcccattaaaaataaactcgatctcaaatattttggaagataccatcttcgatattttcagtgtagatttgaaccttggctctgatataccacttgttgagaaaattgataaacttcaagcgcaataatataataaagaaatgaagcaaagtaattttactccgtcacttaaaactactacacacaaagagagatatatttacttatcaattcaaaattacatttaatctctatctcaatctctccgccaaaattccaatacaccctctacttcttcctcactctcaccacacaacaaactcatactcacttctcttttcacaacctcactttttttctccgcaagcacgacacttcttctctcacatacaaacatacaacacacacatatatatagaaaacaaaaatatataaacttgggca

SEQ ID NO: 53905 - DNA, 2486 bp, Cannabis sativa
attaaagtcttttattgtctttatcttaaattattttaaacagactagctagtgtgtcgtctcgagaaatcggggtgttacaggtactacaaacttgtttggggcccttccttctaagggcatcagccactaccttggctttttgaggatgataaggaatctcacaatcgtaatccttaactaactctaaccaccgtccttgtctcatgtttagatatttctgagtaaagaaatacttgagattcttatgattggtatagatttcacatttttccccatagagataatgtcaccatatcttcaatccaaacaccacagctgcaagctctaagtcatgagttgggtcacactgctcatactcttttagttgataagaagcataagcgatgacactatcagcttgcatcaaaacccattccaaaccctatctaaatgcaccacagtaaaccacaaacttttctttatctgacagtaaggctaacaccaatgttgtgattagtcacttattcagttcttggaaactgacttcacacttatcataccacataaatcgtttgttcttcttagtcaattctatcaatggcatggagatcttagaaaatccctctacaaaatgacgataatacccagctaatccaagaaaacttctgacttcaaaactatctttggtcttggccaatctctaactaattctatctttcctagatcaaccattatacaattctcaccaataatatgacctaaaacggatacttttgaaaaccagaactcacatttcttgaacttggaatacaacttgtgttctctaaatcactgtaaaacaatttggagatgttgctcatgttctgcttctgattgagagtataaaatgatgtcattgataaacactatgacacagttattttgaaaatccttgaatactctattcataagatccataaaggctgctagagcataagtcaatccaaataaaatcactagaaactcataatgtccgtacctcatacgaaacgcagtctttggaaagtcttcctcttggattctcaactgatttaacctgagcaaagatcgatcttagagaagattgtcttcccttgaagctgatcaaacaagtcatcaattcttggcaatggatacttgctcttcactgtaagcctgttcaactcctgataatcgatatacgtctgacaggatccatccttcttcttgacaaacaatactggagctccccatggcaatacactgggttgggtaaacccaatgtctagcatctcgtgaaattgaactttcaattccttaagttcagatggagccatcttgtatggtgctttagaaataggggctgctcccattatcaggtcaataacaaaatctatttcctgctagggtggtaaaccaggcaatttccttgagaaacacatcctagaaaatctttgaccactctcacatattcagacccaattgttttgagtctacttgtatcagtcactattgctaaataacctatacacccatcttgtaataagtctctagctctcaacactaatatgattggaattcaagaacctagaactgctcccacaaatacaaatggcttctaacctaccagttgaaaagtcaccatctttctcatgcagtcaatactacctgcatagttggataagaagtccatccccaaaatgatatcaaagtctctagggataactcgatgatcaatacttaactccctatcatacatcgtgattggtacagccataatccaccttttggagataactaactccccactaggtaaaagggttccgaaccctagttggtaattatagcagggcctacccagtttatcaattactattgatgcacataagagtgtggtgctctagagtaaaataatgcagtataataggagttattaattataagttgacctggcatcggcatctgcctgagtgatggaaaatacccgagtaggagtagatatgaactccttctttggctcttcccttttcaactgagggcactccctcttaaagtgtccaaattgaccatactagaagcaagaattcttgttgcattctcccaagtgatgtttcttaaaacgaggacattctgggtacgtaaatacaccttgacgatcaccactccgaccttgattcccgtgaaacctcttgttgtgtctagaacttcttggtgtgaaaggattcttccatttcgaatcaagaactgaatcacaactactcctacccaaaccagaaggaggaggggcagtgactccactagaacctgagtcccgcggggcttatgcaagaactgtataacaccttcagctcggagagccttctctaccattagtgcatatgtggtagcattgtcagtcgtaattgtcaaatcacgatgaatcttggcattaagcccacctaggtatttttttcttcttagtgtaatctataggtactatacgtgaggctaatctggccagtcattca

SEQ ID NO: 53906 - DNA, 600 bp, Cannabis sativa
ctaaagtaatttacatggccaaccatgctactatcccatacaagaagcctcctcccatgaagaaggacatcaacaagagggacacttctaagttttgctgatttcacaatgatttcagccatgattccaatgagtgtatgcatttgaaaagagagactgaattcctaatcaagaaaaaaaatcctcatgtacaattatgtgcaaaatgaccaaactcaggcacaagttgcgtagaatagagaccaaactcaggcaaagacttaaatttataccaaatatttcttgagttgttattctctcttggaccaccactactaatctaactctaagtctaatttgcctaaattaaacatatacaagtaggagatttctaagatagaggatttatatcatttcaggatagaatgtcgggaatatagtcatttgcgccgttcaatttcttaagagaaaacagaatgacaatataagcaaatgattcataaaccattcatccaatgatatactatcccagcaaattcgaaatgaataagccaagaggaaaaaataggataatttcgattaaaataagaatccaacaatgtcctggtaggcgagagtcaa

SEQ ID NO: 53907 - DNA, 1339 bp, Cannabis sativa
atgtattaaaaaaaaataaacaatgaattaaattaaagcaattaagaataattaaataatagaatataaaaaatataaaatttaaaaaaaaatactagatttatagaggtttgaccccttatagttggtaatagcctacttctatttttattgtattaacttttgagaagatgaacaaagatgccttgattcctctcgaaagctcttacagtgatttctgagtaatttacttttagatcgagatttctttcttgagtattctctctctataaaattagtgtccctaaatagtgagatgagtttattatttacaggagttaattacatgaaattaattttcctaaatcaataagaaataaaataaaaaactagtttaattcccataattacgataaagaaagtaggaaacttagactaattgtttttcttctctgaagatgcgaatccatcccatgaatgtagggattatgccgtgacttgcaagcttggagatatacaagatatatctctgaaattaccaattgacattccctcattgatgcatgtgagctacctgcttgatagaaactggttggatatatattcttactctgctctgatatcacaacttctgcctgtgagcctgagaatcaattctttctgtacgacttactaagagtagaatcatccactcagattaggaaataatgtttaattgtcaagatggaatacatcaaacttgtgacatatagtaagagtaagcctatttatgcataagttaaaaattttgttttttttgagatataactaatgaaatttatttctggccacgataccatgaactagtaacaatctacaagaatttttgatattacgtgttaaaaccgtgtgtttttatttttcgtacattattgttttttactagttttttggtttataattatagaatctcagtctgtagctacaaaatatatcaactttattcttttgtattataagtacaaaatttaaatttctttccctcaagcacaacaacctgctcccttatccctgtcacaacccaccccatagccatatcatagtctgttgctcccacacctgagcacctcaaactagcagagagcaagtctctcttcttattgttgtaatcatcgatcatttgccaccatcaataaaggattcaatctttttatttatgtgttcatggagtaggtaacaatggacttacaactttgttaatgaaccaagtaataaatatttgttttaaccttgtttttatttttcatgcattaattttgagttttgttttatcagattgtattatgttgccgtacaagtttttcgattgatatttgttctt

SEQ ID NO: 53908 - DNA, 1063 bp, Cannabis sativa
agaaagaaaagaaaatgtcacattatattttatattaaacaaaaaatttaaggtaccttctgttatgcccaatcataatagtaatcatgtgcttaaatatctggtgtgaggcaatactccttgacaatttcattcaccaatttttgcttcatgtccttagaaattgatagcgtggaaagtttttccttcacctatgatttcaataactatgtcaattaccatgattctcacgagacaattcaagcacaaacacagtgataaaaatatattaaggtttcccaaacgacaatcagtttctacaagtacaacctacacgattcctcaaaacaaaaacaaaaaaaagaacaaaaaaaaaatgaattttgacgattacacatcaaccattacaccttattgaacctctgaaataacaatggagaaatcaaatttaattgaatcgaattctcgaaagggtcataacaaaataactttcgaacctcttatataacgcaattcaaaggacttgagagtggttgaagggtaactgaagcttgaaacagtaaaggtgttgaacgaaacttgttcaccagaagaaaaacactggccaaagagaccaaaatatagcagtagtacactaaaaatcaatgagttagagcgataacgaactgaactgaaacacatttatcggaattcttcttcttcttcttcttctatctttactgttatatttttttccttggtctagtaaaagagaagattaaaataaaatcagaacccacatatgtttaggcacattatacacttgtctcagtaatatttctttaaaattaactattaccttatctcaatttttctattggtgaaaaggcttataaggccaacatcagtggaactatagaatgttgatgcccaacaacaagaagattgaaactttttcttgtagatgactttgttaactctctaaaaaccaaagaacaaggacaacacatcatgaaatttgtctaagtttttctttagaaattgaattagaagactagttgttggaaatattttactaggatctagatttacaaccatgtatgtt

SEQ ID NO: 53909 - DNA, 860 bp, Cannabis sativa
  modified_base (260)..(280): a, c, t, g, unknown or other
ttttcctttccgcagggaccaggagattggatctagccgtaagaagaatgcttggctgataaataactcacttcttggtctaaagttcttaatattagttgagtgctcgattccccaatagattgacccgcaataatacctacagcttctcccaattcgacgaggtctccatgagtaggactctaaccataacataatcgatagatccaagatgtacttttacacgtaaatggagttcggatagagatgggttgtgtttnnnnnnnnnnnnnnnnnnnnncaagtccaataccaatatcttgattttgaacgacacttttccattatgaacagtaatagtatgcctaatcattgtatggtagacgctcgggaccaagttactattatttctttttccgcttttgtgttaagcatattcatttttcttaataaataattgactacaaaaggatttttttttagtgaacgtgatccaattgcttcaatttgaattatccagaggatgccattctagggatttctttatagttagaatagattcatagaccaggttgactgatacattttaaatttcaaacagttctagatggccctttcctattccagatatttcaaaaagaaataaataattcaatgatttgatcaaataatatcactatgggtcaagagaaagtaatagtatctactcggccactactgtgaaaatgtgttgtcagaaatggaccataacggaatttcggtctatgccggaactataatattaaattggggaggaagattagaattagagattgatagaaaagtaatgatatgggctcgtgtgagtacgaaatgaaaaatatctattctatatttttttt

SEQ ID NO: 53910 - DNA, 878 bp, Cannabis sativa
aacaatctcaatagtttagggagcatttttaacgacattaaaagttcagaaggcataatttggtacatgtcaaagttcgggaggcaaaatcttaattagtcttttccaaaaggcctaaaagtatatatatgtctagtctttctttatgtccttaattcatgtttatgtatatgtttcaggatatattcctagcaggagtggacacagctgcactaacagtaacatgggcaatggcagagctagctaaaaatccaagagtgatgaagaaagtacaagatgaaatcagaagttattgctccaagaaaacccaagtcaagatcactgaaagtgacattaaccaacttgattatctcaaaatggttgtgaaagagactctgaggttacacccagcagcaccacttttactcccaagagaatgcatatctcaattcaaggttggtggctatcaagtttatccgaaaacactcatccaagttaatgtttgggcaataggaagggatcctaattactggcataacccagaagagttcttccctgaaaggtttgttgataaccccattgatttcaaagggcaacaatttgagtacttgccattcggaggcggtcgaagaggttgtccgggaattgtaatggcactaactatggtggaacgcacactagccaatctgttgtgtggttttgactggaaattgccagatggaatgatggagacagatattgacatggaagaggcttctggtcttacaacgtttaagaaatctcctcttaaacttgttccagttagctaccaatggccattaatatcagaccttcaaacttagccaaaggaaatatggagctacggctacatgcttgcattttgcatgaactttaatttt

SEQ ID NO: 53911 - DNA, 908 bp, Cannabis sativa
cttttggatccaaactcaagggctacctttccataattcgttacttgacaacaccagtttgtcattgttgaaagttattttaagattgttattgatgtgctaaggggttcccatcccatatgaaagctccataatttatgtactagcttgtggaataattttgtctaggtcttttttgagttgtacttttgttaaaatcaatagagattttaacattgtagctcatcaagtggctaaataaagcactagcacaaaactattctggttttgtggagaaatcttctattctaaattatttattaggggtattcatccaatctaatatatattattttgttcataatgcatccgatccgcactaatgtgatgtttggttaaaaagaatgaaaacataagaataggagtgagaatgggaataagaataggaataaaatttaaaatgcataaaaaattgataaaaaaattattaaattttttctcatcatgcattgaaatgatgtttccctccatttcaaaatggaatagttattccaccaaaatagtaaaaaggtcattccattggaatgacattctaatactttaatatgcaactaaacaaaggatttgaatgaagattattttctttccatttcattctattttattacctccaaccaaacgtcacctaagtggaaattttcatattttggatccattcaatccaatcaacaaaaataaggattggatcaatcattttggattgtttactttttaatattgagttagttaatatttattaaaaatattttttcccacataactaacaacaaaataaaataatttattgttgttttatttctctaacaacaaattaaaataaataaaataaaaaataagattataaggaaaaagaaaatttgtgtgtataa

SEQ ID NO: 53912 - DNA, 2023 bp, Cannabis sativa
atatttccaattcaaattcaagaagaagcaacaggttgccctgctgcataatttccaggtctgaaatctgaaacgctgctcaaaatgtgatgtgatgccttttcgaaactaacaaatcccatgaaccagaaatcatgcccatctgaggtaacaatctgaatatatttctctggcggactttccttcatcgtcactgggttcacattccctatgttccccaatggtatcacaacctgttccatacagtacccaaaaacaaaacatctcattcaatataatgtctcaaacacacatacatatataaaaatggttcatagttcataccttgtaatagctccaagcttcttgtccagagggagcattgaaaaacagaggcctatcactacagaaagccaaacgagctgtggatagataaagggtaccagcaacaggcccggtcgatgtcgaaaggtaacaagcaaaagtcttcttaagcttctcgttcggctcagttccgaatatctgtttgaacagtgactcaaatcccccttctgtgatcgctttcgccgtaagattcactttcccccacgcagcttccgacactgatggccctgtcttcactgcaacacaaaaaatcactactttatcagattctaattaaagacccaatttttaacatatgagaaaacaaaaaaacttacggttgtgccaaatgtttcgggcaattgtctcggccttagtgctccaagtgttgaagaggtgtattactggttcaaaggggttgttggtgggcttttcgatcggatcatactgcacatacggttgatggtagacctgttgatggtcgccggcgctccacaaggcagccttttgattatctgggtgtacaccgggggaggctggtgctcccatcacgtgggttccccatttctttgagtcatcggttgaagaaggaggaggagtgatgatgggattgtgaggctcagactcagcttcttgttttagttgtggttgtggaggtgacgatgatttgtggggttctgttgttgctgacatggttggttgaattttgatcaaagagaaagagggatgatttcaaaagtaattactttatactaatgagaaagaaaaagatttgtttgatgggattttgaattgtgaacgtaattagtgttttatataaggattaaattaagactgagttgtttttgttctaataatacgcggtttggttttgttttctttgcagcgaaggatatgaactttttaaactttcttgactggttgtttcgggagacccagaacagaaggttctagttacaaatgagatgagatgggacgattgttattatgaagttttgatttgtcaagattaatatatacttagatttggataaatactatactagattttagccacctgtgcataagtgtggcacataataatttttgttttatattagctttttttattattattttattttgatcgaacattttattaggttggtattgaaagataaattatggtactttcatctctttgcttatttcatgtagttttttcactatgagacaaatcgagtttccaatctaataaaattatctcataatgaaatgtaataattgtggggttaggtttcttccaaatattatgtattaaggacttgtttagtacgtggtattatagtgtattgtattatggtagattgaattgtgttgtatggtattgtattagtgttatttaagataatactatacctgatattgacttgtattaatagattgtgtaaaattataatatagtttcaatacactcgactccaacaccaactacaggtccaggtcgcgggtccttggtccaggtcctaggtttgggttcaagtttgggtccggatcctgggtccgggtccaagatccggatcccggcactactacaaaataagcctttaggggcttgtttcgtacgccgtattgtaatgtattgtgttggattgtgttgtattgtattgtattagtattatttaatacaatacaatgtttg

SEQ ID NO: 53913 - DNA, 1295 bp, Cannabis sativa
aaaatacaaatatactaataataccaatatctgactggaagaacaagtctcattttcttctaatagcaataataaattttgcattcctataatattatcaaaaataaattaaacagcacatacatttcaccacttcataaaaaataagaattgcttcaagtttcgaatgtggagctgattgcccaaattaatatcccatactagaccacagaccactaatcacccccacaataatattagctttaatttctcctttcaagatggatagaaaatatcaataaacaatcaatttcaatcttatctgatcctcatatattgttgatagcaagcacaacaacaagaggagattattgtggagctgactttgatttgtacgaaaataacatctattcaattattctatacctctaaaatggtaaactagcttgatagttgaaaataaatgatggtgttaacagtaggaattaacagcctagcttgatctagaccaaattatgcagagcctaaaatttataaacttcccactaactcactaaaaagaaagttagttcaagatcaaatgcacaaataattattagtattacttagtaatataaatttaaattattaaggactaccaattatgaatagaaaaaacttgaaccaactgtgctatgatcttgaatttgaacttttatatgtctattaacatttgaaggaacataagaatcttccttcaaaaagtcaggtactgccacaaagaatccaacaactgcaactttctctgccaatttacttttacaaaaggcaaaaactggtattagtttccaaaagggtacacatgcacaacatcattaacacagaattaaggctatatgtaaattaaatcacattttcatgtagtcaaaaattgatatgtaattgcataagagtgagcctgcattgtcctttatcaaagtttttcctttgaatcgagcattccaattaatcaacaaagcattctcatcccattattcaaacccattaagattttttttgggtttgtacaaacacatacacaacagaatagaataaacaaatacaaacataaaaaaaaagtttacataaatcatgtgaaatcaatcatacctgtttcggttttccaaacaactattgaatactttagaaacgacactccaaggcaagcttcgaatctggcgagaatagtattaggtaaaaaatgcagaatccatttcagagtaaaaataccaaaataacattttagagatcaaaccctaaatttcatttcagaaattaaactcaaaatctttcagaga

SEQ ID NO: 53914 - DNA, 1622 bp, Cannabis sativa
  modified_base (152)..(157): a, c, t, g, unknown or other
  modified_base (1455)..(1465): a, c, t, g, unknown or other
gtaaaataatttccaacataaggtgcatcttatttttggtagcccctcacgaaagatctcgacagttaagcgtggttgacctggggtaatttcaggatgggtgacctatgggaagttttcccaagaagcgcgcgagtgaggacaaagcacgnnnnnnacacttgtgttggtctgtagggtcagtcatcattcaatgaagcagccatagtggcgtactcgtgtataagagccatgattccgtaggtgtaagggcccaatggaggcttgaagtaaggacattacataattaacctattacagttattcaaaaaaggcaaataggcattcacaattagggttgttcatgtgagggaaggctacgttcagtatgtcgtacaaattggatagttggatatcggatttatttaatttaaattaaataaataattaaattatttttgaaaaatctaaataataaaattattatttttgaaaataataaaataaaattaaataattaattttaaaattaaacctataaatttgaaaaattaagtttttaacaaacctaaatatctattcaaaaaaatgccaactaaggttttaaaatttatgttatttttgaaagaaaaaaaaattaaatatctaataaaataaaatgataaacaaatatcatttatctaattttataatttaatttaactaaaacaacataattttgaaagttgacaaaaaaattggttagattttcaaaattttctaaattaaaatatattttattttaaatttcaattaaggtcattttataacattaattaaataatataaaatataaaatatctgaccttaatttttaaaataagataaaataatcaaattttaaataaggtaaccaattaagcaaaatatcagattttatccattttcaagttcaaaatctactaatatctaaaattaattaattaattaattttattcttataattagatttgagaattgaaaaaatctaaatacaaaattatacaaaaattcaaaattatttccatgaaaaagcatgaaaaatgagaaaaaaaaccaaaaaaaaattacatttggtgaggatggtatgcagtgcataccatccgcgcacgcgcatggtggggatcagccgagaattatcgcacaaccatgctgcatgcaggatttctgtgcacgcaggtgggttgttgagacaacctgtgcgtgttttctcggacaaaatgtctccgaacatgcgtgctgactgagtgacactcgattctgcgcgcgcacgtgggtgtatcccaccttgatattttggatttttcaaaaaatcataactaattcaaataaaatcaaaatctagttctgtaaaaaaatgaattgcttaatttttttcatactatccaagaaaaatcattccagaatgaaattctaattattttacgtaaaaaaattgcaaacatcaaacaatcatnnnnnnnnnnntagatcaacatgaatcacatccaagtcacacataaatcattttcaatccatatttcttgaaaacctggctctgaggctagttattggaatatattttatgatgacctaaatttactaacaagtatgtttttaacatcttaaatatgaacttctaaaa

SEQ ID NO: 53915 - DNA, 1375 bp, Cannabis sativa
tattgatatgtatatcatatgctagtaatactattgtatgaaatgacagaatagaaaatgagaagaaacaccaatgaaagacatctatgattgtgtattatacagacaaatcatttgaaagaacaatggagtgattcttagtccatcaaaattactaagacaaatcgttttaaagattatcgacaggttacagcattgccttataattaattacaattctattgtttgtcactacaattatttattctaaatagaaataaaattaagaatctttagaaaccgatagtgatcctaatttgatggtaaaactagcattacacagattaatacataagcttaatcataatcagctcgaaccctagctggtggagcagcaattactcaaatcaaaattttctcaattagtttccctcaaataatcgtatgtatacctctctgcatatccatgaaaaaacatttataaatcaaatctaaaattaaaattacaattaatttctttttttataaataatcaaataccagatcggtgaccaagagaaagaaatggtgacttctagatagataaaatatacacacagatttagaaagaacgtattcagaaattaagaaaaaaaaaagacctttgagcgattgataacacagattcgacgaaggtaggatccgacggaggctcggatggctggaattcgacggaggctcggatggctggggagaagaaaagacgagaagacttttttttttttttttttgaaatgaagaggaagcgaagactttagccttcagggcgagacaatgtttcttttctactgaaatttggaaattttattctattttttatccatcatcagttttagtaagttttttaagcaaaatttttggattattatgctacttaactttttagacagtgttaaaaattggtctttctaagttttatcaatcccacataaaaaataaaatgatgacatgattatttagcttgttattacatcagtgtcgtattagcgtcatatatgttgttaatttaaaaaaatagtttaaaattttttaatttaattttacatcgttatgacaattgagtaagcagtcatgttattattttatttgccacgtgcaataaaatttgacagaatataatattgtgaatagtttatggactatttgtaacggacttaaaaatttaaaagcacaataatacatatatattatagtttagaagcaaaaatcctaaataacttttttactattgttactattatttttgaatgaaaatgtaagcttcattaacaactcaaataagccatgaaattcaaagagagttgaattctcaatataaatacaactactagaacctttcgcatgataatgagtagtg

SEQ ID NO: 53916 - DNA, 1343 bp, Cannabis sativa
atatcacatgcataatatcattgcattatcgatactcaaccaatcaattttttcattatataacaatattaactatatctcaatattaatcaattcattgcaatactatttgtattagatacaatgtactatgcagtacaacatacttttcttacctcaagttctgattcaagtgtgttggctgacctacttggagtacgatcgatgatctcgggccttatgtcataacaataataaactaataagtttttatcccaaaacactgcataacaattgtaaaggacaatctagagtttcctaccgaattctgtagttcaaatacactaaaacaaaagttatattttggctctaaaacatataccatatggtagagctcgtcacaagcttcgaaacggtatatagaacgtctaaaacggacacaccagtgaaaagttatggcaaaaacacgattctcgagttctcgaggctgcccgaaacggtaaaccggttggccataaccgattgaccagtttttcaggagcgaaaatgtgattttccaagtttatgcactcagcgaaacggtatcggaacctgtccaaaccaccccaaacttcatatggcacatatataccatacatactaccatccttacataataaaatctaaaatcgagcctgtaattggcaaacgccactagtgttcggacttaagttataaaaagttctaaactcaatttttaatccaaaatcacctcaattttagcaaaaaaatatcagaactactcccataactacctgagaacaatcctataaggtcagaacctttataactattctaattcgcaaaactcctatatgaaattgattgtttttaaactcaaaatgaaataaaacaccttaagctttctcgctctcagaattcactattccgctactacttgagcttagatcgctaaattttggattcaaaatcaaagaaaataaatatagaagggcgaggatttcatcaaaaggagaagcgagttcgtatattttctgtttaaatatatatatactgagaatttttatatataataatatattaataatattaatataataatatattaacaataatatagacagtaagattaaaaataataataatataataatattaataaaaattaaaaaaattattaatagttattttatcatttctaagccactaagaaattttacttccagagcactacgccaaatttaatatactcgtaattatcccaacacttatattattaactcatcacaatattctcacaaattctatcaattaaacctgttacgacatttctggcccccaatcgagtcttcaaggttgctaaa

SEQ ID NO: 53917 - DNA, 2273 bp, Cannabis sativa
  modified_base (26)..(36): a, c, t, g, unknown or other
aaacctactttttggtcagggtgatnnnnnnnnnnngggaacatggtagtgcaattgaatgggagcgctaaacataaatatgtaatctataagttctatctagcaactagaagtgaaatgatgatttccttcgagcttgactagttttgaactgtaaattgtcagtttggcgggattagtttgaaaagaccaaattacccgtaagttatatttgagctataatgtttaaaaagggtagaatagtcatttcttggtttgtaaatagtttgtctttcagtgaccatttagactgaaaaaaaagaaagttattatttatattaaatattaagttagaaaacctaaaatagaaaactcatatatctctctctctctctccctttctcttttctctctctcgagctaggggtgcacaaaatatgggttgggccgaccaactttgccaacccaacccattttttatgcaaaagggttatgtcaaatatgagccgtatttcattggcttgaaaaatcatgacccgtgtatgtatggtttggttatgggtttgaaaaatctaactctactcaacccaaaccagaccgtgtccacactactaagtcacattacttctatatatattttatataattattgtttgtattatatgtaacaatatgaaaaaatatttgtatatagtaagttaacatatagtgatatcataggtactagtcaactcacttttgcaatattagaggcaatcaaatcaagcaattgcctagcagaaattaatgtacattatttttataaattaattatatatattataatattataatatagttaaccctagtagcacactagcagtataatatagtctagcggactagcactatacaatatacattacaaaagataatctcaaaataacgacaacgctaatccaccaattgtccaggttcaccaaatcttaggtaaaaaccaatcactaccacaattattttattcttttcaagaactagatttatatttacatgtattttttatatttttatactaggtttataatttattttttctacagttctactattgttagagtttcgacaccaatttctaccgaaaactacaacagtaacagtatgtaatatacatacttttttatatatattcatgctcataatttaatatatataattatataggagttaaaaatatatatttaattgtatgaaatcttttgtttgttgtgtttgaatatatgtgtgcgtatatgattattttctatgtgttcttattatattatatgctcaaatatgtgtatatgcactgtaataatatataataaacattatctatatataaataagattatgtattaactttatctgtttatctatatatatatgtatcactattactaatttaaatatttttatcattatatatataacttaatatatatatgtgtgaataaaagtatcttattctagtacatcaatttttattatatttttttaactatattaccttgtaatgtaagcatgatttatcacatatgtcttattttattgatgtataataatgtaaatttattttatagcttctttatttttgcatgcatataatgatgtttttattttttttctctccatgttttatatataatattatttattatcaaaatatatttatatactttttatttagttcactcttcttctggttattatgtgtttgttgataagtttatatactagttgattttgtatattttttatgttgttatttttataggagtgatggagaggtacctttcccctacttctaccccattaggtgaaattcataataagtctaaccctactccaattcctatccctaacactacctccatccctacttccacaatccctattgagcttaagtcaccaaaaaaggaaggtgatgatgacgcaatccactaccaagaaaaaatcaagtagataatctgctgtttaggatcattttacaaaaagtaagagtgagaatccaaatgatcctaggtgtgaatgtaattgttgtggtaaggactatgcttgccatagtactagagtaggaacaagcagtatgtagaattatttgaaaaaataatgtaagaaatatctatttagcgtatctgataagaaacaaaagttattgagttttcaaaatggtaatgagagtggtggaaatttgttggcaatgacctttaataaggagaattgtcaggatgctctagctaagatagtggtcttagatgaacatgcatttacagttg

SEQ ID NO: 53918 - DNA, 982 bp, Cannabis sativa
aaggagcacgaggagatgtatgttgtagagtttttcctgccatactctcggaagctgcccagcaatggtatttcaagttgacacttggaaggttccattctcggaaggctttctcctcggaattccatgcacatttctcttcttctcgccaactcttattgcatttagaagacctggtcgaagtgaagcaaaggccaggagaacctctccgagcttatatcagtagattcatgacggaggcgacgaaagttgcacggttaaccgaagaagggaaattgactgcgatactggggggcatcgaagttctcaaagaactttggaaggatataaaaagaggcagaccagtagattctatgagtgacatcctcgatcgtgcagatggcttcatcaagcttgaagaggccattcaacgggcagaaatcgagcttaaaccaaaccaaccacaagctccctctgctagaacatacgttcagccccctcagtacccaagcaattcaagctcgggcggtaaaaggtctaacaacaacaacaacagacaaggcaatgggaaaaagagaaagtttgttggaaaagccgaacaggctcccaaagaaaatccttccaagtttactactttctctgtcctgacagaggatttggaaaccatctacatggctactcagtcattagctctgtataagaaacctactcccatgaaaaaggacgtaagtaagagggacatgtccaagttttgctattttcatggagattatggccacgacactaacgaatgcaacaatctgaagcaggaaattgaattttcaataagaaagaataaccagcacgtgccaaaatatgtcaagtccaatcaaaattagagggccgcccagacggataataatcaagatttactatcgccaccagtgggcgggcatttacaagtcattattagaggcccacacatagctggagtgtaacgccctgtccaacagggacgccacgt

SEQ ID NO: 53919 - DNA, 1525 bp, Cannabis sativa
ttataataataagaattttcataagttatgaaagaaaacaattagtgacagaattttatatagattatgaagccaataaatttatattgatcaatacaatttttacaggtacaaattagcaacttgaatcatgaaaatctagaaagaatgaatagaaaactcaatcattactacttgtattttacacacatgtaaatcaccacataaataaatatttttctaaccattttagccacaacttaattaaaacaaaattgtatcaccacagtcaaaaaagtttaggttgcgtaatattataaataaaaataataatgatatatattagaaaaaaaaatgatagaaaacttccttgatatgttcttgagagattgattgaggtggttttggaaaaaaaaaaaaaaaaaagagaaactgagaatagaaaagagggatgcagtgattgagattgttttggaaaaaaaaattgagaatagagaagagggatgcggctgtgaaggttaaaaaaatgaattattagggttttgggtagatgttttatatgatggcaatattgtcttttaatttttaataataaaaaataaaataaattttgaaaattctcattacccgtaatggtatacctgaacaaaataagaggaaaagtattcccttaactttctcctaaatttatgttaaccataaagcattcctattattaaataaaagtaaacaaaagaaaaggaatgattaccctatatcacattcccaatcctgataagtaaacatgccataaatgaaacaaaatggcaaaaattaaaacattaaggcccacatggtgatttcgcccaaggctttggttttgggtctattatctttttctaaagctcacttaattctaaaccctaaacctatagagactctataaaatgaatattaaggctttgattctcataacatgttttgtgtaccaaaaacttagaaaattgaataagagaaaagccttccttttccttctagtaatttctagttctctctttctctctctctcaatttcaagtcttataatattaagaaattgcccacacaattcaaagtaatactcagatttgtgtggaagactgtgtagaagaaattttttgtcctattaaggaagcaatctaggttcaatactcggtgatatcctgctataaaaaagaattgagggttagggtattgaatgaaaatttcgctgccatttttgtaagtaatcttaaactctaaggtgtttaactatcgttttatgaatttcatattttaggatgttagattatatactgtacaatcaaacataaatgttggtaaattaagatcttggtaaaatatgttccaacagctggcctcagagccatgataattatttactttcatgaaaacatggattcaaaatgatttggattgttttttatgtgatttggatggttcatgttgagtttatggtaaagccctaaataaaactctatttcaatataatctctatcatttaaatatcaataaagagacaaaagta

SEQ ID NO: 53920 - DNA, 1270 bp, Cannabis sativa
caagaattgccgttaaatagacacttttaatatataaaaatatatattttttatttctattattaaatatttagctagaatcctaaaaaatctgatctctctccttctctatatatttattgatttattttgatttcatttgtagctatgtatattttttaagttcaaagctgtcattttcacttgccaaaaccattctctctcaattgtttgattgttgaccatgactcatgatgagatatttatcttttaatttatggtttgccgtaataatttaatgtcagccattattttactgtactattataaagttcacatttttatatgataattcaccccttttttgttttttttttaattgtaaatcgagcttcaaattaaagtaaagctttttattttttttttccttttaataataatgataagaagaagaattttatgtaagcgatgaccaatttttagttcaatataatatgatatagtcctcttcataaaatgttttgttgtgctaaatatttgtcttaaatggtattggattggctatagtagagtataagatttaccaataattgtggtggcttgcttgggttgtgggttggttggtagcttaggagtgaggaaatttggtttggtttggtttggtttgaataatggctggtctaagagaagacccagttcttggaattgacggtataaaaagggagaaggaactgggcactgaggtcaatactaaggctgaagataagggtgttgagagtgagagagatatggctcctcctcctcatccttctaccacttccatccatcgatctggttcacgtccccaattagaccttagcaaagctgctattcaaggcaattctgaggagagagatcccaccattctgctccctaaccagtctgatgatatctcttctcatctgtctttggacattggaggtatgcatcataatcatcatctttatccatgttgtttatgtctcttactttctgttgatgtttttgatgtattaaattgaagaaaatgattggttcttggaacattcaataaaggggattgtatagaatatgggacagtatcaataaacatacttcacttttaacaatgatgctaattgctgtgtgttttgttttttgttgattagctgcttatttgcatcactttatggttccaaaagcaatgtcactactcactgctctctcttaagattatttgtatataatatttcttgttatgttttttttttgtcttctttcttattcgatattt

SEQ ID NO: 53921 - DNA, 1317 bp, Cannabis sativa
taaggatagttaacgcctaaaccatttaaaaatctcttatttgctatcttactatttattcaatcattactttctaaagctctaaaaaatacttagtttccaaaaaactcgataaacacctatccattccaccataaaattttaaagagaaaagccttgtcagattaccttaatttctactacaattattcttcaaatattggcttctaaatccgaaacatatcaagaaaattgtagagaaggcactaattttttcttgttcatgctccacttgagagaaagaaagggaggagagagataaatctattttggttttgcgtttaaattctgattgtatctcttaacttcttcacttatccattcaaaaggataaattgaataattatttaagttattggcagattactatttttccgcttggcttagctactaaggcgatcttcattggtaaaacttaaatttagtattaaatcaacactaaaaaactagtatttcaacatttactttttttaatttcaattacgacactaaaaattacaccaaaatttatattatttattattctattattttattattataatgagaatattttaatactaaatatatataattatttagtttcttcctcttaaagtattatttaattattaaaaacttttattaaaaaaatagtgtggtctgtagtgccctactaaatttgaggggacactgtagagaaagtcatttattagtatagttttagtgtctcaattggagtaaatatagtgtgaaactacactatatttagtgttttaaagtccggttggagatgctctaagaaattataaactaatggtaaaataatcataacccaataacctcacataacctcacacttcaaactattcataaatcttccctcatacctctagaatactaatctctactattatgacacgattgcccaattcgtcgagtttccactgttgctgaacataaactatgaaaatgtcaaattttatatataacatattttgcacacctaaaattcaataaattctccgtaattgaaaaatcatatcttatgtgcctctttatcataatagtaggtcttatttcataataatacacatatatattcataaataataatttattattaataatctattaattatgtgctgattttatgcctatacatagagtcattacaattgggatttggttgaaaggaatgaagacataagaataagaatgaaaatagaaattaagggtgttcataaaatagccgatcctgttcaatccgcacagtccaatccaatccaattggcaaag

SEQ ID NO: 53922 - DNA, 931 bp, Cannabis sativa
gaaagttaaaggggatttttgggggttcggttttgagtgagtaaaacattgagtgagtgagttttttgggttgttgttgtctcggtttgtagctgcaaagaaaggaaagaaaatattagaataacccataaaactcttgctgccattaaaatagaaaagaagaagctttaagaaatcaaaaccctagaaaccatagaacaacccttgctgtaagaagaagaagaaaggatagaaaaccttaccattttatttctgccatttgaagagaaaaggagaagcttgaagaaaccctaggttcggttgaaaagaaggagaagataagagaacacattagaaccctataaccctagcttccatttgtgttgaagagaagaagaagagaaggaaaaattatacaaaccctaaccctaggaacttttccttgctgctgccgtagagagaaagagagaaaagatatttgaaagagtttgatttttgaaataaagtgatggctgccgaagctttagtttagggttagagaagatatcatatatatatatatattagggtttgtattgtcttctattgggctgggtttctatttgggccgaaccattattgtggaaaagtgagtctcatttgactccttctttattgctttgactgaatatatatcaaagaaagggtgttgattggagagagaaactttgtttctctttggattgatcagtgagaaccgaaccattgattggttcttttgatattgtacataaaagcttgatattgatttcttgttgggctgttatctttgggctgaaacaaagtttgcaaaatgtgttagatataaaattaccaattttattttgtggacacataatataaaagtaaaattagaaaaataccaatttgcatataacattaattttgcttcttaaagtgtgttggttagaac

SEQ ID NO: 53923 - DNA, 579 bp, Cannabis sativa
gtgtcgatatggcttgcctcataagatagtctcagacaatggaaagcagtttgattgcaaagaattcaccaacttctgcaactaacacggagtcattaaaagtttctccgtggaggcaaggccacaaacaaatgggcaagcagaagccgtcaataaaatcctaaaggtcaccctaaagaagaagctactggcgtacaaaaataactggcctgaagaattgccaaaagtgttatgggcataccagacaactctaagaaccacaactgggcactttccattctcaatgtcgtaccgttgtgaagctatggtcccggtggaaaccttgttccgatccaacatgagaacgacatacgatctggtaacaaataaagctttactacaagaagtacttgatcaaatcggcgaactccgggatgagtctcaagtacggatggcagcttatcaaaagaaggtggctaaacactttaactccaaagttaaagacaggaaatttactattggtgatctagtcttaagaaggatattcccagccactcaagaacctggagtgggggtacttgggccaaattgggaaggacc

SEQ ID NO: 53924 - DNA, 540 bp, Cannabis sativa
tggtgtgatgcagtaaagcttcctttagctttagttatgtcaaattgcctggttttggtgaacaaaattaagcataagtggaaggacagatcttctctctcagatttgattcaaaatattgtaacatcttgatcaaatttttctaatgctaatatttgttttatttcaagggaccaaaatatttttgcccataggttagctaaaaaagcattaagaacagatagagagtgtatttggaacttggaaaattctaactattgtatttctactaaagttgtagttgtagatcagtttaaaaaaaaaaaaaaaaaaaacaaaaaacaaaacaaaagacaaagcaaccaaaaaaaaatcctcagctttggtgaaataaaaacctgcctcaatcttcaagtgcaagacaccttttcttttttgttattttatagatatgcaataatttctgcataatccatgcttaagcgaggagcctgttttagcatcaagtccatgtttcatttttatgctcaaatgttggggacatgctttttatcttttttt

SEQ ID NO: 53925 - DNA, 1373 bp, Cannabis sativa
tcctcctgagcatcaactttcattttgtggagcatcagctaggggtgcacacgggtcgggttttcgggttttcgggcggtcggagtcgggttttcgggcttcgagtcttggaaatgtataaccgaacccgattttcgggtgttcgggtgggtcgggtatcgggtcgggtgtagtcgggttgggcatggtcgggttcgggtcctattgggctaagcccgaatatttaatttatgggctgaaataaaatttaatttttaaaaatgccattttttttaacattgtttagacctttttgttataattaatatttttttagtctagtaaattgtatttgaatttcaaactagcttttttaaaggaaatgaagagaagaaaggtggggtggtggtgggaattccaagcttttgtgggtcctaattaacgccaaatatgctacttatttgtcgttttttatttattaaataataataataataataatcaaattgaatgcaaacaaatatcattagctagatgacaaatattgaactttggaacacgaaaagatgaagatgatgataatttatgtcgtcttcaatttttttttagctctttttattactatactgtatgttcttattacatacaaaaaaaaaaaagaagttaagggaaaaaaaaaaaaaaaagatcgcacgcacacagcaaccaccacacactgacagtgtaacagtacatcgtcgtcaaagttaacaactgaaggaagaaaataagaacgcacaaacatattacctcgccagtcgccaggctagccggtgaagtcaccacctcggtcggactccgaggctcggagaagaagaagttttctgatgagtttggacttagatgttagggacgcaggactgcacaccgcttggatgtgaccccgccgaagaagagaagcaatcgtcgtccgtctgtcgccgcccttggagaagaagaagcttgaaggaggtgactcttggtgtactgactagtgactactgtgtctatattcgtaaggcaaggcaagacaagctacagaatttgaatggccatttttttttaataataaagtctgaaaactgaaagtatatattatagtaaatgttaatatattattaaagctggtttaattggtttaatttttaaagctggtcgggttacgggttataacccgaataaaaaaaaatcaatttattatacccgaacccgaaacccgtgtggggtattttcgggttgaacccgacccgaccacgcaggttttaagattttcagtttttgggtcagcgggtcggggcgggtggtcagatttttcgggtttacgggtctaaatgtgcagccctagcatcagctggtgaaataataccgaggagaat

SEQ ID NO: 53926 - DNA, 1016 bp, Cannabis sativa
ctttacttaagcttctaagctatctccaaaactatgggtaaaatactcataactaaaatgtatcaaagtaacactgtttaccaaactgccaaaccgtctaatttccactattattaggcatagaacatgaacatgttaaatttcatatataacatgtatgacacacttagaatttaataaattctttgtaattgagaaattatatcactaatgtttattttagcaatatgacttattttttatactaatacacatataataataaataatactttaattactaataaactgttaattatctgctaattgtcatatttaattatgcgattattataaagaaagtaacattagggtttataagataaatgaatatgttaattataaaaatacaattaataaatatctgaaaattttcatatccatatagaataggtatatgattttgtaagaaagtacaagagaattaaaatcatacaatatgaataaaacaggtcgatagtgtattaaaatataatttttttaatatggaattactaattacggtttactaaacactatattctagtgcgtgtggttttgattcaaatcacatatgtgggtagacatttagtaaaagtactctgtataatttaattatacatgattggactgatgtgaactaacatcttttaacatgtcatttatcataaataagttatatatcacaacgatgatcattagcagattagtataaatccaaaatatattcatgaacttttgtttatattcattaagttatttgattcactcgttaaagtttatcagataaaataattttttatataaaaattcgtttaaatatacttaataagaaaataacacgtaaaatattaacttgacacttaacgcttaagtacctacggaagtcttacaaacataacttatgtaacgcccgtattttataaaaataaactcggaaattacttttaataatttatatattaataaccatgtggatcgggatcccgagtatcaaa

SEQ ID NO: 53927 - DNA, 1044 bp, Cannabis sativa
aaataaaatttatttcaaatatacagtacttttttttgtcaatattgtactcaaattactctcacactttcaggtaactaagacacaattttaaatatggattgtgttctttagagatggatgtgtagatttgtgagaaaattgaggtaaaattttgattagagaagaataaagactattataaaatgataaagataaaattagtagaataattgaaaaaaaaaaaggtaaatataatagattttgaaagagagagttaaaattaaagaaatcaatttaaaagaggtatttagtgtaatttttgggggtaattatgacaaattccttagaaatggtggacatcttgagaagaagcccaattatgttagcagacccaaagcccaatatgataacagacccaaagcccaattgggtttcatttcatcgttccaaagtcaattgtagtctctctctctctctctctctctctctctaagtcatcatcagcggtatcctaattgatcggagatcggaggaattccgttcattcattgtccggataaacaattacttaactcactcactcacaggtactacgaatttgagcctaataatgaggattattcatgtattatatatatatatgtaatgttgaaaaagaaagagcctaaattcaaatagagaagatgggaaactttgtctgtgtttttgtatagatatagagctgtacattggcattctttcttggtctttttagtgtaaaaggattttattttagctgttaatagttaggtttttcataatagaagatttttagaaattgtgtttgttattaccatttgaaattttataatatgaatatgtgttaataatcataagaaagtctggtagtgtttatatgatgagatcaatcaacccaacaaagaaatgaaaccttcaaaatagggtttatatggttctatgatttttctaattctcttattctgttacacgaaaatagggttagggttccaagtgttttccttctttacctttcctgttctaacccgaaaaattatacccaga

SEQ ID NO: 53928 - DNA, 3311 bp, Cannabis sativa
ctgtgagacttattatatattaaggagtgttcttaagtttgaataaaagttgtttgaaggtttaaaattctagttagcagctggtgaaggagcaaaagcttggagctttaatagcagatttttgtttgtgattcgattttaatttttgtaacttaggttatgttatattgatattatgggactgttctgtgaagtttgagctcatttggttaagtttggaagttgtggagaataagagaaactcggggtccatttctgcagaaaaatgacaaatcgattttggaaaaatggtctatcgattttttctagcagaggcacttaaaacagtttcccatttttaaaatggtatgtcattttgggtgatgtttgggacccctgtttttcatgttttctttatatttagggtattatcatgttatctatcaatagggaaacttccagttatgaatttaagaccaaaaatgggataggacaagtggtttaccgatttactgttgatgtgacttagggctgcatttctccatttgggttggccgacatgcaggaatatagaatttaaggtaagaaaagtacatctatactacatagcatgtcaagacaagatcatgatcgtttgtgaattaaatggttatgaaagtaacgagacggtcattgccgttatgaaagtaacgagatggttttaccgttatgagagcaaaatgacagtcattaccgttatgaaacttatgagatagtcattactattatgaaaccaacaagacggtcattaccgttatgaaaccaatgagaagtgttactctataacccgtcataggtggttgtcttattagacaacatataataattgattacttgattaagtaacaatgattattggttatctagagtagataatagagtaggttattttattaaacgacgaactatataattgaatgtaatataaggtttaaaaacgttaaccaagtatgaaagtagtattgattgcaaggaaaaaatggtagcatatgaactagaaagtgaaactttggtggaatgatgggaaaagaatataagaatctagaattctgatgacttagttctgacaaagagggactcattataagttagtatggtagttcataccaagggaaaagaatataataattatcaatgtgatttgggattaactctatttttgtataaatccgagattgtgactaggaatgtcggcacttgtttgggatcacctgtggactagaaattatcttcatactttgggttttaggcaagaaagcgaatcttgcacatagaatatagcacggtagcgcacttgtatgttttataaattgcttagttagaaatgtaagttagaattattaccttaaaatttctatatttatgcatgtaatatatgaattaattgagtatgttaaaagggttatgcgactaagacataaccagtagattataagggttatgcaatcaaggcgtaactaggctaaactcggtgaccaaaattgaaaaaaaaaaaaaaaaaaaaaaaccttgaaaaggccttatttgtaaatagatgtgcgagcataccacgcagtgtctatacaatatagacttaagatgcggtggcatcatcataggcacagtggaaagttatattagtgtggtggcacggttatctatgcagtggcatattatgtgtagtatgtgtgctatatgcatgttatattcaatagattatactttcttactaggtcttggctcataggtgctctattgtccacgtaagggtaaagcagtgtcaggccagccatgaggtcgagggttttgatggtgaattgtatgtgtcccggtcaagttagactacgagggttgaatccaatagagagattgtatagaaatctcaattttgttgcttaggtcggcttatatgtaaaaataacttttgatattttaaaaagaattttacgggatcccagatatatgtaactatattattttattttgcattaaaggttattcctattattacaagttgttttattatttaagttaaattgtttttaattagtcacttgacttattagatcccgtttaatgggattagcaccatgtaatcacggcacgtgatgttcctttaattagggaattataaaaaccctccaaactcgcatttcattttagtatttatatttccatccaaaaggttctattaagtatcaaggtggacgattgacatatataaaagtgtccacatgtcatgttcttattagtttacacaattttaattattataataataaataaataattctaaaatatgaaaaataattaaaaaattatataaataaaatttaaaaatacatattcctttttttttttcatttttcttctcctccctttcatttttcttttttctcaggaaccctaattccctattttctttcctagacacactctcactctctcttcccttctccttttcgtgcagccactacgcaaatccggcaaggtcgcctccgaacaccttcactactaaaaattatattgttggtgtcggttcatagaatcggcgtctattccacagtgacaaaaagaatattctttggtgtcagttctgaaccaagatttttgggcatttgtgtcgtttttaaactgacacttactggtgtgcaatatatttatttttacactatatgcatcggtttagaactgacaccacaaaaaaacttttaaatctggccacgaattactctgagccaaatctgagatcgaaaataataaaatttacatcatcaaatcctaaagtaaaaatttctcaaccgaaaaaaatctgaaataaaaatatacattttaaaattcaaacaaaaaaactatatattatcaaaaataatacaaaaagattcaaataaaaaaaaataataatataacaaatgagtctacaaaaacatgagaataatattaagacgtgcataattgaggagagatctgtcatggctcttgaggagccatccgtggcctctattttggtctttggtgaccggagttgccaccgttgtgcacatcctaggagagatggagaaaagataaagagagatcaggacagagaagagaggtctataaatgtcgacctatgaacaatgaaccatgagccctgacctatgaacgacattactcgttgactacaaagagaactcccgccaagaatgaaccacccaccaacaccactacgaatgtcgaccctttacgaaccacctccatgaaccatcacctgggaaaaccctattgccatctcccccattgccacctacggtcgagagagagagagagagaga

SEQ ID NO: 53929 - DNA, 1335 bp, Cannabis sativa
tcatatattttaatataataatttatcactaatcaatcacaaaatgatacatttagtgttacaatcaacctaaattattaataatataattaaagagaaaagagggcagcactattgctttttatagtttcttctcctaatttatttatagtatacattttatttaagcataaaatatcttaatatagtacttatattgcaattattaaattggtgattatacttaattaattctaagttttaattaagcaaaactacatctactattttgtatttatatattattcttcatggatcggccgaccttgagaaaagtaaagccatatgattgagttggtatgaatgtcggtctatataactaattaaatgattgagtggaatgtgtggaacattacttattattattttattgattaggatatttaagcttaattatagagagttaaagtactaatctaataaaatatttcctattctatatttgagttaagattattttttgatgctgaaaattggttcaacagcaaatttgcatttcaatttcgaattcttacactatgattaatccaatcataaaattgtaactctattagtttacacaatttctccaaagtttttgataattctttttctggtttgttggggtgtttcttgttcctaagctgatgagtatgtgagagatgtattctgatagagctttgattgatctagtgtgcttaagaattcgtaattatttttgaacgatgaagttccctatttataggtgggaatggatgtcaagccacatctttcctctgttcgaatccatgtggactcgtccttcttattttctcgtacacttcccttttttgctttgctctttaaattctactttctcaactatttgagctctgacatgtcttctaagctctgatccgcttcttctgccttttcccttagtgaagcgatgcgttttaaattattcccgccacatcactttgttagttttattgttactatgaaagtaaaactacctttatgcccttaggataattttgccccttggtttggaaccggttacctagaattatttacatgtgtcattatgagttgtaactgatttttttgaaataatcacttcaaatttttaggaaatttttcccgccctttcaatttaccctaaatttctaaatttaaataagtaacctttttgatatttttgattttctttaaactttatctcctttccacaagcatcttcttgccatatttgctttctttaccttcaatttttcttttttattttctacgatcatgacttcaaggaatactaagggtaaatccaaattggttact

SEQ ID NO: 53930 - DNA, 761 bp, Cannabis sativa
agtggaatcttctcgaaccaggatagctcattgtctaatcgaagggcatgttttgtcaaaccatgagctgcagaatattaattgcgagccacttgggacaaaactacccccggaaatatagacaataaagctataacatcttcaatcagcaccccatcacattgaaaaatactttccctttattaatagttgtgttgttgccagagttagcaaaacaaaactaaactgaaaaaacatcacaacaccaaaccaaaaccacattatattataatgacaattttaaaataaaagttaatatacaaactcaaaataaaacacacaacccatatcacaactcaaaataactaaaaaactaacaaaatttataagaaaaactagccaaatgtattaccctttggctagtaataataagaaaccccctaatttaaaaatgttgaaaattaatatcaaatagattatatttaaaatttaacttatcgataaattttctgtaatcatagacccttcacaaaataacctacaaaataacaaaaaataaaaatctattactacacaatataatgaagaaaggtaatatgaaagaagcgatggtaaaccaaaccatattaatgataatgcttaaatagacttaaaatacttatctgttaaaagtgaaaaagtcatttaaatagaaaacatgagcataaaatggatcaattcttatgcccattcaccataccaccaaaccaccctaaatgaatagggacaagccataataaatg

SEQ ID NO: 53931 - DNA, 672 bp, Cannabis sativa
aataaaaaataaaaataatgagagggaggcattggtgacttggatcatgggctaagaaaatttgtgcttaattggtaagtttcaatatttactctacattgatttattttgatatgtttccctttttaaaagattgatatcttatttattgtattttgtcattaatcttgaaagattttcttaatgggctatttttgtattatgtttccctttattttatttttaaaagaaagggaagaaaaatataattcggcaaaagagtgggcggtttcccttttgtccatgggctggcggttatttttcaaaattcaaaattggtttccattttttttcaccttccatggttacttaacccaatttttcttgtcatttactctcacgaccaacccgatttctattcccttgtgtttttgttctttgtctctttttctctctcaaaaatccatggctaagactaagaatctagggcatccaagaacaatggtggaatccgaacaagcaccctcgaatgctcctcctactgctccaatcttactgcatgctgctgcaactgcgtcgaatccaggagattcatcgcttccttagcgtgaatcttagcctgtgaagcccaagccgaagagaatcccaaagcaagtggttagaaattccatgcgtctttacaaatgttggacc

SEQ ID NO: 53932 - DNA, 855 bp, Cannabis sativa
  modified_base (795)..(812): a, c, t, g, unknown or other
aggttgttcgtgatgttcctgctgttgatgtgattcaaactgaggttgttgcaggcagtaaagagaggtccaaggatgttgaaaatgtcaagggtaaagaatctggtgtaaagggagatgattttcttaatggtttaagccagcttgaaattgatgatgagcaagttgtgttagctggtttagaggctattgctaaaatcaatgtaagtgtacttttgattctttgttaggttgtgttagcatgttagttttttttttagttgttagatagttttatgttagttttgcaacttttactttttttgattttttaattttctctttcaggttccagattccaatccaaatattgttattgaaaatgtagatgtcattgcttctgatgaagaagaggatgacaccattacttatactcctctattggataagagaaagtgtgcctcggcattgcaattgccttttgttaattttgagtcggctaatgtgagcagcactccaatggaggtattttggtcatttccaatcaagaatccttgaccgaagattttatatctttgaggtattttgttgaccttaatttcaagtctgtcctgactgtaattaaggatattcaagaaaaagttagtcatttatgatcgaccatctgttgaggtatttataatcacactttttatttcatatttttttttcctgttattgttggttgttttcctgttttatttcagttgcaatactattttccaacacggtaagtcatctaatgaatttgtcacccaagattctgatgatgatgannnnnnnnnnnnnnnnnntgatgatgatgatgatgaaaatgatgacaaaggattacctgat

SEQ ID NO: 53933 - DNA, 2069 bp, Cannabis sativa
acaaataagccatttagaaaattccttacgtcctatacatatttataattattttatacttgtaagtaattaacattcatataaatactttagtagttataaatgacttatttttcttgagtcgttagacattcaacaattacaccaaaaaaagataagatacagtagcttaattagtattatttgtaactgtaatcttatattaaaacttaaaactgaaagaatgaataaacaaaattagcaaactggaaaaagaaaaaaaaaaactataaaatcaaaagtcatattgtaatagtattttttggtacttagaaacatccaaatatatataaaattaaaaactataaaccaaaggtcatattataacagtgcttttttggtgcttagaaacacataaatatttatactcgttagtttgtcacttttataatttttgaacatttgtattattgaataaatatttatggcacattttgaataacataatatattataagcataattaattactcacgattatcgttataattcttttttttttttttgcaaataatagaatgtaattataatctgtgcactatatgcaaacataacttcatctttacagtcttttagtttcttttatatagctattacaacataatgatttatagtttctgaaatgagtaattagcaccgaaacttctttatgttttaacttttatatacttaacttctttatttattttttttttttgtaaaaatcctatgtacacttgtatatatgtgatagtaagacttcaaagtcaatacaatggtaatccaactgatatctaactgatacctcaaatttacaaataaaaataaaacataaaaggatttggctaaaaaaaaaaaaaagaattaagtgtataaaataaaaacgtaataaatgttgcctcatataatcctttaaagaataatataaaaagaaaatgtatagaaatatatatatatatatgtatacataaagttattattttttatctttattttgatctataataatatgtagttttacaacataacattgatatatgacttttacatgcaaatttcgattcatattataataatattgtgttaattagtttttatattaacttagtttatatgaatgactcacttatgatgaagctttgtcatttctaataacattataacaatgtgtatagcaacaatcatactattcattttataatcataaattttattttgctatatctgaatatatgttatttgattttattacaaaataattgatagtaaaactttttcatgtagtagattaactccattgcaaagaagtcaatattaaatcttatttgtccttcgtaccacagatgtaaggaacatttttaaagtcttcctagagttaaattcactcatataaaactataaagtccaaaaaaaaaaattatcaacattttaattttggttaatattttcatacaaatttaatcagctaaactttctcatcttaaacttatattcctattatgactctaagtatgacctaaaaaattgttataaatttagtagcagacgacccacataaattcagtatataggacatgatgagtataagattctaaaaatttcaggatgctcccatacttgttttgatatcactgttaaatgaagtctaccaaaagtcagtttattttaaaattctttcaagaaaataatactttttttaaaaaaaaaaaataagaggtgatacccatgtgtaattgtttccaggagttggatgttgttgaagtttagcacgcatggtaccaatatgagaaactgcattcataagaaacaaaacctcatccatatgtaagaaacaaaaataaaaaataaaaaaattacatgattcaaattaaaatgaaaaatagaattaaaaagaggttagaatttaggtaattatcaacttcaactaccaaataatttaataaaaaaaattaccattggagcaactttagcagaaccactaacaatgtcaatatttgcatcaacaattttatttttatttaagttgttaaaaccatcttaagtctttttat

SEQ ID NO: 53934 - DNA, 2179 bp, Cannabis sativa
taaaatattaattgtatatatataatttttttaattatatatatgtatggattggattggatcggttacttttacaagctgtatctatgcccaggaaggtcgacggacttggccggagaaaaatgataacttcatgtagctataaatttaggacaagaaaccctatttttttaaacgagaaataaggaatttaaattagttgtagatactatatattttatttttgaataaatagaatttttgcctccttaattttgatcatagtagagttttaccccttaaatttttctttgttgcaaaaatttccccttgaactacgaaaattattgtaaatatcctcttctagttatattttgttcatttttttaaaacaatgtgcttatgtggctatgcgttacatgtatatttgcagtataaggccctatttaataattttaagcaacttgaaatctagtttattggcatcaaacatgcaaacagtagctctatgaatgtacatgcatattctcataattcatcgttagattgatatttatacatttattttttgtctcgactattgagctgagctagattaacgttacgttagtgttatatcaataaattgtttaaagaattaagtagaatacaactatacgacatatttgcaacaattgttataattcgaaggaattttcgcaatagagagaaaagttcaaaagacaaaattttacaataatgataatttgggaggataaatcctatttattatttgttttttatattcacatattttactctttttttttcacattgaccacttttattgaaaaataatcaaagttaagtatatcataaagaatttgtaaaaaaatattcaactaaactagttcattatccgcccttaatgtatgcacaattaagagcacctatgatatagggatgttgctgaaggaattttaacaacaccaaataaatattataataataatataaggagaatacatgcgagtacttaacctagagtggcgagtattcaaactaaggacacaaaatactgaaaagaaattggaaatgtaaagaacacaagagagtatagtggttcagtcagatcacggtctgcttagtccactattgtaagaatttctgtcttgtacttatttcacgttggatcactcctttatatacaaagcaaatgtcctttgatttacacatagattgaattcatcatcaatccgtttgtacattgaattacaataattaaactaaaaaatataaatacaataaatgaagagcagtttctgcttaattcactaaatacagcagcgtatgcgacttctaggtgcgagttggctgttcatattcttgcataagctcgcaggcttaagatgcattcgagactagtcaagtctaagatgtctgcgtcctgttcaagtcacttatacagacattttgtaataagtcggtaacctaagacatgcaagtccttatcgatttatcaaggttgtagggtcatctggaccagctcgcagagtaaagaatcgatctttacaattcgcaggaggatctcaaaagtcctcgcatatatcttggtatatgtgagtctaaaaccatttcttggtcctacgctatgcgagccatacgaatgcgactaaacttggtcatggtcgcatcatctcgctgaatctagtccaggcgaggttcgtactcgaggggtcactcaatgacatctcaactttcctcgaggagagtaaactataagggggtgtttgttatggggaagtgttgagatgtgggaaaatttggaaggaaacctttgtttggtgtatttttaatgtgggaatgtggtgagtcccacaaaattttaatgaataatataaaaacctttctacacttgagttaaaaattcctccacatttgattcccatgcccacatcctcctgcaaaccaaaacatatatagacacctctttaatattatcttacaaggaatctaaaacctacaactctttaatatacaaacacctctttaatatacaaacacctctttaatattcccttgcccacagcctctcactcttataataaaaggtttaatgaaaaaatcaaaacctatggctttcactaaaacgatgatgaaccttgtgtttatcaactcaaggataatcaagtggtagtattcttggtcctttatgttgatg

SEQ ID NO: 53935 - DNA, 1983 bp, Cannabis sativa
atcaacgtcggtagcaaattttgccaacaaaacacttgacactacaacatttatggttattagaggtggagggttccgctgctaataatctctcaatctgctggtaaaagttaatagcggtggggttcactggtaataatctactggtaatacttggtcgataaaaactggtattagtggtggactgacacccccgccgctaatactagtgtcagactgataaattgatgtcattattaacggcgggccattccgcctctaatgcttttatatatttttttaaaaaaatcttattatatattaatattaattaaaatcaaaaatatttttcatttagataatttggataatatacactatctatataaaaatatttatcattcaacattcatatatacaaacatttaaacaacaaataaataaaaaaatgtataattatccattgtaacatttcagcaaacataatgttcatttttgactgcaaatcaactgtaatgttcatctttaataactgcataattgaatttatcgccaccaacaattgatctacttcttttttttttttttttgagcaaaagatgatttattcattcagaaacattcagcatcaacaatagtcataagttcaggaggagcattacgctcactaaaaatacgatctgaggagaaacaagacgctcgagcaacacaatgagcagccttatttgcagactgtttaacaaaatgtaaagacacaccattgagagatgaaattaaagaccgacaatcttgaactaaaaaaccaaattgagagggcattgaaactgaaccaagaacagcctgcaccaccactagcgcatccgtttcaatttccaccccactccaccctttgcgtttgatccaactcaacgcttccttcaccccgataacctcagcaatctcaggtttcacagcacttatccggctgcctgaaattccttcaatgagcttcccatgttcgtcccgtgctaattgatctacttctttagtatcaaataatttaatagtcatcaatctttcatcttatacaagtccttgaaatctgcaaccttggtcacttttattctgcacataacaaataatcaataaaatttatcatataattaatatatcttcttgaattctcaaaattcgacaagaaaataccttccacaatggacaaccataaaacaattcgacgttatttctattttttcttactacgcattcatcaccacatcgacattttctcttcttcacgtcgaaagagtcactattcttctttatatcgattgaactactactctcttacattataacttaaactataaaaataattttagttaatttataaatttcacaaaaaatacatataaaattattttgagtaagtcttcataacaatactctccaatatgatattatataactcactacactctccaattatgcactggtgggagagaaatcgaaagacaattttagtgagagacaaaataaatttacatcttttagtctcactaattttagtcaataccctaaaatcatttacaaaataataaaaaaaaaaacgtgcaatctgtttttaattaatcacaattattaaacaaccaaaattttgacacaaatagaagcagagttcataaaattttttcaatctaccaaatagaagaaaactttaaacaattgtttagcaaaattaaaaaatatatatataaatatatatggtgtaaatacaacaaaatattcatgaaacccattttttttttttgccgagaagcatttccttaaagaataatcttatatataaatacaaggcagtcccatttacaccatagagtcccaacaaaactgtcattttgatgaataagtgaaagcatattttagacatacctgagagttggagtagaccaaatagaaagagacgagaagggagcagtaagattttgggggtttcaggtttttggagaagaaattcacaaaata

SEQ ID NO: 53936 - DNA, 1340 bp, Cannabis sativa
atctaagatcctggtaaaattaatcccaacatcgataccaagtctccttggaaggtcagcgcctagcgacctccaagccatctcgattatctaccacctttctgtcaagttatcaacagcagctggtatcgatcgtctcctaagaaaccaaatagtagaatgtgaatgttacaacacatcgttgacatacactaaaaagacctccttggctgtgttaacatccgagggatgaggaagaacttctttgctgtaataacagttgagggaaagttgaagacctccttcgctgtcaagatagccaaggggacgaaaaaggcctcttccattgtgaatacaatagaagggatgatgaagacctctaacgttaaagaccaaggataaaatagagattgtacctagaatcactctaaggtgaacccaagacggggaaggcatcacccccatcttgagtatatcaattcgagagttggtcacatgcttaattgaccaaagagcagccaacaactgctacaacacattgttgacagtcgccaagaagacctcccttgttgtaaagttgaagagatgatgaagacctcctctgctataaagttgaggagatgatgaagacctcttctgctgcaaagctgaggagatgatgaaggcctccgatgccataaagctaaggagttgatgaaggcctcctccgctatcaaaataaggagatgaacaagactgcctctattgaaacacagccgagggaatgttaaggaacttcaaggttacaacctaagagacgacaaagactacctcaacattcacataaacagacagtgtgacaaaaaagtcaatgctaagaaaacagtcgaagatcaaagtaaatgttgacattcctatgtcatgatgatttcacaatatctcaaatcaaaggaaatcactcaaggagtcatcaacttaaaattttgaattccactattcaatagggagtggggatttgaaatcctactctcagtggaaatgcttgaagaacaaaaacaattatccaagactgtcaaaattgattcctgcctggtagtttcgagagaaacgggcttagttcacgtcattaagtcaatctcacacaaatataaagttgactttgggggtaaatgcttacagcaagagtagaactaataacatggacattaatgttttgcatgtggcaagaaagatgacatattgaagttgagtagtcccgattcattacaagtcggcttgagaggggtccctagccctacgcccaggttgactttgggaacttcgagatggaagtttagacttcaataactcgcttccaactcactattgttcattattctata

SEQ ID NO: 53937 - DNA, 1290 bp, Cannabis sativa
aaatataaaattacctaattaaaagaaatattaaaaaagtgactatataaatataatgtacctgtatacaagcatatacaactttttttttttctgaaagtggaactttgctccaagcactgtattacaatggagcatgatggcgtatatttacaccaccaaaattagaagcataattgccataaactttaagctcgccttattataagtaacagttaagttagttatttggtcattctccagttcacagattaagcgatctccatgagtaggaccacgtactttcttttgtatttctattttttgtaagaaaaatatataattaataagtatttataaatgtatattttttaaaataagagtgatgataaaattttgggccttttaaagattgacgttgttcatcatgtaatggaattgttgaaagcccatcagtagaaggtgtcaaggattgcggtgaatctgattgtgattgagtatcattgtttgcctgtttagagctaaatcttctcgtactactcaagggttgatttgaagtataattgcattcctgttttgagctaccttttctcgtactacttgacattataaaatctaaaatgataaattattagtagctaatattaaattatcacattaataaaataaagttatttacataccctttatattaatcactttcatcacagtcagtttcagaatctgaaccactaagtagtgcttcttcatcaatatcatcaatgtttaatttgtgttgaacttaattattttgatcttttggggagtcaatcaataactcatcatttttaacttcatcaatatctttttgaataagaacgtcatcaatgttgtttgaggaatccaatgtgagattaatgtatgaggagtcttcttcacatgcttcacaattcctgacaactcgttctccatcatcaacttcaatatgatgtctgatggtatttcccaaatatgacgatggtttaccttttgcaccattttccaattttctccttttttttgatttcattgaaatagaatactggattaacttggtttgcaagcaaaaatgggtcgtcatcaaaccaatatgagttaatatttatactagtaatatgatattttgtataaattctacgtgggctctcactagagttataccaagaatatttgaacaatatcaccttattgaaaaagatgtaatgtacatcccacatttcattgatgacaccataaaaatcacaaaggtttccattatattctacctccactcgaattccataattttgagtg

SEQ ID NO: 53938 - DNA, 1270 bp, Cannabis sativa
ttaatatatgggaatcatatatttcttagctcaatcaagaaaaaatgatcgaaatcaacaacaaccatttaatttcttttatattttgttaacaaaaaatcaaaatataaaattaatcaaagtttaatagattataaattattttcttatttcattttaaaagttacctaatagtgttctaaataagcttatcttattgatttttttttttttataaattactaaaagaatttataaaaaaaaaaaaaaactaaatagtattttaatcagtattagaatcgtttatattaaaaaattaactttactaattttcatattaagtaaagtatactttatcataactctgtaatttgatcacacatgtttaagggggacgaaaattactaaaaaaagtaaaagtgttttaaataacaaaattagttacattatgaaaaattagtatatatactatttttttaaaatagttatgtatactaattttactaataagtgcttatactttattgtaccttattaaattcttaaactagttttgaagtaatataaatattgctaaaaaaattaaatgtataagtattttaaacaacaatataacataatagtagctaaaattaaagaaagttttgtaatgaaattaatttttggtgtttaaaatattatttagtttccttacaaattttataaaaaatttattaaaattgttctataaaatactcatttagatactatcaagtagtttttgagtataaaataataagttactaattagtttgtatatatatatatataaatttaattttaatatttagttactcttatttgataataaattataaaagtaacttaaatattgcttttaattttaaatatattatcggatgaccatcttgaaaataatactcatgttaatatctaaattaaaatagtaatttttttttggtaagaataataactaaacaaaaactaaatagttatgtaggtagattttttatttttttcaaaaaaaatcgtacagaaaaaaaagaaataaaagaaaaaaaatataaaagtagttaatcttaacataattgagaaataaaatatcaaagcaaaaggctgtcatgcgaaagaaaaaattagaatatgcacatgtattattttatattaagtataaaagtatacataatatttatatttaaaattttatcggtatgtgtataaataatttgagtattatgtatataattgaaagttccccaaaaatcttttcttattgataggtggcccaaac

SEQ ID NO: 53939 - DNA, 1890 bp, Cannabis sativa
  modified_base (65)..(68): a, c, t, g, unknown or other
  modified_base (1855)..(1861): a, c, t, g, unknown or other
caactaatgcttctaaagactcttgacctagttttcttcttgtcagacaactagtgagtttgagnnnncttcttcttcttttccttctaattttcgaaatccgatagtcttcttcacccttaaatttcagcctttagtgattgattgcatgcccacccatagcaagtcagtccttaatcatagtatgtaagactgtgaagaatccaaacaactgaaggagtttcgggctcagatcttggtaatactctaaaatagaaaggatacaagggttatagatctaagcgaaatgagtcatttaattctgctgcaaccaatgtaaggtttctcatactttatgtgttaattttcatagttttagagattcatattttgggtgttaaaaacatacttgttagtaaatctaggtcctggtaaaagatattccaacaatatagatgacctggacaaatgcttcaaagtcctcagaagatacaacatgaaactcaatcccttaaagtgctccttcagagttagctcgggtaagttccttagttttattgtcaatgcccgaggaactgaagccaatctagaaaaaattcaagccctccttggaaatcgcctagaaaatccaaagaagtccaaagcttaactagtcagatagctgcacttagtggatttgtttcaaagtcaacagacaagtgtgcttttcttcaacatcctgcgaggaaataagaaatttgaatggacggaggaatgcaagaatgcctttctagagctaaaagacaacttgtgaaacctcttgtactctcaaaaccacttgacggagaagaactagggatatacctagctgttatagaacatgctgtaagtgtcgtgctgatcagggaagagaacaatatccggcatccactctactacatcagcaaaagactcgttgaagatgaaagaaaatatctgctaatagaaaggctcacttactgcctaatcttagcaacaaggaagttaaggccttactttcaagctcatcctgttcgggtatacactgaccaaccatatcgcctagtattacaaaaacttgatgcctttggacggttactcaaatgggcaatggaattgggtcaatacaaaataatcttccaaccccgaacaacaatcaaaggacaggacttagcggattttgtagttgagtgtatgggcaatgaagaaagcatttcaaaaaacaaccaggaatcaatacaagaacctcagccgagcaacaatgaagacaaacctacctggaaattacatgtagatgggtttgctacagatcaactgtccggtgcagggattgcccttgtcacacatggggggaaacacttacatggggcagtcaaactttggttcagagcatcaaacaatgaagcaaaatatgaagccctcattgccggtctaaaacttgctcaagaaccacatgtagaacacattgagatctgcagtgactcacagttggtagtaaatcatgtgtttggggagtatgaggctcagggggaaaatgatagcacatctaagtaaaatacatgacctacttgcacaattcaagagctatgtcctcaagcaaattctaagagaagaaagtacaacttttgatgccctaacccgatttgcaagcaccaatataactaataaggctaatctaatcccaattcaatttcttaaagaacccaacatcacctgtaaggaagaaattgagatggttgacacatctccaaactggatgacaccaatagcaacttacctcaacactggggaactcctaagtaacagaaagaaacctcgaaagatgaggagaaaggctacatggtacgtcatcgtagaaggagtcatgtatagaaggggnnnnnnnatgccattacttagatgtgttacacaaga

SEQ ID NO: 53940 - DNA, 2815 bp, Cannabis sativa
ttttatttctcacgagatgatattacaggaaaaggctaagtgttagaagctccaatttctagagagagaaagaagctctgaccttatgggtagtttactgaatgtgaaaaatgaactaagggggctctccttttataggtgaaggaagcccacaaaaaataggggaaaatacaaattagatgatttttaccgtaaatgattatccaatagtgaaaattagcttgtaatggtgatagtcatttttcagagcctggcgagacccgtcgcgggtaactcggagcctattttcgtactcccttggggtgaaatttgtggttgatagcatcaaaattataattgaagttggacccactacttgataaaccattgaattagcttcaaaatgcaagttgaatcacgttaatcagatcaatattaagtgagttatggttgttttactaaagtcagttcatgacctagtgcacatgttgacatccagcgcccaggttgacattccagcgcccaggttgacatatgacgtcaacctggatgttgggtaagtgtaaggacatccaaggtatgtactttaagatgtctaagcgatattttgacatcacttagttagtttctatattttggcaaagctggtcactagttctcggagatgttgctgttttgcagaaatgagagactcaaaactcttcattttcgaatgagtttcataggttgtaaatgagaaatgcaaagttatgaatttgattctctgacttcatggatcttagttattgtgaaaaactagacagacggtgaaaacagaatcagaattggataagcagaacccaatgcacaaggccatttgtcaacctaggcactgggtactcattcctgactcccgggttgtcattttgatacttccaaggttcttgaacttgaggacgagatatcctaccccattttttaccattctggattcgttgctcaaattagatttggcatttgagtgatcgaaactagcacaccaggttgattgtcaacttgggcgctgggcccagcaccaagtcaacttgggcactgggacctgtttctaggggctcaggtttatggttttctccccgagtttgcttgaatcttcattatttctaatgatgaaaaaaattactgtaacacttttttgagaacttgattggaaatagccaagttgacatcaaatcaacctgagcactgggtcccaattatggcccttcaaaagttaaaaatagtttaatcttaatatgttttgaaaatggagaagatgcttggaagagttctcaaaaaacatcatcgaaatcagcccaagatgataaagtgtcaacttgggcgctgggccttgctgcttttagcacccaaaaaaaggaggtgtgttgtgttttttcttcttccccaaaagtacctatttctccatttttgaggaagaagaagatgatgcaaaaattaggtcatcgatctaatacttggaaggcatccagattgacaaattttcaacctgaaccctgggtgctcaaaaatgaacttgctttgaatctgattctagatgcctcaaatatttttacagtatgtctagttgatatcccaatcaaagtttgactcattttccctaagatggtcctgaaaacggaaactctaggtgggaatgtcaacctgggcgctgagtgaaaccctaggtgactaggtgggcttccaaagtgcttgttcgtgtaatttcagctcctaggacttggatttgattgctccatgtattcatagtagagattactaaaagatagtgagttgtattcaagttattgaagtccgaaattccatcccgaagctcaagctcccaaagtcaacctgcgcacaggcacagggctagggtcccctcccaggtcgactgttatgacttgggtctactcaacaccgtgacatcatccttctttccatgtgtcaaacaatgatgtcaatgtcactaggaaaagtttcgtttctaggttaggttaacttaacattttttgccccccaagtcaactttacacttgtgtgtagttggttagatgacgtgaactaagctcgtttctcttgaaaataccagatgggcatcaattttaaaaatcttaggagattctcattcccaattaaattaggacttttgattcccttgcttagtccttgcgaattattgaaaattaattaacaaagaaaaagaggaaaaacttatcctttttttttcacttatcttttatctttttctttaaaaatttgaaatttccgtatatttgttgtgccattaggattaattagattcaaattctaatcttttttgttaatgccattaaaaaattagagagagagaaagaagaagagaaaagacttttgatattttgcttatcatttatctttttctttaatcgtagtagcattaagaatggaggttacattttaaattaaaaaaaaaaatctattcctattgctatacaaattttgaatttcacttaaaaaatcttatcatttacctcttgctttacaactttaaatttaaaagactcccaattgctctagaattaggaaattgagtttatctataaataagagagttttcaatcaaatttttcattcctcccactttgttctccacgctcaagccttaataaaagcattggaattttatcttcatcaagccttcaagtgttcttcatcctccgagatagaaaataatttcctttttttctttcttttttcatgttttcggtgtttttttggaaaaatttcttcaaaatttattttattttattttatatacatttcgaaaatgtatttaatttta

SEQ ID NO: 53941 - DNA, 1098 bp, Cannabis sativa
aatacatataaaaagaggtatatttcaattaaatataaaattagaggtaaatttgatttattgattaataaaagtggtacttttcaagttacctctaaaatagtgtcaattggaacaccgcctaaagtaaagtaaccaacgaagatgcctaacctcagataaagcccatattataggcccaactccaagcccagccgctaagcaatcggaataaaaacttagaaaacctaggtgaatacacaatcttataaaaccctagttacactctcatgcctctctgtataatccaacatcgtcttctgtagttgactcctaagccttcttcttttcggtttgatttttttcctattttttttttctgtaatttgtttcgattttagtcgatcgtttcataacatgtacaagaattattttattttatggaagagtgtggtgatgatacaattttgtggactagagtttctgatctgggaaatactcagaatctgattacaaacccttggctgtctgagcacccttcttattatttttactctactctgtttttattcatctgcttgattcaaattcaaaataatggtaataataatgtggtgatgatacaattttgtggactagagtttctgatctgggaattactcagaatctgattacaaacccttggctgtctgagcatattttattctttaattttggcttgtaggattagggtgtttactgatttgcattttcttatttaaaagttggcttatgatgataacataaattatcttagcggatttcagtgagattttatagtcaatgatctgaatgttacacacactgaagccccctccaaactattatctaatcttgttattcttttctcatgaaataaaatcaaatttttgacagaattgttgggacatggttgctatgatgagataaagcactggatgtgtttatgggtagtggacgaggcttcttaatgttgtctcgccgtgagcctaattaaaaaacgacttctccttccactgagctttatttagtcccgtatttgtttatttttgttttctagtttgagttcttagagagatgctgcgcccttttaccaattct

SEQ ID NO: 53942 - DNA, 673 bp, Cannabis sativa
gtaattgttaagtgcacactcacctaattaattaattccacaaagaatagtgaaactctaaaatattatttttttggtcaacttaacttatgttttgggttagaaaacttgaaatgtaattatctttagattatgtgtggtatagaatagaagtcaagtcaataagtatatatatttatataaattgtgtgtggtatataatagaaaaactaacctcatcaataaatacatttagttatattatacatcgatccacacaattaattttaattccaatgtattgatatttagtccatcctttgtagtttatttggtcttcttcattgttattttttcacgactctaatagatttacaaaagaaaaatggatacaaaataaaataaaatttcaaagtcttccaagtaaaataaaagtctaaccacttacaataagaaattaagaatgtatcacctcaatatatatttattaattaccccgaaatttattactagatttaatattttcctcatatcgatcaaaaactttattgcatctaggaccggccctaaaacaaagtgggtcatagggaattttttttttttttgggctcttatgttagaaaaaatgtggtatttttcaaaatcggtaaaaaaaatgtataattttaaaagaagaaaaaaaaaatttggaccc

SEQ ID NO: 53943 - DNA, 927 bp, Cannabis sativa
aaaaaaaaaaaaaaaaaatatggagaccacatttaaatattattgtattttgtttatatccgtgacttttttttttttttccattatcattatttatacttggtaaatttaattaaaagtaacatggcgtagcagtgacatcgttcataaatttatattgtggattattttttaacatttaaataatttttctcatttttaatagtactatattcagaaataggttaactaattttatatagttttttttatataagtgtgttttatttcgctccctcattctctaaaacacaaagatttataaagataagttttattataatttcttttttaattttttcactattttacttaatttgattttaatctttttttttttccatgtagatatgttggtggacagaaacacatctcataaatttcttttatgatattaaagttttattctgtagctttttagagacatctttttcttatgtaagttccaatattaatgttgtggctcattaattaatttaacatgtctttaagataaatagtatgttttaaagaatagaaggaatctcttccctttttccttctatattttttttttctctaaactataatgattacccttgaaaaataattattagagaaatgttatatttttgttattttctttaaaattttaatatttataatattcccatgccttcataaattctccaatattggttaattaatgtgctacaatgcgtatattgcttgttcatctcaaaatattagctttaccgattgattatatatattgttattattagcccctcggggcgtttttattaattttgttaattaaaaagtatcttagaataatataattaaactaccttgtaattaaaatatattattaatcatagaaatgaaaactaattagtaaagtccacc

SEQ ID NO: 53944 - DNA, 730 bp, Cannabis sativa
tagagatgatagttattctcatgatttttgaaattaggagtaaaggatgaaggatagagagaaaattagtcattaaaattatcataatatctttgttagtataaatatttgttattttttaaaagaataatttttatatttagtgtattatttctcaaatttttcctaaaatggaggattagatatttataatttagagggagaaagtctccttgaacctctcatctcctaccaaacaaaagattctacctcttctaaactctctccctccctctctccatctacctatccctacttcttaccaaaccgaacagaatgcagaacactatgtttttatgtagaacccattttttttaagttttcagaaatataaaattattttctaatactaaaccaatcaacttttagtaactttattatggtggagattagaattgaatatgggagccataacaacaacgcaaatgaaaattacaaacaagatatattatatatggggtattagtggtaaaattatttaaattttatggtttgtaacacttaaccccatatattcatcttttgacaataaaatttattgaactcccattttgttttaatttttacacttccatccaaaaatttttattaagtaccatggtagactacccaatgcccacacaaatttttagtgctccagatattattaattattaaaatattataaaaaaaataatttaaaagttataaa

SEQ ID NO: 53945 - DNA, 623 bp, Cannabis sativa
tctttcttgtgcttttattcctgccaaattctttgattatgtgtgttattgattattcgatttggtgctttgttgtgtgttttagtgtaacaatttagcaattattttggttctattgctcttctcactttgttttgtattttgctttgtgttaatttcactgttgctgttgtattgtttgtgtttttgtatattgtgttggagtcggttggagttagttacaaaatcagttgtaactaactcctggttcttggtcttgtagaggcaaagtcacattggattgtgtcttttattcatctgttaattgttgttgatatatgctgatgtggatgttgtaagtaaaggactggttataagtggaatttactcaacaatttccacctgaattcctcttataaccagttctgatgtaatatttgttttatctctgagagtcctagcttgataggtcctacttttagtctcctgggtcgattcttaataagttcatacaatgtgtgaacttattaagagtcacaattttagtacccatgtctgctgggttgtcctcagtaagcaccttctcaatttttacttcaccttgagtcactttatctcgtataaagtgatacttgatttctatg

SEQ ID NO: 53946 - DNA, 1354 bp, Cannabis sativa
taaaagtatatttaagtttgcttaaaacagattataactgtttatgcgaagtagaattgataactgcttgcaaatcgaaagcatagcagataataattgcacgcacatagtagattactaactacttaaataatatcaaaagaaaataagagcgatggaaatgcttcaagtgttttaaatttgatcaaagtataattaattaagttgtgagtaaaaattcaagtaaacaaatgtattaagttcgaatgcaaaagtacgagacattaaataaaagataaaatagaagcaaagttggccatccaaccttgcaaatttgtctttacaaaagtgccacaaagggcaaaccattgtctcggccttatggccactttcctaaaattaaaaaaaaaaataaaaaataaaaaccaagcctacatagtaggagacttggatggtctttcttcgataacttctcatgatacctcgacttcctcttctgcctttttagcttgctcgcagtaagcaaggacttcctccatggccttacccaggaaactcaaatccatttctggattcgcaatccaggctcgatagatggagcgcatggaaatgcaattgcatcgctccttggtgtcaatctctttcgcctcgagcgctgcattggctgcattaagttcctcctaaagtttctggcatagctcggacttgtccttcacctctttttgagcagcttcatgttcagccttgttggccctcttcacttcctcggcttccttgcttaagcaagtgatctctgccttagcatcattccattccttggacacagcctcacgctgaccaatcaccttctggatctcactctccaggtacttcatcctttccaaaccccaacattggcgatgaaggagatgaaagtttgttgaaaacaaataaacaaaaatgcataagtattttcaaagattgttaaaaagagaggtagaacgagaagagtacaaaagcttaccgagaggccaaaggtgacactcctctcgagtatctcgtctaggtggacattgttgattaagtcccagtcgttaggaaggaaggatcagaattcactccaacaagctgcagcgtactccgcagtgtactccaagccagccctcccagcctcgatgggcagagtctcaagttcttggttcaaagaggcagcatcctgatttactgtgggaatgggccttttagtatgcgcaggagctaacgggtgagtctgaacctggttctcgggggcatcgaggtcaatggactgagaggctcgcttcttgttggcagttgtcttcctaggccttttaagaggctccacattgacattagaggaagtctccgacgcagttaa

SEQ ID NO: 53947 - DNA, 1352 bp, Cannabis sativa
atcatacctgtcttgcttttcctcatactcctcgtcatgggtttcatcttgttcttctatatccacatttactcgtgaagttgcttcttcgtcccttagattctagggatcttggggagtacaaggttcaggcgtatgatttctagtctccaccttagaattcttgttattatttgcagggatattgagtctaaaattgctaatttttggtgggattccttgggaaaagattctaagattcactagaagaattggtctactttatgtaactcttagtacttcggggggttttagttcatattcttagtgcattttaaccaagccatgttagttaaacagacttggaggctatttcagaacccaacttatcttcttgctaggttgttaaaagctaaatattttagcatacttatttcttagatgctaataatgggcatatgccctcacctacttggcaaagtcttatttggggaagggagttacttaggaaggggcttatttgaaaggtcggtaatggaaattctatacattttgtctaagatcaattgatctcttattataggtataaatcatataaagcttcttctcaaccccttcaaattcgatctctaattttattaaccaaaataaattttggcatgttgataaattaaataactattttgatccttatgttgttaatcaaatacttacaattctaatagttagctttgaagttgatgattttttgatatggggagcaaacttattaggatattttactgttaaatttgcttatcattttgacaagtcttctaatattcattcctcatcttcagactccaagttcattaggaggtggtggtcttctctctagcatacagatattccaccaaaattaaatattttatttggagagcttatcatcatattctgtcgttagcctctaatctctttataagaaaggtggtataagtccaaggtgttaccattgtaagacacataatgaaacggtaactcatgccctacttaactattcaagagctaaaattatatgaaaaaaaatcatacttaaatgatgattatttgcaacaatgaaatgtggatataaaatattttatatttaatggttttgagaagcttactaaggatgacaaagagcatctttttggtactttatgggaaatatagaatagtagaaatgaagagcactttggaaagtcaatgttgtcattctttgatgttctaggtttggttgctttatttttgaatgaatataaacaagctcagcatataagtatatattagcttttacaaaatagtaaggagcaaaaacaaaagcaatggcttccactgttggatatattttacca

SEQ ID NO: 53948 - DNA, 734 bp, Cannabis sativa
gcctattttaaaatcaaagcaactatttaattacttactataccaattatatattcgttagttacatttctaatactgtaaacaaataattataaaactaaaattttatagataagtaacctattggcactacgtttatttaccaattaaattatcattagtcagcataaaaaaattctaacataacaatattttttattcgcatctcaagcaattaatttttttttttcaatacagtagagtaattaacaaagaaataaattatttttgtgttgtgtatagaaaaataatatcgtagaaaagtaaatagttgtttttcataatggtaatgatgaaaaaatatatatattttttacatgtcaaaattaccacattcaagaatcgttcattttccttctaattaataagaaaataaccaaattttaatgataaacaaaatataatatgtgatcaaatttgcgagttgttattttattattctatttaaaagttattatacattaactaattagtttctacataaaaataatgttacttaaatcatataaattattagcaaaatgtttagacttctaaattaataaccaaatagtttcttaaatcaataacacattagtttcttaaatagagtatggaaggtaacataaatattattatacaaaaaaaaaatatatatatatatatataacataaaagtacatcttaatcagcataatataaactaaaaataaaca

SEQ ID NO: 53949 - DNA, 1093 bp, Cannabis sativa
tagtatgatattttttgaatgctattagcaaggagtgttttcgtttaaaggatattttgaggaagtactcgttggtgtcaggacaagaggtgaattttagcaaatttgagggttgctttgtgaaaaaggtcaactattattcacatggtcctcttgctaacatttttggtgttaaagtctcaaatagatttcaataatatctaggtcaaacttgctttgttggatggaggaagaaggatattttccaatatgttaagaataggatttggaataagatttgaggctggaaatgatctttattctccacggctgggaaagaaattctcattaaggcggtgattcaagctatgccaacctacactgtgaattgctttaggatcccgaaaaattttattaactgtattcatagtgtggcggccaaatttttgtgggggtcgtcagccaagaagggtcgtattcatttgtgcaaatgggaagagttattcacaagaaaaaatagagggtgatggggttcaaggatctgacttgttcaataaagagatgatggcaaaacaagtttagcatcttgtcaaaaataaagagtcactactggctagggtcctcaaacgtagctactttccaaattgtgatgttttagagactaaaaaaggtagattcctatcaactatatagagtgggctagtgtgggggtagagaggttatatttaagaggagtagatggagaatagggtttggagatggcgtgagggtggtggaggatcggcagaattcacggctgactacttttgatttttatgataaactttttctcttgaaggagctgagagtggtggacctaagattggctttgggggaattggatgtggagtttatcaagataatattaaggatgatggtgatctcatcttggatgtggagtttattaaggatgatggtgatctcatcttgctgttacctgttggctctttggagtgctaagataaacttatttagcactattctaaggatggagaatactcagttagaagtggatataaggtggctactcaaacaagaaactgagggaaggatcttgtatgaggggagttgagtc

SEQ ID NO: 53950 - DNA, 1232 bp, Cannabis sativa
ggggattatgattgggtttcgggaataaagtacacccatgggtgatccaagggtcgttccaaatgctagtatctctcccatccgcaattagtttacaagccccctttttcaagatttcttttgtacgcacaacatttctccagaaccaggagtcagaactcctacctgtacaatcaaagaactttctacccctcatatattttgcacttagcacctgacaacaaagggaccgattctcattgaggagatcccagccccatttggccaaaagggcttggttcatctctacggttttcctaaaccctaggccaccatgagatttcggaaggcataactgatcccaggctttaaggcagatacctcgatttccttgctcatgaccccaccaaaaatctctaaccatcccatcaattcgcaaggcaagtttttttgaaagcttggtcgtctgcatagtataaacaggtaaggcaagccctactgatttgatcaaagtagcacgacctgccttagataacgatttcaacttccacccatgcaatttcttaaccaggttatcaagaataaaattgaagtcagcatctttttggcgagttctaaacaacggaaggcccagataattgatattacccactgcacacttcagtcccagtgtctgcttgatcgcccttttcattccgttgctcgtgttaccgctgaagaagatggatgttttgagcttatttattctttgtccagaccaatcacaaaatttttccaaacactgccacatctttctagcttcatctaaactcgcccttcccaccaaaattagatcgtccgcaaagaacagatgagacaatcttggtccttctctgctcaacttgatacctttaataattccatcattcagggccttctggagaagtcgagaaagaatatcagctgcccaaataaaaatgtaaggagacagggggtctccttgtcgtattccacactctgggacaaaactactaatctttctaccattgaggagtagattgaaagaagtcgtagtgatgcactgacggatccacatacggaacttctcaggggctttgaagcttgaaagcacatgatcaacaaaagaccagcttaacttgtcataagcttttaccaggtcaattttaatcgcaaaaaaaccctcttttcctttctttctcttaaaggaatggataatctcttggattaaaacattattatcctgtatactcctt

SEQ ID NO: 53951 - DNA, 2245 bp, Cannabis sativa
gtctggttcattgggagccaaaggtgtactgagaataaggttcacatctctataaatgaaaatatcttttattagatcctcatcccattgagcttgatcaatagtcattaagcaggaaactgttttgccttgtaaagaggcattacagtatgaacataaggatcctccacacatggaagccatggcacattaacaacttgtactgaattaccttggccaactcagactgcagccccttccttgataagctcatgagcttcaaagatgcttttccaaatgtagcttggatttcccccaacttagcacttaaaaaagaaccattagagtagtatcttgagctgtacaccttgctaaccaaagaatccggccttgtcaataatctccatcttttttttcccaatagcgccatattgaaatcatgcaagttacagaaacccaaccctccttttgtttttggacagcataacttctcccaactcatccaatgaatacctctatcttttttagaagatgatcgccaccaaaatttacacattgtactctctaattctttgcaagtttctaatgggagttggaacacactcatagcataatttgaaagagcttgtgctattgtcttgattaatatctcctttcccgcttttgacaaaaatttactttcccatccttgcacacgctgctgcactttatccttgaggtagcccataataactgtcttctttctaccaataatattagacagcccaaggtatgggatatgatcatccgcttcatgtatattaagcatcccatatatttcatcacaagtttcagcacccatattatggctgtaaaaaataaaagatttgtcaaaattaatcttctgagccgaggctttctcgaaaatttgccatagatccaacatgttattggcctcctccacctcagctagacaaaagatgtagctgtcatcagcaaagaacatgtggttaattgttggggcatttcgagctactttgattccttggagcagactcttactttcataatctcttaaaagagctgaaaaaccctccatacaaatgaaaaataaataagatgacaatggatccccttgacgaaggccagatgaggaattatattgccaaattcttgaccagcatgagagattttgtatcttgccgttgtaacacaagccataaaaagtctgacgattttatttgcaaaacccatgtgccgaagcatagcttcaagatatccccactcgactctatcgtatgctttactcatgtccagtttgactgccatagatcctttcttgccacttctcttcctcttcaaatagtgcatcacctcataagaaatcatattatttgtgattagccttcctggaatgaaagcactttgtgtttcagatatgacatgattcaagactcttttcaatctattggccagcactttagaaaccactttgtaagccacattgcacaacgatattggtctgaggtccgcatagttaccgggttcttcttttttggaataagcacgatattggcttcagtaagatgttcttcgaaaaccgctgttgtgaagaaattcttggccaaattaatcacatctttccccactatactccaaaacttttgataaaatccaggactcgttccgttaggccccggagacttatccagatgcttttgaaacaccgctgtcttcacttcttcttccgtaatgggctgtaaaaggttatcattctgttccaacgtaatggaaggctgaatacactgcaccacttgatcccaattaatatcagaagcttgaaataactcattgaaatgttaaccattaaatcttgtagcccattatctcagccgattgtttgccggtttgacttttgaagattgcatatttggttgttgcgacgtctggttttaatagctaaatgaaagtatttggtattttgatcaccatcttttaaccacatttgatttgctcgttgcttccaaaatatctccttttgtgtcaagacttcaaaaagcttctttttctccgctgaatatgtcgccatagcagcagcatcttgtcttcctttgacaactttatataatggcttttttacattgtttgattctagtattgaaactgccagtaattccttgtccccaaacagccagcacttcagcaccgtttttaatctttgctattaaattttgttccccagaactattccaagagtcttcaaccaactgcttgcacattagttcgc

SEQ ID NO: 53952 - DNA, 2175 bp, Cannabis sativa
  modified_base (2014)..(2031): a, c, t, g, unknown or other
ctaatatgtcagttcttcacatctgaggagtttacgtctcgttcaaagcaaaatgctctcaatcggcagaaaatgctattcccatcaacacaagggtccataactatagctgagacccttcatgaaaatgtaagttaatatatataccatttatattatgaagtttaatttcattgcaatttgcttacaatttttatttatcagcaaaacataagtcgcattgagaattggaaagcttgtcacacaaagaagggcacaggcgagtttgttagcgagcatgctaaagaaaaatgtgtaagattatgtaaactaattacttttgaatatatttaaataactataagtttgtttagtttctaacttattcttaaaataggtacggatgaagacaatatatgacggtcaatctactcatgctgagtgtggacaagatgttgagattgagatacttcgtgagactcttggagagaggcgtggccataagctaggagtgggccgcaaattgaaagggcaatcaggaaaacgacgctcacaatttgctgcaactactgaacaacctagcttaagccaaatcgtatctcatctgcaaagacatattcaggcgatgacacgagtattgacacctgaacaacgtgcccatgtggagacattgatgagtggcgttgctccaacacaaccaacgcaaccaatacaaccaacgcaaccaacacgtccacaaccgtctcacttttatatgtctggagatggatctggttcatcttctcagccaatgggttttcaacatcaacagtcgcagcgggctccactttcatttcagcagttgttacaacagccattacagcagcctcaacaactccctgaacaaatggctcatcaatttcaacaatttcagatgtttcagacattcatgcagatgatgtcacagtcgccctcgccaaatagcccaccagtaatgatgcagatgatgacgcagtcacctcagacgtctcaagactcacagtctcggatgccacaagtgatgccgacgcaaaaaatgtcacagatgccgcagaattttcaaatgatgcatacactacaagggcaacaatatggacagcagacatcacatatgccgacaccacatgggcaacagactgctcatatgatgacaagttcgcagatgcctccatactatccacagatgccggatgtttctcaaccgcagattccgaggaatgctaatgatgatgatgacgacgacgacgcaacaacaaatttcttttagtatttaattttatcttagttatatgaactattgctttaatgtttatttatggtttatgaatattcactttagcaagtattatcttagttgaaggatattgttatatttgacatttgatatgtgatataaaaatatttagtttggtgttatgttttacttttaatttaatattttatatatttttttaattatcaatgacgaaaaagtcgccattgatatgttcatgaatttttttcagaaaaaaacttaatctttttgccaacgacaaagtcgttggtaataatatttatcaccgacgactttgaatttcgtcaataataatgtctttcaccgacgacgtattaccaacgacatattactgacgacatgtcgccattgatttccaatactgacaaaatacaccctttttactgacgaaatgtgtcctcattaaaagccataattcttgtaagtatataagcagtttgagatttgaaatgaaaagtctaattttagtcgcatttagtacgtacaatttggtttgccttttgatgctcaaaacacatgaaaaggtaaaattataggcgaacttatatataaaagtgattttcatatagtaggaagcatatatagctatttatataattaacaaaatataaaggtaggatattatcataaaatattaaaaataaaaaaaatttaaatttaattatcatacatggttgtacataaatcctatcattcatcccagctctctctctctctctctcnnnnnnnnnnnnnnnnnntatatatatatatatttatgcatgactctgaagaattattttgaatgttaatccatcctctacagtcatgatttctttcatttttgtttagcttagttttgtttcccctgctactacatatttatgtaggtatatatgcattta

SEQ ID NO: 53953 - DNA, 1000 bp, Cannabis sativa
tggtcataaccattcaactcgccagtaagaggatcaagagagtgttaatagataatgggagctcgatgaatatcatttataaggagactttaaagaaaatggggctcaataaggccaagttacggccttgtatagtgaatagatgcggattcaccggggatagcatagctagccttggcataattgagctcgcattaactgtaggcgaggcacctttaactgctactgtcatgcaagacttcttggttatcgaccttcccttgagttacaacatattgttgggtcatctagcactgatcggactaggggcagtaagtttgatcaagcacctatctttaaagttccaaacaccagatggtgtgggagtggtgcatggtgaccagatgttggctcgcaattactatcgcgtagagttgcaacatagaaaggccgatcatcagctgaggacggtcttggcaaaagaaaacaagaagaaagatgaagatcttgatccccgagttcaagatgaaagaaacctgctaaaagcaattgaagaattggaggaggttattcttgacccaagaaaccccaccaaatgcgtgtactttgagaagaacctggacgagcagctcaaacaacaattaataaactttttgaaagcgaaccaggattaattcgcctggagtaatgggccctaagattatctgccatcacttaaatgttgatccaaattacctagcgaagagacaaaagaggaggcccttagattccgagaggcaaagggcactaaaacaggaagttgacaagttgtttgtcaacgattttatacgtgaggtattttatccatcgtggatagctaatcatgttctcgtctcgaaacctaatgaaacttaaagaacttgtattcacttatccaatcttaatgaggcatgcctaaaagactgttttccacttcccaagatcgaccagttagtggatgacattgctaggcacgagcttatgtcgtttatggatgcatatt

SEQ ID NO: 53954 - DNA, 1359 bp, Cannabis sativa
agtcagccttttatttggggaattgatctaatcagacaattccctaaaggtaagggggagtacaatacacagtggttgcagtggactactttactaaatggacgaaaaccgagccattggcaacaataacatccaaaaaagtacttgactttgtggtaaaaaaaatataatatgccggtttggattattgtataaaatagtctaagacaatggcacacagtttgatagtcaattgttcactgatttctgtacaaaccgtggaatcataaagagtttctccatagtagcacatccctaagcaaactgtgaggtcgaagaagtcaacaagacacttaaagacactttaaagaaatgacttacagatgctaaagggaactggccggaagaactcccagaagtattatggtcttaccgcacaactgaaaaaataacgatcggacagactccatttgctccctcctctggaacacttggattttgtgaccttctgagctggagggtccacagcgggtcgctcctcgaaaagatcaataacctcgtcaactggcgccttctccttggatagggtctcaccacccttggacctcttagccggaggagacaagctcgagctgtctcctactctcttcttcaaggcctgaatcatcttttgagacatctctgcacagataaaacaacgcagttaggagcagacataaaatatgtgaaagcataaaaatcagagaaataaatgcaagttgaagtactctacacactggcaggggcattctcctgaacaataacagatggagcgtcatcatctgaagagtctttttgctccaccatgatggcttttccttttccctctacaggggttgatggccgagcaggcacaccaggttccctaatcctgatagcatgttctattggcgcttgctcggtcaggagagctttcttcgtcttcttgctcggcctctcctgctctgaatattcttaagcatcctactcctgctctgaatattcttgagcatactatttggctcctgcacctcccttcaacttagccacacgcttcaattgaataagctctttcccctgctcgacatcctcagctcagctcagcttggacttcttctccttctccttacgagctttggcacaaaatcctctggatagagcttatacttcaccaagttggcctcggtggtcaacaaagtgatatttcgagcatcctctggcagttggagaattttttgtgccctctccctaagtttcagcgtgaaaggaggacaacagtatgaggaaatttgctggaaccgagtgtggacagtctccattcccgtcacgaaataataatcgtccacaaaatgccctattttg

SEQ ID NO: 53955 - DNA, 792 bp, Cannabis sativa
gtgtgaataaaactaaaggacaacgttacgacagctaaattgcaacaaaaatatcaaaattacgtggtcagatccatatcataagatgaatgtgaatttagtttaatgtcgcgattggaattgattaattctaagattaaaattccaaaaaaataacgtttattaatgcaacaattagaatatagcgattctatgatactttatttagattggtcggaaaactccaaatcaacttcttacagatctacatcttggcattctctaaatttaatttacgattattagtatttcagaatttgaattattcttcatggttcagtttaacgtttccaactagtttttatgtggttttttgatcgaatgcatttggttgattttctgtttaggttattggttttctcaggttgtattgttggaatcaattttgttttcttgtctctagagttattgtgtcatttactagaataatcattgtataagttcgcatccattatgctgttaggatttgtgagaaagaggtatttttgtaataaaatatatttaggctgtataaaaatttaataggttggcccattgtattttttttttaactcttttcctctattaggagatataacagaaaatttccaaataacaaaaatagttgattaaaaagtgttacaaaatcctattttattttactgtcacgtgaagagatagaacttaattattattaaggtaaatagtggcataagtatttaaaattttaagtttgtaagtggcataaattcaatatttatttttagcagtata

SEQ ID NO: 53956 - DNA, 4828 bp, Cannabis sativa
ggtcttgtggtaaactaataaccctagtaagagaacttgaaagcacctgccttttaatcggtcacaaagtcccagaatgagggtttcttctctttggcctttttctcttctactttcctcatcaattgatcaataatttcaagaaaggaagcctcaaaagtgttcttaaacttctcatacaaattcacccgatattttgtctcagaaaaccagttcactagcatttggcctctgaagaaaatccaacacattcaacaagttgctcatgctaacataattctgagtaacggcaactgattcctcaaggttaatcaccaaatgccaccatccattaggcacaaaaatcacctccccaactttacaaacacactatgggtttctttttccatgtcttggttgcaccataaaaaatcataaaccactcaattatcgaaacagggcatgctacctcagcaccatcaaggctggggtgcactcctggaggagtcacatcaggaggaaacataacccatttcttggacccttttatcacagcattccatgctgatgttgaattaggatcaatgtggaatgatgaaccagaaccagcaggtccaattattatccatctgtaatctggtctctcattgcccaacagaccaaacaaatcttcccggaagtacaccgaaacttcatactccgaactcaatctcggaaccttttctacgaatttcgggtcaaataaatacaatggcctctcttccctcaatagatatgaatacctagagtagttctcaagcttcatctcaactggccctactgaaaaatgtaaatcaccagagagcttaaccaaatagtctctatcccatttttgaagagcaacccagttatctatacacccttctaacaacacaggcttattcggttcctcaaaatttgacacaaattcttctactgatatgcccttcttccgaattatgttatctctttcaagccactcaggtttcatttcaagattggcacagagctaactctgaaaaagataatcagaataaaagtcccccactctcaaacatgacaatccaatatttatggcatcaaaagaagggtaacaagtagtaatgtaagtgagcatccatgaccctttaaagatgaacccatcactaagattttccaacacgagattcctttaaaggggttcatagttagtgaatacatagaaagatttcctaccagtcgctaaaacccctaaatgggtagcacccaaaagccctagaatatcaataacaagctcatttgttaggttttggagattgcccaaacctgtgtttctagagttgacagaagatgagttgaggtagaaattttccagtggtcgaatcccatgagtgtgtgaaggagtagaggctttgaggctgaaaccttcattaatttcttcatcttcatcttctgattgatatttttctaaaatgagattttgctttatgccactggttttgctcctaagctcgttgttggttttgtttttggtcctttttcttttccataacaagctcttgcagctcaacatggcggacaaggttccaacactaacaatgattagaaatcaatctcaccgccgagaacaaatttaaacaaatatgagaaaacaaaataataaaaaatacacacatgatttgcatggttagaattagagccaatttgactataacctaaatccacgggcagccacttttattcaaacaacttctcttatctttgagtacaaatctctcttcctcaccgttacagcgtctgtcaagttttcaagaggaaaaatacaatgaaattctagagcatttaatacctattcaacataagctatttatagcactaacaaacaaacatacacgcaagattaacttggttcgaattagagccaatttgactctaacctaaatccatgggcaggcacttttattcaaacaacttctcttatctttgagtaaaaatctctcttcctcgcagttacaaaatctgtcaagtttttaagaggaaaaatgaatggaaattatagaacctttaaaagctatacaacataagctatttatatatcactaacaaccaaacatgactaaaggccaacagtcataactgattgcattttaaagaacggttgttataatggaatattgactggaccaacaagctaacaaatctccaccatagtagtgattgtacttatagccctgaggagcttggtctcctgtttgctggttcagttccaagcagtggaagaacttactgcttggaagtactttagttatcatgtcagaagaattgcgcttagtggaaaccttcttaattataattgatccttgagcgcacttctttaacaaattgcaacttagagtcctcatgctttttcctctcatgatacatttggttcttggataggtgaattcacaatttgattatcacaatgaatgttgataacttggtcttgaagctttagctcactaacaattccttccaaacatataacttcttttacgactttggttaatgcaatatacttgaatctttcaggttgtgtcatcaaaatagtttcatttatcaagctttccatgcaagaatgctgtcgtagcatccatcagctccaactcatgatcagactttgctatcattgtcaagaaagttcatttttacttgcgtttagatataggtgaaatacatagttgaaatcaattcactcattttgagggaagcctcgaggaacaagtcttgcctgaaatttggctggttcaacttttggagtctctttttccttttaaaaatttatttacagctgactgctcttaaaccagcaggtcgcttgattaactcccacgtatggttatcatgaaaagacttcatctcttcattcataaccttgagccattcattcttctccttactaactacgacagttttagaactttttgcctcttcttccacaagtgaccaacttctagtttaatcttcttcagatttttccttagactccacctcaaaattgatattctccaaatcagaatttgctttctaatttacatggactttgtcccactagccttggtcaaataagtgataggaatatcatagtagcaaaatagaggaaaatagctaatatactgatagtgaaaattgaagtaaacaagttactgggtattcgagagacccattgctaagctaagagcagtagctctcttacaaattcatatcccccccaccccccccaaaacctttccaatacactcttatatatactacattgagcatttattcctagagtgttcttacactcaaaaaatctggtcttctttctacattgaattcaaggtgttgtgggtgatgcctcggttaatatcccaagctttgttacaaaagccacaaggtggtaaaaggagagtaagactttggaggactgcttttttggcaatactatggactgtttggattgagaggaatagcagaatatttgaaggctcggagaaatcagtctaagacaagtggtctctttctcttttcaaaaaaaaaaaagaaaaactcattcttagacaacaactttcttgtcacagaagctgctgaaccgtactatgtcaccttccaaaagtacatgccattcttgttaatccctctcatgactatcgtggaaccttttataacattcaacattcctttctcacctttcaacacattccctttcttgtgtagctcaccaagaaaagtcagatgtctcttaagattaggttcaagtttgttttacattcgaagaagcttctcaactttatcatgaaatctgaatcctacagatccaattcttgtaagataattcttgtaatcttacaaggttgattatatttccaagaagcacaatttctctttgttcatgaaattctccaaaccaagatctgtttagggtcatatggtaatagaagcttgagtccatcatccacgatgtttctggatttgtactggacaccatcaaatcctcagaagattcataaccatattgcacaatagctgcatttcctgagtcattggatctctcattatggcctttgtctttcaggacacaacctcctggaatgcttctgttgatcccacattaaccaactatgggattggttagtagagtatataactagtcggacaccctcttttcttaggctagtttttggaagtgagttctgtccaagtggttgtatcgcctttctttctataatggcagcacttgatatttggacattcccttcaacatttcttccaccatgtttgttctgtaacttagatcttttcctgtcatgtttattgtcctttcttgatgttcttcctcttactattaattctttaccttacaaaatactttttttcaattctttcaaattcagagcagcctgcacttcataaagagataaagattctcttccaaacagcagggtttctttgaaatgagcacgagtctttggcaaagaacataacagtaataaagcctaattttcataatgttctttcacaacttatcttcctacatcttaaatgaatattaaatttgtttgagatagagacggtttactagaggtttggtcatagaggcttcaagcttagtccaaaacatgcaacaatctcttgcttggagacgtgtctaagcactgtatccccaaggctcaagataattgcattgtgagcttttttactcaacaatactttcttatgtttttcagccattgacttctcccgtttagcttccccttcaagtgcttcaactagaccctattgaaccagaagggctcttatcttcatccaccctaacccaaaatcatttgac

SEQ ID NO: 53957 - DNA, 1754 bp, Cannabis sativa
atgattatatcatctacatacaccaacaagagaatcagagacctggaagtgtgtaaaatgaacaaactatgatcagacttggaagaaacaaatccaaaggacagtaagcaggtgtgcaatttctcgaaccaggctctgggagcctgctttaaaccgtatatagctttattcaatttgcaaaccagatgaggtgcatcaggtagttcgaatccaggaggctgtaccatatagacctcttcctttaaatctccatttaaaaatgcattattaatgtctaattgttgtatacaccagccctttgccaaagccaaagtcaagacaattcgaattgttacaggtttgacaacaggactgaaagtctctgtgaaatcgaaacctggttgttgatgaaatcctttggcaaccaacctagctttgagcttgttgatagtcccatcagcattcaatttgattttgtaaacccacttgcacccaattggtgttctaccatcaggaagagggacataagtccaagtaacattcctttttaatgctcccatttcatcattcatagcattcaaccacttttcttgtttcatagccattttgacattggttggagcttgcaaagccatataagccttaggtttgaatataccagatttggaccttgttttcattgagtgcttgtttactacaggatcatgagaggaagtgggaactgttgggacagagataggtatactgggaggaataataggtgtgtcaggttcctgaggtgaggaatcagcaggcagagattcaggtgagctattggatacctgagtagtgatgatgggattttgagaatgaggaggctgagtagcatgatcaatgggacaaaagacaggggtctgtattgatgatgaagtggaatgagtgggaaatagatactcagcagtataaatggtggtggatttgggaattgtggcaaagggtaggggttcattgttgtgcatctgttcagaggagatagtgaaatgtgaagccttatagggaaatttagactcatcaaaaattacatctcgagagatgtacaacctacccgtggcatgtaagcacttatagcccttatgattgaggctatagccaacaaaaatacaaggtgctgatctaaaatcgagtttgtgcctattataaggtctaatgttgggatatcaaaggcacccaaaggtccttagattgttgtagtcaggttttatgttgaacaacatctccattggagactgttgttgcaaaataggagagggcaatctgttgtgcaggtaaacagcagctctgaatgcctcatcccaaaattttaagggcagtgaggcatgagcaagaaggcttaaaccatgttcaactatctgcctgtgttttctctcaaccaggccattttgttcatgagttgttggacatggatgtctgtgtaggatgcctaattgtttcaagggttcagtgaaggatctaaactctcccccccaatcagtttgtagagttttaatctttttgcctttttgaagacttgtctcagctttgaaattttgaaaagttcttagtgcttcagatttggttttaaggagatagatccaagtgaacctagtgtaagcatcaacaaagctcatgtagtatttgtaaccattgtgagaaatggtgtgtgaagggccccaaagatcagacacaattaattgtaatggttcagtgtagatagttttagacatctttggaaagggcaatttgtgaatcttacctaa

SEQ ID NO: 53958 - DNA, 1331 bp, Cannabis sativa
gggacgatttacatcaagtagggagaaatttaccattttaccattcaatgtattttatccttaaaacacttagctattataaaggatattctaataaactaatataattactgaaatgagtactccaccatttaaacttgtttagccaagctctaaggaaactgtcatgtcatttctagatgtttatagaagctatagattctatatctataattagtgctcccactcaattggactatcatgttctcaaagatgtatgggccagtcctacaggtaagtggatgatgaataagtcaaagaacccgaatagtacagttaggctagaacctaaacatctcaggattgagatcattgatctaagatcaactaagtgacattgacttaaaaattatattatgataattttatagtatattttccactgtcaatgtcgatcatgttcgatgtatagccaatatttctgatacaagcttactttgctaatgctctaaaaaaggcattctacttaaacaagtgcaagtaaactacatcgatgattatcacatcagtataaatctagtacattgataaattatgggactaatatagtttatatcatgaataacaatattataagaatttaatagaatttatatatatcaaacatatggtcatgaaagtaacatgtgaacaaactatatataaaatagtaatgaaataatttatgttcttttattgacaaatgaaattataattacattaaaattaagttttatatagggcataaaatctcaagagagaagtgtgttcacgtgttagttagtacctcgattgagacagattatgtctccactacttgtcttttcgtgcaaccagctcttcctcagaagcgtgcatgctttaatgactttgtcctttgttgttcgtctttttggcatttatccttttatagctcacattcattatctgaagataaaacttacaaaacttggccaactgttaggcccacatgagtctccttagcttgatgaggggcatgaggaagtaagtgaataagaatgattgggtgagggaatagagagatagagagagagcatgagggagcagagagggctcattgggcgtgtaaggagagaaatagtggggagctcctgccagtgcgcacgaggaaggagggagcaggtaacagggagctcccgtcggtgcgcacgaggaaggagggagcagggagctcccgttggtgtgcgcagtgagggacggagtgaggagctcccttgggcgcgctgttgggttttgtgcccgaaataaaacccatttaaatataatcagatttactaataaagatcaaaaat

SEQ ID NO: 53959 - DNA, 736 bp, Cannabis sativa
tctagtgatttggcaattttgtatcaaggggagggcaatcccccggtgattcccatcaattttcttaattaatgaactcatggttctttcaaaaaaaagtttgtatctaaatcttgccctctatagctagctactagtactaaggatattattatttacaagcaaaatataaatataataaaaaagcattcaaatgccacttgaaatctatcatcatcatcaagatcatcaaagcaatgatttaaactcaaacaccatttcctaaaaaatcgcaactcaagctttccatttccatatccatccctcacgatacattaacattggaaagtcagaatcatcaaatacatttgaattattttttttttaatatatattttctcatcttattcctaatcctaatatctatttatctatatctatataaatatataaaagagaatcataaagaggttgtgttacctctccttctaataatctatattttctaagtggtagatttttctaattttttcatttgattttctccttttcaacaatttttatacttttagttcttttgaaaaagtcccacatgtttaaaaaccataatgagtttatacttttaggttatatatagatcttaattttttcattttagtttgtctcaaaattaactttatcaaacatttattcaaataactgttgctatattttgtaaacactacgcaagtatacgcaatcaagtagtaaatctcac

SEQ ID NO: 53960 - DNA, 573 bp, Cannabis sativa
tctctctctctctctctctattagtattttcctcatttggatatatttaattattcaaatttgtatgtttaattaataacatagcgaacttggaattacatatgtcttgtcttttgacatggttgtgttgttctctctatagtactctgtctttcgttttgtcgtctactgcttattgactacagtggtgttcgtatatgtgttatggcttcaacaagtgctttgctcaaagatgtggaagatcaatatgctaatatattgattgaaggagaagatgatggggatgttgtatatgacatatttgattattcagaccaaagtggggaagatcggtggtgtattgtaggcaagtttctaaccaagagggctattgattttgatgcaatgagacatatgatggcatcgttgttccaacccgggcgtggtatgtacgttaaagaactcgagccaaatcggtatttgtttcaatttcaccatgagattgatcttgaaagggttattgaaggaagtccttggacattcaaccgcactcaatttgtttttgaaaggcttcaacggggacaagatcctcgt

SEQ ID NO: 53961 - DNA, 1303 bp, Cannabis sativa
  modified_base (140)..(141): a, c, t, g, unknown or other
cagtctgtttaataatataaaagttataaaagtttaaaagtttaaagtttaaattttgttaaattttgcgtttgcgctattttaattagtaatcccggttaggggattagggccttataagtattttgggtagcgtgccnnattatttagggcgttacaaaaacattgataacatttctggtccttcacattctctgcttgtgtgggttgcaatttaatatttggtacaatgggtgtttcaacagatttacactctaacataacagtctctttaagcagatcaagaacatacttacatttcttaatgaagattcctccaataaagtattctaaagtaccaaagtctttgatctctgtgaagcttttaacaatggtgaaaggtagaaaccaaagagagaaaaacagagcaagtggcagagcctatagcagaattgaataccaagaaaagcttaaccaattgattagcttgagaccaatttatttatactgcaataatgttcaattgcatgaaaataacagaataaagcaacttgcctaactaactttttaactaactaaactaactgataaaactaacagttattattgtttacatccccccctcaaacgaaatggtgaggaagccatttgaagtttgccctttaggtagttaaatcgatctgtagtgagggatttagttaggatatcagcagcctgatccaaggaaggaacatagcaaattgagagttgctttgcaatgatttggtctcgaacaaaatgcaaatctatctcaatgtgtttgcatcgagcatgaaacacaggatttgcagctagtgccgcagcactttgattgtcaattcataaaattggggtctgagataagggaatttgcagttcaaagaggatatatttgatccattgcacctcagctgcagcattagccaaggctcgaaattcactctccgtactagatcgagcaacaacatgttgcttcttagctgaccaggacaccaaattgttgcccagaaacatgagatagcctcctgtagacctcctgttatcgatgcagctagcccagtctgcatcggtgtatccttgtaattgaagatgatctgttggtttaagccacaagccttcatgtagtgtgccttttaagtatcgaagcaatctcttgcaagcttcccagtgtttgacagtgggagcatggagaaattgactgagtttattagtaatatatgccacatctggtcttgttaaactcaaatattggagtgctcccaaggtactcatgtacagtgttatattgtcaaatggttccccatca

SEQ ID NO: 53962 - DNA, 7939 bp, Cannabis sativa
  modified_base (7397)..(7400): a, c, t, g, unknown or other
ttactaattagccaaaaattaattattaggcccttcttttaagatgacatattttttaaaaggaagtcttttttttgcttcatcctcggtggccgatcctaagtgcttatccaatgaaaattcagataaataatacaaaaaatatagcttacttagttaaaaatgtaggtgatataaatttggaacataataaatttttaaaattcactcttatcatttatttttcacgtttaaatttgatctcctatgatatctcatgtgaattcactcttatcacttgttttttacttttagatttgatctcctatgcttattaaattcatgtccattctcatcaggtcaggtatgggatcgagtttcgggtcgggttctatcttggatcagtctggggtttgggtctagtcttgggtcgaatctgggtccaggtctcgagtactgtcctgtcccgttcaggacttgggtcccatctgggtttggggtctgggtccgagtgcgagtgtgggtctgagtttggtcttggtttgggtgtgagtgtagggtccgagtcttgggtcaggtctgggtccgggttcgtgttcggtccaggtcccgggtccgagtttgggatctaggtccaagtctcgggtggggtcctagatcccagatctaagttcgggtcttgagattgggttcgtgtctcaagttgggtcttggtctcgagttaaggccggagtccgagttgggtttgagtttggatccgggtctcgagtccaattcgagtcttgggtctgggtttgggttcgggtttgggtcgagtcccagatttgggtttagatcgagtttgggtctcaagtcgggtcccaagtccgagtcgggttcaagtttggatccggatctcgggtcttggttcaggtttgaatctgggtccaggtctgtgtttgggttgagtcccagatctgggttagggtcgggttccagatccgtgttcgggacagggttccagtttgggtccaagtctcaggatccgagttgaagattgaagttgaacctggactttttgtaaatattataatacaagttaatacagactatttgttatgttaaataatacaacttacattgtattaaaaattttgattgtaaaaattaatacattattttattttatcccaatataatattatttattatttaatataatacattttaggataattcattccttatactcaaagtcggacatgtctctaattatgctatgttctctacttccttaagtacagttggactattgggaaaataggggaagaaaaatgatcgcttcgaggtcaatacatgtcatatatatacatagagagataggttcctttatctttttgaatatgtaaaaaaaaaaaaagtttatgcaattcttcaaatatatcatcattccaggcataacttcttagatggtatttgccaagatagtactgttttaagtactttgattacataatcattcgcataacttaataaacaagaaatatatacctttattaacactactacgtacccttacgaataatcactctatataacaatttacttcatcaacgtaaattaaaacaacacttatttctaatcaatatggagccaaaaagaatttttgaagcctccctcaccggtgacataacaaaactccattcattactctctgaagacccattcctactcgaccgagttaccctaaactcggtcgaaactcctcttcacatctcatgcatggcaggacaaacagagataaccaaaaagtttctctccctaaggccgaaatgggctcaagagcttaaccaacaagggttaagccctctccacatggcctcggccaatggacatgtggagatagtgaaagagattgttagtgttgttggagccaatatttgtcgtttgaagggacaagatgggaaagtttcacttcactttgctgccatgaaaggtcaagtaagtgttcttagggagcttgtttcggcttgtcccgagtctgtctcggaagtgactgtgggagaggagagtgttcttcatttggctgtgaagaataaccagtttgaggctgttagggttttgattgaagagcttcgaaagcttgggaaaatggagatagttaattggaaagatatagaaggaaatacggttttgcatttggctacttttcataaacagcaccaggcaagttcactctacttttatttgattgatatatatacatatataatatatatatggttatatgaaaacgtaagctttttaggtaactatatattagagcaatatatttcacgttttcttcttttaaataataactcaactttttctagtgtgatatttattttgaacaactttttctagtgtgttaaaagttaaggaatcggtagtttattaattaacaccaaagaaaagtataataaactatagtgaaaaaggaaagtactgccgagatccagagatcctttctttaatttcctataattaatcaaaagaatcaatcaattaaaagtattttattattattattaatcatttctaaaatcaataatatatatcatgctagttgtacagtccactaaatattggctagagatatatatgttatgcatacatatagtttgcaaattaatcaataggtgttattagaataattttaatttttattgaaaggattgttatttgacactttaaaatgtgttcaataatactattactatatcaatgtgatactttataattaattaataatttattatattagttattaagtttaataattatgttagatctgatattaaattgtactaaaaataaaagtgtctcataataatttcttttcatttattatagattagttatatatgcaaaaatgttttaggcatattcatattaattaattctatattattcaataataaaataaatttaaatataatattttgtgtatatatatgtataatataaagggaccggttttgtgtgcttttaaaaaacatatccaatcttttttctctaagtcctactaaaattcatggtgggggccgaccgtgaatacaattaatgtactttgcattagcgtcaaagtaattcaatactagtagaaatgaaaatataatattaaaaataagagaaatattacgggacaccttaaggtgctaaacaccgacacctgtctttaggaaaataggagcccaatatgacgaaaattatagtgtccttttttttttttgaaaaaaagagaaaattgactttcaacaacattcttcgtaaattaattatatatatatatatattttgatatatgaataatataataaattgagtaggtctggtagtaatgattgataaattttagttggaagtgttcatatctcgggaaaacagaacaagcgaagaacttaagagggtgcaaattaatgtcactaggccaaggacattttatgttcttcaagagtataaaaatatatttaataattacattgaatatataaataaataaaaaaaagttcgggctcccccggagccgacacaggcctacttacccttagaattggcgcttaggtgataccactattagtgtaattgaatatatacacattttaatttgataaatgatatgggaaattgataaccaattataaatattacatcggtgctttaacaataattcatacacatatataatgtatatatatagattattgataatatgttttactttcaattctaagtaatattttacagtttaaaatttgatcatttattataattacccatgcacatgcagaccatcgatttgttgattggtgatcatgacgcccaagaagctggtgggataataataaacactaatcctgtaaacacaactggattcacacctagagatgttctagatctcattcttcaaaacgacaacagtactggatcattaaatcacatgatcaaaatgatcgaaacgtttcaaaaggcaggagcactcaaatccaaccaaatcgccattaataaaaaaactcaaacagtaaacaatattaataataataataataattctaattctaatactaataataagtgtacctcttttcgatttataataaccctttggagagaactaactaaagaaatcgaagaatcctccatagaaacccaaaacgcacttatggtggttgccgttttgatagcaacaatgacttaccaagccatactaagccctccaagtggcttctctaataatacaccagttgactattactccaaaaacgacgccgttttaataaatacgaaaagtgcacttaacgttggggaaggagaagcagttatggcgagtgatccacacgtgtttgttatatttactgtgtttaatgcgattgggttttttgcttctcttgggatgatttctgtgctgacaagtgggtttcctctacgagctgggcttagattggctatactttccatggtggccacatatgttatagcagttttctatgaggctcccactaagatgaggactgtttttgttgtgctgtggttgatgggtcttgttgttctttttgagcttgggaggtttggcttttggttgcttagaaaatgtggtattctcaaatttagtagaagatcatcaccaccttcacttgacggttatcctcatgatcagcaaaacaatcatcaccagttagacttttgaatctatctatctacttttttttttcttataaaaatttgagttttatgaaaaataaataaatgtactgttgcgacttgccagtgagtaataaagtataatcaatttttattgttgtaacatttccaatcatgctttttaaacaaactcattagcaggagtgagatttaaaaaaataaactccaattatacaaaaaaataactccctataattactaaatatttttaataatatttaataaaaaatactattactttttcattatattataaaattaatttatatttaacaaattcaaattataaaatattattaaaaattgtcaaataaccaatacatacaaaatattaaataagaggaaaagataaaaagccatcatcttctctgctgctctgctaggaaaagataaaattgccaagtccacattagtgacggtttttaattgtcgtttattttgcttgttttgcgacgatcgtatatgcgacaattatagaaaccgatggaaatactaaacgactatttaaaaatatcaagaaaaataatttttgtagtaatgatagataattgattacgtatagcatgaaccgctaggtccgctaccaaacaattagtctcaagaattgctaattaacaatcattctttaatcttaatccaacttaaaggttttaagatacctaatatttgcaagctcaaatgccactataccatttttatacatggtcctggcttcaaagttcaatcaaagtggtatctatatttattttgatttgagaatatggatatgaaataaatttttaagataagtgcaattagttttgaattagaaaaataaacatttaaattaacacttgttgggcttggtaaccaggttgagggtttaaatctgattgaattctttctcttttccctagaaatattttattaaattcaaaccgtatgtataatgaacattaattagtataaagcattatttataagtttggccttcattactaatattttataataattattaaattaaatagaaatttacgataaaattcttttaacattttcaattgttacacattaaccctaatccaaaaagtagccgtaaaactacattatcttataattttgttgtagtcgtacctttaaatgtcaattcaaacacgcagtgatatattattaatagatcacgtattaaaaattaaaaagaaaacttttatatttttctctattttttatttaattaaagaaaaactaattttgttttcctatttaaatttgtatatttttaattaacaaataagataaataataattttttaatatcaaataatatattactacatatttttgaattggtactcattggacttaattgtcacttaagggtacggctacaacaaaatagaagaataaggtagttttgctattactttttttattattagaatcaattggttacttttctagtaaaaagattatttcaaaatttatacatatataaataataaaataaccatttaatatgtgagaaacatgtattaaccttttggttgcttttgatgtaaataatatatcaattagttactttttattgaaaaaattgttttaagataattttttatcccatacacttctagttacttattttgattagttagctttgaaactatgattttattttttaatttttagactatattatattattttattgtttaagatacattgatattacttcttctttttaacaatttcaatatatattttgaaatatgaaaaaacatatatattgaacaagtatcacaaatgcaaaaccctaaaatcaactctaacccaaaacacaagctaacctataacagagaaaacaaaagaaaaaccaaaaagaaagaagaaaagattatcatgatcttgatggttcatatcacaagagatatatgtatatatatttatatatatatagagagagaaactcacttcagaaattaccttagatagtaactagaaaaataatgagagagaaagagagaaagagaaagaaaaaatggattgagagaagggaagttatcgtttgagaaagagagagagagagagagaaaagtagcttttgaaatatagcaaaaatatagctgtaatacacgcataaaatatggaacaagaaaaacagtatacgacgtatttatttttaaacttaataacagtataaaatagaattaaataatataagaccatttccgtaaataaaaacaagataacgtgacgtaaatttttctactaaaattatagtgctagacacgtatgagtaataatatctccatttaaatagttttaaaaaagggtgccacgctttaaaaaaataaataaataaaaaaaaaagagtgccacgttaatgtatataatatttgtgtataattttagttgtaggtgaattatagtttttgagctttttatttatttatttttttttttcagaaaatcctgcatccattaaactagaactaagcatccagtatacaagtcatacaaatatggatcatcttctacctaaatagttttattagtaagggataattacataagacactattttttataaaaaaaaattatattttaacgtttaattttttttttttttatatttttacagtttttcataaaaacaacacgaaaacaacaagaaaattacataaaaataacatttaaataacatcaaaacaataacnnnnaataacatacagataataaaaaattaacaacaaattaataagagtacaatataaaaagaccgtattttctataaataaaataaaaaaaatcataaaatatttaaaattctgtaaaactgtatttttataattttttttattgtttttgtgtatttgttaaataatcccttatctaaacatagagagaaaacttaactaatttatgagcagttgcgttaggctgcctaggaatatggctaagtgtagcttgagaaaagaaagataatgtgctgaaaaaattacaaatatgctgaaaatattacaaatgtagtcttagaagatagtaattgggccttggaaaattaattattagcccattcttttaagatgacatatttttttaaaaggaagtcttttttttttttgcctcatcctcggtggctgattctaagtgccttaaaagtatctccaatgaaaattcagataaataatacaaaaatatagcttacttagttaaaaatgtaggtgatactgttgaaatttatttttaccaggatctt

SEQ ID NO: 53963 - DNA, 978 bp, Cannabis sativa
tattcacaagatgaaaatcactgtttcattttccaaacatatgataattatccaatttattgcttttgcttgcttgcctgccaaatgggtttggggccaggcatattaggccgtgtaagctttaacaaaacatttttaatatcatttttctcttttttgtttgtgttttgtcaacataaattacgatttgacttctttcttgtgatttttaaagacctcttttcttgtactacttttatgtaccaaatgccaatcatcgagggttggggagacaatactaggcctactaaggaatctatcttttttcttaattacgtacactaatcatcttctcattataaaccttttctttgcttttacaactttttttaattccttttttatattgtgaacatatagaaaaggacatatttcaatgcctcagtgatcatcatcagtaaagtattccaattccaagacaaaacatcctgaaatcatattaattcattttctagggaagaaagattgagcttcactatgctccatttcataacaataagagcaaaaaccatgggaaatgaatacccatgcatgaacattattcattaccaaaaaccaagtaatgacaatcaccaatctgagatgattgtttgtgtggtgtttctggtccatgcaaattaatgaatgaaaaaaaaaaccataacaattttgatcactactatcagatctttctatatatatatacttgtcatgtgtatatgagatggaaatacattttcatatcatgatcaaccaatgaacgacataatcatataatgtctttttttttttgagtggctagctttctaatatgttttgggagggcatacatactatgtgacttaaattcgaagggatttctaaggtagcaaaaatatctagctagaagaggataagagtggctttatgagctcttgattaaatatacatttatatacatatatatatataataataata

SEQ ID NO: 53964 - DNA, 1182 bp, Cannabis sativa
ggcccgaatgtaaattggattgcattattttggaattttatttgataatatggaatctaaaatttatttggaaatgattgaatatggaatgactaaattacccttgtgagggtgcatgtgtgtatttaagccctaagggcaaaatggtcatttgaccatatttgagtttcatttaattaaaagtgattttgagggaaatatatgaaatttgctggttatttatccctctcacccgaaccctctttctgtccctaaccctctctatatttgctagctaaattgtgtgaattgcttaactttttaagcttggaattggaaggattttaagcttggaattgaggtattttctagctgagattatttagaaatttctgttgtaatccttgctggtattaattgttgaaaaagcatgtttgggattgtgaattgcatgttcttgatgatgatgatgataggttgcatgatagtggtttctttgattaggttaagcatgttatgcttagatttttgatgttgtgcttggttgagctctagatggagttttagggcaactctcttgtgttttattctggttatttctagtgtttgattgctggaaattaattgaggagcttggctttgaagttcttgagtatgagcttcagtattgctagtttgaagcatgactttatgtgtgtcatgcaatctcaaatcttgagtttattgctggaaatttgtgtttgaaacatgagttttaaatccctagtgattgctagtaactttgaattatgatttagaagttttggttaggagttggagtgagtttgattagagtttcttgctgaaaattcgaagttttattgctagtttttgggttctgcaccaagatgtcggggcatgctctggagcatgccgcggcccgcccctcttggtagaacctgggttttgtcccaggtgccgcgacatggtttgggcatgccgcgccccgccctcgtgatttttggccagtttatgttgaatttttgaaaatgcataacttttgattctgaactccgatttgggagttttgtatgtcgttggaaagctcgttccaagctctatatgattatctgaaagttaaagttcatgatttaattttataaatatggaaccaggggttaaccctatgtgtgaaaaatcccggatttgtgtgactaggattac

SEQ ID NO: 53965 - DNA, 1464 bp, Cannabis sativa
ataaagttcctctgactgaggcaagcttaacatatcgtaatgccaattgaagtccgttatactgccccggtagttgactttagaaaaaatgttgctgaacttgtcaattaaagccttagtgatatccttcatttcttcatagtgattaccttcttcatccttaatagattgaatataattgcgccttcttctagtaacagtactagccataaagaatttcgtagcacggtccccctccttaagccacgcaactcttgatttctgtcgccaaaaaatctcttctctcgccaatgcctcattcagagccaatatagcctcatcatgagaaacctcatccattgactgactgccttcgatgtctttgagcctcgcacgggcttcagagatttgagtggccagtttacggaaatgaattttgttccatttgtgcaaatgctctttagtggctttaattttccggtacatattaaacattgggtccctatggctttgagtcatccacgcctttttcacaacccagaaaactctggggtccctttcccacaatagttcatatttgaattgaggctttgagcagtgccgtcccccacaagtatcaagaataattggattatgatctgatgatgcagccgtgagatgactaacaattgcattaggccaagccaatctcttatctaccgacgcaagctccctgtctagtctggctctcttgaggctgggacttgatgaagagcttgatcccttcttgaaccaagttaattttaccccattaaagccaagatcaattagacccgatctttgcacagctcttcgaaagtcaaaagagtaccgactgatattactcgcccttgagtaattcaaacaatcactgtctaatagtgttccatttagatcccctattagcagaacaggcagagtgcagttgcagacaaactcactaatctctttccaaaagccttactttttctgcatataccggtggtccatacactcccatgagaatccaaggcttatcaggagggtccgaagagatacaagcctgaatttgaaacttgtccgcccgttgaatgttacaatccacacctagcttccaacacaaagcaagccccccagcagatcctactggaggaacatagcaaataccatgaaaatgaatttttttcatcaaaccagagaacttatcttttgataaccttacttccgagagaactattacttcgggattcgacttcctgattaaatcctttagttgtcgaactgtcgctgcattctcgagaccgcgacagttccaagctatggctttcatttggaattgggagtcttttttgggcaagactccacagccccaaactgaaaaacctgacttgaagaagtaacattctccggattcgattccttcacctcctcaataacgcacgaagaacttggctttgggatgtaatcaactaccacgaaatgattgtt

SEQ ID NO: 53966 - DNA, 1464 bp, Cannabis sativa
atattttctcattacaattatatattgttgatctgctttggttttagggacctaagaaagaagacttagtacgttaatattacactactaatatttattattgctcaattatctcagtagatcaatcaaatctattttctatatcattgaactactcatagtgttttaaattatctattgggtcactaattaactctctcaagaaactaaaaataccattcaactcccaaattcatgtttctcgaaacaaaaagtatggtatctattttaagactgggcttagcatatgtgtgaagtttagttgaggatgacataatcggttagtactacattaactcatagtgttttaaattatatgcaactatcatcatgtcattataaatttctaacatctatttcatcaaaagtattcacaaggattggaatacaaaccagaggcaatgccagcagctgatccagcagccacaagtgaaagctttttgttagaacttttatcaaacacattaccaactcccttagctatggaggttccaatttcaacactgggaccttcagggcccaaagagttgccagtaccaagagtaacacaagcagcaactgctttgagaaatggacgagacacagccttgacaccattccaaactgaactaggcaatccatcaccatcatcaactaaaccatttcgaatttcgttaagaactccaacaatcaaacccccagaagctggaacaagaaccacttgcttccatatatcttgaattggctcctctctcacccaagaagctcctctatgcggttgcccatcccagaacaggtctcgaatttcatgaacctgaaatcaaagacaactattaaaatgagaattcaattgtaaatttcaagtaaaaatccaagctttattatgggggtttaactcctttattgaagagaacgatgccgatccctgtgagaagacccactaagcaagaatatattattatattcgaattcccacttccaccactgtcattggaaccactttcttcttcttcttcttcttcttcttcttcttcttctttttggaattgggtgctgttagaaagggccaaacaaggccttaaggaaaatgactctatgttcctcttcaatggtaaagattgtaactttgatgatttggtgcagaaaggcagtggtctcaatctcaaagggttatgaaaaagctgagaatttgggagtcgccatgagagtcccaaagctcccattatccactccaccagaaccagaaatggataatgtttctttattaaaaatcaattttttattttatttttaaattgaaataaatactataaataaaaatcttaactgaaaataactaccgccggcacttaattttaattggaaaaaaattaaagtttctcgttcaaaaatttataactattgaatattgccttacggcttggcgggattgtgtttttctactgc

SEQ ID NO: 53967 - DNA, 879 bp, Cannabis sativa
aactgtaaattttaaaaaaataaataaataaaataaaagttaaaaaaatagtatataaggtaattttccataattaaggctttgttggtacttcaaaaaaataattagagtactcccattagttctttattttactatttaaaatatattatcaaaataaaatttatattattattaaaaaaatcacttttttctattattttaaacttttacattatgccataaaattttaaaacacattactaaaattaattttttttctcaaattataatatattttaggggctttttcatttttatacttcaaaatagtttttttttcacttttacaaaattccacataaacatctcatagcaactaacggagcaacttaaatcactattaaaacccacatagaaaccatcagagcaacctaaaccataaatttaaaaaataatatataaagtaatttccttatattttattcatttcaaaattttaatattaatatatacatacatccatgtatgaaaagaaatattaaaactcaaaataattaataaaatatatttaaaacaatatataatatttgtaaatattaagcatgactaataaattttaaagaaattttgagtttatagtatataatgtaatgtgtttttagtaagctaaaatacaacttacattagatgttccaccaactaccaagtaagttaaaatagttgtaagttaaaatagttccaccaaaatgagctaaaaaagttctaagctaaaatgcctactctggtcctcctactcgcacacactaggaccatcagcagtcgacaccaccataaggaacctcatcggctcctcctccctttctccatcttcgtgaccccacaccctctctctctctc

SEQ ID NO: 53968 - DNA, 962 bp, Cannabis sativa
  modified_base (325)..(331): a, c, t, g, unknown or other
ttaattactagaagacacctaatcgacaaacactgagaaggaaaaccaccacatgaacagtatgggtggaccaaaatccccatatcagggaccaaaacacgatcaaaagagaagagggttctcatacctaccagagtgttccagagagaaaaagtcttcaacagcaaaatttagtgggagaaagttcgaaatgaaacagtatgaagattataggagtaggaatttggaaaattatttaaaatataatgggtttttttttatttttacactttaaaatattttttttttttgcatttttacaaaattctacatagaaattcttatnnnnnnntagcgctgcaacctaaattgtaacaaaaactcgtatagaaatcctatttacaactagagctgtaaccactttcaaaactcaaaccgtaaatttataaaaaagaaaaagttcaaaaaaaaaattatataaagtaattctccaaatataatctaatccaactaaattagtaattagattgaatcaatttttttaattatatttaaatactacacttaatttttaatattacataaaaaatattaaaaaaatacacacgctgaaaaactaaactataaacaaaatatatgagtttcttagaatattttttttttgtatttctttattgagttgtaaaaagtctattaaaatttaataaataaataaaaaagaaatttaaatagggttttattataggtaaatacatataatatttattaatatatattatacgtaattggattagggccagtttgacacaattgtgttgtggaaaaaacagttgtagttgtgctgtcgggaaaaacaattgtagcacaaatgtaaaaaaaagttgaattgagtgtttggtaaattataaattttaaagtgttgcgagttgttaagattctattataataatgataatattttaatctagtttattataatcaca

SEQ ID NO: 53969 - DNA, 2451 bp, Cannabis sativa
aagaaacataccaaaggaaagagtagcaagagatattagaagagaacataaaaaattacataacccaaaatccaaccaaaatttccatatctactcgataattttctgtctacgctcttatttacaaattttccatgtgttgtctctcacatgacagaacaagcatttgggttctcgtcactgaacatttgaggggcgtggacattttctccaatgtaagctggcgggtaaccatgcccatgcccgtacccgtacccaaaagcaggctgacccatatactgattgattctactaatctcatccatcattaccattccaccttcagccgacacgttctgacccccatcaccgccgccgccccctcccttcttttttccaccgccagcgttatcacctttaccggatcctttttctccagcatctttctctttcttagggggcacaatctcgacgggtcgcttcaacttatcctgcaagctctcggccagagctttcatgtccattgagccaatcacagtcaccagctccttctgcttgtctatcgacatgtcattaaatcctgtaataaaataaaataatacagattatttttttttttctttttaataaaataaaaagtggatttgggtttgggtctgtcgtttaaagggaagaggcgacggcatttcttacctttggtcctcgttaccgttttgtgaatcttcgagatgcaaccctggcagtgtagtctcagcttgagtaccgccgttgtcaccgcaggcttcattataaaataattgagaaaatagattaaattagtacatgtcttcgctgtatctatgtatatttaattaattgtaaatataaattgagattgattttggattaataaataattgttggtagcttaaaaatataatcaagcgaagacaaggtgctcagacccaaaacagaataaaagggcaaaaaaaagtcaattttaaaatggctatcgtgcgccagaaaggagcaaaagtaagaccagtagttgagcctaacagaatctcatggaaaaaggggcgtagagaacgacactagcgcacgttagtggggaccagtaaggaaaagagagagacagaaagagagaagagttacctccttctctttgggtttcttctcgtcgggcttcttcttaggttcgtctgctttcttcttgatgtcgttttttgcgttgttgtcgtccttcttgtttggctgtggagaaatcaggtcgaccttttttttagccttctcggcaagcaactcccggagtttcgacgggtcaacttttccgatcactgttagcttgttcgtcgcgaactctgttttcgctgcttcgaccccttcatttaaaccaccaaactagtcagtaatggatccttgatcaatttagagaaaaagttaggcaaaaataaaatgtaaatctcaaatagagaaaatttgaaagacacggatgaggaagaggggaccaatatgcatggttattctactttccatttttattattatagaatctgaaagagaatttagcagattaaaaatttgaaaatgatttttgataacgaatttcccacaacattcttactgaagagaatgtaaaccaaacctatataggaaaactaaaaaagaaaaaaaaagtagacaacaaaacagaattgttaccatcgaaagccttaactatcttcccgattttagaagcgcaaccttcgcaatgcatgtcgactttgaagaccacagtaatggggttatcgtccttcttcttctgacctccatcgccattcttcttttcgccaccgttcttcgtctgcagcaacaaaacagtcacaacaatgctttaaaataactagttctttaagaacaacaatatatatatagaagagactcacctcgcccatagtttgcagtgaagagggttttttcttctggtttgagtttttttattcttttaagggtttcttcttttccttctctgattgtaatgtgagaggatgagaaaacgtgacgaggatggggaagtatttaaaggagtagagaagagtggatgttttggagggttagttgtaggacagtgggagtggtgggtttaagctattattatggcattcattatatcatcatatatcatatcacatcatatcattcacccagctatcataccatgtatggtttgtatggttcgtatgaatgtacatgtatgtatatagtacatagagcaagactatggttagatctagtaaaagtgacctagcagtaaaaaactttgaaaaatttgattttctatacttaaaaatctttaaaaaaaaattccttaaatgcatacttaataatattggtcaaatatgaccacattcctaatatcccacaaatacttctccacgaccctctctcttcctctctctcaaaatcgagcaaaaaaacaaaaaaaacccagggggtccgaccaatcggacccat

SEQ ID NO: 53970 - DNA, 4482 bp, Cannabis sativa
tttacttttttttttaaaaaaaactttcaagcattccaaaatataaagatgtaaatttcaagcaatgatcagttacattttatttgctttcatggttatgagaaaatttgacactgcccaacctgttacagacaatgacttaaattagaagatattttttaggttttttaacaaatagtatcttagaagatctttcttatgcaataatttcaataaaaacaaaatataaaacaagattaatttagtgtacttagaaaaacattaataattttatcctaccctttatttatagagtcggtcttggactaaaataggctaggtatgtccatacaatctactcagcctaaaaaaaatatttaaaaatacacatatttttttttttataatttaaaatttaaaaaaaaaaaaactatataaatttatcaaggataattatataaaataccaatttttataaaaaaaaaaaaattattatatttttaggtttaattttttttttttttttttttacatttttatggtattttataaaaatacaaaaaacaacaacaagaaaaacacatgaaaataacacaaaaacaacagcaaaataacataaaaaaataatgtacaaataacaaaaaattaacaacaaaataacaagagtacaacattaaaagatcatattttatgtaaataaaattaaaaaccataaaatattaaaaaaaaattatgtacagactgtttttgtatttttttttttcaaattatcctaatttttaattaagacccaataatgtatatttttccttaagcccacaaaatctcaaaatcagccttaatcatatttcattacaaaactatgtatcatgttcacagtcaatatctactttttttttcttgatctataaacaataattatttataaaactaccaaatatgaacttcccgtatttttagcacataattagatactgttgacctcgattttgaccaaccgacaacgaagtcttatttattattgatgttaccacgtgcacacaataagaataggaaggtaaaacagacataatattttttatagaagtttggctcccttaattaacgggtaatgacatactctccttttggttgtattaataccaaaaataacaccactcagatcacaagggttgtggattcttgagtgactcttttaagattacaatatgagaatcagtaggcaaatctcaagtagaagtgatgaatgagacttagtctcttctaccatgcctggggcgtgtagattagagggatagataaaattagatttttagacttagagcttgagagctttagggcgcttaagacttagagaaattagagtttagctaatgttctttatataggagagcttacatgaagataataatctaatatccctaaaataataggaactataaagtatttgttacataataaaataataaataataaataggttaattatcccccccaaaataggttaatagttgatatttctcccctattttcgtgggttgttgaagcccaattcccaacttgagttgttgtcctagacaaaggctacacaccaagtgcctgccaggctgcaggctgcacgccaagtgcctgcgaggatgtaagctgaccggccaagtgcctgctagggtcaaggttgcacatcaagtgcctgccagctttggcaagtgttggtcagtcttagcatgtgttatccagccttagcgtgtgttgaccagcctttggacaactttccttgtaaaggtcaggcttccttggtcgaacaggcatgtttgggtctgacaatcactctttggttggccagcttgtgctcaaaccctggctgaccatacaagctcctcttggccggcctacgtactccccttggccgacaaacatggttgtgcagcttcttgacggactcatttcgcttgttgcttgatgattttgccatgccttgtaaggaggctttgtcctgctattgacaaggttgtgtttcacgtgtcgtcagtcttgatttacgttgacataccatgtcagatggataaaatttaagataatagataccatacactatacacaccaaagatgaaacttatagcttctttggtgcaaatatttttccttcttttttataaacaattcgttgcaactataaaacataagatgaataaagcatgtatgtaaaattaagtgatgcattactaaaatatagttattttagaaaatatttgttataatagtgtaccaaaatttagcatctattagccttttactgacatagtagaccagatgttacgtattgtgctcttttctgatcaacacaacacttctgcaaatttagttactgcaaggtatattcactgtccttctccgtccaagggttttgataagataggagattgtggtagttgcttctttaattcttgaaaagcttctctacacttgtaatatcctggaattaataaatggattagcaactgtaattaaataaattaattgtaattgagtaattacattataatataaataattatatgaaattatttgacaattattgcatttaagacgtcatttattagttaagggtatttttgtaattttgacctgagaagggtaaaattataattttgatatttattgtgctaattgactatattattatatagtatgttcatattgtcttactgcaggtgaattctgacaagatggtacggtatagtcacaattgggtattctggttcgcactaaattttgggtctaaaatgattttattatgtgattatgttataacataaaatatatgtggaattatgaattatacgcgtgagtgttaaatgactggattgcccttaattgagaattatgtaaagttttatccctaggcaaaatggtcttttgaccattctttactacaaattgaaaatgcattattagataagtgttaaatgaaaagaaaattttattttttgtatttcaaatccctagctgactctatctctctctctctaaacctgtcttcaagttcttttcaatcttgagaagaaagctactttgggggttgattttttgtggaatttgttagaaacaagcttgaagatggttaaggtagcatttaatcttcttttctactaaatttaattcttgaaattttaagatatttgtaattttgcatgaaatttttggaaataatttatgttaatgaaatcttgttggtgattttgaatagaaagcttgtatgtgagttttatggtggaaggcatgttgtgtgtgagtatgtgggtcaattcctagttagattattttgttgtgtcaggggtgatttgagcatgaaaattttagctttgtgtgttcttgagttttaaaagcatgaaattggtaatttttgagtttaatattgtgtaaattaagaatgatttatgtggatatttttgctatgttttgggttttgaaaccacctctttgcatcgaaagtttgtatggaaagtatggttaggtgtggtggtgtttggatgcatttttggggtcaaaattttggttttttctaggttctgaaccaagagccgcaacctggttcatgtgagtcgtgacccttaactttgggcatttttgctacctgtaagggctcaagagccgcgaccttcggtccaaggtcgcggacctctcagttcagtagagccaaaatattttataaattatttttgccataattttaattctgaactctgtttgggacgttctttacatcattggaaagctcgtaaggagctatatcatttgatccagtatgtgagtcctgattttgtataaatattttatgaaattggggattgaacttattatatttaaacctgagaattgtgactaggaaatatcgatacttagctaggatcacttgtggattgggatttctcctcatacgttggaaattaggtaaaacagtgaattatacacatagagtaacgcggtggcacggttcataatatgtgattaatttgattaagtgtgagttagggttattaccctaactttatatggtatgaactagggttattagtaccttacatatttatattgagaattggggttattaccctaagtaaatatactgtgaattatggttattaccttaaatacatttattgtagaatagggtcattaccctaaatatgcatagttttgagcatgcgataatgtgatgtaaataaatgattagacttatgaaagttaaggttattaccttaaaatttaatatagtaaattatatgttaaatgtattgtatgctatatatgtcaattatgtgtataagacataactaggttaggcctaataaacatcatcaggatatactattgtaagaacataatgtatgaattatgtatatatgagtagagttatgcggagaaggcataaccaagttagactcggtaattataacggagataaacctcagtaaggctttaaatgtaaaagagacgtgtgag

SEQ ID NO: 53971 - DNA, 816 bp, Cannabis sativa
aggttagttatatcacatactttaatacttattagtagcacagtactaagttaaaaaaaataaaagtagtgttaattacaactacttattataagtttttagttaatttttacgtatgaaatcacatgtcgtaatatattttatagtgatattcgttataattataatattatccatataaattttaaataattttgaataattaacggtaccgaaaataaaattcttgatattctactttattattcgtgttcaaaaaaacttcaaatctatttttgacaccataaattattcaaaaaaattcaaaaaattttacaaaataatattataactataactatattttaagtcactatttttctttggttatcaaaaaaaagtaataacttcaatatatcaataaaattttattacaaattgtggttcaaaaaattcaagctaaactctcttaaggcaattcaaatctaaactcccttcaaaagataaacataatcataattattcaataaatagtctttaaaagcttcaaaattcaaaaaccaaaaatattgatacttctattataaggttgaaataacggtattatttaaaaaaaatatacgaaaataataaaaaattataaaaatacagttgtataaaattttaaacacttttataatttttaagattttatttatagaaaaatacagtcttttgatgttttcatattatttttatgttgtgctcttattattttgttgttgattttttattatttatatatttattttatgcagtttggatattatttccctattaattttatgtggttttctt

SEQ ID NO: 53972 - DNA, 1130 bp, Cannabis sativa
  modified_base (1067)..(1068): a, c, t, g, unknown or other
acaggggagaggtaatattatgggacacaaaaaagcgttagtagaaaaataaacacaaaaagttaataaaaagtaacaaataagtaaccaataagtttgaagatttttgttttggtaataaataatcaaaaggaagcaaataaaggtgtaatcaatagtaaaagagagaaaaattttaagaatcatccatatgcttgtttggctagtttgtacctttgattcacaaagttgacaaaatgatgtaacattaaagatcattatattttgagtatacaagttcttaaaaataaaaaaaatatatttaatcttatgtagagcctaaaaatgacattatacatcaagcaataatacaataaaagattaaacataaaactaaacatcaatattatatttactaaatagtaacatagaaagagcatgactaattctatatatttttagtaaaaataatgataaagagatagagatggagatggagatggtggtgattgtgaaggaaatgaacattaatattacttttcttaatttttagacacataggaagagtatttatatgtttagcaaaaagtaaataaaaatgaacatgatagatagaacatgagcaatactgctattaatataattactaaataaaaatataaagaaagaccatgattaagtttatatatatttagtatataatatcatatataatagcatagatggatgaagaacataaaaataaaagtaaattaaaaacttgcattacttaaataaaaatattacaacaagtgaatcaaagatacaaaataacctcactttgcatatgaaatcatccctaatcttctcaggaagattaggccattatgctcatagttctcataaaaattaaagaaatatgagaagaaaagtgaagagagatttttgctatagtttctttacactaaaaattacacacttcacttctaaaatgatatcctatttatagagccacaaaaggaccaaaaataaataaatgaaagtttgagattataaaataaatattaatatgaaatttgatatttgaaataaaaaataaaattaatatnnatttttgttatcattgttattttgtcttctactctttggatgaaggttgagtgtggaagagg

SEQ ID NO: 53973 - DNA, 1268 bp, Cannabis sativa
tttatttatttattaattaattttcaatgtagacatatattgatatagatatatttttatctttatagagcctaaaataccatgttttatgttgttcgttagttttgattgattgtgagatgagacacaagtttttctatgttagttttacaatgttaagtctctgaaatagtgtttgtaactttatcataatggtgagttctgttgttaacattactaggtagattgggatgtaaagtagaggttgtaatatgtttttcaacttaaatatacaaatatagcagattaaaacaatgaatttgagtttgattcaattgcttttcttataagaactagaaagtatatgctttttttatatatgtaaaatgtaaagataatgtttaagcattgtagtgatgatttccattcctatagattgaaacaatatcgagcttcattaggcaattgcacttggtctactcaactcagagcacaattttatctttaattccttgatttgataatatacgttggtagccattagccacccactactatctaattatgctacagacatacattccagtagccattagccaatggtctgattggcttaagttgtttgctacacttagattagactagacatgttcaacattcaagttttgcatgaattacataaactgaaccttatctatttagccataatatcaaaaagataatatgggttacatatttatctagtcagagttgattggttagtttcaaaaatatatgaaccttttaattaggttagtcttgagctttgttttgttcaagtgattggtataatgcctaatggtatcgttggtggagatcaattgttttgttttcatgtatacaatactttgttctccttagtttctgaattaagaatttctaagtgacaacctataaataatccaactgttttaataaattacatttgcatatgcttgattaactaaagtagcacaagctcaagctgtttgttagaacagaacctgaaattggtattttaggcataagatgtgtatatttatttggagttttgaataatgaaaatttggttgttaaataattggtagttgccatcaatagcaagaaagagtgaggttgggcctattctatttaagattcctataacgaacgtgtggactatgaatggacgagacttctgattgatggctctctttagtatagagctcgggaaagagttagaaagatcatgtttattcactttgacctaaaataatttgcaggacaatgta

SEQ ID NO: 53974 - DNA, 1020 bp, Cannabis sativa
  modified_base (43)..(44): a, c, t, g, unknown or other
cacatcctctctctttctcatctcactctctctctctctctcnntctctctctctctctctctgtctccctttaatcctgatttaaggttttcaaaacccttgggcagccactcggttacagatcaagagcagcgagtcgagaaactcagggatggactcgcttttgagtcttctccaagaagacgataagaacgtgatgatcgtcgttgctcaaggcgtggttctgttttggttaggttaatggattcgagctcggttgaaatgaaggagaagaccgtggctgcgatttcgagagctgggatttcatccaatcatcgctattgaagatttgtcaggggggaacacctgattccaagcttctgcaattggggtttttagaaatttagcttctttctctgaaatcaatgttgaggaaaatgggattctggtccttttggggggttgcgagttcagggacggcaaaatggggttgtgttttgtgatttgcattttttttttgtttcaggtgagctttgatttggtttctgtggtggtagttttggtgaggtcctggtggttttgattagttgatggtggtttataggggagagagagagaactgtaaatgaaaaaaaaaacataaacgaaaaaaaaagaaagaaaaaaaaaagaaaattttttttatttacattttttttcatttcaaattaattttattttaattttttaatattttaaattattttttacgtggatcaatagaattgtgtcatgtgtacactgtatccacgtagatgcacacgtggacagtctaatatgacacttaacacttaaaatggacggaaatgttaaatttctaacagaatgcgagtattggggttttaccgcctaaatttgggttttcgggattaagtgaaaccaaaataaaaattttgagaattttgctgccatttacccataataaaaagcaatataattgaagaagtaatatagaaaaacttccaaaaaaaagtaatcaaaatgcaccataattaataatc

SEQ ID NO: 53975 - DNA, 691 bp, Cannabis sativa
aacaatatttccctctgtaataacatattctaattaggctgtagtagaaactttaatgattattatcatgtttcaactatccacctctgcctatgatgtggagaggtgtgatattcctatttgtgaacaagtttgccagatatcatagcctctgtttcctattttgttgtgctgggatgtatttggacaagaaataagagtgttaaaagaatcaccacctttattaaaaaaccacacagtaatagaaatatatatgctttattttatttcctgcctgtaataatcttgttactatgctggacacattcattatttagactaaataccatcttgattgacatccgtttatttttaatgggcatgcagagtccaaatcagagctccaagaacagaacgtaaatggtaactaactcgttcatcttcatcactgttatccaaaccatagtctctgtttcccctatgcctttcaattagtttatctgggagataaggaactccattcagactaatttggacttggctaattaggaaattagtcacaatttgttgtttcttactattctctcatttaacatgtttcgttacctgcaatgtggttcaacaatgctggaaccgtgtgggaattggaacttcggccaccccagaaacgtcctttctgcaatggtgcagcagccaatttcaagctgcaagt

SEQ ID NO: 53976 - DNA, 1289 bp, Cannabis sativa
attggaagttattaaattttattagcaaaatattttaaaaaaatagcaatacactatatttatagctctccgttaaagatgctctaagtaagatatatagtgttatagtgagattttctcgcttagaaactcgagaccggactcctatgaaaatgacacgtgtactcactctcctcgagggaagttgagatgtcatcgagagacccctcgaatatgaacctcgcctggactagattcagcgagatgatgtgaccatgacagagtctagtcgcattcgtacggctcgcataggataggatcaaggaacggtttaagactcgtatataccgggatatatgtgagaattctcgagatcctcctgcgaattgtagaggtcgattctttactctgcgagctggtccaaatgacccaataacctcgataacctgataaggactcgcattccttaggttaccgacttgctacaagatgtccgtataagcgacttgaacaagacgtagacatcttagactcgactagtctcaaatgcatcttaagcctgcgagcttatgcaagaatatgaacagccaactcgcactataaaagtcgcatacgttgctgtatttagtgaaataagctgaaactgtccttcatttattgtgtttacattttttagtttaattattgtaattcaatgtataaacggattgataacaaattcaatctctgtgtaaatcaaaggacggttgctttttttatataaaggagtgatccaacgtgaaatgaacaagacataaattcttgcaacagtggactaagtagaccgtgatatgactgaatcactatactctcttgtgttttttacattttcaattttttttagcattttgtgtccttggtttgaatactcgccactctaagttaagtactcgtgtatatttctcttatattattatattatttattttggtgttgttaaaattcgtaagttaaaacaagtgattatttagctaggcggcaggccacctatataaatatttctacttaattatacttgtttagtttccaattttgtttacagatgtaacaactaatcaacaaatataatcaaattttctatctacgtaattccttttctttgtcttttatttatatatgcaggccaaatccggttattgctaataatcgatactatatactacaacaaaatacaaatgcacggtattaattaatctaatatgcaattattatattttaaccaattcttaacttatcattaccaatcacgcaactgttttgagtaaatatta

SEQ ID NO: 53977 - DNA, 1013 bp, Cannabis sativa
gaaaagcaaagcggggatgagatggaaatcaagtttggtgggatcggactgtgagcaccaaaattggcaggctgaataaaacgacggagaaggaaattttttgaaatgtctgaatttcattcaccgttatatattatttacgtttatcttttttttttttaatatttttatatcattttttataagaggttgcttttagaaaaatttacatcaatttttttttttaaaaaaataaaaatctttaatatcgaaatctttttatttttatgctttaaatattttatttataaaactactttaataaaaataataaattatttttaattattttataatttatttataattgtattatagttattaagatgttgtttttttaattatttttggttgtttcatagtttatttatacttaatttataattatcgtgagattaatttctcattattttttaattgtgattttattctttttaaacaaagtatatttttgtaattttaaaattttatgaatatatttttataaatatgaactctatagactgtaatattttacataatcataaacaaaagtatttttttaaaattcttcatatttttatatcattaaaaaaaatcaattaatgtcaaaaaaaaaaaaaaagcaaagcccaatgtgcttttttgaaaacaaatccttaaaaagaaattattttgtcaaataagaaacatcaaatttttttactctattttttaaagtattttactaaaattttacatttttttattttacttcacacatttatagtagaccacacatcacttctttataatttctttaaaccatttaaataatatatttataatacacacaaataataaaatattaggatatagcagtaaaattacccaaattttatattttgtaacatttaaccacaaaaactgattttttgatgatacattttgttttgctctttacacttttgtccaaaaccctcaattaaatgtcacggtagatacatacgtgtaca

SEQ ID NO: 53978 - DNA, 918 bp, Cannabis sativa
gtggcaagtttttagtggtccacgtaatattaattttaaatatactaaaaataattaaaaaaaattaaaaaaaacaatttataaaaattaaaaaaaatcttttttaattcttttttcttttttctctttttctttctctttctctttctctttcttctcgacaaaaccccctcccctaacccttcttctttttcttcttcttgccatggccggcctcctcctcctccaattccatcaacttctcatccatctcacggcaagcacatggaaccaaacccgccagaaaattggaacaaaccatcctcgtgtcccgcttcctgacccgaccaggatctgaattgtgaccctcctcctcctccgtcgtcgtcgccgtggaagtggtggtcagcggaacaagcaactgctgctgctcctccaccccaaaacaaccaatgaaccccaaacccctgataataataatacaacaacaaaacctagaattgggaaacccacttcttcaaattccatatactcctcggcaagctctgtactcaagcgcaactcaggtaatctttctatctctgaattacgtttatgctttgatgagatgattcggatgaacccctttcctccagtgtcatcatttgaacctttgattgttgttttagctaagaataagcactactatgatgtttttaagctttatagttggataaactcaaatgggttgttccctagtttcataatgattaatgttttgcttaatggcttttgtaatttaaattgggtttctgatggttttgtggcactgggaagcatgataaggagaggttatagtccaaatattgtgacttatacatctttagttaaagggttgtgttttgagaagggaaatttacatggtatactaatttttaccatttttttacaaaaatactg

SEQ ID NO: 53979 - DNA, 3200 bp, Cannabis sativa
  modified_base (690)..(701): a, c, t, g, unknown or other
  modified_base (2002)..(2003): a, c, t, g, unknown or other
ttcctgccataaacagattatatattctgattgtatcaagatacaatcgaattcaataaggaaaagtccataatcaaagtttccttaaagaaaccaactttccataagagaattacttctcttacaagaagtttccaaacaaaagaaagtccaactgaaaagtgcatctttattaacatagaaaatagcaactaaaactgaatatacaaggtaagacaatcgggtatgaatgcaaaacaatcttaccataagaaaaaatattttgtcaactaacttgcccaaaaaggactttacagaacctacattgtattttctattattaattagtgtagtatcacaatagcacatctagaatttaaatatatcaccataggttggtagttagactagttatgaagatttaaaattgatactacactaattaataatagaaaatacaatgcaggttcaatataaattcatacacatattcataaattattaaacagttagaaagtaataaagacacatgcaaatacaaaacaaatacatcttaaataatttctaaggttttcaacaagctgatatatagtgtctcggtaggcgggattcaaagatatcatcagttcaatatagtagtcagctcatttaaaaaggacactattttaacaaccttttattcgatcaaaataagaatctaatattgtcccnnnnnnnnnnnntcaaggttattcttattttatgacttccactattgtttcatattcataaatttatttctaagtagtcaccgttatacaaaggaaattttacaaagtacttatctttcgagatgttacggtgttaaatgttcgatgtaagaccatccataaggggatgaagtctagcatctcaaggtcccattaaaatattaaccatgtaagatcaacaacggagatcgcatgttcttaaaattaaagcaagaattgtattttcatttgatatttattttaatctattcatttaaatctatttatattaatattaatatatttatttaattaaaattaataatttagataaattcaaagacaaattttagtttaatatttataaattatatactcacatagatctgaaaaataaaaaaataaaaatatatttcatccatagttttaattgtcaataaatatcaagaaaaatgcttaacttgagtttgtccataattaattaaacttaattttcaactcaaatttaattttctataaatatatatctaattaaattcgaaactaatgtatttaataatatatattttaaaaatctattaaaataaaacaaaataattcttgaaaattattctaatttatgttaatataaaattaattaattaattttgaacacaaatataattttcttatttaattaaatctcttaagaaaaatatctaatatttaagcgtctttaacaactcaacttaaatattaattttctatttacttaaatacatctggaaaaaaataccaaaagtctacttagaaaataactatctaatatttcataatataaattttgattttctacttaagatataatacaatttagtatatctattttatcaaatcattcatcaaaaattacttgatttaagttgatctaaaattaattaacgaattagttttcaactcaatctaattttaaaaattaaaaatttcaaaatatctacatttaaaattaaatgtatttcaaaattacataagaatgattattaaaataaaacaaaatatactttgaaaattataataatttaagttgatctgaaataaaaaaaaaatccaacttcaatatgattttcttattaaatgtattaaaatagatacaaaaaattaagtatcttgaataaaatcaacttaattattaattctagttcaatatccaaaatattctaatttaagttggtctaaaattaattgtaaattaattttcaacttaaatatagtttactatttaattcaattcttaaaatagaaataaataattaagnntcttgaataaaatcaacttaattattaattctaatttatgttctaagaaaaaatattctaatttaagttggtctaaaattaattataaattaatttttaactcaaatatatttttctacctaatttattattagaaaatttaaattagttactaaaaattactatctagaattatttcattaaagtaagtgtatttttttaaattaattttaaaataatctaatgaaaaactaatttttatttattttaaaattaattatgttactaattaattttaattaggttaaactaatataattagcctagtacaattattttaaataaggcaaatgtgcattcacagttagggtgactcatgtgagggagggttgtgtttagtatatcgcaaccccacttacctatcccctttaactctcacacaaggccagaagagaggaattttacctttaaataaataattgttattaattgaataagctcaatagtaattgggcctaaataaaactatcaaattcatattttatttagcaacctagtccatttagatatccaaattaaatgggcttcctatatgcatctaagtctaatagcaaacatatagggtcatatataaacctatgttgatgggttttatcatgttactaggtttatcacaaatgaaagaaattacaaaattacctattttaaattatttatttgatctattgacaattggactatgattaaaattagatcattagatctatcaacaagttaatcatagcaatttaaatcaaataaatgatatgtttgttaaaaaaaatgaattaaacaaccaattaaacaaacaaaacaacataacaagatcttgaaagttggttaaaatatttgtattgtaaaataaaatatttaaaaaatatcttaatttgaatttaaattaggttgttagaaaatatttgaaaaacatattaaaatataacaaaattcccatcttaaattcaaatatccaaccaattttcaaatatatagtttatttaaatttaattaattaaataactaataagataatataacataacatcccaatttgaaaatttaaatatttccaatattataatttaacaaaataaacaaatttgaaaataaaatactttttatagttaggcaattatcaattttatttaaaataaatttttataaatttgaaaattttatgat

SEQ ID NO: 53980 - DNA, 1809 bp, Cannabis sativa
aatacttatattgtcacattcatagaacaactaaataagtgtttaaataaataatacttatattgtcacaaataacaatactataatcccaattatgtggactcatcctcctcctcctcctcatcatcatcaccattctctccaaactgttgttgtggaatatgcgatcttattggataataaggctactacgacacttctagcatttacaggtagtacggttattgtatgtgtggcatttgctgcattgatgtcatcagtgatgattgctgcatctaagacactggtggcatatgttgcatcgatgacatctatggcatctgttgcatatgtggtgtttgctgcataaaaattttctactagagtatatgtttcgatgcaaatttgataaaggcttgaacaccttcccaataagcgtcatcacaataatttttcgtcattcaatttttatcgatcgtcatctaaggaaaattttaaatgaagatgattattatgattaatttaaaataacttatactcacttattatgatgaatgatcttttattattatgaattcattatttatttatttaattactttaattattaagtttatttattatttttaattattatgaattaattttctatttaaattattttttaaaattatttaaaattatgaaactaatttaatttaagttctatttataaggaaaaaatataataatactcaaaatttgttgttaactataattttaatttaaccgtaatacttttactttttttttagaaattaattaattattcaaaaatttattttagaagggtgaaagtctaatttttgtaaaaaaaaaaatattgtaaatattttaatttaaatgatttgactagtaaaaacatcataatttaaatataaaaaaattataaatattaattgctaaaaggatttcattaaatatttaaattaaaaattaattagtttaagaaaataattaatttaattttattaaagaaaattttacctattaaaaactttctatattacaggtcaaaacaaatggaattatcatggttacaataaaaaataaccattaaatagttatccagcaattatatatattctatattttccaaagttgtattgttggaaagaatacacattaggaaaataattaaacaagagtttattatgtgtgttactcaaattcaaataatataatacatccaacaatatcactacaaaaatattaaacatacatatattactaacttatatatcattaactttttacacacattaatctaacacaatcatcacaatggtatctaataaaatttgtacataccaagatagacccactgcccaccccagagaccaaataccaaaattaaaacccaacaccaaaaaatacactgcatataaaaccttaatatatatatatttatataaaaataaatatgtgaacagattaatataaaaataaaaaataaaaaatcaaatatatagttttatatattgaaacacatacaaacatatatacacaagacaaatttaaatagtttccgaaaaaatgtatcactgtaagaaaaagaccactgccaagattgaaatccacaacagaaaacaccaaccattaaaaatacccactgccaaatcctaaaaaaaattgataaatatacaaatatatacaatgatgatacaaataaacatagctatacataaaaaaatatgaaaacatataaatatatatatataaaaaaaaaacataccttaatctagccaaagcttttcacttctcccgcattatagtcggagttcctcaccc

SEQ ID NO: 53981 - DNA, 2354 bp, Cannabis sativa
ttaccactcgtcaaccatgagctgaatatgtcactatcgttgcctggtaaagcaagcgataagtaagaaacctatctgaagtttcaggattaattacttttaacggtaataaccgcttccaaccctcagtcataactgaggctcaacaaacatttaattagaatcttgataataatcaagtctgtaatcattcatctattaacatttaaccacatacggtgcttaccacttctcttaccttaattcagaactcaagcgtgtgggccgacctgagtggaaaacaagttgggcgatcccgatcctatgtcacgacaaccaaaactcattaaaaaccctaatcaaatttttgagaataaaccctaattcttataaccggactaaccctatttccccctggattaaactaactcaaatatccctaagggtgcatttgtttttttaaagattcagacgtctgaatctgaatacatatctgaataataagatattatctctgaatctgaatattgaaatatttagattatttgtttttctacgtctgaatatttattttaatatttttaattatatatttatttgattattttatctatgttctttaaaaaaaaattaaatacttaactataaactatgattaattcaactataaaataattaatattatgtatagaaaatattcattttttaatagaaaagtattatcttttgtatttatagagcaccacacctaatattatttgaattgtcacaattttttttaaagaatcataattttatttccaatactatatatgtattgaaaaaaaaatatagtactacgttattaatattgcaccaaaatcaatacacctaattatatatatattattcttgcaagaaaaaataatatatataaatatattatatcataaattatatcacatcaattagtttttttttttttaaaaaaaaatcatatatatgtaccctatttaaataacgttagatgaaaaaaaaaataacatatataataaaaagccaaatcaatcttatcaaattattattattattattattatttaataaaagacatcatagtcatatattttatattatgtatatgtaaaagggtggacatgtatgatgtatcgaataataaaaagatagtgatcaaccaagatttgactatgaaagaaaagaagaaatgaggtctgaaattttttaagacgcttttacaagtctgaccgaattagtggtaataagtaccaaaaagaggttaaaaaaattaaaaaacaaatagacttaatggggtaagatctgaccgaataagattcgttgtgttattaagtgcaaacaaatacaccctaaaatactctgaattacactctggaagataccccgaaccaaaatcagactcaaggagaaaatccaagattttcccttggtggccaaactggttgaccggtttgccagttgcctggaaaaccggtcggccagttttttgggcagccatggggaaatctaatttttcaccccaaaatccgatcaaacctccaccaaacatgctatactttccagaacagtccaatataacaaatgaaacatatccaaatcaccaattcatcacaattcatcaatttactcaaaattacattctcaaatgaaaattaagctcaaattacttcactaaacatattcaatccaaacaaccattaaaattgcttgattcaaactccaacacactctaaaacagatctaaaaacacaacctcaacctaatttaatcctacagccacgaaatcccaaaaccctattccaaaatcaacttaaaaattgaaaattacaatcctcaaagaaaaggacttacctccaaagcttctcggttgatcttgggtatcaaatctgctcaaaatcagagagaaattgagaagaattcccttggttttggttagcttctaagtcacgaaggagagggaggaagagaattgatttttggtaccttttcttctaataccttctaaaacaaaagccctttactattttaattaacttattattattattttttattacataaaataatcagccaaaagaagtcacaaaaggacaaaaatcaaatgttaatcctcaaaataacactttcacccctccttaagtaaccctaaacctaaagcacatatatgggtaatttagtaattctagctaatccaccaagtcgacaacccaaaattctaagctagtccggaatacttccaaaataatccatcctttattgtcgtgacatttttaaccactccgtcgatcttccacggtcgtcgggctcgaaaatattttattctagaaatggttctacgatacccacatattctaataaaa

SEQ ID NO: 53982 - DNA, 1535 bp, Cannabis sativa
  modified_base (1504)..(1508): a, c, t, g, unknown or other
tattggttagcgaggctactttggtcgcctatccctaacggcttgaaattgcttcttgaaatccctagacaactattcccatgaaattattgaatgacgagtgaacttgttaaaccaactacttgctgctccaacaagcgaggtagggaatataagacagcataaatttttcgtcacgttactcgctcgcattatcgtgttaaagttattcaaatgcgagactagatctgtggttccgttataggacgagacattgggtttttgaatccgaaggaaaaggggtattcataatatctgggtgacacggctccagctcctcgtcagagtcgtatccagatgatttccctatttcccctacttgatatctcctgaacttgtcctccagctcgtttatctgcaattggattggatcctcttgctttggaccaagttgttagcgaaggtcaggtttcttttgatttaagtgctcttacagatctgcttgggagtaatagctggcagatctcgtcttactcattgaccgtatcctacttatagactttatttttaagtggctcacggatttacttgttcccatactctcccgatcactagctcaataagtaccttctcctcttcaagttgatcgactatgagttctagattgcctagaagtcacactagcctcttcacgctctgttcttttctcccgagagagatttgttgtattttctccatcagcgtacgtacgagtcctcgctctgtgggtttgggaagaatgctggttattcctagcaggtgatgtccattctcctggctgagttcgaagatcctcctcattttcatgagggatttctcgttcaccagtttccagttgtctcctttcgggttgttcatcctgattctcaaggagtgtctcattttccctaggttgttcttcccggtccttttcctgtctcttggttcatgagccacgaggtctggctcgtggtctccttactccaggttaaggttgattttaagcgttcatcccctgtgccgccttcgtcgaggctgcctctcgttctaactcagcgtttcgacgctgcgcctcttccaggcagcatcttaggcggtgggtctccgtcttgtaagttctttctcccacatccacggttgagcccttcatccatcgtcttgggattctgaccattctcgcgctaagttctcctcgagcgtgttttccgagtactaggaccaacgtcgggttgagttttctggggacgtgtggttcgagtactgggaccatcctcaggttgggctctcctagaacgggttgtccttctggacggtggattagttgatctcctagagcccataggttcttttctagaatgatggttagtttcctcatgcggagtgggaatattctctggatttgcagccatgaaggagaaggcttttctttaaaagaatggaaggctttttctaagctttttttacagaggctttcgatgaaagcgccaaactgttaacgcagattttnnnnnaccaaatttgagcctcacaattatgat

SEQ ID NO: 53983 - DNA, 787 bp, Cannabis sativa
aaaattatcttgaaataaagttctttttttaaataataataataattattatgataataataataattttgttatgtggaaagcatcttcatattttttttactgtttccaaaaaagaacaactaccattaaaagtaatctttttattttttttataaaaatttttaatagaaaaatcctaaaactttaaacttaataaaattcaacatattaagtacatcgtaaattattataaaatttttcattatgctatatttaaaagttatgatatggtatactgataaaaaaatttaattgataaaataatttcaatatgttaatataaaaagttataaagttataaataatatcttacacataatagaattaattatattattaaaattattatatatatactaatttttctaataagttatatggtaagtgcttataatttattaataatttttaaagataataaaatattattaataaaaaaaataacataaaaatatcttaataaaagacaacatagtgtacctaaaattaagtttttgtaatgtatattattttcactttttataatattttgaagtgtttttttaaaacagtaatattttgaagttaaagatagtagataaatattttattaaaaataaataaataaataaaataagaataagaagtgcacaaaggaggccagaaggagacagatttttttaaaaaaaaaaaatggataattacacgcaagaagagagacaataatattacaaaaagaaattatagaaaacaattaaaaaaaaaa

SEQ ID NO: 53984 - DNA, 1598 bp, Cannabis sativa
  modified_base (1112)..(1119): a, c, t, g, unknown or other
  modified_base (1184)..(1185): a, c, t, g, unknown or other
atgtcaatcacaaaaatttaaatcctaccgaaagcctttttgtaataattttatttagaaaaaaatgtgatgcacataaaattcaaatacttatcaattatatttagtcacttaactgttagatttatacttcttctttattgttatatattagttttaaattatatttaacacttcgaaaatacaatttcatatttatatttttaattaattttgaacagatttttaggatattattttatttttaaaaatagaaaatatctttggttaacccaaaaacttttcttggtgatattgatagcaatgtgacaaatggcaagaaagataacagctcagaattaagtagtctcgagtcatagcagccgatttgggagggtccatagccctgcgtcaagttgactttgggaactccggaatagaagtttagacttcgataactcatttccaactctctttctttcactattttgtaccacgaagatatagggcaaccaaatccaagccccaagagctgaaatcacatgaacttgcaaaatggaagtcaatctgggcacctagggattcacccagtgcccatgttgacatcctcaactagggttttagttttcgggaatgtcttagtggaaataggtcaaaatattctatgacacgaacatatttgaggcattaaattcaaattcaaattcagagaaagttcatttttgagcatccgatgtcccgacacccaatgcccaggtcaaaaatttgtcaatctaggtgactttcaagtattagatcgaagatttgaatttcgtatcatctttgtctttcataaaaaatcaactaactacaaaacaccctttagaggcattttttaaggcttttcaacgtcagttttagccaaattcgctaccaacactgatttaggtgacactgtagggtctaaaataaccgacgccataggattacatatggtgtatagttatttgctaggaaccaacgccataggggtacatatggcatcggttcctagcaaacaaccgacaccatatacacccataacaaccgacgacaaatatctaatgattattttttagcgtatttaatttaatttaatttatttaaattatatnnnnnnnnatttatatattatattatttaatttaaattcaaattagatatttttttaaaaggtaaattaaatnntatttaaattaattttatgattggctaatataagtaattaaataaattacaattaaatattacacaaatattctaaaattagtccaagtattaaaaagttaataaatttaaatacaagttaacctaaaaaataatatagggcagaaaaattcttaggcctttcaacatcaatcgtccaagccttcgtgaatcaccgccatcaaccgttctatccactgtcactatactagtaataaatcagtttttagattgtattcctgcttgtctccaaactgaaaaaaaaaaattatattagttaatatatattattatttatttttataataaatactatataatcaataatgaaaacttactgctttttgatcttgtatgtaacagttggggtttgcacgtgcgatgatgtcagtcat

SEQ ID NO: 53985 - DNA, 1058 bp, Cannabis sativa
attaagggatgatatgagtttttattttgaatcgtaaaactctatattttttacatgttgaaaaaacagtatagtgtaaacaattcgtaataaaccgtacaacaacatagaaattaataattttgttttatcaaatattttaaagttgaatataaattgttacaaaaacaacataaaagaaacttaataacaacatgaaaataatttttattttatttttaaattttttttgtgatttatgtttaggtattttcaattttttttaattattcgttaaataataacaaaatgtatacaataataaatatgagaagggaccttcatactagctacgtagctattgagtccatatgaggaatggtggccactgatttctacgttattatcatcttatgtatagaaataggtggcagtggggtctatatatgttagtagtaagtggggtctgttagaggtagtgggctacaaagactcatgagaatcacatgcaactccctttatgttcattcctaaaatgttatcaattgtccataagtggagtcagtccgtatttttgaaaaaaaaaatagttttgtattttcttttttgtttaatttccttaatatgataaaaatgtaaaatttggacctaaaatgcttattatagaaaaaaatcccttttgatttctgtgcatgggtagttgttttatcgcttgaaatatatttattagggtgtattatgcaggtctggaaagtttggttgggtttggaaacattttggttagggatttggtttttgtaggttttctgggtaaaactagataaccggttttacactacctgtaaaaccggttacccggattttgcagcagagggggaaaactggtttttcagcttgtcgtttcgtgtcagtttcaggtttctagttggttgtttccctgctagtttgggatattgccatattaatttacagtagataaggttttggtttcaaatcttagtcccagttgtgatttagcgagtcacttatgtgtgttattatcgatgtgatttaggagcctataattcaccgagcagttg

SEQ ID NO: 53986 - DNA, 542 bp, Cannabis sativa
aaatatatctactaaatgtatggtttgaattgaattgcatcaaatgttacatagtagatttgagatctgagcattttccttcaagtgcgagaaagatgtgtttgttcgtactatcttctaaagcttgtaattgactttttgactgtaggttttcggtttggttgctaagaaaatcaatattgtttttagtttgtttcgtatgtgtgtttgtgttttagcaaaaaaggtgtggatagtttggagcttacgctactgttgaatttagattgttctaaatgtatttttagagtttctgtttggtttccaagaaaatgaagtaaaaatcttcccttaatagtctgtcaattgtgttaatatatgtgatctaatagtctcttaattgtgttaatatatgtgatctaatagtctgtcaattaatgtgttttgattaatctctcctttcacacctgaaggaaatctatcacatcatttttttgctgcctatgatgcgctttgtgaagaaggaacgacaacacctttatgcaaggctcttgatgaagttg

SEQ ID NO: 53987 - DNA, 2572 bp, Cannabis sativa
  modified_base (694)..(697): a, c, t, g, unknown or other
  modified_base (2035)..(2050): a, c, t, g, unknown or other
tataattttaaagtatgacttaccttaaaatgaggcatatatctagaatttttcaatatctcttcaggaacatctttaaattttgggtctggtggttttaatacatctgtactcatatgacacatttcatctaaaatcttgttgaaatatcgactaactgtctcgcctgagtgctggaatcgctcttgtgttaatcagtttctagcgctgtgacctaatgtaaataaaaacatacctaatatttcaagagtacacatcctctttgaaccctcaaatccataattagcttccaattcattgcataatttaataaaaaacatatttctccatcttaaatattctataacatctactttcatttccttgtaatatttccatcaaccacatatgaccagtttgagaagaattcatacaagtagtattttcaatgtatgttgtataataatgttgaacaaggtatgtagctacatacaccgattgtaactcagtctcgtcatcggtctctgccattatgtttaatttaaaataaacctgtaaatattagaaaaatatatgaaatagatattaaatagccataaagtcttcgtagcaaatacaagtaaaaaataataaagcatatttattttaaatagtgataacaccaagtcttgagagcgaatacaattaaagaaataacataacaaacatatattannnncataacacaaagtttagaaaataaatactactattctgagagatttaacactactacgaaaacgacaattcccgaccgtcttaaaaacgatttttttcgaggaccgtcactaaaaaaattgtgccacaatttaaaaccatcaggaaaatgagtattctcgatggtttggagccgtagaaacaaaaatagccgacggttttggttaaaaaagaaaaattaaataaaattaaaaataccccctatacctgacggttttaccgtcgagtatacccttttttttctcaatatatttagttttccccctcaattttcatttcataacctagcacatttcatctttctctctttgccaccccctctctctcgcagccccctctctctagcacgccgtcgacgacggcaccacccctctgtcggtctccggtcttcggcctcctccgtcctccctctctctcttgcacgagcaccaccaccacaaaaggaccgcgcctccgtcatccctctctctctctcttgctcgagcactaccgcctcaaaggcacgacgcctccgtcgtccctctctctctcttgcttgagcaccaccgcaccacccaaaacagcaacttcagagcaccaccgcaccacccaaaacagcaacttcagagcaccaccgccggttttcaattgggtaatttaatatttatttatttataatctatgtatagatagttatatatttatttatttatatataaatttattttttttcaagctgaatgtatatatttatttgcaaaaatatttaggaaagaaaattaaaattttaatttatagttataatgtgtgaaaatttgatgtgttttaaaaatgtaatgtgttataaaattaagtgttgttgttaaagatttaatgtgtatgtaaaaaagatttggagaaaatttttttgaatagaaatgtttttgatatgtgtaaaaagcttattcattcaattagtttagttataattataaattattattaggtaaaacaaaaatttagttaaaaatttaactattctttatgcgttaagtttaagtttaattagttttatttaatcatttaattaattattaattgataattttgtgtatgtatttatttgcaggttttgggttctttgtgttgaatgaaaattgcgaaattgtagctttctttattggagataggtataatctttaaaactttataattctttgtttagtagagtttgaatatgttagatattcatccttagtgaagtaggttctgcgattaattgtactgcggtcggatgggtggaatatatatgcatggtagaagagtttgaatatcttaaatnnnnnnnnnnnnnnnngtaggttctgcgaatacatgtactacagtcggatgtgtggataattttatattgttaattttattattgtattgttttatgtgtttattacttatttttttcatgtttttaatttttgggaatgtcctattacagtcgttatgctgccgaaattttactagaattaggataaatttcactaaaatgcataaaattcaataaaatatgtatgtgtgtggtaattaacttaactgattatttactacacatttaaacaaataactgatttttttttttttttgaattttcgaaatggatagaattttgatgagtgcgaatagattatcagcagagtatagtgaaggtgttgatttcttggacttttgttagtttaatgccaaaaattccaaattggttctttgtccttgtcttaaatgtggtaacatggagcgtatggacattgctaagataaaggagcatttatttaggaacggaatagacaagagttataaggtttgggtttaccacagggaaaagaataga

SEQ ID NO: 53988 - DNA, 1366 bp, Cannabis sativa
  modified_base (340)..(344): a, c, t, g, unknown or other
tttagaatcagagtggtcttccttagataaggaattttcaaaaataccttatcaacgtgaagatgatatcttacccaccctcaaactgagttatgatcatccatttgaaactttgctttgcctattgtagcttatttcctaaagataaagaaattttggtgagaaatttaattaatctttggatggggcaaggatttctcaagttaatagatccaagtcaagatcaacatttggaagacgtgggttatgaatggtttatgattctgttggaaggatcattctttcaagatgttgaagtagatgaatgtggaattatagagaaatgcaaaatgcatgattnnnnncatgatcttgctgttcaagtagcaggagaggaatgtactacttttgtcatttcaaatggccaaggaaatatcaaggaaacttctcatcatgtgtctttttatggtgatacttattcagcctatgaacttccagttctgttggttcatgccaaaaagtttcgaacagttctcggtagttccaaggaccaaacattttgtgatgcaataatatcaaattgtaagtttatacgttgtttggatttgaaaggttcaagtaggaagttagtatccaattctattggcaagttgaaacacttgagatatttagacctttcatcgaattcttatctcaagtcacttcccaattcagttacgaatttggtgaatttacaaacgttgaagctcaatgattgctcagatctcaaagaactacctagagattttgagaaactcatcaacttaaggcatcttgaactttctttttgtgataaattaaatgctttgccaagtggactaggtaagttgacacaattgagatacttggatctttcttggaatgaaagtctattatcacttccagattcaatgaatgatttgttggatttgcaaacattgaatctcaatagatgctcaaaactcaaagagcttcctagagatattgggaaactcatcaaccttaggcatcttaaaatctctgattgtgataaattggagtatatgccaagtggattgggcaagctaactaatctccaaatattatcaatgtatgtgctgatgaaaagtgaaaaatctataccaaggcatggtggtgagctaaaggaattgatgggattgaacaatttgagaggcgaattggaagttataaatttgagttgtgaaaaaaatgtagcagtggagtatgagaaagccaaattaaaggataaacaatatcttcgatcattgacattggagtgggattctgaagctgaaatcgatgaaaccgaggctattgttggttatgagatgtcattagaatgtctccagccacaccaaaatattcagaa

SEQ ID NO: 53989 - DNA, 977 bp, Cannabis sativa
tgtaatatttttatttgagatactaaattcttatcatcattaaaagtataacatggttatttgtcttttttatgaaacttgaaaagatgcttgtattagaacaacttgatttttgtatattttagtttcttattttttttttatttcgaaaaaaaagtaacaaaaaagggagtcgtgtatcttgacttatgggctaagaaaaattggtcatttgtctttcttttggtaagtatcaacatttgctttctttggtaaattttttatgagtatcctcttaaaatttgatttcttattctttgtattttgtttaattgttgatcatgattgttttttcagatcttaatttttttgggaggatattttgttttctttttgtctttggcccttataattatagataaataaaaagggagagtatttggtgtttaattttgattgtacactcaactgtacaaggagagttgaggtttgtgtttgtattcaactttggtcaaagttagcattttattttagtttaatgttgtgcttcttctcaggggaaggttattttggtttaatgttgtgcttctcagggggagcttatatggttgttttgctaactttgttttgcaagttcttatttattaaaaatattttgattatctaaagtgccaaaatgagagattgttaggtctttttttggcaatttagttgtcaaaatattttttaattaatgtacatttttgttgatcatttaaattatttttaatacattgattttgtgtctctagttactcttttcttgtaaggaaagattccttatcagctggtctcttttggtttaggaaacttcttgtaagagaagaaattctcttatggaaaattgtctaactttgagaaactttactttccttttttttaattgatgatttcggttttgcgttttttagaacagatcaaataaactttatttgacaggtttgaagtccaaattcgtg

SEQ ID NO: 53990 - DNA, 1714 bp, Cannabis sativa
tttaatatataaaatctattaaattctgaacatatatttattcatgattatagtgttgtctacacagtagaaataatcatgataacatgcttcaaactacttagtcccaaaatttatcagtacactgaatttacactgacgtgataatcagcgatgtgatttacttatacttgtataagtggaatatcctttccaggtcattagcaaagtaagctagtaattgatatatcggctatacatcggactggaccgacatttgcaatagaaaagatatcataaacttaccgtgttatgtcttttctaagtcaatgtcacttagttgatcttgggtcaattgatctcaatcttgagatagttaagttctagcttaattgtactatataaaaataataattaaatgtatgcatgtaacagaccaatagtattatatacctacattgaaatgtatatattatgctaataaaattatataccactattatacataaaaaataaaaaaataaatatcatctaaggataataatatatcatacaacaaaaataaatatattctacgacataatgtatgtacatcccacaacaatctataaaaattaaaaaaatcgacataactttaaaataaaaataattttaacaaaattaatatagatatatcataagatttaagtgatatgcttctaattcttaaaaaatatatatttatatgtatatagattaaacattaaatatatgaaaaacatgaaaattttatgtgataaaagataatttaagtaataaatagtataaaaggataattattttacaaattttaaaatgaagatatttatctacttagtgctatgattttaggtatttattataatttttctttttgatatgtatcaatacaagttgtccctaatacggtgatcgtgtggaacattttaatctcatttttttcattaactgtattcattgtagtaataataaacctcttgtaaaattttaaaataaatattcaatactaaaaatagagttgaaaaaatttattgcacacatgtataaaaaaaaaaaaaacacctttatacagtgatgacataattacaaatctcccaattcctctaataaatactagaatatgtaattccaaataaataattactttaatattattaactttcaatatagtagaaaaatatctagtttaattacacataatatctaatgtattaacactgttctcgattttgttaatcaggttgttgatatcattctgcttgagtgttctttttttctcgttcttcttcctttagaggtatgtctcggagatgaattgctcattagtaatggattggatcttcatcggtgttaatattcttagtgtgctatttttatttgttatgttttattttttatgtatatttttattttaaataatggtgttgctacaccaccttgctattactatggcagttggactttatttattcatagcaggaattttagtcttatttttttatgggacattagggtcatctcatttggctcaaagcatgtttgtgctagtagcatgactatccttgttcatgtttagattgggggaattctcatatttttattgacctcgtggtttatggtgcgatcatttgttatgattgtgtaggatttttaccaaattgccctacaccaacaagatactttaatatcagtatcaaggtcaaaatcgacctttctt

SEQ ID NO: 53991 - DNA, 627 bp, Cannabis sativa
cgttgtcgaatgcacgtggaatagttccagtgagcttattggaagtgagattgagatgagtgagtttcaaaagaccaagttgaagtggaatttgaccagaaagttgattctgtgagaggtccaaataggtgagagtaggcaagaaagaaaggctggttggaattcgtccaaaaagttggttttgacgaagattaagagtgtttagggacttccatgattgaatacttgatggaagatctcctgtgagttggttatggtcaagggaaagagttgtcaaaagtgaaagagtggttaattcataaggaatggatcctgtcaaatggttattactggcattaaaaaccacaagttttctccaggaagatgaaccaattggaatgttacctgaaaagttgttgtcattgatttcgagccgagaaagattccaggccaacttctgaggaagcacaccagtgaatgagttgttgcttagcatcaagtgactcaaattaaacgatgtccacaaaccactaggaacatttccagaaagattgttgttagaaattgtcatcgatatcaaagaactacagtttcccagtccttctggcagttcaccgctgagattgttgttataagccacgacgtggg

SEQ ID NO: 53992 - DNA, 1520 bp, Cannabis sativa
taaattgcgacataaatacctaatgttttagattttatacacttaaataccttatctttatttttggagacaaaaatacctaatattacaattctcttacacgtgttactaccaactcataaatatgggcacgtggagggtccagatgcattatatatatttatttttattgtaaaacttaatatttttaatatcagaaactaaatgctacttgtttcaacaaaaaaaaaaatagttctcataacaatttttacatggtattggcacttcaattcgataaccatgttccctatactgcactggttcactccgctatggtaatttagtattgcatctctctcatttttttttgaaacaagtagcatttagtttctaatattaagaatattaaatttcaaaataaaataaataaatgtaatgcatatgagccctccacgtgtccttatttatgagttaacaaaagtggtagtaacgagtgtaagagaattataacattaggtatttttgcctccaaaaataaagataatataaaatctgaaacattaagtatttatgctgcaatttaccctaaaaaataatatacaaataaaaaaaaatcaataataagttggcaagcaattaacaaccaattgctaaccatagaccatctcagtaaggtgcttcctctcctttcggtcaactgcccgatttgtgacagtgaataagaatcgcatggccatctttttgtggattgtccatttacaaagcaagtctctgttgaaatcaccaagtggctgggagttattgagtggccaaacagcaacaaatattggattaattggttttcgaacccccttagatcgttacaagataaagtcatgaatgcagtagtctcggcaactatttataacatctaaatgaatagaaattactgtgttttttattgtaattgtaaaatagcgtgttatatcaataaaaacattaaaaacactgtgaaatatagagtcatgcattgtatgggtgtaagtaagaacagtcatgagactcatatttgtaatgtaatatcgaagttgtttggcccctactgggttgagtagtgctggttgtgttgggctcttgtagcttgctttggttggtgtttttttgaataagtttctctttttaaaaaaataaaaaatcaacaacataagaacaagaatacaacaaaaaaatacacttaagactatattttatgtaaataataatttaaaaaaaaaaacgtaaaatattaaaaatttcgtacaaactatattttcttaatttttttgttatttttgtttaaattatccctttatattatatcacttttttagtataaaaacttatcaacctactaaaagttatcattattgtgtaaaatcccactaagcgcaaattaattccctaatttgataataataatacatacatactatttaaggaaaaaaataggaaaattccaaaaaaggtaaaatattacaatattactatgggccggcccaatcaacatttatacagcccac

SEQ ID NO: 53993 - DNA, 1336 bp, Cannabis sativa
aagcatctactttctgataacccagcatgggattaccttgtagttaagcatacttaacttgggtaatctcaagatgggaaatctttcggggagtcatcccgaaaaaaacgtatgagtgaggacaaattatgatagaaagatttatattaggttgcaaaatcgatagtcgttccagagatttctaaaaggaaagaatgtgttaacaagtaaggatttacaaggtattaagtggagttcatgttagtgggaggaaataagacatgctctaattgaatacctatcaaaaatgaatatttaacttgttattaagctaagttagtaggtcagcttaggagatcccatataaggaatggaaagacataattttgaattatgtattgtgggatcttatgatttcgatcgaatagtaacgattggacataccgagttaatatgctatctataagtataaaaaaattatacaataaataaggatatggaattcatacgaaggaataatctaatcttgttaaattcaaaggttgatatcgttggctatgatgttaagaattaaagaaggatattaggaaccatggagattaaagaaaaaatagtatgatgttttattcttgaaaggtaggtaatctaagaagatgaatggaatattaaaaacatattgtgagcatatttgataatggttagatgatcttagtgttatctcaattttcgcactctgacgtggcatcacatgctggtgacacgtggatttgattctgcatacctacccatatgagatgtgccaagcagaacatcgtatatgcctgcacgggtgaggtccttctagccgagcagtggagcaatccctataaatttgggatcgtatcacagagatatggcaagttgtccaaatcccacaattagtgtattctaaatatgtaatatgtatccttaccaattataggtattgtaagaaaaagggaaaccttccctcaaacatgtagccctataaatagtgactcagtctcactagaagaggggttgaaagaattactatagggaaagatctaagagagcacttagagatttcattgtaagagctttaagaaaggaatcactatattctttgttgttaagtcaatacaaatcaaggggaataggctattaccgaactgctcaggccgaacctctttaaaaaccctgtaatctttatttatcttttcatatcatattttaagtatatcctttatcgctttattattaagactcattatcgttggctaaaagcaaggtcaatattttggtactttcattgagagcaaggatcataaattttctctttacttcaagtttaatcata

SEQ ID NO: 53994 - DNA, 1196 bp, Cannabis sativa
  modified_base (300)..(307): a, c, t, g, unknown or other
cccggatctcgaccccatccccaaccccaaatccaaacccaagacctgaaccgcgaagtctaaacccgacttaaataaaaacaaaaaataaaaaataaaatttacagaacacacttttattttttatttttaaaattgaaaaacaaaagtagtaatagaacatatttttgtttttcaaaaaccaaaatttaaaaataaaattttaccttttattttatgattaaaaaatttaaaaacaaaagtgttaccaaatcctaccttaaaaaataaaaaaaatttacttttatttttgtaattaannnnnnnnaaaaataaaagtattaccaaatgtcactttaaaataaaggttaatttgcggcaaaacttcttcaactttgaagtttatcacgatcaatcccctagactagaaaaatcaaggctaaactctccaaccttcacaattgttttgatctccactcttatgttagtcaattattgttaagcatagatctccatgtgtatacataagtaaacatcacatattttaattagcccacctaatatatattatttaaatattataaaaaataaaaaataaaagaaaactaaaaaaattaaaatcaaatcattataaaattttattattttttttctcttcttttctttttcatcgtgtcgaatgttattactaccgtcagtgttaccattaccacatcactattacgcccatcactactattaccctaaatcaaataaaagtagaaaaatagagtaatagagtactgaggagtgctaccgtcaattttctattacaagctcataatcaatctcagtatccaaaaacacataatatattttttttttcatagcggtgtttgtcatagttacaacataattcttgtaaatttttaaaaactttcgaatagtttaccttaccaaaaataagtttgaggttttttaacacgcgtagtagactaagatatcaagaactctgttttcggtacggtaaactattcaaaaattttaaaaaatttacaagaatgatattgtaactataataaatatcactataagaaaattttgaaaaaaaatattatgacatgtaattttaagtataaaaattaactaagaaattgtaattagggtaattaagtttttttttctcctaaactgtgacatgtaccaaatcatgttctctgaacttttaagttcgttaa

SEQ ID NO: 53995 - DNA, 1623 bp, Cannabis sativa
gaattttcacttgtataagaaaaataaaaaaaaacttaaaaatagagtgttgaatccagaaaaaaaactagtattatataataaaaagaactaataaaataaaaaaaaatagtacaaaagattaataataatagttttaagtcattgatttttttttaactgtattaacttttgtatacattaaacttattatagtttttacttttaaaaaaaaaaacttacaattaatctatgtataatttaaatatatgtattgtactttttttttttttgagtcaaagtgaaaattttatttaaacactttcagctattacaatagacttaaaatcagcagaaacattatgctgattaaaaacacaatctgacgaaaaaatacgactctctagcaagacaatgagcagccctatttgcagatcgtttaacaaactttaaagaaacattatttaaagacgagagtaagacccgacaatcatcaacaagtagaccaaactgagaaggcattaaaatcgagctatgaatagcttgaaccaccaccaaagcatcagtttcaatgactacactgggacattgcttcctctctatccaacttaaagcctccttaatcccaatggtctcagcaatctcgggcttaacaaccccaagccgagactcagaaatagcttcaaggagaaaatcattcgaatcacgagccacgcaaccaaaaccaaacttgttttgttcttgaaagatagccccgtcgacattaatcttgaccatattagcaattggtttcttccaccgctcattaacattattaatatcattaattaacaatgcccccgtcttttgagattgagcagtacaatattggtcaagcactatcctagccgatcggaccacatcaatagcagaacaacttttgttattccatagtagttcattgcggacagcccagattttccaactaacacacgctgcttctttgacaacagcagctgaatggtgcacaacgagatcggacaaccatttgttgaagccaccactgtccgcaccagcaggaacaatcgagacacaccagcagctgtttgcaaatctgcactcgagcaagacatggctaatggtttccactgctgaattgcagaaagggcagtacaaatcaacattaatctttttggtgcttagttgaacctttgttggtaagcatccaactaaaatacgccacaaaatatgctgcaccttcggagggacttccagcttccatatagctttgaagagcatctgatcttccacagcaacattcacaccaggttcttactgcagcaaacgataagcactctttacagtgtaaataccattagcttcttcactccaataccacttatcagccattgcattctcactcagttgtatagataacacaaggttcttatccctttcatcaaacaggtcattaatgatattaaaatcccagctcttagattgcatggaaaataaactagagacattttgattcactaaaccaggatgggcagatataacaaagggatttgtaggatcaggaagccaaggatctaaaagaatactcacattgtttcaattcccaatagatttccttgcactagctttgactaacccttgtgcttc

SEQ ID NO: 53996 - DNA, 657 bp, Cannabis sativa
tgtaaaataatcttaaatttagaaactaaataagcaaatgtcattttttatcaaaaattagcaaaataataaaatataataaattaactaataaaaattataaaaatacattaccaccattatcaccactaccaccatgccaccaccattatcatcactagatctattaaaaaaataaacatcatatgcaatacaaaaacaccaaatttaattctatttgggaaggagaatttaaaaaactacatatctaactacgcagtgaggactgtgggacaatcgaatgaacatggcgatggacaacttgggatggagaagccgagagggagaagagaagacgacgatttaggaaagagtagatcggccatggttctgccattgaacaaagatgagagaccttttacaagaagaagaagaagacatgggtgattgggtctgggtggggtttgggcgaattgggaaggaggaggacgaagggaatcgtataggtgatgagcatggaagaagaagaaagaaaaaaaaaagaaaaggaacaaaaaaaagaaaaaaaaattaaattattttgtataatttaaaataattttaatattacgtggactacttaaattttttcacttgtacattagtctacattgatcagctgtccaccgtaattgagat

SEQ ID NO: 53997 - DNA, 935 bp, Cannabis sativa
taatgttcaaacagtttatttcacgttaaataatcacgagtgcaagatactatttgaactttattttcgatgtgttaaatttttctgaatttcttaaaattttacaagatgtcttaaataactataacttacatgattataagaaaaaatttgactaaaaaattatttcagataccaaaacagataaagtgtatcgatgcattttttttaagggagtacattgtagaattttcctaaattttgtattgttaaggttctatttattttagattttctgacaaaattagaagcttactgtattttcttttgaattatgcagatattgcaatggagttttttcgttggattaaggagcaaattttttttgtgcccagttgtaatttatttctttattttgttgatatgaaatatgaataaataattaatgtaacaagtctttaatttgttggaaaaaacaaaaaaaagaaaaaaaaaagaacagaaaaatagatttggtgtatatgatattagatagattgatccgtttctttaagctaaaaatcaataacgcttttttttttgaaagggaataatgcttttattcaaaaataaataaataaataaataataattacttctgttatggaaaattgagaaaagagaaatttagatgactaagcaaaaaaattgttttaatattagacaaatacgagtctctacagatatattatagcaaataatgagaacctattttaacaacaaactaaattattaggatgaaaaaaaaaactaaaacatgtatcttactatagaggcttactcttcatttaattttttaaatttctattaactcactaaaatagaaggtaacaaaacacaatattacaaaaatatatataacaaatatattgcaaatatatgtatctataattattaaaaggctaattagtaatttt

SEQ ID NO: 53998 - DNA, 2065 bp, Cannabis sativa
atccgaaccctttcccccattttctctttcttctcttcaaaatccaaaatttcatttccccccatttctccaccaccccgacccacagcgccaccatcccgacccgttgacgacgccaccaccccgacctctgacggtaccaccaccgcgacccaccgcgccaccatcccaacctgttgagcggccattaaaggtaatttttctccagtttttgtaagttttaaatttttattttacatttgggattatatagtttttaggttttagattgatatatatatatattacgttttatataaaaacctatatttaaggttttaaatatttttatagttgtataaattatatattctgcataaatcattaaatatacagataatattaaggtttataaattaatttgggtatttattttgaaatatctgtgtatatatattaatttgtgtatgttataatataataatataaatatagaggaaattagtatacatttgtgtaaatatatatatatatatttgggtacaaatttatatatatttgtgtataaatatatatatttatatagataattttagggtttatatgtttaggtattttttttttatttgtgcgtatagaaatttttaatttgtacatatatatgttttatttatatatatgtgtattattaatgtgtagatgttctaaatatatatatataagattgatattttttttttatttatgtatgtatatgtatatataaaatatatagtatatattaatgtgtatataatttatatatattgtatacagtgatatatatattgtattgtgtttatttgtagcttttttaattaattttagtaattgataatgtggtatactctttgtttttcagattaaagaaatttttttagcactttggagaaggtgtacacaaaagttcttttgtgaaatgtgtatttgtttgttttatattagattttatttaaattaaataagtttgttggtaagtttagtaaaaaattgaaaagtaagtttagtaaatttagaatgatgaaaaaattttaaaaattagaaaaagaaatatattagtttatagtttaatatgtaaaatgaattttttaataataataattgttttcattaaattattaatttatatttatataattttaaaaagtatagtaattttttagtttttgaataaattattaaataatttaaatattaaaaattaaaaagattaattagaagaatttatttattttttttaattaaaataaaaattgcaattaaatgaataaaacttttatttaaatttttaaaaaataattgttattgtatttttaaggtggtataaaaaaattaaaaataatgaataaataagaaaatggtaacttttaatgaatttgttttataaagataaatttataaatttaggaattaagtataaaattagtttaaattttaataactaatataaagtttttaaataataataattcatttaaaaaaactaattattttatatttatttaaatttaaaaaataaatttgtttttatataaataataaataactcaaaaattaaaaaattaaaattaaaaaattagtaatttaatgaataaaatttttatttaaatatattttaattcataaaatattcataaaattttataattataaataattataaatggttgaaaagaatatatcaatgctttggtatacttataaatatataccatagctttgttatatttaaaaattatcatagcttttgtatagttacaaataaagtctagaacaaaattgttcttccctttttttcaatatgcaagagcgatggatatacatggcaaaatttttattcataaaatttcataacactttacaaatcattcaaacttttaatacttcatttgtcgcctacattgtagatgtcgacaatcgataagtcttggaccaaaataaaaaatcgtggttgtcatgaattttggaatggtctacatggcttttttagcaatggcatcagaacataaggattgtgatggaagaattcgatgtccttgtgtgagat

SEQ ID NO: 53999 - DNA, 879 bp, Cannabis sativa
cctattttgattttcaattgtagaccaatcacctgatccgaacactcccattgctgtttgcatagtcctacaaattattattacataaacaaacatgcatggtatattcacatggtaaataattaatctttacttggataattttactccaagccatgaatatcttttgtgtttttgaattgaatagaatgtactacaaatatataagaaaattagattgatgaagtatttagtacgatgtgttcaaaatatatatatatataatttaattaattagaataataaattagagaatgttattgtttgaaaacttataactgtatttaattggttatgcatagtactattaattgaattatattgttttatttaattaaatgtagaaagttgataaattgttataaaaagttatgtaaaaatattaatccattaaatttatggcattaaaattcaaaatatttgaaacccaccttatttctatctcgtactaaacatgaaaaatgtaaaagattttcacattatctcacataccaaacaacaagtagattattagtagtagtacctcatcaaaggagaagtgaccactaattgaattttcttgaaagtccgctcttttcaatatcgtttcgcaaattttcaacctataacaacacgtattttttatgtttacatttagttaaaaaaaaaattctaaacaaataataactaatatttgtaagatatgacaatttttatgatatccctaaaatacccctatttacatcatcccatttacactatcggaccacccatcgggccacccccatcggactacatcggaccaaatctgctaccaattttttttttatgttttttacatacaaaagtagcatcaggtga

SEQ ID NO: 54000 - DNA, 880 bp, Cannabis sativa
  modified_base (696)..(720): a, c, t, g, unknown or other
cgttgactgtaaggtcttaggcgaggaatcaatgtacaaactggcacttagtgtattagtgagaaaccatacatcgctagatgcaaatagcgaggcactggagaaagtgacgcataccaactttaaatgtctgtaccttgcaatatgcaaactaagtttaaaagtcagaacggctcaaaaaataagtatgcaagatgaccatctcgctatgggaagacttcctatgcttcattcaactaacaagagcgaggctcacaaccctggcgagtcaaaagatttctttataaataaccacgatcgacacaaaacatacatcgtcgaccccagagggaagaatggccttagctcgctattgggatcactataatcaattttctgtcgagacatctccaggttcaacaattaaagacatgtttaatacacgagaatttagacccagtaaaagcaggaaaatcacaactatacgattttcaaatcataaactacatttaaatttccaaatatgtaatcaaatcccacgattttagggataattgatgtaaacatattcgtgtcaactttgtaccactatgtaattataaatagtggcagataagctcaaaaaagggacaaaaaaactcatatgaaagaggccctgaaaaacacaatcagaaatttaaataagattgactcatggactatgcagaattttaactnnnnnnnnnnnnnnnnnnnnnnnnnttcatatatcatttttctatagcttttactttttctgtgtgaagttattaccgtgaggctcaaatttggttaacaaagatctgcattaacaggaagtaaaacctatatttaaagttctgaattggatggtaattgtagaattgaaagtggtgaaaattca

SEQ ID NO: 54001 - DNA, 1302 bp, Cannabis sativa
ttggctaaaaatccagtcaacataaacatatgatgattactattgtgactacaattgaacacaagaaaatcatcaatatgcaaatgtatcaccaagagaaataaatatctattagttttatttatttatttattttgtgggcttgggattaaaattgaatgtctaaattattttcatattattgctactattggaattaccattattattggacatcagtgattataattcttaaaagttattaaattaaattatatgagaccagatatttagttggaccaataacaatattaatatataaaaaagtgctaaacaccgctataccttttagtatttttcattaaaatttgtgtcatcaactatataattaattatgttattgtttacccaaattttgacgatgatgacgtgtcaagaatagcaccgcgtggcacaaaaataccgggactaaattaatgaagaaggtgtaaagtcatgtctggtttaaatctcatttattacgactccgcgtcggttggctaaaaatccagtcaacagttattattaaatcaacattatttttggagccagatcctctattcaaaattgatgtctatttcctatctaaccaatgaaaagagtacattacatgtcattaaatgaattaacagcaatcaaacttatatcatctttatattttaatacataataaatgagattgtttttatccaatttttttatttgttttcgactgacaaaaagttccttattattattattattattaacaattctttttgaaaagggtcattgcttaactttgtacaatggtttatgcatacatactttaaataaataataaaagatataataattgaacaaaaaataatcatattgccataattaattttataacattaattatctatataaacaaacaatatatagggaaaatttaatgtaagtgctgttgttttatccttttagtataacaaattaaaccagtgataagttagaaaagcatggtgcacttctgttacaatggaagagttgtatataattttatttcattaatatttgatattgttcgatgagagtaggaatggaaatagagcaggtaatgtgtgaggaacgcattctccgctttcattcctgctacccatttacggcccccatacctaccctatccctgtttaaaacccaacaaatttaggtaagggaatacctgtcaattatgaaaaactcgtcgggtacccattaaggcaaaatgaagaaaaaaataaaaataaatagaaaaataaaaaaatttaattttaaattaaa

SEQ ID NO: 54002 - DNA, 951 bp, Cannabis sativa
actcagactcaagattgcagacctataggtttaccacacacagctgataggaccaactacaactttgctcaaagtaattcaaacaaggtgggaaactaatctcctccagaggattttcttcacaagtctaatgactctaggccaccctgtgaccctacatagggaaagagacctatagtcagccttagaggaaaaacacagaagtgttaccataaaagtgaagagtattatatttgaagggtgaggatcaatgaactactccacactcaaaaaatatttccatgatgaacgaggtgcttggtgaagttactttgcccaaggtcttgataaccaacaatacaaatacttcccttgggtgcatggagtcgtattgaacttaagcaatcagttcaattccctccgcacatgtcactctgaggaagactattttaaaaggaatagttggtacagtactacgagaaatcaagcacaaagtaaatgctcaagagacgactttatcagcatacgagatagatccctttagttgccaacaaggccatacgaccaagcaacaaccttaaagccttggtcaatcaattccttagatcgacttggaagataaaagatcctgcttcacaacatcaaatggaagcggtaaaccgatacgcacatcaccacacatgatgtttatatggctgaattcgacacccttgctactctggttaacggcatcagtattttaaagcaaacagagtatgggctagattgagagtggttttctcctctgtgagatcaaatcaaggatttgaagatcccctccaaattcaaaaacccaatgtggcatttgtaaactggtaaagaaaaccctctctcttgcataaacaacttggaagtacaaactggcccagaaggcattcgagacgattctcgttgtcatacttttctacccacgctattagaagtagcacaata

SEQ ID NO: 54003 - DNA, 1168 bp, Cannabis sativa
ggaggaaaaccatgggtcaaagaccaatccagcaccatcatctttataaaataaataaaagtgaattagcatattaaaacaataatatacattgcaataacatccacaataataacatagaaaacttatctgccacaaataatttaagatgtggtataaattctttttatatatatacattatcaccaaacaaaacaaaacaaaacttataatgtaacaacacataatataacaaaacaaataaaaaaacataccatcaccacactcataaatagaaactctttaatataataaaaacaattaattaaaattaaatacactattaaaatagtaaataaaatcaatatctcaatataactagaataaaaacataactagagtaagaatgagattcattcaaataccttaaaataaaactaaacaaatgaatactaaacaaatgaatataataaaaattgttttctttttaagttcattatattttattccctccaaccaaaaatcacctatatgtaaaatggaaatcactatatttcaaaatcactattctcttatgtatattgttgtttttttaaatgattttttttttttaacaatgaataaaagtttcattgaaaaactaaaagagagtagtacattatcaaaaaatataacgaatccatctaaactagttcacaaattactctaagtgcatgcactgttaattcatgaatacgaaaatgaattaggaacgcctcaagaagattagtaagtaaattattaaaaatctctaaaaaagatcgtaatttattcaatacgaataaaaaatctcgtatagaatacaaagaactaaattcaactgtcaatctttttgatatcaattgtcaatcttaaaaaaaagtggaggaaaaccatgggtcaaagaccaatccaacaccatcatctttataaaataaataaaagtgaattagcatattaacacaataatatacattgcaataacatccacaataataacataaaaaacttatctgctacaaataatttaagatgtggtataaattttttttatatctatacattatcaccaaacaaaataaaacaaaacttatactgtaacaacacataatataacaaaacaaataaaaaaacataccatcaccgtactcataaatagaaactctttaat

SEQ ID NO: 54004 - DNA, 2014 bp, Cannabis sativa
catgaccggccagaccctggcaggcacatggccggctagaccccatcctacacctagcagtcacttggtgcgcagccttcatctgggacagaaagctaagttacgatttgggctttaacaacccacaaaaataggggagaaatatcagctattcccctattcttaagggataattagcctattttctatttattattttattatgtaaataatactttatagtttctgttatttagggatattaggttattatcttgatgtaagctctcctatataaagagcattagcctaaccctaatttctctaagtctaagctctctaagtctctagctccccaaaagctctcaagctctaagtctaaaaccctaactctctctctccctctcttttacacgcccaaggcttctctctcacttgggatttgcctacttgattctcatattgtaatcttaatagagccacttcagattccacaatctttatgatctgagtggtactatctcgtattaatacaactaaaaagggagtatgtcattacccgctaactaagggggttgaacctctatataatcttgtgtctcttttacttttatattcttattgtgtacacgtggtaagtatcagtattaaatacaatggtcggttggccaaatttgaggtcaacaatatcttttccatattctctccaaaaagagttcttctcgtgtgttgagaataaacctaagaacttcatatacactatatcctactagtccacactagtccttgtgtgtgatagaagatttagaagactatggtgtaagtacttcgagatcaactaaggatacaacatacgaaaagttttgaggataccctaataggtttcgagaggtaaattatcttttcgtttatttattttagataaatatatatacatatggtgatcatgaggatgtggtacgatgattgttagaaactattattctgctacgtagctggtttagtacctcaaaactaatgtaatgagttactaatttccatgtttaaatatgcgatcattacagccaaattccctttaaggcccaaggacttggatttttgccattttatttcaataaatgaaacaatcttacctttttttcaaaaatactagttatctaatctatttatttaaatattaattttatctatttaataattatcatataaaattattatttaaatatatttattaattagagccgcaaagtgtcttaattaacaaataaacccatatctcttttttcttctcaaatcggcccaaacttagtgaaaatctcaaataaaacatactcttattttagaattataattgacttattaatcaattaattgagtctacaaggtagtattgtcctagataatgtggggaccatgagcttatgtaactaagctcccaataagtatattagaaatttaccgagtaaatttcctagcttattaattcctcctgacttcactatagattcagaattatactcttgattacatagaacgctctatataccaaatataggtacgttatgaattattcattgtttcaatctaaatagccaatgatcttctatagatggtctacatcgagtatggataaatttactattttacctttctattgtattttatccttaaaacatttagctccttttaaatgatatttctaaaaacttttataatgactgaaataagagctcttccatgtatatcgcttaaccaagctctaaggaaaccgtcatttcacttcataatagttataaagttatggattccatatctatgattaacactcccactcaaatacactactgacctcccaacatgtaagtataggctagtcttatggttaagctgataacgaacaagtctaagaacccgtgtagtacaattaagctaaagcttaaccatctcaggattgagatcaattgatctaggatcaactaagtgacattgatgtagaaaagatataacagtaagtttatgatacattttccactat

SEQ ID NO: 54005 - DNA, 940 bp, Cannabis sativa
tggtacattattttaaaaaagagttaaaaatgatagactttaaaaaagagggtaaaaataaaaaaagacaatataaaaagggtatagagtgtaatttcctcaatagaaaacgagtttaagtattttctgaaatgggctttaatcaaattgagcccaacacccaacatgggtaagggtgatattatctcacattcgtcgcgcctttcataatgttttcagagataagttgagtaataatttttttttatccattaatcaatactctcatattatatttcattaaaatatatccacttttgtaagtaaattgtctaatatactcttactctcaacttaagtttagcacataatttacattaacttaaatggtacaatagggacatcatctttaaaagtgagtatatcttaaagaatatgaaagtgaaggtaaaaattaaaacatataaagtaaattagctatagaatgtaattttctcatttttatacttatttaggtctaatatgtgaaggtccaacccaaaactcactaattattgtattattgaaacttgaaattatttctcatatttattttcaagctttatggtatttttgacaagtgttgctcaagttttattatatttgtaatagtttaattatttggtgatagttcaaactgcataaattgtaaaaaccgcaccgcactattttcggcagtacagttttggggttttttagtttagcagtgcgggtgcggtttgaaaaattgaaaaaattatgtgcgggtagtttaaaaaaatggtcaaaaattataccatccgcaccgcgaacgaccctcgtatttattaggctttaaattttatttacatattttttttttgttttaatttagctattagattccatttaagctgatggtctaaaattggtgtaaaagataatgtcaaaaaaaaatgtgtcc

SEQ ID NO: 54006 - DNA, 2441 bp, Cannabis sativa
  modified_base (2383)..(2386): a, c, t, g, unknown or other
aatggaataaaaattgtttcctttccattccatttcatttcattacctccaaccaaacgcgacctaaagaagagttacaatttgttttcactttcacatattattagtgtaataaaaaagttgttacacaatttgatttaaggattcaaatattaagaaatataattgtcacgaactatagagatacacatttatacaagagaaatgaggtgttgtatattttgaattttaaatacgatcacttaaacaatatataaaagactctaatgtgctcatttgaagagaatttttttattaaaaaatacattgctcgaaaaccttaaggcttataattcccaaagttatttctacttatttctagcaaatcagttgtcttagtgtttaagtgatagaatgagtatttatatatatattctttagtcaaatattaattactaattaacattaattacttatggtactatttatcactgtacaacagctatgtttatgttttttttgagataataatgatagaaatggttaagtaaattatccttttagagttaaattgtctgagtctgaatcattacatcaatcgcaatcaaaacccatttttctgaattctgagcactgatagaactggacacatatgcccaagaattattatttatttgatttggttatataggtttctattctagctactacctacccatgcactctcatttaaggccctttaactttatttcatttcactgccgcccttgcacagatttcgttttttaagctatgatccaccattatattgagtcaatattgaccgcattaatcttatcttacaacactatttttttttctccaatgattttaatagcaaactaatgttaattatgttttcttatttgtttgtttcagttttttaatcattagtgattatgcgagactgtttaaacacattattgtataattaaacatgctagacttgctacatttatgccaaggttacttgttacttgttatttgtaagccccatatatgctaatgtatgaacttaaaacctccaacacactatctatactatctattatagtgcgaattttttgcttagaaattttagatcatttttttatgaaattgacacgtggatcaaattttcaaaaaatatggatgaactgtcaattaatgactctccaaaaattaacctccactactacaaaaaaaagatatttttgtcaatttttaagtgatacatataatttttgcgtcggtatacaaaaacgatatatataccatagttgtaaataattttttatttatatcattttttaagtggcgcaaataacaattctcttcattttgaaaccgacacaaaatgtacaatgttctttataatattatgtgtcagtttggaaatgacgtaaaattatttgtgccatttaaaaaccgactctaaaaacttttactgtcagtttataaataacgcataagttgctgaatttttttttacctattgtgtcgtgtggtgaatccttactctcaaaacaaattgttacaacagtaacaatgtccaagaaacacaaatcaaaactaaaaccaatcacaaaatcaaaatttgaatttaattgaaaataagacaaagaaaacttaactcaataatgaatgaatggtggatctttattgaataggaattaatagccagtagtacactatagatgagcccaagattacaactcaacacagtaagtaattacaaagaaatatctcacattaatcacttcaagagtgacatccctccacacacactcactatgatcttagatgatcttagactctctctctctctctaaactgaatctaaagtatgagctttggagattagagatcaagactctcagtcagacctcctttttagaataagttggtattaaaaccaactattataaattgcagcaactttctttagattcatctgaagagcaaatagatggacatactgacatgagaggttaagtgagtttgatcccaataattccacctgattagaatcacttataggactgagcatcggtcggtttggtctgtttttttctatataaaaatccaaaattcagttttcggtctggattggcacaaatccaaaaaccgaccaaccaatttagaacctattttaaaattgaccgttttgaacctcagtttagtcggtttaaaccgcccaaactgaacttttttcaaaaaaaaatgatccaatttattctataaatacattattctacattttacaactacaaacatacaaattaattattcaaaaacactttaatattaataaaaaaaatgatatattatttttatatattattagtaactataatacatgcaaaaaaaacttaataaattaatnnnnatgtataacggtcggtttcagtttgaatggcttttttggttctctggattttatg

SEQ ID NO: 54007 - DNA, 1043 bp, Cannabis sativa
aagtccaaaatagtatttaccctttaaatgattacaagggtattttcatcttaattccagtttgaaaaattgcatgctttgagttttggtggttcataattttgaggtacatcattagcattaaatgcccatcttttccaattctctctagttctcatccgttagatctttagtctttcaatctaacggtgaccctttttaaagtataaaactcaagggaaaatactttattcgccatttctgccttttgaaccttcaattttttttgcaaaaaaccatctttatttttcatcaccttgcatgccctcattgtccttgacctattttctacgtatttcctcaaatttcatctttaatcttagaaattctcagagcccatcatcgcattcatcacgatcccaatcacgaagttgttcactgcccaaaaatcttcagaaatatagtaagtggtttatttcttactctctgttattccttttttcttgagttgatacttttattttttcttctgattgcatcttcttttactgtgtttggttttcgattttattttttttgggtaatttttagggttttaaggagtgaacttaggtttattaaattcctaggtttctggtttaagtcaaattaactccttccaggaattgggattataattttatttttttgttaatatgtcccaatctggttttgagatttcaactcctgatttcctagaaattgaatgtcctaaagacttagcccttccattaaaacccaaaatctaaaaacctacatccaaacttgagattaatgatgccaaaattagggatcatctaataaaaaccaatcataataaaatttctagttgttatagacaatttttacaagagataactgagggtaaacatcgttatctgcgagatgcagcttggcttgaacctcaaactttatcttctattccattagcgagacccttttttttaccccgagttactgttgctttttcatcaggtgaccttgatttttaaattatgtccaccaagcctcgtaaatcaaagatc

SEQ ID NO: 54008 - DNA, 879 bp, Cannabis sativa
gataattctccttttttatatttataaatttaagtccctaatttaatattttaccacacaatttttttaactataatatttaaatttgtgacaattttttttttcaaaaattagacttataccagccatacttttttttttatttaatattagtaaattttaaaattaaatttccaatatatttttaaatattacaataatataacaagtttttttttaaaaaataataaaagactaaattcttaatcttttttaatcaaatcaccacaaaatatcatttactcatttaatttaaaacaaaaaaaaaaaaaaaaatagaaacctaaaatgaagagagaaaaaaaatcatcaatcaacatgagcattagacaaattccttcccaaaaaaaaaaagcattagacaaattaaaatattattagtcaaaagtaattttacatagttacactatgtatagcaaaaacactaactaaataccaaaacacatcaaccaacacgaacattaaaaaaattctaatcttaaaataaataatagtatagtagaagatgaatgttttaaatccacaatttcaaaagcacaatgacatcaataaatttatgctaaaataagataactttgaacattagagaataaaatagtaaattaacttatctcgtggagtgatgggtacacattcttccgtcgactacgcctgtcaactataatccaatttgcccatatgtttgtcgtgctaaagtttactgaagcaataactataccaaactgtccaacagggccggcccaggcattgagcagcttgggtcattacacaaggccccaaaattaaaaggccccatttttttttaaatccctttatatataatatatatatattttataa

SEQ ID NO: 54009 - DNA, 1022 bp, Cannabis sativa
attataaataaatatgtgtttggccccattattaaatccaaagataaacattagggtactttattctatacattatttaactgtatgttatacaaaactagagcttaattaattaataatttcgatatctcattgtggatagagattgtgtcaatcattttttaaaaggacaataattttatttggataagaaaaaatatttatatatagtgtagtatcctaaatgaggcacgatcgaggccgccatatttatttttataataagtaattaattaatattatattaattaagcacaaatttgttattgtaatataaataaattatgatcacatcatacaatgaatatatattaatagtaatattatatatggattcaaatcctcgtaatatatacgtgtcggatctagattaatgtgtttgctaactagggttcaataccagctacagtttagaagatactgtaatgaagaaaattattatgatgataatataatattggataatgatgtattaaaaataattttatgtagaatttttcttttaaatatttgttattgtttcatatttaatgatattttcttatttaattttttaatatataattatttttcaaaaatactattatttttcttgtcacttctttcttttgttctccctctctaatttttttttaaaaattcaaaggactcaaaagtaatgtaaccaaaataaaaggctttgatacattttttttttaaagaaaaataaagttgagactcaaaaattctctaatagtaaaatcaaagaacaatgcaaaaacttttaatttttggtagatatatatcatcggagaggagcaaaagcttttttttgcattattttttgactttgccattaaaaaacttctaagtctcaaatattttaatttttcttttaaaataaatatcaaatcttttacttttagttacttttcaatttgaaacttgtttgaattggactaagaacttttcaagagagtaagagggagaagaataaaaaagaa

SEQ ID NO: 54010 - DNA, 1128 bp, Cannabis sativa
taataacatgctcatgcattagtgtataacatgtcatatatagaaattctacgtagttatattatcatgcatctcatagtagaaacatgatatattaagattattctatgtgattatttatttacctttttgaaaccgaaagcatataaactgactaagaataatttataattaacttggtaatttaaaattaacttattaatttaaaataaaattaaattatgaattaaagaattgattcaaatttaataattgtgacaggaaattataatttgaggattttattataaataaattaattataattattaaagtagttaatatgtattaaataaatatattaacctaaaatagtgagtgggaaaacgagttcatgtcaatgtaaccttcaacctccattattggtcaacaccgaaaaagtatagactggcctcgagacggctttattttcgtacccctaaagaaggtatttgtctatactattgttcaagcttgatctcttgactaagataagagaaaatgatgtattttagtgcgatactgaccctataagacagcgttactaagttaagtcatgaaatatgaaataatgggttacactcataaagtgcaactaagcttcatagtagttagttgttaacttgaccaaacaatagtactttatattttgaaaagaaaatatgagatattaagtttcaaaattataaagatgagatcactctcataggctcaatgagatttactcgataccaactctaaggcggcgatcaattgtcaaagagttttatatattgtggaataacttaaacaatattttatgtattttatcttgtgctaatgcatcacgtttacattaatttcaaaataatatttataattaaagtataaccattatgtcatcttaatttatttcaaaaatgtctactataccaaatttccttattgttttattagaaattgcaaaactgaatggtgaatatttccattaacggaaatctaatctgaatttgatggtagtttgtgagaaccacaaatttgtcctaactgagtagtgtctccgtaggaactcatgtattgcaagtgataatgctaatacatgaggcggagatacaagaatctatcgtaaac

SEQ ID NO: 54011 - DNA, 1225 bp, Cannabis sativa
caacacttgaaaagtttcgagtttgagcaacgttggtatgatgaagacgaagacgaagataaagatgaagatgaagatgaaatgattatcagtgatgttacaattgaatcagctccaaatttagcgtctttttcttacgatggtgttaccgattttgatatatcaatcgagtcatctaatttgttgaatggaaaattccatatttttgaggatcaagagcttgattgtgacacaaggtctaccaatatgatcaatttcttttcaaagattaattactcttggaatattataagcctacaagttcacacagataaggtaataatatgctttattttcatttgattttgcatttttttatttatttcgagttattattatgtttatacctttatacattttaatgaaggctctcatcttgtcggaaaagttgaagaacatgtacgattctcccttgtttaagtggaagcatctcaaactagttattactgaatatgatcctgaaagattgtcagagttgaaggattcattatcatggatttcaccttctttagaaacattatctattaatggagatgtgatattttagttttgcttaataacatttgaactacttattagagtagggatgactattttttgtctcttttcttttttgctgacactttttgaggttatttgctttagtagttttgcaatgatgaatatttgcttttttgcgctaatgaaattgatttttttatgctcaaacttgagattacattagctgcacttactacagaataactaaagttcatttccatgtcatattccataaatttatatagataaatataaataaatatataaatatttatatatatatataaaaatattccaagagtgcattcttttcactctgtttttctttaattattatattacgagtttcttgaacattatcatcaaactattgtgctcttcaaaataaaatagctagaaacattcaataataatatatacaattacactgagacataagaggatataatgccttctaacttgacacatgagaaacccttttgatttatgatctcttttcttggtcttaatttagctaaaaaacttaacatgacctttggctacaaatttttggcggtgacataatgtggtgacgtggtattccgtcacgaaaagtctaattttttgctgtcatgatatgtcaaaaatgtttcatgtattaagagga

SEQ ID NO: 54012 - DNA, 770 bp, Cannabis sativa
tggtaacaaaagattaatacaataagcacaaatcctatagcaaataagacttaggacttccaatgcataaaacgaaacaaataaacatcaacgttcctactagcacgttccaacagtctgccttaccactacaccaccctttggtgatggggttagagcctttaccataatgaaggtctgaaaattcttgagttggactttctatttctacagcagttctccagctgcactgaaatgggaatttcttgcatattcatcgtctatatgagagaatactgaaacattcccatgggcaccatcatcgtaaagtatttcccttcgaacagaagctgattgagatgttggactgacatgcttttttcccgtcaattgtgaggtcaatcacaaattctgaaagtagaatttgtgtttccacataaataaatatacaagtaccagttgacatcctgtaaaattgacactgcttattaaagaccaaaaaagaatttaaacaaaaaagcaaaagcccaaaccatcatcttcaaacttatcccattcctcatccaaaacatctgctccctgttgaatgcaaggttcccagccctgagcaatgcacaaatgaaacacaattaagttaactgcaaggcagtataacgaagaaaatgacggattgcaattgtgtataataatacaaattctcattttttctaattttgacaaagaaactttcacatacccaccaccacttacacttattagaaaatgggaacggtaattttccatcaaagcac

SEQ ID NO: 54013 - DNA, 1171 bp, Cannabis sativa
agtttggcagtcagaagtgatgacagcaattggaaaatggactgcttgacaccataggagagctcgatggagggcttcggcttcagcgaaaatgggggcaagagctgtgtgggaaggagccgtgagagatgcaatgactgttcctttggagtcagttactaccgccccgtacccatgctgattagttgatggagaaagggcagcatctacagaaagccggtatgtgtcatcgggaactggaactggcggtgaaagatgatgtgaggtgtgagatgatgtggagatccgatcttgtgcatccctatattcctgcaaataaatactgacatagttctccacacagaaattagtgacatgattagggttaaaaatggctctatttctgttattccaaatggcccaaattaaacccaaaaaggagcaaagttgatctttatcaaaactttcaaaacctcttaacataaactctttaatgtcacaatgtttgtttttaacataaaaatgatgaaaagaggagtgtttccaaattttacctgccctggaacattcaataagagagtgagtattggagtcatgatgagaaagacaaagggagcaaaagggggaggtagtggacttacgattgaaaaggttaagactagaggggaggatatggtggaaagctttccaaacgaaatgtttgattttgggtgggatattggaggaccatacagtggtccaccaacgtttgtatgtagcagggtttgaaggaccaggagaggaaaagtttgagtttgagttggccaagtggtaggcagaattaacggtgaaaacccccgaagggtgatggttccagatgaggctatcattgctgtgagggtcgatggggacagcaagaatggcgttacacatctcctcatcaaaaaaacgtctgagcttttgaaggtcccaatgtcggtcttcagtgatgaaaaaggagacattttgggaaggaagtgaaagtccaggttttagtatagctttgccatgagagggaagccaattggattcagaagtattgacaaggttaccatccccgattttccaaataaggcctttggtcagaagatcccgaccccaaaggatacttctccaacagaaagaaggagtgtggccagtagccgcgagtaaaaaatcgttgcgtttaaaatat

SEQ ID NO: 54014 - DNA, 650 bp, Cannabis sativa
  modified_base (604)..(611): a, c, t, g, unknown or other
tatttataactggcccaaattgggacttgattttttttataacaaattagaggttattcttgaatagagtatttttaaatagaggttctactgatattaaactaatttatatattaaataagtactgcaaataaaaatagtataatataattgtatatttaatattttattttaatttataaaattatttttaatatatatatacatagatatgaatataatattgatcaatatatgttaatacctataattactccttatgaaaatgtcctatgttaaatacaatttactaaaaatatattatacatataaactttaaaaaattccgggagcaccgcccttgtgatcttgtatataactttgcctctataaggggtcatgctaattcaaatttaagtaatgattcacattaagtcaattaaagtataaactcctttgttctcatgatgatagtgggaaaattatacataatgtataaaatcaaatcaactaaaacatattagagtattgttggaaacgatgtgataagatctgttaaggatttctttcaaataaaagagatgccagaagggatgcaaaatactaatgtaaagaccgcttagtnnnnnnnngaaattagcagttaattttgattaattatgaaattattt

SEQ ID NO: 54015 - DNA, 1225 bp, Cannabis sativa
tatgtatatatgtatgagtacaaacactttatcaaagtacaaaaacaaactcttcctcacttgcaaaaatttgaccatcatccaacacgttattagagtcagaccttatagtggtttatttgcatattggtcactccacatatatgtagacgagcctttgcaattttcatatctacactaatgatgtgactcttcaaccttgtgcaagttcattatatattacaaccataattagggattgacatccttaaatcaatatatgtgcagaccaacctaaggtcaatatagtgcttactctgaccacaacatggggtcataccaacatatctctaaaaaaggcggacaagcctagctagagattatatgctatcttccaaaggacaactttacatagcccatatataacactttaaaggtacgacttatatatgcatttacgcaataaaagtaactcacttattactgatgtgagatgattcaattcatacataaaaatatgtatatacatagtgggtcatttcacaaccagatgtacttgtacattacctatttgtcttgaccacatggacatgagctattttttctcttcaaaattatcctgttattcacgccacctataaaaatatgaaataacaatgcttggttattttcatacaacttttatcacatgtccatcaatctatcaaagttgacaacgtactctccactcacatcaaagactttttcttgtcctattaaatccaatatgacaaaaggcaaaacacacatccatgggctcacctactagacttggaccgcccattagtgtacaaaatatcactaagctaactactaggcctcatcatacattgtagaagctagacatgacttctaaaaactaatatttataaattgaagcatccttaaacagattaaaattgagtaggtcctcaagataaaattacatatggcttgttcacaacaagatatattaaaaaatattcatacaagaaatttggccttcaattattcttgagggcccaaccctttacaattaaatctaaactaactactacaacttatgccggcccaattattctcgatctaaaatcacactataggcactccgagtcaatcatgcacgcctgcgggtgatgctccttaatttgagtataactcaacttaaagagcaagggacaaactgtagtggccaaaaattgctctaagcccaatgaaaaggcccaac

SEQ ID NO: 54016 - DNA, 7894 bp, Cannabis sativa
agcggatgttgccaagatttcttctaagggtttcttcacgttcaaagtttggtgtgatttgaacaaacccatatgtccgggcttcctctttccctacgaaggccgtaaattatggctcccattcaggtatgatagattaccttatatgtgttttaattgtggttgtattggtcacgaaatgaaggtttgcttggatcctacccgacgagtggtggaagactcgaataatatcaaacaaggatttggaacatggctcaaggtggatgggaagaaggacataacagatatttttgggaaaggaacgatgggctcaggttcgaatttgaattctggtatacctcattgtattgacaataggaatccaattcctacaaacttgagaaaggaatcagaacaggggaagttaaagaactcggctttgttaactcctcctgcgattgcagtggcacagtatacacatgaatctggtatagcagatatggaggtgatcgtggagaagggctcatcttctattgataagtttgtgggaaaaaggacaggcctgataaatgaagtttcacaaaccccggaggaaaaaaacttgattaaccataaacgaaatggtgattggcgtgaagaactaatggggaactcctcttccattttggcaactccgaactctctcgatccacaattatcgacaacaatacaaaaggccagctctatagaaaccgttcaactcttcgaagtgccggttacttatgagagtaatattaataaatctggactgagtgagggaaagacgaaacgaagaaagataactccgaaacgtctcaagaatggtggaattttgaatacaggattggttaattcagtggttggaatgaaggaagatgggagcagtgcctcaaggaacatttcaaagttgacagatttgatccttgatactactttggaagcggcgaacccaactgttttgggtcgccgatcgcaatgaatgccctattttggaatgtccaagggcttgggaatccttggacattaactactctcaaatcccatgtcaaggagattcatcccgggatgatcttcttatccgaaactcgtctttcaagtgctgctatggaatttattcgtgttcagcttggttacgaaggttgcttttctgttgatgctaaagggaaaagcggcggattggctctgctttggacaaatttgtttaaagttcagattaagtcttttacggtttctcatatcgatgccttagtggagaatgacttgggtttcatgtggcgtttcacgggtttttatggaagtccggatccggggggtcgaaaagaaagttggaaattactaaagaggttacaaccgatgtataaaggcgcttgggtttgtggtggtgacttcaacgagattacaaagaagtccgaaaagaaagggggaaacgttaaaccggcctaccttatgtctaattttagaagagctatttcggattgtttcctgaaggaaattccttctgagggaggaagttttacatggtgcaatggtcgagtagcgaatcttgtgtttgaaaaactagatcgagttctttgtaattcggattggatggacaaattcaagataaactcgattagacttttggattggagaaattcagatcatctgcctttggttataacggctcatctcaaccatccaaaccgtgggggtaggtgttcaagaggtcctcgatttcactatgagcaagcttgggaggataacaaagagtgtcaagaaattatccacaaggtttggaataatgccatcccagccgaaccattgtcaaaacttactgcactcttgcaaagctgtggggagaagctccatgggtggaataggaagcaaaaacaagacctcaacaagagaagtaaagagataaaagataaaattgagtggctatctaaatcttcctgtcaatccgattggctcaccatgaagaaattggagaatgatctcaagtgtatggaagacaaacaagaaatgtattggaaacaaaggagtcgggcactttggctaaaacacggagatagaaacaccaaatttttccactacaaagcttcccaaagaagacgaaaaaataccattgaaggcctatatgataaccggttgcattggcagactagtttggagaaaattgctgaaattgcaattagttatttcaaagagctattcacaaagtcgaaccatggtgttgagctaagggatatccttgtcaattgtgttcctaaccgaattagtagcgaagaaaatagttcactcctcaaaccatttaatgaacaagatgtgaagttagccatgtttcaaattcatccattgaaagcccccggaaaagatggcctaccgggtttgtttttccaaaaacattgggagttagtgggcaatgaagtcactaaggcatgccttgatattctcaacaaccaagccgattgtggaaatattaatgagactcttatttgccttatacctaagaccaaacgacctataacaatgtctgaattccgacccattagcttatgcaacgtggtgtacaaagtggtgtcaaaatgccttgccaaccgaatgaagcctactcttaataatgaaatatctctgaatcaaagcgctttcattggtggccgaatcatccatgacaatgctatcattggtttcgaaagtctccattgcatgagaaaagggagatttggcaatgggaaaaaaatggccctcaagcttgacatgtcaaaagcctacgatagggtggaatggaatttcttggaaaccatgatggcttgcctcggctatgatgagctctggatctctaaggtaatgaattgtgtccgttctgtgtcattttcagttttaataaatggttcaattcatggtcattttatacccgaaagggggttaaggcaaggtgaccccctttctcctttcttattcttattgtgttctgaaggattaacttgtcttttgcatgagacggagagagccgggaaaatacacgggctgcggtttggtaacatggaacataatctatcccacctcctctttgcggacaatagcctcgtcttcttgaatgccaacattgaggaaagcaaagctcttaaaaaagtgttggactgctatgctgctatatcgggtcagaccattaacatagagaagtctaatctatgtgtgggagggaagattaaagaggacatggccaattttttggccacctatctcggggttcaccttgtgaagcttcatacaaaatatttaggcatgccgacttttgtggggaaaaataaaaaagaggtctttgggaagattcgagataaggtggaagctaagctccaaggttggaaaatgggacttttctctcaagcgggaaaggagatattaatcaaagccgtgattcaagcgttaccttgctatgttatgagttgctttcgtatttcaaaaggcatccttcatgacatagaaagcatgattgctcggttttggtggggagcgaactcaaagaagcataaaatacattggggatgttgggaaaaaatgtgtaaactcaaagagaatgggggtatgggttttagagccttagaggattttaatcaagcgcttttagcaaaacaaggatggaaaatagtgaccaatcccgattgtcttatggctagagtcttgaaagcactctactttcccaacaacaatttcttagaggccaagatgggacacttcggatctaatatatggcggggattattatggggaagggatttgttacttaaaggataccgctggataattgggaatggttccaaagttaggatcaatgaggatccttggatccctagaggagctccttttactcttcgtactaaggttcaagtcccggctgaagtgaaaattcaaactctaattaccgaagaaggggattggaaaactgaagagattgctggctggtttcatgaggatgatattccttgggttttggggattactccttcgataaacagggaggatgtaatcggttggagcctcaccactaacggtcaatacacagtggcaagtggttataaactgagatttaaggacccaaacatagcagaatgttcagataattctgccattaaagcttggtggaaggtggtttgggggtctcggcttactcctaaaatgaaaattttcatatggcgtgtgttccaccattggattccggtaaaaacagagttaattaagcgtggtatgtccatgaatacaacttgtaatagatgcatgagtcatgatgaggatgtatgccatgctttatggagttgccccaaattacacaaggtttggaagcatttcgggttcctacaccaattccctacttccttaaggcatgcccctgactttctcatggtgatgaagtggaagctttcaaaagaagagtttattttcttcattggtattacttggctaatttggtttcgtaggaataaatgtatttttcaaaataaagacattgatgatagtatttggattccttgggccatggaaatgttagaaatgcaccttgttgctgccccaaagattcacatcaaaagcctacacaggacaaggtctgttggtctcctcctcctctgggatcttttatgatcaatactgatgcttctctcattgagggtaaaccaggttgtggcttaggagtcattattcgtgatcatttgggtgagttagtcactgctgcaacagactacattctgggatatctttcagtgcttatggcagagactttggcgatctgtttagctctgaaactagctgcttctcgatccttgcagaatattttcatagcttcggataatcaatcagtgatcacagcattgaaagggcagactagattcaacacggactggggtaaaattcttgaagactgtatcatagccagcaaaaacttcaatactctgtcttttaattttactcctagaaagtgtaacaatgtagctcattgccttgcaaattggagccgtgtggctcatgtatctgatgtgtggacatcttttttgcctgattgtgcagctgctactttgatagcagatatgccccaaggcgttggtttgtaatcaagtttcttattcaaaaaaatatatatatatatatatcaatagagtattataaatatggtatatatatatttttttagtccatgctcaataattgaattctaatagtggtagatattaatgtggtttaaatttagcacatattaatttaagataaaatatattaagggtagatgtacccacttgatccatagattattctctttagttacaatagccgatacgtatatacttgaacatggttgttttgttccactcagctacatttttaaagccaatgcctccagccgctttagattgacagatgctgtctcatgctatttgccttacagaaaaaaaaaatccaattacaattagattggattgaatgttaaaagttaaattttaattcgatttgatcaattattggatgtcagtctcaaaatttaaataattaaaaccgatcaaatccaattacaatttgatctatgtatattaaaaaaattatttatacttttttatatacgataaaaaatatatttttattatatttttactagtttttgttttttgaatttgtaatactttgttaattgttttgtatatttattttcatgatattttgttcaattttattagttgtagtgttgttattttaattatttcaaacttttggctgaattaaacttataaagatgatatatttgtatagtattaaacttaactgaaagtttatatatcgtttttaagttttttttttcacgtttttaagttaatattaacaattaggtgtataatttgatattcaattaaaaaatcgatccaatccaattagtaattggatttgattttgaggtctaattggattagatcggatgataatttttaaaatccacttactaattggattggatcggattgagagaaaaatgttgaatcggatcacatatccagccctaaaatatgaactaaattttacactataataaatactatgtctaatttttatttacttttttctagcacattaatgtaattcatgattttttatatttttatttatatattttaataaaaattaaatatttttgttaatttttttacactattttattaaagtaaaaatttattttactatgtatattggagttcaattataaaatttgaactaaatataatattgactcattttttgatttacatttagcacaaaatttacatcaccattagagagtctcttagctaaaggagctatttcatttggttgctaagctcatgtgttatatgttggcatgctaaattataaggggtgcaatgttatattttgatatttttgtaaaaaaaattgcctttaataatttgctaaaacttgtaccaaatttagcgcatgaagtttaatcgaatttgaatatggcacaaaatttaacattgtattaaatttagcacacagttaatgtaacttttaatacactttttttattacaatattttcattattttttaaaatatatatttaatttattaaatatcattaaataattattttttatgtcaatttgcatcttaattttttattatatatattgaaacacaattacaaaaaatttgttaaatatagtatttacaaatttttgtgccaatttaacacattttttacttcatatataggagatggttttagttggtgtcctaactagctaactaagtcagtatgtaagactctctattgtactttgtacagaattattaattgtattctttcaattgtaaaaagagagagttgtgatgacttttgcttactgtaaagagattcttggaccaattctccatttgcgtaacttgatcaaataaaagtttcctaagcttttgtggctggttttggcagtggagtaggatagagttcttattaattatctgaaccaatatatgtgagtgtgtgctcgtgttgttacgcattttatgttctttgattattcagttttagatgcttgttggttagatcaccataaataatctggtgtatttatgttggtctgttcttgttgaggggttactggttgtaacataatgttttacataataactcgatccaaacttataagctaacaaaaagccatatataatatatatataaatttcaaaattaagaaaaaagtgttattctattcttatattatttgggatagtggaattatataacttgtaatgttacccactagctagtgatcatcttaaggtagtggtcacagttttcgccacttctaagcttataatcatgtccatactcatatagtataatgggaaatcgtatctatccgtaatatatacatagccatctcttttatataagattagtaatgatttgaaccatcgtttctttttcactgtcggtaggtaaaaagaaactacgttagtgtgcacaatttgtcctcataattttgtatgtaagtacctagatacttgatagtgcaatatgatctggagaaacaataacttttttggggggacgttttgaatatcactcattagagaaaaagcccactaaaatatcccctccattagtggcccttaattatatatgcatgtacactattaacagcatctcaatgtactataaacatggtgcatatatattttgtaatatatgttaaaagttatatcaaatttaatataaaataaaggatgcactaaattttacactatatataataaatattacttttaaagggctcattcgtaatttttctccctgaattttgacatgtactaaatcgtgccctctaaacttttttttgccgttaaaaattcccctactattgagattgttaaattta

SEQ ID NO: 54017 - DNA, 1462 bp, Cannabis sativa
  modified_base (54)..(62): a, c, t, g, unknown or other
tattaaaaaatatataaatcggtttaattcggtttattcgggttaattgggcgnnnnnnnnnaatttgtaaaccacccaatatattcattggactgtttgaattttcattgtattatctcgtgttatattttttgtcggtttattcagtttggtttaggcagtttattcgggttgggcggtttataaattttgttgaacaccctaattctaattttaataaaattatcaaaaaaaaaaaaaaaaattacagcctttaaacaattttattggtcttttgctaaagaatgacaatttcccaattccaaagagacattcaattgttcagcttgatatattgccattaagtcccatgcaatcttaagcctttttttttggcctaaaactcaattctcaaactcaattcttctccaaaaccccaccaaaaatttctcattaaactccaaacaatatgatgaaatcttcatagccaatttccaatgagatcttcttcaattttttagcttgttatattgccattaagtcccatgcaattttaagccttttttttggcctaaaaaccaatattctcaaactcaattcttccccaaaaccccaccaaaaacttctcattatactccaaacactatgattgacaagaaagaggtatcaatctcttgacatcagctccaagcttttgaagtttcaaaaccaaattttcgtagccccgatcgatatgttcaacaccggcgatctcagttgtaccggttgcagccaaccctgctaatacaagtgacaccccacctcttaaatctgttccaacaagggaagtaccagacaagaatctgaggaatgagagtaaaaaagggaaaatagttagtacaatttaaggggttgtttgttatggttagtggggttgacaaatgaaactcaattgaggaatccaacaaaatactcaaagataaaaatacacatttttccacatctatacttagttgcagaactagccacaaatattaagaggggcaaatattaataaaaaatattttttttgttgaagaaaaaaatataaacttgatagggagaaaaataaatatgaaaatatgtgaaataaaataaaaaatataatagaaaaaataaaaatacgtgatggtaaaattaaaaataattaaatttatttgctggcaaaaacaagaatataaaaaaaatgggatttttataaatatattagattttaaggaagaatttataattttactgttatacagaattttttacaaaaatattgtctttttataaaataaccgtaaaacaacaaaacagaacaattaaaacactagtggaacagctaaaaaataattacgcaataaaaataaaaacttaatacagtacacaatataaaatttacacagtagttttgaaaaaagtttcatcttatagtaaaaaagtaaaaaaaattgataatttcaatatgtagtgtaaaaa

SEQ ID NO: 54018 - DNA, 591 bp, Cannabis sativa
atattgatactcaagaaaataatgtggaagaccaaagagttatctaaaggtttcctctgacaaatacatgtatgtatatcaaaaacacatttaagaaaaatagaaggcatcataaaaaacattaaattcatcttctataacttgaatatccaactctgataagtctcattttcccaatcaccacaaaaaaggggttcaaaccaccactttatgtgaagagttcttatcaagatgacctgaacttgatgctgattttgcagaccctctgctatttgactgcattacacttggaatatgcccaacaaattcaataaaaggattagcacaaaattatactaaagttgggcaaagaatataattctgcatgcaaatttctttttataatggtccaattaaatgttataatgatcagttttcagatcctccataaatatcaagctctaactatgttccataaacaaatgattgtattaattatcaagctcctttctagagttttattgctaatcttttctagaactaatcatgagataaatccagctaatataacattttatgattctattgccacatttttaccccttaaagaag

SEQ ID NO: 54019 - DNA, 1403 bp, Cannabis sativa
  modified_base (30)..(32): a, c, t, g, unknown or other
  modified_base (60)..(62): a, c, t, g, unknown or other
ttaaataatggagattacattgaaatagannnatggagattacattgaaatagagttttnnntagggcacaaagcccaacagtatccatggagattggagtgggcagcaagattcgatggggtattgttctgtgcatcaacaaagaacaaccccttgcagccatggagtttgtacaagtgaaaatgttgctactcattgtagtagtcatcacagtcatgcacctttagaagattataatgaaagcacttctgcatttcaagggggaaaagataattattggatttggtttttaggttgtgtagttatagttgtactctttataatgttgttctgaattgaagaaggttaagaattgtactattaagatttaatgtatgaatgaatgactcttttttgttaagtgatattgcatgaattgtgtggactttaatttataattagtataatacaaagataaataatcatagttttgaacatcaacattaattcataccatacacttaattaaaagatacaacccttaaccatacaataaatcaaaagatacaaccctttagtttgcatcatcagatacaaagttcatcagaagacataaatttgtaccctacagaataaagacattgaaatccttatccaaatacataaagtttcaaaaagaccttatacttgtgctttttaaacaaaatacataacatagtttaatggcatcaaaaggatggacacaaaatgacatcaagtccaccacattgccacacatgaaaattagatagatacattagataacatagttaatgttcatatgttaaattggcataaagttcaccaaattacaacaaaaagctttcatccctaaatattggcattagctgagacctttgcctttgctttatcaacctttcctttcttttcttggttgcatcagttggattggcaaatggtggtctccccattttctttggctgagcaggctgtaaaagtaaataattagttagacatatattaatccaaacattaattgaattgaaaagttgatgtattacttagttttacatttataatcataataacagaaaagtgcaagtgtgagacactgcatttttgcaactcttttaacagttgtcagcatagcaataaggaacctgcactaacttagattcatgactctaacagcaaaatttgattgttcaacagatactaaaaaaaatggatcaccataaatgacaaaagtcttaatttgcataaatgacaaaaactaacctgtggagttagatctttttgacacttttttgcattgtggccacgaacaccacacctactgcatttgtgaacttgtccaaatcttctaatagtggttgcatttgctgctgatggttcatcaacatctctccttctcttctttttt

SEQ ID NO: 54020 - DNA, 742 bp, Cannabis sativa
aaaaatttaagtctgtattaccgagaacctgtcatccttattatattaacatgaattaagagacctaataattttttaatatgattatttttcaaaatcgatccatattgatcgagtaaatatgtataatacaagtcttaattccagcgtgtatgacctgttcatttaattcttttccacttatatatatattcaaatagtcaagggtcaaataaacttatcataatatttagacattgaaattgaaaagggaaaaaaaacaacaatattcaagtcatgatgattcaatagtaatatttattagacatatactagctataaaaacaccttatgtattgttagctccacatcgtgaactcatcaacattatatttattgcatatatcgatataatatattttacaacaaaattataaacaatttatattataccacaaaattatttggtagctaattaagtgttagaaatgatgaggaatttatttgtggttttggtcactatgttggcaattatcaacttattattatgtgttgatccgattgaaggtggtcgagttctgaatcgagacaaagatttaaataatttattgatttcgtctttacaaagaggaaataatcaaccaccttcacccaatctaaacaaacctgcatcttttgacgaaagaaactttgctagtacaagtagtcgtagtagactactagctcattctccaccattaccaccacctgcaccaactcatga

SEQ ID NO: 54021 - DNA, 2209 bp, Cannabis sativa
aaatcataaaaataagagtattattattggttccaaacctcagatgggtctttgagagagtagaatgctttggtttctttgggtactggggacaccagaattccataacctctgttttcctcccttaaaaactgaaatgaaaaaaaataaagttaatagcaagaactgttgccaaaaaaaaggtcaatttaaaaaaaaaaaattgaaaaaacttctaagattaattattagtaatatcttcatttcaaaaaaaaaaaaaaaaaaaatattagtaccttaaatgcatcttcatcagtcctatcatcacctatatagattggtagcacatcatctctattgtttatgtctgcaccaattgatatttaaagtcaaaaccataaaaaatatatataacaaaaattaaatacattaaaacacgtcatatatatgcaagaatgtgtatatggtatatacctagagattcaagcaaaaattcaactgcttttcctttgttccagtcaatcacagggcgaatctctaaaacctgtaataaatgaaaacagtaattaaaaaaatgaatttattttttttaaaataaaaagataaagaaagttgtaatagaatattacctttcgcccatgagtcaatcttaaacgagggtagtcctttagtatatcatggacacattgtgcaatcaaaggccaattctgataacaaattaaacacaaaaattgaactcaatataattagtatttaatatttagcttgtttatttgttttgtttaaccaaattaagataattatatattatatgatcaattagttaccgtttcttctacattgcgataatgtacagaagtacaaaacttgtgattttcaacttttgcaccttcaattgccttggtattctcgacaagggttctaaaaacctgaatttaattttgataaaaaaaaatattagaaaactctattatgaatttttaattaatagaaagaaaattctattcgattcataatcctctaataaataaataaaattttcaattacctcatcgatcatagataaaaactctttagcaggctggaagagctttacctccttatcctattattataaacaaaatgtttagttcatcaattaatgtatcatattaaaagagctgtaaaaggtgaaagggttaatggttaattaatcaatgaattacctgtttattatcaatagatttgacacagttagggcccataatgtccattccatggctaccggcataatagagctctgttagtcctattaaatcaaaaacctgaacacaataatgaaatttgctttagtaaattaattgaaatcttattaacaacaatttcgatataaaaaataaaaaatccatttatatacataccttatcacggcttcttccacttatgattgccgttggaaaatactttgccacatttttcacagcagagcgcatctaagacacaaaattttgtttattcattagtattaagtacaaatatttgttaaatttaacagacaatttttaattttatgagttttaaggtatggggaaatttaaaaatatgggaaaatacgataagtaactggttacccttttggttactccaagagtacgtacctaattactcttagttttctcatatttttaaatttttattgaattttttcaataaaagaaaaaaaaaattacattttttgtgcaaaaatataattttatttttcagaaaagttattttgtagaaaaagtaaaaagaaaattaaaaaatattagaaaatcgggtaagaataaccaggtaaccaattacaataagagggtaatcaggttgctgtttttaattccatatttttttaacttttttttttttttaatttctcataaaataattttttctttttttgaaaaaatgtcttattcttgcaaacttacattttaaatgaaaatttccaaaaaaaaaaacatgtttttgcatataaagtccaataaacgttataatttcgtcaaatttaaaagttaaatagacctgttagctgagactcaaattccacataattttggtcatatatatttataaatattattgtaaaaataaagtttctatgtctaattttacctttttttcttacaaaactacagggtaaattttaagattattcaaaaaagttattctacaaaatatagtgacagcagagcaaactctatatagttatgta

SEQ ID NO: 54022 - DNA, 971 bp, Cannabis sativa
atcttatgtttggtatgaaagaaaaagaaaaagaggaaagaaaatgtaagagagaaagaaagtttatttctttcttgttgtttagtggatatgaaagaaagaaaattgatttattgatgtttataaaacttttcattccatttttctctccaaattggaggagagaaatttcggtaggccccgcttaatatttttctcctcacttttctcttctctccatttttctttctcaccgaacactctaccttttttttctttctttcctctcatttttcctccctaccaaacaaagggttaaagcaaagaaggattcagcctgtgttgttaccttgttttttaaggtcttatcagctcctttgatcaataagagcttcacaacatctgttcttcgtgcttgaacagcgagatgtaacggtgtccatccatcctagcgagttctcaaacacgaatgaaatcaaaatttaactaaataaatcgttcgaatatgcacaaaaagttgagcaatagcgagaactatgaagcttacattgtcctgagtgtttatatcgacattatacaagaggagaattttaattgcttgactcgaagctgttcggacagcataatgcatcaatgtcgctccatcctgttatacacaaaccataaccgaagtaaataaataaacgaaaacatgaaaaggggcactccatttcttctataaaaactcaagaaatgaaaacaccaggtcccgaatgaagacctatatcttagccaccccattctcagtattaggctaaacctaatggattattcgttttccataatgattgcattgcactcagacaagatctttcattcttcaatgcttaatgctatgctctaatgatttatggcaacacatattcatagacgtttgcttctattgtagtacattgcttctatgatcatttacgaaattaagaataggcataaaaagcactgatgaagatgag

SEQ ID NO: 54023 - DNA, 892 bp, Cannabis sativa
  modified_base (41)..(50): a, c, t, g, unknown or other
ttttgttctcattttttaaaacaattttttgaaaacaaaannnnnnnnnnaataccaaacatgctcttagttttgttgattttgttaagcttatattattctatttctcttaatgctcattctaaatttctaatgcattagtcttacttgtaatgctgaaagacagtcttttctttcaagaaccaagcaccaccttctcatgaacattgtaataacataaataatatggcctttatgtgatttacagaaatgaaaaataaaattacaagtggtacttcatcataaaaagtaaatttttaagagattaagaaagaaaacaggatggacaattatagaggccatggtcaaatcaaagggtcattgacagttctatgcttgatgatttgtcttacaattggacactaattaagatgcatggtttccttatggaaaacttgacatgatccttagaaattaatatggagtgaatgctggtattttccttgcatataaattttgttacttggattaatagtggttggttctagaattcgggaacaactatagtgagaagaatttggctaatgtataaaagataacatgaatgaatgaagtatatagaagatttggtatcatgctatttggtgtccaaaattacaaagccaaactgatatggaaggattgtgtatccacttttggcattggcacaacatggccatcgacgagttcagcgacaatggggggttttgagatgcaagtggttggtgctcgagacaagggcgccaaagatgcctcagttgatgcgcaatagcactcaaatatggcatctaatgtcccattcaactctccattcaacataaaaccccaaactaaatacacaccagtatgccagcaaaccagtggacataacaaa

SEQ ID NO: 54024 - DNA, 5082 bp, Cannabis sativa
  modified_base (5013)..(5013): a, c, t, g, unknown or other
attaatcacaaccatttaatagtgatcgaatggctaaaaaaatgtgaccatgatggttacaataaaaatgtaaccattggaacctcctccaataaaatatatatgaaaattataattataatttggcgaaatatatgtaaatattataaaatatttttatcaattaaaatatcaaaaataaaattcatatttattttttattttcaaatatattagtattctaaattaattattatttttgtgatagattttaatttaaggactaaaatatatgattattttttgaaatgaaataaaataagggttagaatgttaaaaaaaaaaaattacaccaaattattttagattcaaaattcaacactattaatgggatagtatttggtgcagaccaattcagtgcataatttagtgtactatttgagtgaaattgtgtgaagattctacactaatttggtgtaaaacttttttcttgcattctaatccttatttttaatttatttttaaaaaaatttatattttagttctcaaattaaaatttatcacaaaactaataagttatttataacactaatatattaaaaaatataaaattacaataataataatattaacattaatcaaaataaaagaacatcattattaaattaatcatatgtggaaacactacaataatttagaaaattaaattatgtaggtgtgattttatttaagtttttttttaaaaaaaaatgtgtaatgtttaattgatttattttaagattttaaatttttactagtagtcactatataattatatcatagattagttattttaggttattaatgtaaataatataaaatgttaaattttctaagtaaaatatttttattgaatgtaaataatataaaatatgaatctacaccaaattagtgtaactattggaaatattcggaagaaaatatattcatgggtagatttacttttgtttgcacagctcatagtaaaaaaaattacattaaaagataaaatattttctatttaatttaataattatagcataaaatttttaaaaaatcacacgaaattcaataaattatgataatttttacttaaagtagatttgaatattttttttaacaactaacttctcacgcaacaaaaatttaagtctgtcactaaatttattacttgtatattaagaaaattaaataataagtttacaaaaaaattaaagcaaacgtctccaatctccaaaagccgccgggtacactaagtagtaattctgtaattgtatataacaaagtataagatttaagatcccctcaaaaaaaaaaaaagtaaggatttagcctattaaaaaaaaaaagtgatctaagcacgtgcttcaagttaataatcaaatttatgaaggaaacacaaccggaataacgtcactctcacaatcattagtggactaaacaatcatcccaacttaatattatttgtccaccaataatgccctttaataattaaattagccttaatcatagcttaaaccatcatataatataacatagtgaaagtgattatcatgtattctagaattgcaagtatagtaaaaacaaactaatatttgagagttttttttttttgaaaaattacattgtatactcattttacttaatttgttttaatttttacctctatttttatatttttttagttatacctacttttatagatgatgttcctattagactccttaggttatgtaaattatatactagacttaagtagagagtgagggtatattagacaatccactaaaaaaagtgggtatattttaataaaaaaaataatataaaagtatttttgattaatggatacaaaaaagaaatatttttcaatttatcccttatttttaagggtaagttttgcgagattcgctatcgcaaagatagctatatactcctttgagacatagtccatcaaatcaattttagaagaaaagtgttattgttaatttcttggattatttactccacatgaaatttttattttttttatttttttattgtggggcggaattttttttcaaaaatattgtattttttttcaaaatattgtgtaagttttatattgtgtattgtgttaagtttttactactgctctacggttgttttttagttgttctacttttgtttttagttattctgttttgtgttctactgttgttttataaaaatacaatatttttgaaaaaatttccatgtaacagtatttttgtaaaagtttccagtatttttgtaagtcttcctaacttcttatagtaattaaattctatgtccaaaaatatatgtaagaatatttttttttacatttttttgtggcggtggtcgttaatatcacccctataaatttttaaaaattttcgagtagttttatgtttaaaataatttttatttagtaagaaattaaatatttgatttgatttgatttataaaatataattttttatttaataattaattaaaatattttaattatggtcagtttaattaacaaatatttcagttacctgatttaatttctagaattaattgttaaaatatttttacaattagtgtgacagagaatttgatagaagttctcacatatatataaatataagggctcggtcctcgagctcaatactcatcctgtgaaaacagtaaatccatctagagagagtagagagagaatgaaaatccaattatccacactaatcaatttccttttcttttacagatttaaagttcgtgtgtgattaaaactcaaagaatcaatagatggagatatttcgatccttcaaatagtaacatgtatatgtttgtgatagtcagtagtctcgtgatccgtaaagggaaatactaggtaagttgtgcaagcccacatcgcttgagaaaggtcaagtgtgatgattctgagacttttttttatgaaatgattctgagactttgtaggtgttgaacgagatttttgacaaccaataattagagttgtatgaagtaattaatgaatattagaagatgaaattttacgtggttgggcattaatgagccttagtccacgagtcactgtattaataagaatatttattacagagtgtttttccgaccgatccccttttctgtatatcatttaggtatttataggctcataatggtggtaaaagaccactattattgtgtttgattgcactatgctttgcacaatttcccaaatttgatcttaggatatgattgcctacttttatgatagattttaaactatttataggcgtttggtgggatttgacttatccttcatttatgacttgatggcccatttatacaattgtcgattgatgtatggggtctcgtgaaatcacaaaaggatgggctttaacccttaaactcgtttgttagagtaaggtgtcgaatgcttttccccatgccacattaaatgtgtgtacaatattttgatacttgagtgacatgttatgtttcatcagttctcttgtatacccttctctgggtagacttcactcacagagaggaaaagacaagagatactcgttgtccagcaagacccacctgaatataactgctctatcattactcctctacaataatagactctgggagtaattgatgtgatatttcttgttaggtgggtcctaccgctatctagctcactcctggtttgcaatgtattttgggagaaattctaggcaacatttacccccaagtccttttttgcaattttgcaagatgggacatgtgatgtgcctcttggagtgttgacgtcacgctgtgcatgaccattttaaatgctgctcattattttctccatttttgatgaagacgattcgatttcttaatcaattctgatgccattaattgtaggatgtcagaggggcattgagtagtgtaactgtccttttgtgcttgtccatatgccaactgcttcagttgttgcatcacatggttttcaatctttgaattaggattgttggatgatcgacgatccatgttgccttgactagtctataaaaacccctcattcttcttcttcaaaaattctactctcatatttctcagaatcctcaaaccagccaaaattctaggcagcccagattttcttttactctttctttaacattataaagctcgatttcactggcgttttgcactagcatctacaactgctcgatttcaccctatttgtatgttactagtcacaagaatttattcttttccttgtttttttactgccacttcatttgatgatgcttgcatgaacatgttgttggcattgtattagtgattttgagggtatttcccaaggttgtcttcagttttcatctttagacaagagattcttatgttggggctagtaaaacttgctcttttccttttccatcctctgcaccattgcttttcatcatggtgcagttagcacccgatgtgtagcatatgaaatttctctattttgggatatgctagcatttggaggggccctcttctcagtggttaggggaccccattatgttttttagggtttgatatgagggctaactgttgggttaattcttgtctttttaaatgagcgacatcttgagcgatctccataaacacaatttctataccttcaacaaagagatcttagaacttcactcagaaactagaatgtcgaatcttgaagctcttgccccaccttcttctcaggccatggtatcatggtaccctgtggtgccagtatcagtagtgaaacagagtctagttccagtcacgaactatttacactgagccaccagttgggaggctgaggaactgcattcgcccatgggttgcattcatcacttgggttccatcgctagtaaaatggaattatgccttaggatcaatgggtcgtccaccgtttaccctaggagactaaaattctcaatcattactacggtagttttagggcatggagcaaaacacatctcatgtctgaatagatgttgaaaaaattatttaaatttaagttgnaaaaataaatttcaactgaaaataattttctatttaattaattgtcatgaaaaagaaaaatttaagtat

SEQ ID NO: 54025 - DNA, 2517 bp, Cannabis sativa
ataaaatgtgtatagttttatttttttttaattttattcaattagtgatctctaattaaataaagaaaaataataataaaaaaataagacaattaagtagaaaagaaaaattagataaacgagagaattaaggagagaataaatatttataattttttttatttttaattgattatcataaatttaaaaattatacataaatagtttgactttgattggttagttattacgtatgattagatttttttaattattaattatggatagaaagtttatttttttttcttaaattatttattactaagtgttaacgcggattttcgttaactatatttgagcctaaagtgtgacaaacttgcactgaaaataaaaacagtaaagaaaaaagtaagaacacgaaggttttttacatggttttgcagttaaaattctgcatagtccacgagttaatcttattagatttctgatatagttctagggtcttttttcttatgaaatttttcatccccttttttagtgcaacatgcctctatttataattacatagtcaggtagttaatacatagttgattgacatctttacaacagttatcccctgaaatcatgaggtttgattacataccacgtaaaataaatgtggttaatatttgaaaattacacagctgtgatatgtctgcttttaccgggtcaagataatcgtgtattaaacacgttgtaaatcctaacgttcagggatgtctcgatgggaacaaagcatcaataactttggtagcgagctagagcttttcccacatcttttacgtggttaataacgtaagtcttatcgcttctttgtttgaagacataatgctccatctaacaaccgcaacacttggcgacaaggtgaacttcaacagccaacaccatttgaatgtctgtttccatccgagagaactgactcgccaagactatgaatctcattgaaagatgtcttaagttgattagtgaaggtaccagaagtgtgccttcctatagcgagatgcacgcctcactattagttgtttgggtttgcccaactattatacttattttgtatactatgtattatacgctaagtatcttaacaatcattatatctcgcctacatctctttatgcgtaacgaagttgatgcctcaccttacatatctaacgacatatgatttctcgttaacgtagaagacaacagtttgtatatctttatctcgcataagaccttatagttagcaagttgtaaatatactatgtaactcccgcattaatgagttattctattttcgaatgtaattactgttacattcattgattcatattcttcgcaatttgacacgtgttctcctttgaaataatagtcgaattttgagtataacactaaagtattgtatatacatatattttaaaaaggtaaaacttttgaaagagaaaaaatattgtgttctatgctgatataatttcttttagttagatattttgatttttgttcttattagagattatattatggttattattattattagcttaattgaaggttttttattaaaaagtaataaaaaagtaaaacaatgagagaattaagaagataatagatgaagctattgaagttatatttagttaagcttttctaaatttaaaagtctaagaaatcatgtaaataataaatacaaaaatctctattgtcatttgttgcaacaatatatattaggagatattaaataacaatgttaaaaacttataaaaaatcaaaataaataataatctatatttatatacatagatttatgaaattgatattttgtttattatttttgacaaaaaataaataaaaatcaaacgatgaattaaaaaagaaagtgaatattataaaataaaacaattttttttataaaaaatattttaaaatagtaaattgaaatggcgttaaactcgtataatttttaaaacaatacatttaaattacacttaacatatttatattgttcaaaaaaaaaatacttatatattccctcgtcttaatcacatcatcttgtctattttaatgtactattccctcagttctttgcctgcactagatattttacatgtagtaatcatctatgttttaaaataaagtgtataaaacatgatatcaaaagataaatatctttcattttgactaaaaaggtaaaacaaaagaatttagcatggatagacaaattgtaggagatatatgtcatgtacattatagcactagctaaaaaactcaagccatttttctttgttggtgctgtcaagtttataaatgaaatttgtaacaaaaaaaaaaagtgttttttcatttttacactttgaaatattttttttttttgtatttttatgaaattccacacggattccactatagcaactaatagagaacccaaaattcatatagcaatccacatagaaattaccggagcaacccaaatcgtaaattttaaaaaaaagttatcggctaattcccaaaaaaaataaataaaga

SEQ ID NO: 54026 - DNA, 1621 bp, Cannabis sativa
aaaaacgtaaatttgggcgggtcacagtatttttgtaatacatggggaaaagttagtaaagagtataaatttccctataatatttcataacacttctcttggatgtccataaaaaccgccttattaaaaaccttcttgaaaaaacttggtcaaaagaaaaaagagtgcagagtaaattaaccccatctcatttaggcattcgtggagatcttgtaatcgacaaatttcaatcttatatgtcatcttctaaaatgctgatactggtaataactttgtgaataagtatgcatgattgacacttgattgaatatgttggacaccaatatgtattctcttgaaatgtataaagaaaaatttggtgaaatatgttttaattctatctctttcaatgtacccttcttttagttgagtgatgcaagcagtattattttcatagagaactgctaatgttgataccgcgtgacagagtgtgatccatacatttctcaaatatgttatgttaataatgtcactctcacacattctctacttgcttcagaaagaacaagcatgttaacattatttaaaattacgtgttaaaaaccttattaggaaaatccagtggaacaaaacctgagctaagaaaaaaatagtatttttcgccaaactttctcatttttcaacatttttcaattctgtaagtttgatatgctctaaccttgttcctggaaaaggccatcgagatgaagtaagtgcacttgatcaaataatcctatacaacatcatcttgaaagacaaccaaatcaacctaggttaccttatcctaaaaatcatcaatgaagtgtataagcctaccctaaaaagtcttaccttatggttatcttcttagctacttgttcccacttctaggaatctcaattgaagatgaaactgacatttatgaacccaaggattccgacactcttggtgagatcacattcaagtctatgcgctacaagtttaatgaagtggaaaagaagtggatttccaccaaacacggttcacatgtccatgaggaagcaactttgatctcaagtgaaagtgaagaggaagagcaagaagcccaagctcaaagcgaagagaaagctgaagaagaaccacaagctcctcacttcaacatcgaagaggcttttgctaaccttaacacctccattgtttcaaatttcaacaacttgagaagtgaaatgaacacttaaaattttttactctccaaaatgagatggctaccataagaagagacattgccacaatgaggagtgacacggagcgcgggtttaccgatgcttaagaggagatgccataatggagggcttacatggatcgatttggacctccaccaaactagctctcttgcatttagcatattttctcatgtttttttttttttgcaagggcttagtgccttttgacttttatgtgttagtttgttatttttttatttttttttattttagatgatatgtgtttgaattttttttatggtgaatggtatgctttgttttatctttttatttgtcttttattttgtaaattcatttgccaccttttttgatgaatcaaaagggggagaaattctatagtgattattctttttttttttttt

SEQ ID NO: 54027 - DNA, 2442 bp, Cannabis sativa
tatatatagtagtgcatttttaaagacacttgggatattactgggaatgaccttgctgaagcaattctctcttttctccatacaggtagattactcaaggagattaattctactacagttactttggttcttgattataaactaattcatcgcttgctgcaatgtggtctataaaatagataccaatgatttgttccagattgagagaaattctccctaatattatctttgaaaaccatagtggctttgtcaaagtcgtcaaataattcacaacatcatggttactactaatgctgattttcattttcatccaaggtgtaagcacttgaatctcacgcacttggtttttacagatgaccttttacttttttgcaaaggtgattacaaagcagccactctttcactactggaatttaaactcttttctagtactttggggctactagctaatgtgggcaaatcaatatttttggagcaagtatggatccccttactcttgatcgaatagatgttctttctggcttttcttgtagcaaacgtcttttcaagtatttgggaatgaaaatctgctctaagaagattaataaggttgactgtgattgttttgttgaaaaaatgacaagtcagattcgtgtttagagtagtaaaagtttgtcttatgctggcatgattactcttatcaatttagttctcattacaatcaacacttactggtctcaagtagttatcttaccagcagttatccaaaagattaattaaatatggcgagcttttctttagaaagggagtgaatagttcaatgggccgagtaagatttttttgtctgtagtttgtaggccaaaaaagaatggttgcttggggttcaaagatattgctctttggaatccttgtgtcttggagaaacatgtttgagttatttcttctaagaaagataacctttgggttcgatgggtcaattctgtatatataaaacaaaacaattggtgggactatatatgaggtccccaatgactcaagctggtatttgaaaagggttgtgcaagtgaaagagaagttaaagaatttttttattgagaaagattttcagcagtacaactactctattgatgaaatgttcatcattatgcagcaacttctcatggaaaaatagaaatattctatgttttgggatagattttgtgttcctaaacataaaataatcacttggctggctttgaagcaaatactcttaacaaaagatggactttttcagtttggagtggtgagtaatcaaatttgtccaatttgtgagggagaagatgagtctcataatcatcttttcttctcttattgttatagtaaaaaaactagatggactagaaggttaaattgagcaacttgaattccatgatttttaagctcaaaaaattaaagatttctcaaggaagaatgaagatttatacaatactagctgctactctttactctatttgggatcacaaactcccaatggtcaaaccgattgtcaattgcatagaaatatcaatttgtcatagaatacaataaatgaattttaattctttgaataggatagacaaagattgggtggaagctttatataaagattgtaactaatagttcttggctttaagttgtaaatagttctatgatcaatatatttcttactgattttccaaaaaaaaagtaagctattttaaagtttactttcagtatggtaaataatctcacacaaatttaatggatttttgaaataatttattaaatttgttttgagtactcattagtatagatgattagggcataatatatattcagggctaacctaaatataggccgactaggcccgtgtgtagggcccacaactttcggaggctcaaaataaaaaataataaaaaattattaggtttttatttaagtaaaattaattaactttcggaggctcaaaataaaaaataataaaaaattattaggtttttatttaagtaaaattaattatattgtaaacaaaaaattcataacttagctggttaaagtgtatgatatgttatacaatatcatggtttgaatctcataacacttgttttcaatattttatatgtatatatatgttttggatgctctaaaatcaaatttaccttagacggcccatatattttcagagtcggccctaaatatatttattatagaagattaaataatggtccccttaaataacattttgaaagtttataaatcaattattcactaataagttgatagtacttatagataataagatgattaaaagataaatttataatttactctaactttgattgtgaactaattgttgaaattttgaattgcatgatatgattatattaattgcaaaagaataattccataatttgtactagaatctcatagtattattaaattattgttatctccattaattttagg

SEQ ID NO: 54028 - DNA, 1149 bp, Cannabis sativa
taatgttgaatgtgtgtttggatagctcataatctatgtgataaatttaacaattggtatcagagctagtatatttgattttagaactccataatattttttgaactaacccattttgtttttcaaatctaaaaattactatattattttctttttcggattaatgtgcttatagttgggtaaatatgagatttactactttgaatgggtttatatactttttttggatggatattttatttattttccattgttgtggaggtgaaacccatttttttaaatctatgttttatggctaatgtttatattgtgaaaatgtatgaaatggattttggaatttgatagaaggttgaaaatggaacaaaacccctcaatcggcgtcggatttggtggccggacatggtctacccggccgggttatgaaccgggtcgcgtcgatccgagttgcagacccgcggacccgtggagaagtttgttgggtgacaggggtgacgaaaaacgacttgtcgttttgcctccgttaggcaaacgacatgtcgtttgccataggatgaaaaccgtcgtttttggagcaaaaaacgacttgtcgttttgcctctatcgggcaaacgacatgtcgttttgcatatagtgaaatgtcgattttctggaaaaagaaacgacatgtcgttttgcctctgtcgagaaaacgacatgtcgtacgcacaccaggtctagcccccattgtcgcacaaaacgacgggtcgtttatgaccctgcggcgtgtcgtttctaccaaacgacatgtcgtttttcaaaacgacatgtcgtacgatagttttttaaaaaaaaaaaaaaaaactgggcgtgtggggcgcgtgcaaggtctaattttgggccattttcaccaatttattctaattttagcattctatcattttctcatcttaatttatgcataatattaattcaagaatttattcataattttagttattaacattatcttgttatggcataaattaatatttatttaaataattaatgcttattttcttacccctcgtaaggttaagcatggaaaattgtttggtaatgaggaacacttaaatattaatttatttaaatattgtatcttcctccaatattagattaagatccttataagta

SEQ ID NO: 54029 - DNA, 1160 bp, Cannabis sativa
ccctatcaaagtgcctctaatgggcaaatcattgcatttcactgttaccatgcataaaatatgaaaaatgcaaaaaaaattatatataatatatataatacagctagcattcacatatatcaccgtaattaagaaataactaatataaatcttatttctgatcataagccctaattatctattaattcccatcataaagttaagcgtcgttacaattatcgtcccgtcataaggatttcatcctcaaaatctatcttgaacaactatagatactgatccctcatatcagactctaactcccatgtggcttcctccaccttactatactttgaccaatgctattgtctttttccgatgaatttcatctttcttatcgtggatttgcacgggttgcatcccataagataagtctggctgatgttctagggcttcataactcaagatatgagtcggctctaaaatatattttcttaacattgaaacatggaatacgttgtgcactgctgacaatgctggtgtcaaggctagacgataagccactaatccaacttttttgtgaattttaaaaggttttgtaattctacggcacaactttcccttcttcctgaaacacttcacccctttcattggggatactcataggaaggcatgatccctacttgaaattctatctttttgcaattcctatcttcataacttttctgcctgctctaagaagtaaccattcttgccttgatcttctctatagcctcactggtttgttgaactgagtctggacctaaatattttctttctccctctcatcccagtgaattggagatcgacacttcctaccatacaacatctaatagagagccatcctattgtactatagtaattttttttgtatgaaaagtctatcaatggcagatacttgctctaagagccttcaaaatccaccacacgtgctcataaaatgtcctcccatatctggattgtcctctcagactagccatctatctgagggtggaatggtatgctgaactttagcttcgtacccatgccctgtggagactttcccaaaatatggaggtgaacttcggatccctatccaaaacaatgaattttggagcttcacgaagtcgtacaattttctttacatacaactctgcatactgatc

SEQ ID NO: 54030 - DNA, 1252 bp, Cannabis sativa
  modified_base (954)..(975): a, c, t, g, unknown or other
ggtccgtcacttgttttgatggctcgttggagaagccctcagtgcagaaaaaatctagttttggtgtttagctcttataaaatttaagaagtaacagttaataatattttataataattattaaattataatatgtacatcttaattaatgttataattacttattataatctttcaaagtatttatataataaaaaaaaattaataaaaatgaaatattcaacatttaataattaatgtaaagttattaattaatagtagcacaaagtgaaagtttcataaaagatatttagtgcatgtttcacattataattaaaaatttattttttgtttttttaaaaataagaaattattttttgaaaacaattaggcgtatttgaccttattttttgaaacagttttcaaagaataaagatacaaaaattaagaattttgagaataacaaaatattattttctattttgaaaaataattcacttttggtcaatattttttctacactttatctcacatcattatacatttatactcatcattttttcattttctctctcatcactttatctcctttttttttctctctcgttactttctcactcatcattttttcacattattttctcacactttctctctcatcactttcttacattattttctctctcttcactttctcgtattattttctctctcttcactttctcacattattttctctctcatcactttctctctctttattttctctccccccattttctctttcctcattatcgatctggactaggccgggggttgggatttggggtccaggtcgggactggatccatgatccggcactgtgtttgggtccagagacatggacagggttcggggctacaactagggtgcgagtgcggccggtttggacgaatcatgggtcgtggtcgagtcttgttcatatcggggtctcannnnnnnnnnnnnnnnnnnnnnaataaaataaattaaaaaataaaaataaaaattattttttgaaaacattatccaaatgcgatttgtgttttgaaaatttcagaaactgttttttgttctcatttctaaaaatactttgttaaaaacaaaaaacatattacaatgacaaatatactcttagtagtttaggttttatatcccaaactaacacaactcaagttacgtaatccccaaaatacttcaaatatattatttattagcgtaaatctcaatattcttaacataatgaggtgttatt

SEQ ID NO: 54031 - DNA, 1128 bp, Cannabis sativa
  modified_base (1099)..(1102): a, c, t, g, unknown or other
tcgttggtgaaggcatctcgattaaagcctttattttctccaggtcagcttcaattcctcttgtattcactatgaaacttaaaaaatttcctaaggaaaccccaaaacaacatttttttagggttaagcttcatgtcatacttcctgagtatgtcaaaacattctttgaggtcccttgtgtgatccttgcttttcattgatttcaccagcatatcgtcaacgtagacttacatattccgtctaatttggttctcgaacataccatttaccaatcgttggtacgttgctccagcatttttaaacccaaacatcatgactttataacagtagagtcccatatttgttacaaagctcgtatgctcttgatcagggacatgcattttaatctggttatatccagagtatgcatccataaaagtcatcaactcgtgtcctgctgttgcgtccactaactggtcgatccagggtagtggagaagaatctttgggacatgccttgttcaaatctaaaaaatctctacaagttctccaagtgttgtttggttttggtacaagagctagatttgagatccacgaggggaaaaggcctctcgtataaagtcattagttaacaacttgtcaacttattctttgagtgtgccttgtctctcgaaatctaatggtcgttgtttttgtcattttgctagataattggggttgacgttcagatgatggcaaattatatttggattatcagagtggctccaggcaaactgatcttggtttacctttagaaaaacaattaatttctattttagttcttcctccaaatttttcccaatgtaaacacatttttaggattatttgatctaaaataacttcttctaattctttgagctggctaccttcatcttggattcttggatccaagtcctcttcttccctctcgttttccttagttaggatcaccattagttgaaggttggctctcgtattttgaagttatatctgatagcattctcgagccaataactggtcacctctgactactcccacttttaactatgttggaaactttagggacaagtgtttaaatgaacttactgttgggttttatgccnnnnataaaactctttacaatctgattagt

SEQ ID NO: 54032 - DNA, 1069 bp, Cannabis sativa
taattttagagttaatgtttgaatatttaaaatcattatacttggttccaactaaagttagttaggggaaatgcagcgatcagggtaaatttgcaattattttcatagttcaagagattctttaccaaaaaataattcagaagcaaatactacataggtcatagttcgaggagtaaaattactattcattcaacagaaaaagaaacctcaaagcttttcagataaagccataaatctggtttcagccataaccacataaattcccacttatctttttaaggctacatttcaaagtctcaaagtcaatagaaaaaagctgcaattttgactgaaaatgatgatgattattcagtccagcttatgtcttaacatgtcaccaaacgaggatattgtgagaaaataaaggtaaaaagttcactataacttcaatcagtttccttttttagggaaaagagcaatgcatttgacataaacataagtcatgacaactagtactagaaaaggaacaagacagaaatcgagttacctgcatcatagacaccctatttccaacaacagcagtttcgcctataacaactcccgtcccatgatccaacagtattccctcaccaattattgcagctattgatatgacaaaaaggagaaaattttgataaaggttagtactataaaaggtgtttcctttctcagctaaaaccgaaatttactgctgccatcaattgccctcatcttgaaacgaatcataacagaaaaccatcataggatgttatgaataatgtaaaatacaaatgaagttacctgggtgtatgtcaactccgaaaacctcacttattctactttgcagtgccaatgccaatactttccttccttgactccacaaggcgtgagctactcgatgaacttgcaaagaatggtaaccctgaatgcattatagaatgattaacaagttaaagctcaagcataatttgtaagccagcctaaaccaaatcaagaatcatgaagaacaacaacagagaaaatcgataacaatgatagaaacatggtaatccatcgatgaaagttactaata

SEQ ID NO: 54033 - DNA, 583 bp, Cannabis sativa
aaaagaaaatgaaaaaatagttaccaagaacaagctaacataaagaagtaaccaatttacttatactattttttctatattttttaactttttttctaaaaaaaatattcataaacaactactaatttgagagagataaagataatttacaaaaaaatattaaaaaaataaatagagaagttttatttttaactaaaaagagattacgtggtacaaattctttccctaccccatcagtcattctgacaattctaaggaccacagctataggagtctaaaagctcagtccactttaattaggtcattaataattacattaagagttcccatcacacatatagtaccacctccatcaaaaaccaagcttttctttaatccctttcaaagtttcgaatctttgacccaagtaaaaaatgatgtcagtaaaaacaatccctaagacaattcctaccactacaccacacaacacataatataaatagagaaactttaaagcttagctacatttaaataaagaattttaagagtttgagatgacatattatatttaaacctaattaggaaaagcacttgatggaaataa

SEQ ID NO: 54034 - DNA, 2536 bp, Cannabis sativa
accttcggtcattttgtggtcgagatagtaaaaaccacctaatccacgctttcttgcgggaacggccttcacggagtagaaatataaaatttcaaggggagtcaaacactcccatcccataatttggtataagacctttatataggccaaaattctgtaagaactcggaattaactgaaaaagagcaattctgagataattacaaaattctctgaagtactctctcagagggagtattgctccatctttgatgtgctcgaggctccaagcgcctattctagacgagccactagtactagtgctaccacactcttctcgaatcactctttcaaggggaaaatagctaaattcccctggagcgacaaatctaacatgacatcctttcttgtatttgatgacacaagactttaatatattaccaacataagctcctatagatttgactttggattcaataaattctacctcaaaagtaactgtgggatcttgaggggtctttgattttcgagcttgagtggtcataattttgaaatctaagtcacctggtgaaaaagcaacagtgactcgaggtaaaaacaaaggtctcgctaaaggaatagaagataaagtttggggttcaggccaagctgcatctcgcagataacggtgtttaccctcagttatttcttgtaaaaatcacctatagcgacttgaaatttcatcttgattggtttttatcagatgatccctaattttggcatcgtttatctcaagtatggatttcagtacataagttttggattcaaatggaagggctaaattttaaaggcatacagtttctaagaattttgggcttatagtttcataaataaattgggtcatacttgcgaacgagtgtaatcccaatttctgaaaaagttaaattcaacttaacccagaaatctatgaatctaataacctagaaattttccttaaccctaaaattatctaaactaacaaaacaaaaattacctaaaaaataaccaaacaaagcagataaagaagataggcaatcatgaaaatcaaactacaaatatgaaaaaaaaaaaaaggcataaaagagaaagagatgaaccactttctattttgatgaaaatttctaaacaaagaagaactttgtgattgagattgtgatgattgaatcagtgagttttaagaatctctgagattgaagatgaaatccgatgaaatacacaagaaataagttaatgaaaatgagggcatgcaagttgaagggggaaaatcgtgatttgcagaagaaatttaaagcacgagaatgcaaaaatggcaaaatagactgatgttcttgtctttaataccctattaaaaaccacagttagatcataataagttgaatctaacggatggagacactacaaattgtaaaagacggagcatttaatgctaatgatgtgcctcgaagttctgaactgtcaaaaatccaaagcatgcaatttttcaaaattgggttaagacaaaaattacccgtgtaatcatttaaaagtttttttaattaaaaagtactttttatggggcaattgttatacccgcaattcagttacactttagaagttgacacgtgtccaacagaaagaatacgaatcaattctaaatgatataatgatatcattaaatgcatatttaataactcattattatgtaatggttaaatagataatattcaaaactcattgcctttatagtttttttttgaaagaacattgcctttatagttaaaagcgagacaagaataacaactattgatttgagattaacgagacatacacatgccttagaatatacagacaagaagggaacattcatccacccgagcagaatgaatgtatcaacctaaactgtctcgctatatacatatagcgagaagagcacctcacattacaaaagtcacaaagagaacacaacgagatgaataacttctcaacacttagcatttttcttatcaagacgaacaaggaagataactcgaatcagagaagatataaccttccacgttagcaataaccatctaaaggataaaactaaagaggagttgagtagttatttagtattatctcccacgtaatttaaatgcaacatacggattgtccacgtttcatgaacagttatacttgaattaatcccataaagataactaccaacctatactcctataaatagaggcagattccatgagaaaaaggacgacaaatttgagagagaaggacttgtggagtgtgtagattttattattattcaaaatcagatattgtattctaaactctaaaaatattcctaataagaaggacttgtggagtgtgtagattttaactacaaaaccacgtaaaaatatctggagttattatatcttttattacttattaatttttgtagaatatttattaataaaagactatttaattttgattaacgaaaatttgcgttaataagtaactaattaaatactatttaaaataaataatatatcatacaattaaaatatataaaaaataataattaa

SEQ ID NO: 54035 - DNA, 2324 bp, Cannabis sativa
acctcatttaactccttcatgcatagctcaaatagtagagctccactcttgcatttggatggtcgccaagattaggtatctaattgtcctgtcgataatgatagtatgttttgtgactttctattttgtttaaattattaatttttggctcttgccattcgacagagagacttccttggaacaaatgccaaccagcagtttcaccactccttaccactagactaccccttcgggttttctatgttttatgacttaccaagaaaataaaagttcatttggtaccatatattattagatcgtattgtattgtatagtattatattaaattgtattttatagaatattatattaaattttgatttatatcaaaatattatatatttatgtttacatacaaatcaatacattatataaaaatatgatgtaaaacatagagcgtaagaggtaaaaggggagcacagaaacatgtacaaaaatgagctccctcatttggatttgatatacagacaaaggagaagataagtatagaatccaaacctggatgaccttaacctgttaaggtccaaaaagctatctaaatcaatttttgttaattggcgcagtctctttggccattaagtttctccacttgtccttgagatcaactggagtgcgactgggatcaaatacaagacgtccgtactccaaaattttcttccatggcagaacaatgtttgtcatcattgaaaatttgtgaacaccatcctttattaaaaataggaatgcataacaaacttaaatgagtacatacaaacaaaattgaaaagaaaccacaaggccatttctacaaatttctcaaatcaatgacttgtaggtgaagcaagtgatgtaaaaattggtctgaaaaattgcctatttattaagagctattttgtaactatatgttatctccttcccattgtcaccaagtgtagaagaaaagataaaataagaagtgcagatgtcatctatccttcaactatgaataaacgaccctagtctgcacgtatccacagcaataggaacaattactcagaaggttgaaaaggagaatgcagagagtttcaatgacaattcatgcagtaagagacaaagaaagggagagacagtaaagatggacattaacgtaaatccaaaagtttaaagtggtgaactttacggctgtgtttggaaagtttgatgggaaaagaaaaaggtaaagaaaatttagagagaaaaaaagtgaggaaaataaagaaaatcaatttttcatgtttggtattaaaaaattttgaaacaaatttttttccataccaaacatgagaaattagttttatttttatttttattttcaacactttttttctcctaaccttttaccttctccaccataatccaacttccaaacatagccataagtgctgcatacatgttatatctaaggaaagatagtaacaaaaaaaaaaataacgaagttaaatgcaagaaaacctgaagcttatacccttagcatttcttcctcttccactgtccagtgtaatcttgtccgctttctggagaattccatagttgggctgcatgcaggaagaaatatacaataaattagcagttacctttaaccacaaaactaactctcctagctaattttgatgcccagaaaatgttgaatgtcgggaatgtattgccaatgactggttctagcaaggatgagaaattcccatcaacctactgaaaaatacacactaaaaacaaaaaatgcaatcacaacaacaaatgaagtagtttgttcttttttaggatatacacacctacattttaacgctaaacaataaaaatttaatcaaaagtaacttcattaaaattttaagagtttattaggaaatatacacctacaccagttttagtgcttgttgggacttttcggaggtagtatttttctcattaaaaagcaaagcatttttctttgtggtgcttttatggcgtgcaactgatttccatagcctaggggaagatctcttgggtagagtaacattctcagagcatactgtttttccagctctttgtttgaaacgcctgtgacggttcacacgagattcagtttcagatttgtcaatcccatctgatgattctgttagtatttgctcttcatcctcctctacaattttagcctccctcaatagttttttggtggctcttttctcaatatcagcatcatcaataattacctctcctgcaatttcagaagtatccaaaatctctctttcctcattttcttcaacaattctctcatccttactatcatccattggtcctgaatcctcctcttt

SEQ ID NO: 54036 - DNA, 1075 bp, Cannabis sativa
tttaataaaatattatttctaataaggcatgccaaataaatcataagaggctattggtatacccaaaaagaaagtgaagaatttattgttgactatacaatttgctattgttgttatttatgggtgtttgatgggaatgaaatggtggatttgctgagaaataatttagtatacgacgattaatttaatttaatttaatttaataattattatgaattatcgttaaatatttacaatgtgttacatttaggacctagaaataaattagtagaaatgtagaatgagcgctaaaaggtaccagcgatgtctaacactctctacggcatcttatcgctagtggtgtaattaagtattgagtgccataatattataatttttatagatatcgttaactaatcacaagatatcatctttaagtgatgttaagtactattgatgcttgtgtcggtagtagcttaatataattagatacaaatttattggatttaaatattagaaccgtttcgaatttttcttccttaatttgatctcattgaaccatgtgtaagtgttaatactatattgtagttttcttcaagtagtaccaaaaaggccccacaaataaataaaagagttgaaaaatagttaagttataatcagcaacatgtacttagtcacctaaatcttttagggtgaacaatcacgtgaatatgtttccattattaacttttttgatctaatgtgcaattacaaattctctccatatcagtggggccacccgccactttacctatatcatcggccatttttaggcgagttaatttcttgatatatctctagttttagaaacttttttcggtaacattggtcgtcgtttgagttcattatgtttgatttttatttcggcttacattaaattttattagttttattaaaacttaagttgattaaatagttctttgatgtgttagccgatattgttggtgatcaatagttaatagatttagggtcaattcggtacagctgcactgtgagaaaaaacaactgtaactgtactatgagaaaaattcgtcgtagctgtactgtgagaaaaagc

SEQ ID NO: 54037 - DNA, 898 bp, Cannabis sativa
atttttgtggatataaaaggggtacatggtcactacaaggtggtgtagtgtaggagattgttattaatttatactgtgagtcccacttatttaatgttttatttttttattttaaaaaccccatttttttagggaatgtactcgttatatgctactttacctgtttctttcattttttacgtttttaatttgtattttttacttttatgaaacttattacataaatatttattaaaaaactttttttaaattcgttttcacattttcttctaaaataatctcaataactcttcacgcagtaagaccactgttccaccttcttctcccaaactcaaccagctatgctgcggcatcacaacctcgaggacttcagtgcgtccaccaccatttgaattcttagtatgtttgacctatatttcaattcattagttcttaatatggaattgttcaatcatttgaccctattaaccaaaacccaagaaaagatttgtgattggattgactggcattttcaaggtatgaattttctatacccaattaagaaagaatttagaaattttagagataagtaaggattttatgcgatgaattgaccttttacgaatgaagctcacatggtcaataaagatgaagttcaccagattttgatggctcgtaaagatggagctcaccggattttggatagctgctaaagatggaggtcacattttggattgccgctaaagatggaggtcaccggcttttgattgccggtaaaatggagaatgcatttttatttaaaagttttagtttctacatttttgcactaaacataatatcaccgtaaaattgattaggaatttatctatttctatatctttgaaaaatgccctaaaattaaataatgaattaataaaaa

SEQ ID NO: 54038 - DNA, 608 bp, Cannabis sativa
attcaccatgaagggcctgcccttttatactatgataacaaatcagcacagcatatcgcagccaatcccgtgttccatgagagaacaaagcatattgagatcgattgtcatttggtaagagagaaagtgcaaaaaggggtcatccaaactgatcatgtctcaacaaaagaccaacttgctgacattctaactaaaccgttgtttcctactcaattcaagggcttcaaagacaagatggaacttagagatatctatgctccatcttgagggggaatatcaagaattacttagttattgttagttggtattagctgtcctagttggtttgtttgttactttctgttatagttgttacaactgtaactgttttccttttgattgcttagctgtatatatagattttctctcttgtatttttctcagattgtattcttttctgaatctcagtaataaagacttttgttcttcttcttcctctgttttctcttcttctggtttatgcttactgataccatcacaattcaacgaaacaatcaacaaaagcatctcatctagaatctttcacttcccaaaaccctcgtccccaaccagagagagagagagagaga

SEQ ID NO: 54039 - DNA, 993 bp, Cannabis sativa
  modified_base (948)..(953): a, c, t, g, unknown or other
attaaaggtagttcaacaccctactaccaggttgacaacccagggccattgttgacattctgacgtcaacctggatgccaggtgagtgccaacacgtcctagacttgtatttttttatgcctaagtgatgtgttgacaccacttagtcaaattcagtgttctggtgaagctatccaccaattcttgaagatatcactattttgtgaaatcgagaagactcgaaactcctcaattttgctgatatccaaccttgttaaaagggtaaatatcaaagtttgaatttgacctataataagttgtatctctcatttaccacgaaaaaatagttgaatgcttgaaacaaaatcgaattttgataagtaaaacccagcacactaggtcaagtgtgaacttgggagttgggtgcttcctgggatccttcgcgaggctttttctgatactactatgggattcaagatttagaatgaggtctcctaccctttttttttaccactttaagaagaattctcggagcatagtttgtgtttgaggagcgaaaacatgcgagctaagttgcatgtcaatttgggtatagggcccaatgccttgtcaacttgggcgctagggccctgtttaggctcctttgaaatcttgttttctcctcaagagcacttgtatcttcattatttatgatgaaggaaaaaattataggaataattttttagtagaatgactagatataacccatgttgacaaaatgtcaacttgggtgctgggcctagtttctggccaccaaatgactctgtttgattcttggcaacactcatatcttaatatttgatgaaaacagagaatattcccataatacttttgagaaaaatccttgaaaatggcctagttgacaaagtgtcaacttgaacactgagtcccaggatagtctttagtattatttgttgggttttatgcccnnnnnnaaactctatttcaatgtaatctattttattcaacatcaat

SEQ ID NO: 54040 - DNA, 1043 bp, Cannabis sativa
atgtaagtatccagatttacttttcttatgccaagctaaagtatgcctgcacttgacttagatgcatgtttagtagcttatactaagcgttagcatttctatgcataagttctccgtactagttcgatgcattgtacaacgtgggtgcccccaagtgagcacgtagacttacggtctcttggtcacttgcaattcaccaagtttcatagaccttgtctaggaattttcttgggggttctaccgggtgtatgcatgtggaaccgaaaaaagaataaatttaagaagttaatcttattagcaagtagtttagacacaatcggtcttacgtgtaacaaaagcttacaacttaatgtctgcttttgaaatcacattttggctacccctgcctgagattttaggcagaggccatcgctgaagagcgatgggaggccatgctaaaaagcatggggtactagctcttttatatttggctacctttatagggcttaccgtgaaaaggccattattgaagagtgatgggaggccatcgctgaagggcgatgggtactagctcttttatgaattcctgcacggtgaaacattagaggaaccactttacaacttggctagtgagagtacttaccgagatattctccattccagtattttggtagaagagccacctccaagttctcgttgtacttgccagacttgtatgtaccttttcttgttatcttgtaacttggtgcgggccttttcagtttggtccaaacatgattgttgtaggatctttgttatcaaggaatattcttcagagcactaaacctctttcaaagaatttcctcttcttgacttgtttgttaaagtacctagcaacatattgttggtagatatgctactttaagttggtttggtctcttctgtcttctatttcttcaagagattttgccaacaagatgcggtttacgtcttggtcatagtacaccaaaagtatgagagtagactattggtagatcatgccaactagggtacagaccagatggccagccacattgagggagcat

SEQ ID NO: 54041 - DNA, 714 bp, Cannabis sativa
gaagaatccgactaaaattgtattcaagcttttcttttgaaatttacaccctcaaaatctacctattaaaaattaaaataaaagcttgtgtattgttatccataaaatccaatctagtgcggaaaaaaaaaatcaattaagaagtatattctatctttcatgataaaaaaaattaatttaattaagtagtgtactcatattttagctttatatttagatatacatacatatttgaaaaaaaaaatattaaaaaaaaaggagaaattagtgtagagtgttttatgatgttaggtcaccatcttcatcctcaactttattccaatagtatttttataaccattcatgaatctcaaagattctatcattaaaaaaaaagtaatttgtggcatagatacttaagtttaactccagattgtaaataaatatctaaatttaatttttggcatgttaagtcattatccacatgtcattttttattggtatatttaaactatttgtttttaaaaaaaatataaaaatttaatgatttggatcaatcaaaaattactacgtgacaatttatttaggtatttatgctacaaatttgattttttctacatcaaaaaatttatgctaataaataaatcatgatcattgttatccaaattttgcactctgacgtggcatcatgagaatggtgacacgtggagtccacttggagcatctggtcgggaa

SEQ ID NO: 54042 - DNA, 2560 bp, Cannabis sativa
atagcattgaagttttgacaaactatcctttaaggcaaattttaacgaaaccagaggcctcgggtagattgttgaaatagtcagtggagctgagccagttcgacattagatataaactgaaatcctcaatcaaaggacaagcccttgcatatttcatacttgaatttccaagtagcaaagtggcaattatcgaagagcgaattgatcctgacgtaccaaacaatgaagggtggactttgtatgttgatggagcatccaacaatgaaggcgctgggggcggtataatactcataaacccagtaacttcaaggtacatgctgccctgagatttgaatttccagcatataacaatgaagtcgagtatgaggctttaatcacagggttgaaactcgctcttgagatgcaaatcaagtatttacaagcctttcgcaattccaagatcattgtttatcaggtggacggagaatacctggccaaaggaagtcgtttggctaaataccttgccctcacttgtgagttactacaaaaatttaagaaaataattgtctctagaatacctcgtactcacaactctcatgcaaatgctttggcccgattggcctcgacaagagaagtagaattactcgatgtaatccctgttgatgtgttaactcacctaataatcagtcgaaacaaggtaatgaaggtagataccgtcaaagaggttacctagatgacctcgataataaattacttgaaaacaggaatccttcctgaagataagatagaggctagaaaactgcgatatcgagttgcttgatatgtcatttatgacgataagttctatcgcagaagcttcaccaaccattgctcaaatgtatagatgggactgagtgtgaatgcatactccgcgaaagtgcatggtggcatctgttgtaaccataccaggggtaattcccttgctttaaaaataatgcggcaaggatactagtggccaaaattgcgagtagatgcatctaactttgctaagaaatgatataaatgtgagcggatagcatatgtcaaccaaccaccaagtcagctaaattccatcacaagtccctggcctttcgcagtctgtggcatagacctgattggagaattgccaaaagggaaaggaggagtaaaatacggcgtagtcgctatcgattacttcaccaaatgggccgaagccaaaccccttgcgactatgagagctgctaaactatgaaagtttgtgtacagtgccatcatctgcagattcggcataccttacaaattattttcagataatggaaaaaaattggactgcaaggagatgcgccaattgtgcgatgagttaggtattaagaaagcattttcaacagttgcatatccacagagcaatggtcagacagaggcagtaaataaaataatcaagcataccatcaagggtaacctggaagagcgcaaaggtgtatggtcagaggaacttcaacaagtcgaggttggggcagggtccctgcgaagagatgtacccctttctcgctctcttgcaaatgagccatggtaccagtcgaggttggtgcagggtccctgcgaagagatgtattcaaccttagtgaaaatatagaaaatcaattgcttcaactggatcttttagaggaaaagcgcaatcaggctcatttgaagaatgcggcctatcagcagcgaactgctcgctatttcaattcaaaggttaaagagcgaactctacgagtaggagatttggttctgcgaaaagtcataccaaacacaaaaaacccagcgcatggagtttttggtgataaatgggaaggaccatatcttatcgctgacaaaattggccactcgacctatcaacttgtagaactcaatggtgtgcaattcacaaggctttgaatggcgaaagtctcaagtattattatcaatagtactcgcaatgtaattatacttagcaaaattatttttataaatgttctatgtatagggtgtatagcctaccattgaacccctttgtactattgatttcttgttataataaattcaacaattctagacagttcaaaatttttgcaaatcttaacattttttaaaagttattacaccaagctataataatattgtaaaacatgtgagtaccaaaataccacttaaagtaaatagatagaaaaatatcctcgaagggatataaattgttcaaagtaaaaagaaaggaaaatcaaatttgtccaagtacaaagcgcaagtactcgtgtaccgctaaaaaagttcgataataggggaaataaaaacttagataaattaagcagttggagcagtagaatcatctgcgaccttgctagcagctctgtcagcgacttcctccgtatctgcagtctctgcctcctcacgaaaacgatttcctccgcacccctgagtcttggttggcgacatagcacgaaaagcttcagccattttagccactttcgctccaagaacggagaagttgaagtctggcaccttggataaagtcgtgtagatatagtcagaaacagcttggtcatactgtttcttcccattttcc

SEQ ID NO: 54043 - DNA, 1643 bp, Cannabis sativa
cgtctgttcatctgtaagaagagctcatccccattttgccagtaaagcctgattcaattccatggactttcaaaagccaaggccacctcttgatttgggaaggcataagtggtcccaagcctttaagcacaaaccacggttaccctgttcacaaccccaccaaaaatccctgatcataccatcaattctggaagcaagttttttggagagtttggtggtttgcatagtgtagactggcatggccagggccacaaatttgataagggtagcacgaccagccttcgaaagtaatttcaacttccatccatgcagcttcgagaccaggttgtccaggatgaagttgaaatctgcatccttatgtttagatctaaaaagtgggagccccaagtaattaatgttcgtaatagctaagttaagccccagttcttgcatgataccccttttcattccctcactggtattactgctgaagaaaatagaggtttttagcttattcacacattgcccaaaccaactgtaaaatttctccaggcagctccaatagcctttggcctcgtcaatagttgctctacccacaagaatcacgtcatccgcaaagaaaagatggaacaacttgaggccattcctactcaatctgatacctttaatagagcccgtgtcaatggccctttccaagatgcgggaaagaatgtccgcagcccaaatgaataggtacggggagagggggtcgacttgccgtaacccacattcaggagaaaaattgctaacctttcccccattaaggtggatatggaaggaagtagtagtaatgcactgggaaacccacttacgaaaaatgtctggagccttaaagctactaagtacgtgatcaataaagttccagctaactttatcgtaagctttcaccagatcaatcttgatggcgaaaaaaccttctttccctttcttacgcttgaacgaatgaataatctcctagaccagtacattattgtcattaatgctttgacccggaacaaaagccacctgagtatggcaaatcagtctaggcagcaccggtcaaattctattagcaatgattttagaaatgaccttgtaaaccacattacacagagagataggcctaaactgagaaactttcttagggttggccaccttagggatgagtattacattcgtagcattaatgcctctatgcatggagccagacagaaaaaaatcctccacaacatcacaaaaatcactaccaacagaattccaatagtgtttatagaacaatacagacataccatccggacccggggctttcagactacccatggaaaagagggtttgtctaatttcctcggaattcggaatgcttaccaagtctgtctgctcctggagggtgagatggtctgaaatcaggtggtccagcctctccaacggtccatggaccgtttgtttaaaaatggttcacagaaactctgagaattcattaccaatgtctcttctattgctcagccacacaccatctttgttcatgatagccccgatctcatttcttctatttttgattgtggcaaaggtgaagaagaacttagaacacttatctccctccttgatccaggagacccgaaatctttgttgccaatagagggccttct

SEQ ID NO: 54044 - DNA, 1238 bp, Cannabis sativa
ggtcgtacgtctacagtctaccatcaagagagactcggattgactcaacgaagattatacctttgtctaatttaagatcaaatcttgttccctatgtcagactatggtagtgtgtacgtcccacctcttaatatatacctttttgcttgacgatttgtctaggcattttttttttcaaggagaaattttttggcgacacgtgtccaataccaattgtgatcccctattgcccaactgcttctgcgcacgggcaaaaactttattgggggcccaacaatcagattattacatgcattttaccctaatagtgggctttttgcaaaagcccaaagtgggtcatgagcatgtccatacctgaaatttagcctataaatactccttgatttatatacaaagggagatcaaaaaggagatagccgaagctctacgaaatttcttctaagctttcttcttctccaagagaaaccaagagggcagagttaaggttttcttacaaacactattgtaaaaatattatacaagcctattaagtccaataaactgactcgtggtgattatggctcattaacgcctgaaccacgtaaaaatctttgtcttctttattactgcatttagtatttatcaagctcttatatatttaattagtttttgaaaaattcagtaaacaaaaattaaatatttttttaatagtgtgagtatttaagtataagaatttttatatatttaaaaaataataagtttaatttgtggtgaaatccccattaacatttataattgttacacatatgactctaactaaaaaaagtagcgacaaaagtactttatcttacgattttgttacagtcgtacctttttttgggcatcaagtgtcaactcagaaacacgtggagacacattattagaccacgtattaaataagctaaagaaatatgttgtcccgtatttctgagttggcacttaatgggcataattggtacttgacagcaaaaaaatgttacgactgcaataaaatcgtaagataatgtacttttgttgccacttttttttattagtgttatatgtgtaacaattgcaaattttaagggggtttcgccacaaatatccctatagtttatttatagttgtattatagttgtaatgaggttatgttttttggttgttttatagtttatttatagttgtcatgagattgatttctagttgtttgttaattgtttttttttttgttgaacaaaata

SEQ ID NO: 54045 - DNA, 1329 bp, Cannabis sativa
cttaaaaaataataaaattttattttcaaaaagacaattttgtaattttactaatcaattttttctctatccttcccacctcacacctaataccaaacaatagaaaggagattaacaatcctcttcatccatcctactccccatcctctctaacctctccatccatcctactctccctccctcccaccaaacatagccttattgtcgaagtagcaactaacaaaaatatataacaataattatatcatatctaacggatcatatatttatttaaataaaaaaaaatctatttcttaatttgaaaaggacaaaattttcacaattctaatcgactaggcgtattatgtcaatttaagtaatatatcgggaaatgtctattgattccttattcacgcggtttcgaacacaactggtatattccaaaataattgttactcggacatctttacccctagccatgaacctcctttgggtttgggtttttgattgattcaacttttctatttttttattttccaatccgaagcgaaaaagaaaaaggaaagaaaaaaatagaagttgctaacttgaaatcgaattattaaaaatttcgttgcaatcaatatagtaatagtaagtaatacaaaattttttacttaaatattttatttaagtattttgaatttataattgttgtacaatattgagattttttgtatgatattgttgcccagtccattttctttctcatactattattaattaaatttttagcctggaaatgcaagttcttagtttcacgcgagttaatccgcttttatttttttttcgaatttattttgaattctaaaaattaagatagtaagctacatgttatcccatatttgactaaatatatatttttgctataatccatttgctgaagtctagaaaaaaaaaatagaagaaatttaaccaagtaatatctaaaaaatcttgttttttttttaacatgaagagataaagaaattattgcaattgccagaaatactaagcccactaaaggaacaaaaatagcagataagttgttgatagttgtcatagaatgggtatctcgatttaaatttgtacctgttatttattggtatatttgttattatattaagattttatcctgttataaagatatcgtatccttcacatataattatactactataattatacttaatacttaagtgtaaaattcccaaaatggatttgtcatttctataaagaatataatttacaactctaagttctaaattatccttttcctgcaacaagtcctgtgaaaaaagttttttaaaatttataccatccgctatttca

SEQ ID NO: 54046 - DNA, 1179 bp, Cannabis sativa
tccatctgaaaatcacagttcttggtgccaagatgaacttcagcacccaacatcatttgaatgtcagcttctttctgagagagctgatgcgacagagttgttgaactcattgaaagatgtgtgaagctgattagtgaaggtactagaagtgtgccttcatgttgttacacttagttagtataatgtatatcatacgctaagtgttctaacagccagttcgcttcgtcaacacttctctacatattgcgaggttaatacctcgctatgtattgtcaatatcgtccttgcgattatgtcttctaacacaaaatggtttctcgtcaatacgtgtgtcaacagttcgtacacctttgtctcacgaaggactgtgaagtctgcaagttataaatatacactattgacttctccctttaaagagttattctatttaatatttataaatataattgtcattatatttgctggttaatattccctgaggttgacatgtgtataacaattaaataagtcaatattaaaagtaaccaatccaaaataatcgatccaatctacacttttgcagattggatcaaatttgagttactatgtgaattggattggatccaaaatatgaaatccgtacttagtgtggatcaaatgcactctgaataaaatagtacggattggatctgatgaacaccgctaggggaggttgtattcttggttgctattctggttattgggtaaattatgttcatttcctcgatttctttcatattgcctcaaatattctagagaaatgagcccttcaatttcatctttcaattccttagtggtatgtccaatatctcgatagaaacatcaatacttattgggatcttgcttattcctagcatgtctcataggttcaggtcttcaaaatgcgacccaattttcatttgcaagatagataatttcacgagttttgtttaatcgcgtatataccaagtatatcgaaatatacttatcgtgtttctttgctttttcttatcttttgacgaatctcttgactcgtccttcctttttccattcgacccattgtggttcgaatttcttgctttagttagtacttgtgctgggtttgtctcttgggctagatttgagcatcttcacctggctttccgcctcttccttctacacaaagatttgtgatctttcatt

SEQ ID NO: 54047 - DNA, 679 bp, Cannabis sativa
ttaaaaaagagtaactaaaacacaaagttcaaaatagtatttaattcatttaaaagatgtaatattaatatttacgcatgttcccatataaaaaattaaattaaaaccttaaataagtaataaaatatgtttagagcaatgaataatattctataaatataaaacatgaataatgaattttaaagaggctttgaaatagaaaaaagatttagagcatctaatgtagtatatttttagtttagctctttaaatattctagaggttttcaattttaaacatttgataagataaaatgtataacctagtatgtaccatgaaaagtagtataataaaattgatccatagatactaattttcaagttgttaattactaattattaacaagtcattaacacaaatttaaaataatattataacaattctttataagaaatccaagaataaaaaaacttaggcatttaacttccgttatgttatcattttcaatttaatattctaattgttagtatatggttcttaattatttacaaagtaatttttaaattataagtgaatcttgttaatagatctaattcccataatttcacctagaatttaaatttatgaatagcattaagttaaggggaatggtaaaacattaaaggtaaccctaattcgattggggataagttgaagaata

SEQ ID NO: 54048 - DNA, 740 bp, Cannabis sativa
  modified_base (393)..(425): a, c, t, g, unknown or other
attaatttaatgagaataaattgttggtatacagtcaggtagatatatagtcaaaatttcgaagtgagggccaaatattagaacaagtacttaatatattataataatattgttaattaatagtcttaataaataattgttgttgttatattatataatatatattatattaaaaaaaagaaaagaaattgaggcagaaacatgtttcaaagcacattaatttttccaatttttcctccctcttttcagtgcccaattttctcatccatagtgatgaaatgagtgcaatgggatttgggatttgtttcattgggatgaaaatttcctcatatccataatttgaaaaccttcatattcaaacttgtttcattattgtaataataataataatannnnnnnnnnnnnnnnnnnnnnnnnnnnnnnnnataataataataataaaagttacattttgtatatataattaaggagcgttgttaatttaattaggtgtgtttataaaataggcaatttaattcgatcaattcgtaaagtggagatatccgcacttgtacagtagaatagattggattgagaaatctaaaattcgtactttatgcaaattaaatattgatttacatgtaaaagtaactgatttaatcaaattcacatatatatatatatatgtaattcatattttaaagaaaaataataataattttaaaaagtaatacgttacatatatattttaaaatttaata

SEQ ID NO: 54049 - DNA, 941 bp, Cannabis sativa
tacatacaaatttaataatacaaaatatgaccattttttaaaaacagtagtaaaaaaggaaatttaaagactaattttaaaagcccttcaaaagttttaaggactctcttctgcccttcctaaaaagagaagtccttaaagccaaagaattaaggactataaatgttagtcattataaattatttttaaggacactcttttcgattctttaaaatttcttgtaaagattcgcatctctagtcctcaaaaaattataaggtcacttaatgattgtccttaaaagtaagctcttttcttaaattacacattttaatttattaaagaaaattacattatattttaatattaactagtttattattaatcaataatatgtatacatttctaaaatgtttatcatagtttttttaagaaaaaaagtctaagaaataaaatgtacagtgtattgaataaagaaagtgtaataggtaaaatatattcattgttttataaaaatacaaatcaataaaaatgtatccaatgtattctaaaagtagggtgactattcaatggtgatatttttattataaccatcatggttacattttttttttacctgtaatagcaggttacgaataggtaaaaaatccctttttttttagaattgattaattataattaacaatttttttaaaataattaaataaatatttaacaagatcttttttagcaattaaaaattataaataattttttatttatatacaaattcatactataattattttaacagttaaatcatttaattataatattcataatttttttttttacaaaaattagagttatttttatatactaggtgaagttagcacgtgcgatgcacgtgcctagcttttcttgttacattttatttttatttttatttacttaattttaattttataaataattataataaa

SEQ ID NO: 54050 - DNA, 1249 bp, Cannabis sativa
tttgaaaataatttttaataaaaaaataaataatataaactaatttattattaattgcataggtttaactaattacatggatgctgacccttttacgtgacaatatctaataatttgttatatagtcacattttatgtagaatatatataaatgtagtattctatttctcatatattttaataatttttattttaaaataatttaatgatgagcatctaaaaattattaaaataatattatattattattcaatatatatttttttatgaattattatttcatatatattaaataaataaactttgttactaataaaacaataagaaagaagatgtaaaagatattataactatatggtatttttttatgccatttttttttcctaataatagtaagtgtcaattaataattattaaaaatgtatttatatcatcaagtatctttaatagtatttctattagtgatgctctaacagataaacatgctgaccaaataatctaattaagaattgaaatgtttgacctttgacatatattttttttttttgggtgcaaattatgtcactacaagaaaaaaaatttttttgccaacacaattaattatcaccgccgccaaaagtaagtttttaccagttgaaaaaacaaaagaaccaattgtagtagaaaaagaactaaatatagaatgcgggcaagagaagtgcaactgaagaaaactatatgtaaaaaagaaattatttaaaatccctcacaagctttggattcgcaaaagaaattgattagtggtaatcgggttttcaaactctctctactctgtttagatgaatttattatgtttcacagaatgagtagtgagcttagggacaattactctatatttatataagtgagacattttattaaagtatctgtctcaattaattgtcagaatattttgacaattaataaaaaaatataatttggataactaaatcaaatcaaattggtaactaaataatattgatcatattttgaatattttgtcaattaaactaaatattgactttatttaatccaactataattaatataattaataatggtaatattaaaagagtttataagcaacaaccatttttatatattttccttttattttttatttttttaagctgctaacaagaggagacattcatttctacatatatagagagatatatggactttgtttatcgaaacagataactaggaaaggaatgccagtattttacgg

SEQ ID NO: 54051 - DNA, 1315 bp, Cannabis sativa
  modified_base (1187)..(1196): a, c, t, g, unknown or other
agggcataaaacccaacatcaccgccttcacttccatcatcttccccaccaccactatcatcactcccatcaccaccatttcgatcattagacctctaaaataatattaataaataataaaccattaaaatcaaaacacaccaaaattaaaaataaaatacatataaaaaagaaaatacactttacctaaataataagacaatctttcaagccctctaagacatcatttaaatctgaaaacttcttatctaaatacaaaaccaaaccctcctcactttaagaatcaatgtgagccttcattttactctcaaattgaacaaacttatcatcaatatccttcctcaactccttcaaagaactcccaatctcagattgcttattgataatacgcatcacataatctttaacatcatcaaaaataggacccccaatagaaaccttttccttaacaccttaacactcacccttatctaattgcctcctaggaactttgacactctcaaaatcatcatcatgacaatgaaaaataagaaaaattaaatccagtaagatcaaatttctcattctcctcagtagaaggaaacaacggagtaactgaaagctgcaaatacaaacaaaacataactcaaaaacagataatgaataaaaagctcaaaataaaacaaaataataagaaaaaagccaccataccttagatgacaagtagattttcctctccacctcacttgaagtaacttcttttgcactagaccacatacatacccgatatgtcgaagaagggtcaaaagtacaaaagttttgacttctaaaaagaggaataacctcatacaaccaaacttagaagatgaaaggaaacccatccaatttgtttgttttagaatttgaatcactccccttcttatcaattccttttttcttagcaagtgctttgaatttagcacccttctttcctttcaaaccaagcctcaaatagtacaatgtaatatcataaacaaccttcccttatgggaaactatcaaactcacccgattctatcaaatgtaacaacccgttactaacatgtttatctggaggtttgcttaacaagtagttagtaaccaaatacaacacatccatcctaactacaaactcatcatctttgaaagtactactcagaaaacgctgcttaacagctccatgagtcacannnnnnnnnntaaagtacttgtctacaaacacatctcccttcccggcatacttaagcatatcaatatcacccttacacaacaaaccactaataacagcaaactcccctaaaccaaaacgaaccctatca

SEQ ID NO: 54052 - DNA, 1080 bp, Cannabis sativa
  modified_base (1039)..(1055): a, c, t, g, unknown or other
ataatcatattttattagttgccgaaaacctcggtcaacaaatacgtttgccttttgtaaaaggtcttagatctgtttggtctcggctcagagtttttcattctattatttattatccatccttccttcattattaaaaagaaaacatggcaacagctacagttagggttgaagacttagcttatagttttcatacgtagaattttttaaggtaccttgcattccatttcttgacatctcggctccgtccataatagccagtctgtatgctcctttccccgttgagcctaccacactgtacagaccttcccaattggtggatagtttccctactcgggactcttcggtattctggaagactttccttagaactagttcccctaggagaaaattcttgggcttaacctttctattgtactgcctcgcaaccgcggaacagtagttctatatccgggataaagcgcattctcttctttcttcgacatcgtcggctgcttgtagcctaagaaaagtgctgtcctcgtcgcttagttcggctcgcgaagggggtacttgcatctccgtcgggataactgcttccattttgtatactagcgaaaacagggtttcacctgtgctagtgcgtggcgtcatccggttggcccataataatctgggcaattctttggcccatcttcctttagctttttcaagtcgcattttaatattatttatgatgacttttttgacgactccgcttgcccattgctttgtggatagcgtggcgttgagaatatgagtttaattttccactgttcacagaagtttctgaacttgtggctgatgaattgggaaccattatccgccacgatttcctgggtagctcgaacttgcatactatatttttccagacaaatccttctacttctctgtccttaatttgagcgaaagagtcagcctcgatcaacttcgagaagtattcggtgagggctagcataaactttttctgggcaggcaccgttggtaggggactaactattggaagctcggatatatagannnnnnnnnnnnnnnnnagttgagataatattacttgtaaga

SEQ ID NO: 54053 - DNA, 2642 bp, Cannabis sativa
  modified_base (1375)..(1375): a, c, t, g, unknown or other
gcatctgcatcagctcgttgggcgatgcacgaggatcttcaaaaatctctagcatttgtcacatttctttacataggcctttgaatcttccatcattgtcggccagaaatatccttgccttagtattttctttgataggctttgtcctactgcgtggttgccacaaaatctatcatgtgccttggacaggattcgtgcagcttcttttttgttacacatctaagtaatggcatagagaaccctcttcaatacatcgcgccttctactatgatgtaccatgcagctttcctcatcatcttcctagctttcttcctctcatttggaagttctctagtgttgaggtaggctgctatgggtgtcatctagtttggtgttgtgtctatcatctccaatgcttttgaacaattgatactaggttcttctaagaattggatggggactaggttggccttatctgttactgtgatgctcgcaagttggggtaaggcatcagcatttgtattttcttctattggaatctacttgagtgtgtaactctttaattgtgcaagcaggtcttgtatcttgcttagatatgccatcattttctctcttcgggcatcgtactctcttgaaacatgattcactactaactacaaatcactacatatctcaatgtactcggcatgcacttcccgagcaagttttagttcgttattggaggccttgaacccaaatttgattactctgtgcaagtgttgcccctatgtgtgataagggaaattcttgcaccagaaatatggtctgtagtcgatccggccacgtgcaatttccaggtaggtcagccttcgttattttctggcagggactcttgtattggctctgggatgtcctttatgtttctttcttctttgcctgtgcactcaactaaaaaatctgccaaggcctatcctttaactattgtacggggttgaaagattatttcgtactgacccaactctattgcccatttaagtaaccgcccagaggcaacaggcttttacaatacttggccaatggttggtcggtgtatactcgaacagggtgagcttggaaacagggccttaacttccttgttgataagatcaggcagtaagggagcttttctattaaaatatattgtctttcagcttcaacgagtcttttgctgatatagtagattggatgttggacattgttttcttctcatattagcacggcacttacagcatattctgtgacagccaagtatattcctaattctcctccgtctaggggttttgagagtacaggaagctttgcaagctgtctttttaattctttaaaggcgttcccgtattcctccatccattcaaactttttattacctcaaaggatnttgaagaaaggaacacacttgtctgttaaaattaaaatgaatctgctgagtgaggctatccaaccagtcaatcttttaacttcttttgtcttttttggcaattttatatccaggagggcttctattttctctggactagcctctattccccgagcattgacaataaaaccaagaaacttacctgagctaaccccgaaggaacacttcaaaggattgagtttcatgttatattttctaaggattttgaagcattcatccatatcctctatgtgcctccagccttcttggatttgacgagaatatcttccacatatacctgcatattccctctgatatgatctttaaaccttttgtttactagtctatggtaggtagctctagtattctttagaccatatggcataagcttataacagtatagacccatatctattcagaaacttgaatgttcttgttttggtggatgtattcttatttgattgtaccccgaataggggtccatgaagctcaagatttcatgcccaggtgttgtatccactcgttgatcaattcttgaaagtggaaaataatccttggggcacgccttgttgaggtcgatgaaatcaatacatactcaccattttttattcgacttgggcactagtacggggttggctacccaagctgggtagaaagcttcaatgatgaacttgttttcatgtagtctctctacctcttctttaagtccttgcgcccgttctttgtccaatagtcttctcttttgctggacaggacaaaagtttgggtcaatgtttagggcgtgagacattacaatgggatcaataccgaccatatcctcatgtgaccaggcaaaaacgtccaggtttgctctcaaaatttttattaaagctaattttacttcgagcaacaaactcttaccgattttgagtttcttggtcgagatatttggataaacttccaattcttccagttcttccactggccctacatttgtttttgatttcgcaagtcggggatccatatctttgtctccgccttgggcgacttcctattgagcaatgctctttcccttgcccaaactctagccagagatatttttcttcttgaccttagttagagcaagtttgtagcgttcccacgcaattatttggttttccctgagacacctcaccccattttttgtgggaacttgacgcacaggtaaaaaactgatctaaaagcttttaagtcatataaggttggtcggcctaacatgacattaaaagct

SEQ ID NO: 54054 - DNA, 1005 bp, Cannabis sativa
tggcatgactctatactataggtcaattaggtcaatattttttttaaaaaaaaaaatcataaagtaatgagtattaatctttagtgacccttcataattttagtgacacacattataagagactaacactgaatgtttagagtctcattatgtgtgtcactaaaaatcactcctagctctttagtgacatgcacttttacgtgggtcactaaaaggccaaattgtagtagcgacaaataaatagaaataccactacattacttttaatgtttttttatacataggattcacctttattttgtacaaagccatactctttaatactcttattaaatgtgatattccaagatctagaggcttgctttaatccataaatgaatttaagcaacttgcacaccttttgatcttcccctgataatacatatccttctggttgttccatatcaatgatttcatcaagatcgccatttagaaaggtagtcttgatgtccattttccatatctcataggtagctatggaaataagaatgtgaatagatttaagcattgccacacgagagaaggttttgttaaagtcgacgccttctcgatgtgtgtagcctttggctacaagccaagctttaaaaggtctctacattcccttcaatatttctcttcttcttgaaaatccacttacacccaatgggtgtaatattctcaggtggagtttcatattctcagactttgttggtgcacatggaatccattcttgatccatggcattattccacttgtctgtgtcagggtctttcgttgcttctggtaagtcaatggatcgtccttgtctatgttagagacaagaacatgtgcttcatgttcataccagaaggttgtctcacaatcctcccactacgatgatgtacgggggtttcctttttagaaactgtgttaactgttgtcggttgttcaactaatggtgctgaaattgtaggttcagaaatatttatgatttcctcaaatttcctc

SEQ ID NO: 54055 - DNA, 640 bp, Cannabis sativa
  modified_base (577)..(592): a, c, t, g, unknown or other
gcaaaccattaagtcattctcctaagcttatgatgagaagggaagccaatgaagtagacaaagaccgtcttcatatagcttgaaaaagaccgtctacatatagcatgagaaagaccagctacacgtagagagccttggtctctgcacaggccttattcccctcatcatcggaagatcccatttcctgaagccgagatctattctgcagcgtcaagaaatcactcagcactgaagagaggctgatgcaaagatctcctagcgtaggatagggtctaaagtatgttgggtattctcatagaaaccacgccaacttcctccccagatttacctgaaaccatgcagatcttccttttaaattcttcatcagtctgaggaggatctttgagatggctcacaagatcaataccctctgggatcacttgtgaggatcagccatggcaggtcacggggttcccctggtttggattggtcaaaagctccttagccttggaatccatcgtttttggctccagttgaggcatgaagtctgtaggaacgaatggaagttggttgatactgttggaaatattttactagnnnnnnnnnnnnnnnncaagtatatttcattaacatcctagtatgaatttctaaaacaatgaaa

SEQ ID NO: 54056 - DNA, 1446 bp, Cannabis sativa
gtcgatagtggtgccacccacaactttatcactaccgaattggctcggaagttggagcttcccctttccaccacggaggcatatggggtacaaatgggaagtgggcaagctgtcagaggggaaggtatttgtcgagcgataccgctgatgctacaagagttggaaattgttgaagattttcttccactgcagttgggtagtactgatgttatacttggtgtacaatggcttgagaccttagcagagattactcaccattggagggagcataccatgaagcttaaggtggggggtcaagcaatcatcttgaggggcgatcctctactccataaggctcgggtttcgctgaaaagtatgattcgtttgctacaacatgagaaacaaggaatatgggtggaattgggttgtgtatcagtttgtcaagtcgaagcggaacattcagcggctgtcaacaaggtcttacaacgatattcaagggtgttcgatacaccgacatctcttcctccgccaagaagccatgatcatgccattcctcttcgatcggatgcctccccggtaagcgttcgaccctatcgttatccccatagtattaaagatgaagtggagaaattagtgcaggggatgttaacggcgggcattattcaaccaagtactagcccgtattctagtccgattctattagtcaagaagaaagatggtggttggcgcttttgtgttgattatcgggccttgaatcgagctacggtacccgacaaatatcccatccccgtgattgaagagttgattgatgagttgcacggggcacaagtgttctccaagttggacttacgctcgggctatcatcaaattcgtgtccagcccgaagacattcacaagacggcctttcgtactcatgaaggtcactatgagtttgtcgtcatgcccttcgggttgactaacgcccctgccaccttccaatctcagatgaacgagattttcaagcctcatcttcgcaagcgggtgttagtgttctttgacgatatccttgtttacagccccgacgagactacgcatgtcaaggatctcgaaatagtgttacaaaccctttcgaagcatcagttttttgccaatttgaagaaatgttgtttcggccaacgccaagttgagtacttgggtcatatcatttctggtcaaggcgttgcggttgatccttctaagatccaagctatgcttgaatggccactaccgaaatcaattaaagagttgaggggatttcttggtctcacgggttattatagaaagtttgtcaaggactatggtaccattgcgaggccactcacggaccagcttaaaaaagagcaatatgggtggaccgaagaggctacaaaagcattcgagacgttgaagacagccatgacaactgttcctgttttggctctacccgattttcacaagcctttcatagtg

SEQ ID NO: 54057 - DNA, 1853 bp, Cannabis sativa
aaataatttccaacataactttcagaacccatttagagcttattacccttttgttgacaggtcttggaaccataatccatgttttatttctgatgaaggagttcatttcctcactcatggctttgttccattttgatgcctccttgcttgacattgcttctgcatatgtcttaagttttgttccatttggatgttctcttctctctatctcttgttagtaggtagtcctgaacaccagtcataacttcccgatctagttcatcatgttccacttgatcttgactcaccatttgttccacctgaacctgatcttgttcttgttagtttgcagtgttatcttctgcattactctcacttgtttgaatttgattttcaatgcttcctgcagggttagtattctttgcaaaattttcaacatttatagatttcaaacaatgaaattcatcttctttaaaaataacatctctattatttattgttttaaaaccaggttcattactaagccaaattctatacctttcacaccttggggatagcccaagaatataccttttacagatattggttgtaattttccttcactttggtgtgcatatgcaatgcaaaactcttagatttgataggtttggatgatgtccaggtgttagtagcttgattgttgtagaaaagcttctattcaccaaataagcagttgtcataagtgcttctcccaagaatggtttagcaagacctgagctaagtaacatgcatctcattttgtttagcaaagttctattcattctctcagctaccccctttgttggggagtaattcttactgttttgtgtctctgtacaccatgatttttacaaaatccatcaaactctccactacaaaactcaagaccattgtcaatcctcaaagttttaatttttttttctgtcaaattttctattaacattttccattgtttgaatttttctaaagctcgattttagtttttaataaaaatacccaaacctttctagaaaaatcatcaacaactgagagaaagtatgagttatctccatgtgtaggtattttttcttgtccccataggtcagcatgtatgtagtctaggattccctttgaacaatgctttccaatactgaagctcaatctgtgttgttttcccaaaatgcaactttcacaaaatttcactttgctgattttgtccattccaagtagtccttgatcatgaattacattaagtccattgctactgatgtgtcccatcctcctatgccacagtattgcatttgcatcccactgtttgctgctagagagagttcacgtgtcacagtctcttcaatcaaatagtacatgccatttcttttctctccttttatcatcaccatattgaacctttgctaatcttcataactccattttcaaaatactctacatcatcaagtgtaccaacataaattaagtttttagttaggttaggtacatacttgacattctttagaattctaatagctccattaatcattctgaaatggatatctcccaagccttcaactgcacatgtgctgttgtcaccaagaattactttcccaccatgtgtagttctgaattcccttagcaattctttgttgtaggtcatgtgaaatgtacaactcaaatccaagatccaatgttcatttggagctgatgctgcagcaagtaggacttcccctgaatcatagccatcaccatagttggctgagtcttgtgattctgatatgttattggattgattttagtagtctttcttgtatttctaactttgatttctgttcttgttgaagtaacaatccattttataatgccctacttttccacatgtataa

SEQ ID NO: 54058 - DNA, 1087 bp, Cannabis sativa
attcttatatataatttttctttacttacaatttaaataaaattaaacatttatttatacatacaattatttttttatttgaatttgttatttttattttatttattttaattcattattagagacataaaataataataatttatttattttattgttagttatgtgaaaaaatattttttttatgaatagtaaataatttaatattgaaaagtaacaaatccaacataaccaacccaatccgcacttctgaagattagattagatttgaactattgtacagactagattggatccaaaatataaaatttacacttagtgcaaattgaatgcattatgagcgaaataatagggattagattagatgaacaccccaaccttaactcaacagggttacagtgtaatacaaaaacttaaagaaatctggtcaaaaacataaacaaatacgaacatggtttccaacataatcagataaacaaaggatgacacaacttgtaagaaaacaggagaaaagcaaataaacaagcttgacgcattaaactaacagaaagcactcgaaggtgacaactatatctactttatgactagcaacatattttatataaaaccgtgaatgtgtcttgaatataagcattgctttaaaccttaagcacggttgatcaatcaataagaaggctcatacttggtatcaaccgtaccctgcatctccaaaatttactttacctcaatgtcctgagtatggctcatcttcttcgacaccaaattcgaatgacaagggtaagttctgtattggggcagtggaacagaaatgtccatcatctagaataaagagtggcaggaaaccaaatgggaaagctttgatctctagtaaaaaatcatctggagttaagacaaggagtggaagaaagaaatgcctggcagaagagaaggagttggttacggaaaatatggcagaaattctggctaactgtgttgaggtggaagtggtatatgatcaaaattttggaaatggcgaggaggcggccgataccatgcccccacctttgccatgaggtgtctttcttggaattgtcgcggacttcgtaga

SEQ ID NO: 54059 - DNA, 830 bp, Cannabis sativa
agctttaacctaatgaattaaatactggtttgcaatttatttattatattagttatatttttacacagtatgagtatatatatatatatatatatatacgaattgttgtaaattatttagtatatgttaaaaaaaaatgatatagagtaacaaaataatatgtatatgtactaaatattttcttaataattcaagtttctaattctaggagaactatttaagtgataagtttaaatttttatttttgatgatgtatatatgattaaggtactattatagccatttttagatctcaaatatgtgttaatgaaaatatttaaaatttggaatgaaatctaaaattaagattgagatttaggaaagacaatagtacgacgactacaagcagggcagaggtatattgtagccaagggtggccctggcccccacgctaaatgtatatgcactatttttatccgtagtcttctttgactgttagtcaaactaaaattaaatataaaataatttaagaaaaaaatattaaaataaatagtgtaaaatagttgcatatacatatataatatacacatacatatcgtattagtatctatagataaatacgtaatgttatggtaaatattaaaaaccttaatatcaaataaaaagttaattaagaacaattttaatactctgatcatgtgcaaataaattttttttgattttataattttgacaactatttttaacttactatagaagttggtaaaaatagaaaaaaaaaataagttttttttttttttgaaattattacatagaaaatataaattgacattttatttacaaaaatacct

SEQ ID NO: 54060 - DNA, 986 bp, Cannabis sativa
gcctagtgcccaagttgacaatcaacctagtgctgtggttttaatcactcaaatgcaaattattctccaataattctttctggcatggtcaaaaatagggtaggagacctcgtcctcgatttcaataaccttgaaagtgtcaaaatggcttctcaaaagctccaaaaagagcacctagagctcaggttgataggtgacctagtgtgctaggttttgcttatccaattctgattttgtctcgagcattcctctagtttttcatagtaattgagagctattaagtaatacaagccaaattcacaacctcatattttcacttttttggaaaagtgacttactcgtaaatcaggtagtttcgagtcacccgattctacaaaatagcatcatctctgagacctggtgaaaggcttcaccagaatacagaaactagctaagtgatgtcataatattgcttaggcatcaaaaaatacatccccaacatgttttcctactcatgcagcgtctaggttgaagtcatatgtcaacttgggcactggtcccgtaacagccttcagtaaaagagtcataactcactcaatattgatttgattgatgcaattcaacttgtattttgaaactattccaatgctccattaagccatgtatcacactccaataacaattctgaagttataaactccaaattttgtcttcaagagagttacgaatttaagctacaacttacctgaagtgggtagaaattgatgatagacctccagagtcaatatcatcgttagaccatcatcaatggtgaaaaatagactaaatgtatttttttttccatatttttggaatattttattattattttaataggactgcattccctataaaaggagagctcgtctagctcaaatttgagattcaaaaaagtacccataaggtcagagcatctctatctagtttctctttctagaaattagagtatgaagactgagctatttttc

SEQ ID NO: 54061 - DNA, 1894 bp, Cannabis sativa
  modified_base (755)..(757): a, c, t, g, unknown or other
taagtcattatttcagttctcctcgggtatttggcagtgtttcttttgctcgcgatatttgtccatctgtcaccaaatctttcttggttattctcatcttcagaaagggtataggtattattgtcctgatctcaacaaatatcttatttctattgatgttacctttgtggaaaatacaccttacttttcatcttcaactactcctactcgttagggggacgatgaggatttgttggtatattctgtcacgtcctctacgcctgatacatgctctggcgagcctcttgttccttcacctgcctcgatcataactaccacaaagtctacacctctaccacctccactgtaacgccctaacaataggaacgctacaaactgtaactaaacatatgctaatcccgctaaactgagatttactagagctaagagcagaaattaaactttaaaatgaataaagaacaaaaatagtaacttgtaattattaaactttacaaacatccaaaagattacatttttgtttcgggatctcataaaaactttttcaaaatattactagctatcaatacacgccgacctaagcggtaaaagccctcaaccttatggttgatcaacaacaaatttactctttcctgcacaatagagcacccatgagccaaggcccagcaagacagtataaacaacaatatgaatgccaattttaaaatcacttagcattgatgccactacatctattgtctatttgacatagacctacnnnttacgctcacacgtctatttataataaggctttagaatggtttatctcggttgtgattaccgagtctaacctaattatgccttaagcacataattctttatatcaacatatacaacacattattatattcataatcacttaaattttagagtaataaccctagatcacataactgctaaatttagggtagtaaccctaacctcggtttctcacataacatacacataataacatacatgagcgccactgcgctaaactttatgtgctagtttactgtcttacctagtaatccaagtatgtggagattccaaatctctgggtgttcctgagcaagtgccggtaatcctagtcacatattaagatttcacaaataggattaatcttaaattaattttaacatatacacataatttaaattccatttatatattaacatatagagcccaaaatgagctttccaacgataccaagaacgtccaaaacggagtttggagtcaaaagttatggtacattctgccctgacaaacccctagcgcgggccacgacactcaaagaccatgcagcggctcatgggttaaaaacctagaaaactcacctttagatacacgaaaatgcaccaaactcaacccaaaaataccctaacttgccaacaagtttcccaatcaaattgaggtattttccaagcatttatacaccaaaatacatccaataatcatgcataaaccaagattctaatcaacactgaattcatctagcattggagatcaattgagctctaaacaaagctcaaaatcaaaaaccaaaatcataaattaagcatgccaacaaaaacaacacacttgcatactattatacaagcttgaaacccaagcattcaaaccttcaaagcaatccccagaaattcaaagcaaattcccagaattaaacatcaaaattcaagccaataacctctcaattcaatcaatctagattcatacatacaacacaaaccctaataacacaatcacacatagaacattataatttccctcactctcaacaacatgcatcactaaatcacaagaacaccaagaacatccagaaacattataaacaagcttaaaatttagaaattaaatcaagtgaaatggattaaag

SEQ ID NO: 54062 - DNA, 990 bp, Cannabis sativa
cagctcctctctcgcaaacggcagcaactcaggtcttttaactttctcttatttttcattaaccccaaaaccagtgacttaattaggtaatttttgtcccataatctctctaattaatttggtcgaaagatgtaatcatgtacaaattgatctaattatgttaaaatttgaatttttatttttcttaaaaaaacaagtgatgaatattttttaaaaaaaaattataaaaggttgggtatggtgtgctgattgagttagcccaatataagaagcccaattataaagtcataacgaaataaaaaataaataaaagtcatagcacaaaccgttactcaaactctctctcaatctcgctttcttcatcaccttaccctagaaatattatcaacgtcagatcggagatcggagatcggacacgaggaattctgtttcattcattgccggattaacaattacttcactcacaatagctactctacttaaattatcaaccttagatcggagatcggggagtaggaactccctttcactcatttgtcgcggataaacaattactccactcacaacaggtactctactctcgattttgaggatgctaatgaggatcaaatacaaagagacgatgtgaactttgtcttaagtgattttctctcttttgtatagacttctacattggcattctacacggatatgatttagctattatgattttctctcttttgataatagttaggtctgtcataattagtttattatgtttagttctaagatttaaaaattgtgtatactattatttaatatgttataattcgaatgcgttaataatcataggagatttttttggggatcgttcctagatttggttctcaatctttttccagggccagggctaaagaaactttcataattttctgagttctgttcaataaaaaaagttctgtttttttttttccttcatgtgaatttcatttgtatggtatttgttcctgc

SEQ ID NO: 54063 - DNA, 1042 bp, Cannabis sativa
tatttcaataattaagtgaaaaaaataaaaattaaatgctaaaagattcttatttagtaataaattgtaaaaagttaattaataattatagtaattaaattttaaatataattaatcttaattaagattttataagaaaataaaatatcattactatcaggttttatttatttttaatttctaaattaatcgcaatcatttaatagtaatttaatggctaaaaataaatataaccacatgtgttacatatttgatgtaaccatttaaacctcctttatatatatatatatatataatgaagatgataccacacattattacatacaatgacatatgttactatctcctcaacttcattctaaattcgaacttggtattagagctaaataaaattctaatgagtatctgatccaaattcaatagccggtccaattgaatcaaaagagcagcatgtgattcgaagataataagccaaaaagagtcgttgtgagccaaaagtattgtcggtctaaaaggacaagccaaaaagtgattcgatgagccaaaaagtgcaacttgtgatcgagtcgtccaagattagtgagcaaaaaagaagttattatcttgagaggagatgttagaaaatctcacatgtgtagaagtatataatatctatgaaggtcaattaattttaagatgtaatcttacatgtactttactagaaagtcacattcatcctaaattccaagcgttatggagtggctaaagccttctgatttttatctaaaaaaaaaaaaaaagccttctgatttttttatgggattttttttcatacataatttatataaattaaattaagtttattaattttttgttattaaaaaattttgatgtttctttattgatagaaaaaattgatgtttgttatactaagaaactcatgatcaaatataaccaaaagaaaatatcattttggaccctgtgttttgcaaaagttaccgatcggaccttatgttttgttaaatgacaaaatggaccatgtattttccaaaatagtaaaaat

SEQ ID NO: 54064 - DNA, 1082 bp, Cannabis sativa
aatgagaagctcttctccattggtcgtaaggaagtcttattaaaggcggtggtacaatctataccaacgtatgctatgagttgctttcgattgccaattgaattttgtaaccaaattgtatcagtgaaggcaaactttttgttgggatcaaacaaagatgggtcaaagatcctttgaaaaaggtagaaattgttatgcaagtcaaaattggacggaggaatgggctttcgttcttttgttgatttcaatcaagctatgcttgtaaaataagcatggagaattttggagatgccaaagtcacttttaagccgacttttaaagcatagatacttcttaagaaattctttccttgaagcacatcttggacattcaccatcattgacatggcaaggaattctttggagaagagaattgcttttgaagggtctaaggtacaaaatagggaatggtattcgtgttagaagtggcttggatccctggtccctggacataatgaattttggccaattagctacattggacaaccatgtcttccggtttctactttcatcaatgacaccatggaatagaatttacctcttctcaaagagtactttggtcaaattccattccatgtattcgtgttagaaccagaatctatttagtaaaattcgggttccatctagcaagttcaatctccgaagcaaatgaggaaacaacttcaaacaacaataacacttggtcgaaattttttcgggcactacaattaccaccaatgattaaaatctttgcatggagagtcattcaacaagctttgcctgtcgccaaagctctgtataaaaaaaggttattgattcagcaacttgttcaagatgtaagagcgcttggaaatcgattgggcatgcattatttacatgtaagtttgctacggctgtttaggagcgaacacaatttaatattgattttaattgtgctcatgttatgttcaatagagattatgtaatccacaaagcaacaactatggagaaggctgaatttgaaactttagtatgccttatgtggagcatatggaatgatagaaattgtgtacttcatggtggaac

SEQ ID NO: 54065 - DNA, 1929 bp, Cannabis sativa
cccattgccaattggttttgagatggaacccccttcaccttatctcaaattctaacatggtattagagcaaaaaaaaacaaacaaaaaaaaatctctagctagcgactaactgacccacaaaaaaaccgatcgaagtagagccaaaaaaaaagagccaccaaaaattcaaaaaaaaaactgatccaagagccaaaaagtcaaaaaatgtcacttgtgattcgggaatagtgagcgaaaaaaaaagagagccaccaaaaatctaaaaataccgatccaaaaagtagagcaacagagtcacttgtgatcagggatagtgagccaaaaaagagtcgcttatgatcgagttgtctaagatggtgagcatataattaaaataaccactatcttgaggggagatgttaaagagtctcatattgctaatgtgtgaaaatataatagatcgaatatataaaaggaattgactaatcctcccgttgccaattggttttgagatgtaccccattcacctatcccaaattctaagagttacaaaaattacaatttgttgtcactaaatatatttttagtcacaatacctattgtgactaaaactaaatcagtgacaacttacaacttaatactatgttttagtcacaagtaatattttgttatgatgactaaaattcgtatttaatcacaaaaaaattatgttgttactaaaagttacaattttttgtagtggattaagcattcatttcgattattttcctagctgtcactttctattatcttattgttattgtttgatgtgaaactcagtttgttacaaattctatataaggccataacaactcacatatttgattgagctttccttttcattttcattccatgttttcttcatctctctaaattctctgctcttacacaccttcaaaccaacaaaattgatgtgttttatcactaaagcttttataacacacccttatacaacaataattatgattctttatggaaaaaaaatgatcagatacaagttgtttgaagaaattaataagagaattattaaataactatcattgaacttcttgttcaagtaaaagagaaaaatgaatcacgttattgaattggaaccttatcatggcatggattaaagtaaatgagttcttttaaccctatctcacaatctaaacatacctcttctactataattacactaagattattacaaactaatgaaaaggagagaaagaaaatataagagataatggtagaaattaataaaattaaaatgatagaaatgaaagtttagttcttttttactttcctcaaggaactacgtatttataaataataatttttaattaacattagaaataacagaagtaattttttagaggaacaattttcttttaacaatgtctgtcaaaatctccaaagcatcgcatgattgtttgtaatgaaagtcaaagcttaatttgtgggagttcgataaagacccatatgaacacttcttttttggctgccattacagtctaatattatttataaagaggtctttttttttttgggctggaattgatctaaactgatatactcttaaagggataataattaaattggatcaaaaattacataagcttctataattcagaagataagtctatatttcaatacttaatgttattgtatatgaattgctatctctttctgttaatattgtgtggtcgcactttaaatactactagttctttataattaatgaaatatttcttctagtagggttggagaaatttatctcaataacagtcaaactcaaagttttattcaaccaatatataagatagaccaggtcaattacaagaactctagcatatacaaacaaaagtcatggtcaattaatgtcattacaaagatttaaactatccaaaatagaagcaattgaaaaa

SEQ ID NO: 54066 - DNA, 916 bp, Cannabis sativa
agtcttcaggaggggtcgaccagcaaggaggagacacaactactaccaggggaagcaaacaggcagcataatctgtaaaacaatgagagatagagtcaatagcagtattaatgttacacgggtaatagttatgcactttatcatttcttattctccacgtggtatccacaacgatcgaggcgtaaagaaatagcttgtccgtgtccactgctttcgatttcaggttccaaataaatgttacccaatcccatatcctgcctccggattcctggaccgggaagattccccaaggggaagctctccacaaatggtacgcaacatcgcagtgaaggaacaggtattccatggactcctaatcagccccacacagggggcaagaagtttcgtcaacgttgattttaattttaaaaaaaaaaaataaagtgcattggtactttcaaaagttgataaaacttatatacatatattccttccacttgacaaactatattgacttttgacaataaatttattttatttcttttctatccaattaatatattcaatcacatattttttttctttggttttagtagtttcctttttttcattaaagaaaaaaataaaaatagttttctttttataattttatttttcctttatgtatagtctattattttttttttgtactttttttgtcttctttatactccaaaaatattttattttgtatattattttcctttattttgttatcttgtttatatttgaaatctttttttattttcttattttttccattgcatatatatatttaacattttattcgtttattctttatatgaagtaaaaaaaaatacatatttattgcacaaacaatattttctttatttttttttaattttttataaccaatttgtttattttaataaaatac

SEQ ID NO: 54067 - DNA, 1537 bp, Cannabis sativa
atttatatataacgttttagtttcaaaaaaaaaaagtggtatttttcaacttactccttcaacaaaatcataaaataaggttcttttactgccacttttttattatagtcatatgtatattagcaattgtaaatattaagggagtgtcgctgtaaatattctacatttttataatgttctataaaaatagcaagaaaatattattaaaacagcgtaaaaataatatacaaaaacaaaaaaaaaaactaacatcaaaaaataataatagtacaacacaaaaatattaaaaaactgaatttctgtaaagaatatcttattaactataaaaatatttaaaatttcgtatattcatatttttgtaatttctttattatttttatatatttatgaaataatttctacctatagtttttatcttttccgataaatcactctatgacatctcggttatttcgtgaagtaattaattaacaaacttgaaacatcaccaccacaatacctaattaattaatgaggtcaattatatgtgttcaactcaagttataataacatcaaaaacatcaccaccaccaaattttttttatcacaaagaacaatatttttagcatgccaagtgtgataaattatagttaaaaaaaatactcaaaagaacctttgttttttaccacttgaagctttattagatttccaaattcgttcaagtaattcatgatgatctcattttcgagtagagagtctagcccaatttttgaaccaccatatatatattgttgtaaatacaattaaagaagatgtgagaatggctattcacaccacttctacacaataaattgtaatatttagtagtttcgtgatccgtaaggagaataataagttgttgaatcccacatcgtctaaggtcaagtagaatgattctgagattgtgtaggtttgagactacacagttaaagagagcttaaatagattgattaataatatatctatatcaacaagatgaatcttattttattgtagcccatcttgaaagaactccacggttaagtttatttgacctggagtaattttaagatggttaaatttctgagagattttcttagaaagcgtgtgagtgaaaacaaaacacattgaaaatactcgtattggttggtagaacaattgtcagttaaagaagcaactaaagtaacatacgagtgtataagaatgattttaaggacttaataaaaggttaaagctagcgaggtggttagacattcttaattcaattgtatattttcattaattgattagatttatagtactttattgctgtcatgcattacaatacaaattacaatttaccaatatatgtcgacatgatcatatatatatttttatatattttttccacttgtgaataaataaatctacctacgtacttatatatttggtaattatatatatatatatatagttgaatatattatatacactagggatatataactttaatttgtaacggtcaaaaaaattgggtagcttggcattaattaaacaattt

SEQ ID NO: 54068 - DNA, 910 bp, Cannabis sativa
aataaaattttggcagcataaataccttccgttacacttttagacattttgtaaataccttgctgttatcttacacactagataccagatggtatgccacatcatttaaaataatgccacataatcttattaaacagccacctaatattaactattaaagtaaaaatttaaattgatttaaaaaaaaaaattacataaaccctttacatcaaattaatttaataaatttataataaaatatgaaattaaataataaaatacattgtcttcaaaaaaattacactgttcctaaaaaaataaaaaataaaaccctaaaattgtgaaaccaggggagagagaaagggggttggacgatcttctctgaccacgacccaagaattttttggcgagaccttcttctccgaccatgggacgaaccatcagcgtcggggagagagaaattgatgggcaagagctgatggctgatgggaactctcagttcaatattatgatatttgacaataatactctagagatttattatcctcttactcccaacactttctcatttttatgcaagatgagaaaaatttaataatttttttatgcattttaaatttgatttcattccattcctattcataatctcatttttatttctattcctatgttttaatttcttctaactaagcgctagtgttttgttaggtttttgttctattattattgttcgttgaacaagtttaagggaaactttaaacaataaaaagtctttaggagaagactaatctaagtctcatttcaagacatagcaaatacatatcaagaatcgaagggattctatttcttggtatgtttcaaatgttagattgttgaagtaaattataagaagattgcgtttttgtaatctttgatactttacaaattataa

SEQ ID NO: 54069 - DNA, 740 bp, Cannabis sativa
tgaaattatgatataagagttaaaagttattagtcaccctcaataaccattcctagataacgttgaagcagacagttatccaaactctctattgtatgtaatcaaggtgaagcactcaatttatctaagcagtaaatccacgaagcatgcaatttatttaagctttgagttttatggagataaattaatttaggcaacaaattaatgaaacatataattcattttacttaggttctattctttatcacaattaaaattacaatttattacaaacacttagaatcctagactattaggtgaatagtaatcttaagattacggtaaattaaagtaaaacctaatttagcgaccgtccagacaagaataaaataataatcttaacattaacatagaataatagaaacaatttgatatgatggaaattagaaattaacattcaataatgaaattaataattcatgtttcgggttttgaaataacccttaactaaaagaaaactattcagaattagacattataaccaaaatcataatatttagtaaaagtagaaagagtagaaaagaactagaatgaagaacacttcgaagtcgatctccgtctcttccttgctctctctccgagtttctttctttaatttgtagttttagaatgattaaattcgtagcctaagatgtcctatatatagtgcttgaaaagatagatgaatcctctttgaattaagcttttttttttaaaaaaaa

SEQ ID NO: 54070 - DNA, 1191 bp, Cannabis sativa
ctcgcaataatgaatgttgaggatctctttcaatcatctggtaaaagggaaagaagaggttgaccgtctcggagtctccaccaaatgtcaacatggagcctcttaaaaggcccaggaagacaactaccaataagaagcaagcctcctagactgttaatctcgagatccctgaaactgagactcatgctttgacccatcctccgcccccgcacataccgacgagcccatttccaaaacgaatcaagcttctacctcttcaagccagccctcgaaactctacctgtcgaggctaggagtactggctcagagtacactggggaatttggtgcagcttgttggcgtcattttaaggctttcctccccaacgaatgggacttaatcaacaatggggacttagaagagatgcttgaaaggagtgtcgcccatggcctctcgataaattcttatatccttatcttcttacttcctttttcaacatccttcaaaaatacttacacatttttgtttgttggttttcagcaaacttttatctccttcgttgcccaataacggggcatggaaaaaaggaagtacatggagagcgagattcagaacttgatatgtcagcgcgaggctgtgaccaaggaatggaatgatgccaagtcggagaacacttgcctaatcaaagaagccgtggaggtgaagaggacccacaaggccgagcttgaagctgctaagaaggaggcaaaagataaggccgaggcatgctagaaactctaagagaaataccagaaactccaagaggaacttaatgcagccaaagtaacactcgatggaaaagaagctgaaaccattgagcgatgcaatgctgttggaatacgttccatctacgaagcctgaatggcgaatttagggatggatacgagtttcctgagaaagtctgagggggaagtccttgcatactgcgagaaggctaagaaggaagacgaggaagccaaggcagaagaagaagaagaactgtccaagtctcctaccatgtaggcttggtttttatttatttatttatttatttttttatctagtcaaatggccttaaggacgagacaatggtttgccccttgtggcacttttgtaaagacaaatttgcaaggttggatggccaactttgcttttattttatcttttattgaatgctttgtacttttgaactta

SEQ ID NO: 54071 - DNA, 1107 bp, Cannabis sativa
taataaatatgcaataatgaaagatgttatgaagaagtagaaaaattataacattgaattattaatcattattattattattaattatacttgttatgaatatcaatataaaataataaaaatatgaaaattttcataaaaaaaatgtgatggaatgaatatatagtgccaccccaacatctattctgatttcttttatttatatttttatatattaaaagtgcttatataatcatatttattggtttaacaaattttattttttttctaaaataataaataaataaaaatactagtccgttgaactaaatcctatttttctaaacagttttgaatagtttttttacatttatttcccaataaaaattagaaaaaaaaaacaatattctaataactacttaaattgaatgagatatttaatactgtaactgaaagcaagaatatctcaaccttcacttatgatgatgatttttaaattaatttttagtttaatttattgtgatggcttccttcaagcttttatctatttttatttatgcattggtcataattattggtggtctccatgcttcacataagattttcccagaatatatatcagtcactcgacatcgaacatgtggatccaacttttaaaactgcttaccattttcagcctcaaaaatatttgaataatggtcagttcttctttttaattaatacttatcatgcatgcattgatcgatgcacatatatattaattttacgtgtgattttttttttctaaatttttgttcaatgaaattagtgttgcatatatatattatatacatatatttatttgtactattatatatactgcatttgctttacttggtcaatgatgatgaattcttgtttaatttttgttcaatatactattatatatactgcttaccattttcagcctcaaaaatattggattaatggtcagttcttctttttaattaatacttatcatgcatgcagatgtgcttttttatagtggtgaaatctttaattttttctattaaagagagaaaatatattataattattactttttgtgtttaattattattattatttaaaatacagattagtttccta

SEQ ID NO: 54072 - DNA, 1181 bp, Cannabis sativa
cctagaagcaaagagcctatcgagaccaatcctaatacctttaaaaggtgatcctagcgagtaatcaaagagtcactcagatggcttctgaattttgaccaacacggaaccctccaaacatggagccccacagtgtcagagcttgtcccctacattcgactggcggggtgtgtgcgctacctaaagaaggccacatttttgtccaacgctatattctctaatattctcaatacagacacaatttcacacgacacctgacatctttaaatagtcccgacttgtatggacaacccttacctcgtgaattgggcctcactcaattagcccaaagttagtaaatattgtattttatcccatcagatggcctcactcaatcagcttagttgacatgtgaaaaccctattgggtttgggtatgcccgtactcgattcttccctataaattaaatattaccctttcatgaaatgggacatttttgaattttttaggaagaagaactaagaatgagagttcttcaactaggggataaacacttgtaaaaaatactttaaagtttttctagcttaataatatttactcatgtactagagttcattaacactcgaactacgtaaaaattttggtctcttcttctttaatttatttctttcttaagcttatctattttcatacttagttttcgaaaaaatttcggtaaacagttttgtataattttagttgtataattagtattttttatgttattcaataaacaacactttttattattaaaaatatttaatttaagtgttgtttatatataaaaaaacataataatatttaaatttgttgttaattataattttagtttaactgtaatatttttaattttataatacttttcattttttcagaaatgtcctacacttaagctatgttattttaaaaaataataatagaaagatagttttttggtaactgcaataggtaacgacatcacaatagtaattttttaagaaacataaatacttttttattttattgtttaataagaaaataataataaaaagatatttttttagatatgtgcattgggtaaactaaatgataatatatagaaaaatattttttttgatatgtgcaatgagtttaaatttgaattgtaatattaaaaaaaatactttatattatatagccacatt

SEQ ID NO: 54073 - DNA, 863 bp, Cannabis sativa
gaaatgtcatttttgcccatgtgagtggatatgcttgaatttttggccctaggggcattttggtcttttgaccttaattattagaatttcaattaaatgagttttggtaagaagaagaggaattttatggcttattccttctcatacccgaacccctctctctcaaaccctcttttgagatttcaatttcgtctttggtgaattgcttgatttgaagctttgaattggaggatttcttttgagtttggaattgaagggagttctagctttgtttgaggtagcttttacagatttttaaccttgtcttcttactgaattttatggttgtaaaagcatggaaaagtggttttgatcttgtaaatgcatgtttttgttctttagttgatttgagtatgttattgcataaacctttgtttgtgtgatgctttggattttggtaagctttagttgggattttggaagtattttctagcttgaatccatgtgtttttaaggttgttgctgctggaaattgattgaattgagtgagttgaagctctagttcaagagcttgaattttgcaagtttgaagcttgattttggtatgtttgtgcaatctgaattttgagagttgttgttgttgttagctctctattgtaatgattttttatctataagaagttaattttgggtatggtttgattaaggttcgaatatatggaaaagtgggtatttttagaccttaaaatttggttttctgggttttttgaacccagtggccgcgaccagatgtgtggtcgccgcggccataaaacctagcagagagccatccctttttctgattttgttttggccataacttttgactcgggactctattttgg

SEQ ID NO: 54074 - DNA, 2183 bp, Cannabis sativa
tatcttatcacttcaaaattacataagttttctatctcaatctctccacctaaattctaatagactatttgtttcttcctcactcttaccacacaacaaactcacgcacacttttcttttcacaacttattatttttctcctcacacacacaaaatatatatataaagttacaaaacttcagtatcaagataacttaagaatcaagacattttaaagttttcttaagaagactcatcaaaatttaaacaccaattttttttttccacaattaataattatctaaaaagataattataacttaacaaataaaaaataaataatttgaatcaaacaagaacaaactcttttttttctttacataatctagaacacaattcactgtattaactattaagtgacttaaatttgatcttaatagtaaagagacaatgaaatagggtgacataatagggggcctcaaaacaactcacaactttctttctttctttccttgactaattattattaagaaataaacttaaataaaagaaaaaaaaaaacaaagggacagaagaatcataaagaaaccaaacaaagaaaaggaaaacacaataaccaattgtcacctccactctctctctctcttctttataatagtattaataaggatgaggtgccatgtgagtttattatcttcatttcctcttttttcttttctccctttacaaatccacaaacaaatataatcatctatagtgagtgaaaagaccaaattgcccctaccataaaataaaattgctttcctgtaaagaaattaacagatcatagtataagcaaaaatggaggaagagaagaagaagatgacgatgatgatgatggctacaacaaccaatccaactatcccagaaagccaaagttggaaactttatgacaacccattttacgattctcatcaaaatcataatcatcatcatcaccatagccaaaagcttcaaaaacagagcaagaaccttcagtgtcttcacattcctatctcagccagaaaattagctgcttctttttgggatctgacctttttcagaccagtaatggaatcagagctcgatcaggttaaaacccaaatggccgatttgaaaacagagctggaatgcgaacgcagagcaagaaggaagcttgaagctatgaacaagaggctggtcaaagagttgaccgaggagagaaagggaaaagaagaaatggagaaaatgtgtgaagaaatggctaaagagatttcttttgataaaggtgagatttttaggatgaagaaagaatttgatgaagagagaaagatgatgagagtttctgaggttttgagagaagaaagagttcagatgaagttagctgaagctaagatttttcttgaagagaagcttttggagtttgaaaactcttcttcttctaaagcttctaaagttaatagtaataatgattctgtttgtttctcgggaaaatttagaaacttggtattgggtaataataataataatagtgataattcaattgtctcatcaaagtcatatcttggtcatcatattgatcaaaatgattttggtaattcaactggtttttcttcttcttcttcatctttacagattttcccgagaaaatcagcttcatcagaaagtgaaaatcctcatataaagagaggaattaaagggtttgtagaatttccaagagtggttagagcaattggatcgaaacatcataggcattattggggtacaaaattggagtgtcaaaaagctcagttaaggatttttcttaaccaaaaaaatcccatttcttcatctaataataatcttgttattagttaaagataacatttttattgttgtttttattttacttttccttcttttttgattaaagttgtaatcttttttgtttttaggacacaaatgtatgtgtgataagtctggattattgttgttcttgataaaataattactagaattatggtgtagtagatacatatgttgtttaagtttgtatcattattgtatatgattttgttagatcatgttgctgtggatctgggctatagtgtgttcttttttaaaaggtttgaattttaataaatattttctatattgagaccaaaattattaaagttttgtagtgtaaatttcactaaacatgaacatgtgtgtgcatatatatatat

SEQ ID NO: 54075 - DNA, 1459 bp, Cannabis sativa
tttgataatgctttttctgctggctttgtgatgcgtccttctgctttcacctcctactccactgactctttggtggttgccactactattggtcctatggaagtggtctctggtgctttgagcactatggtttctactgagatgatgcctgcttcgagtggacctgctgctgctgtaggagatactgctgttgttggacagcgggaccctttggttcgtgggaaagggctggcttcagcttcgggtgtcaaaaggccctctttccttccacagcaagtggttgttggcagctctgttaggtctcaattgaagagagctcgtgctggagatagggaggatggttcttcatctgcttcaattgatatggaacaggcgggtggtgctatgcacacccgcccagaaaaatgagacttattagttggaatgcacgtggtttggggagtacacgtgcattccgaaggctctccctacttgtgaaaaatcattgtcctgatcttctttttttgattgaaactaggttgtcggctggttctgttgataggattagaaatggtcttggttttgaccatggttttgaggtccctaggaagtattttggggggggccttttacttttgtggaaagacaatcttttttttaatattataaatttctcttgtaatcatattgactgtactattagttttaatgataatgaaggttttcattttagttgcttttatggctctcctgtttcttctcaaaggcattttacttgggatttaattgataaattgttttataatgctcctactcttccttggcttataatgggtgacttgaatagttttttatcctatgatgataaagagggtagtacttattatgataataaggatatggaagctttttcaaattttcttactaagtttcacctttctccgttgccttgtgtgggaaataaatttacttggaaaaatagttctgttaaggagcgtcttgattgggctattatctctgattcttggagtgaaatttttcctgatgctattttgcatcatcttcctttttttggttctgatcatcgggctttgaagcttattcttaaggatgatagctgtaattcttcttctaagcgtaatagacgatttctttttgagaatgtttggctggagaatccagcttttttctctttagtcaaggacacctgggattgtggcctttcttgccagagttctggaaatccttttcaaaattttttgtctaaacaggatttgtgtatttctgctcttcagagctggcataaaaacttgaatctttctctcaagtctcgtatttctgatctccagcacgaaattgctcgtattcaagatcttccttttactgatcaggataaccggtttcgacttcaatgtcttcaatctcagcttgatgctctcctttataaggaagagatttattggaagcagagatctagaac

SEQ ID NO: 54076 - DNA, 1611 bp, Cannabis sativa
tatttattattacttgtatcccaatttttggattaatggctctttaattatgaggtcagactcaattatagataacaatgccaaaatgtgacgtttagtgatagagaattgacacatatatactgttattatttagatctaccgtctacgttctcttttattttttatcaatattaagaagtagttgctgattgattctcaagttatgtagcagtggtccaataatgaaggccaaaaagaaagtcaaagcaaaataagaaatttaaaaaggtgttgaagaaaataattgattggtctaattccatttgcaactagggtatgtaatcttttacaatataaaatgtgctttagaaaaattatataatttacccctttaaaaaagggatacaccgatatatttctatttgtttcagtatccaaaattatattttagtcaaaaaatttctcatggtcatgaaaattatagttatttgacatatgctgcaaaattttagaaaatttagaaaagtttaacacaccgaaaaattacattcaaacagtgtgttgcacgcgtgactattttattttatacgctgtttgaacattattttttgtattgtaaactagtcaacagactgcgctttgcgtgcgactgtctataattattttaaattatatgcatgaatatttattgaataataaaatcatatcaaataattacaaatttatttttatgtataattttaaaatatatatttattaaaaaaaattatatagagaacttcgaagaatatcttttataaaataactcatcatacaatttcttatatacaaaataacacatcctcaaatgtagattataatgaagaaaaatcaaaaattgaacagtaatcacacaaatagatataaaacaaaaagaagaccataaatttattaaaatatcatataattttaaaataactgtcatcactttatttcacttatagtccctactacatttaatgatgtcatcactgtatctcacttgtagtcttcgttaatatcttttctaattagtttattctatacctataataaatcaaacaataattggtaagtaattatttttatacataagtatataatattctatcataaattaattacctaaaatgattttaactatcaaatgtagtcgttattatatttaaaaattttctcatcatctcacttatatttgtcacttaatatattatctctctacaaatatcttaagattatatgaacatatataattacctctaaatctatgttctaactctattaatttcatacatataacatataaataggtaaatgaataaatatatatatatatatatttgcatatagctctttgaattatgattatactgagtttccttccaatataataataatatttaatatatcatatataaaatgttatttatttgttgctattatttttttttaaaatcacagtgtatggttaatacgaatacctgagaatattgtgttaccattaacacgtaaatgagtcaaatttggagttatgaattgaaacctattgatccaaatattaactatttctccttctagtctctctattgaagttgtaactaaaaataaaat

SEQ ID NO: 54077 - DNA, 1159 bp, Cannabis sativa
tgagtagatctaagttcctagtaaaataacttccaatagtgagtgagtgtatacatatatattattctcttgttatatatgtacctatattatattacatgtgttttatcttattcttctacctttcatatatatatatgcgatatatatatagtgtatatatatgtgtattataacatatatttaatcaatctcttttattgtccttgtattatttttacaattaagttgtatatatcttgatttatcttccattgtaataaaatctctaacacattgaccatagataatctgacgtggcatcctttcgtgattgccacatacacttaatccgagaatacagataacactactatataaagagcattagttaaaccctaaaaccttaagtcttaagctatgagttctaactcacaaactctaagtctcctctctctcacactcccaccaagcatcactcactggagattttccaactttggttctcacattgtaatcttaagagaaccacctcagatccccctactattgtgatctgagtggtattatttctagtatcaatataaccaaaaggggaataggtcattacccgctaactaagggagtcgaagctctataaaatctcgtgtcttattttttttattattcttaatgtgtaacatgtggcaaatcatcagtattaaatacgattccattgtcggttgaccaaatttgaggtcaacacttaggttacaatctatttttttaaatttataattcctttcatgttacaacttttatgtgtattatcataatatatatatgatataatatagaagttttttgttaatatttttacaaaaattcacataaaaactcacatagcaataaatagtaacttaaattataactaaaatctacatagtaccccacatagaaataatcggagcaactaccagaataagtcaaatcgtaaatttgaaaaaaaaaaagttgacaaatagtatatgaaataatttttctataatagaaactctaacacataatatatattaatttgatatcaatgtataatatgtaacattttttaaaaaaaattgttaaaaaacttgactacaaattcaataaataattggtaacacttttttaatcagttttgtgtttttaaaattgaaaaagt

SEQ ID NO: 54078 - DNA, 2968 bp, Cannabis sativa
aattaaatattaaaaaaattatcaaatatttaagtatcatgaataaaattaacttaaaaaataattttctatttaattaaacataactaaaaaaaaaaggctttgtcctctcctttctctctcttctggcgaagaaaagaaggaccgttcaaaagccagtttctcgggttggatcctgacccgattgaagatgcagacgataaaaaaatggagacggcaactgagagagtcactactgaacttgataagatcgcggagatgttgaggactgatgagatttttcaagaaagcaataactctggtttcattaacaagattgtcgagcaggggaattcgaattgggcaaaggaagtggaggatgaaattgcatctgaaacagatcagattcactttcaagaatcatcaataagtcattggaagtcattcaaagaagagaagttggtctatcgggatcccaaattgaagtttactgaaccgattatgaagaatggcatcaaggtttctcaacttgacctagaggaggttaaagaagaggctgcaagctggagttcagcagtgatttgtatggttcttggagctaatcctcctatggctgtgttcgaaggcttcataaaacggatttggggacatctcgggataacacagattgtgaagatgacaaggggattggttatgatcaaatttaatgatgaagcatcgagagactaggtgttagaatcagggggtctccaatttgacaggaaaccagtgattgtaagaccttggacttctgatcttaatgttgttaaacttgttcgtttagtgcctctttcgattagactccatgatcttggcctccaatattggggaaacaattgtctgagtgcgttagttagtactgttgggaaaccaattatggtggaccaacatactaaatatcgcacgttcaattcgacagggtcctagttgaaatggacatatctgatacacctccgagaaccatacaatatgtcaatgaatatgggcagcttgttgatcaaaatattgattacgaatggcttccggtaaattgtaaaacctgtatggggtatggacacatcatggcagatttgtcaaaagggagagacgaagaaaaagcaacaagaaatgaaaggcaaagactcgactcaaaccagtgtgcaagagcaggaaactaaggaagagaacaagcaagatgaggctactgctcccaggaaattagactcgaaggagaaaaatgttacaagggcacagaatatagattggattactctgagaaaaaatttctcacagaagcatctaaaggaggctgaaaagttgaatgatataaggaggaattctgttaacagctttatggccttaggaggagatgaagggggtcagatagtagataaagtgtccgaggaggaaggggaaccaggtaaaaaattttataatcatggataattgcaacattgcttgttggaatgttaggggtgtgaataatagagataaacaggatgttactttggatttttgtaatctaaataaagttggtgttggagccttagttgagaccaaactaagagaggaaaaagttaaagaaatgatggaaaataaattcaataattgggattacttctctagttccactattgaaggtagaattcttgttctttggagaagaacttttgtcaaagtgattgtcattgctgaaacttctcaatttgtccattgctatgttaaaatgtccggaacagattaagcttgctgcattacttttgtctatggttttaatactagggaagggagaacaacattgtgggctgatttgaaagatttaaagcatcctgtgaagccttggcttatacttggagactttaatgctctttttagtttggaagatagaacaggtggcaaccctccttgtcttagtgaattggttgattctcaatctttgtttgcccaagctcatgttgaagcctcaaagagaactggttcagattttacttggacaaataaccaggacgggactagtagaatatactccaaaattgatcatgtctttgctaatgaggattggcatgatacttttggaaatacttctgctcattatggttgggaaactacttcggaccactggtcttgtgttgtctctattaaagctgatatgaaaattggggttaaaccatttctcttttacaatttttgggctgaccatcctaatttcaaagggctggttttacagagctgggagaagtctcttactacatcgggtatgaaaggaatatacttaaagcttatgagactgaaacatgttcttaagaagttcaatcatgagacaattggtgatattggtaacagttttcaacaagctaaagatagatatcaggaagctcgcttgaaggctcaagctcatgctgggcattaagagtatcaggatcaggagagggtaggcgctgccaattttaacagttgtgaaaaatgtaccataagttcctcagacagagaagtaagatcaacttgattcaaaagggagatgataacataaagtattttcatgcttgtattaaaaaaaggaagtctgaaaacgggattgcttcatttaccaatgatcatggagacattattgataacttttgtgaagttgtgaatcacttcatgaatcattttaaaggctttatggggacaaggaatgatactgcagcaagactaaatatggagtcttttgattcgaattctagattgaatctggaccaacaaattcttttactgaatcccttctccaataaggaaatcaagaaagctatgtttagcatccctgactcgaaatctcctggtccggaatggttcaactttggatttttcaaagtgatgtgggctgatattgggaaggaagtttgcaaggctatctctgatttcattattacaggtttcatgccagctgagcttcactcatccatgatttcattaatttcgaagcatgataacc

SEQ ID NO: 54079 - DNA, 1329 bp, Cannabis sativa
agtatataataatttgtgttcttacaccaaacatcaacaacaataaaatttatacacaaattatccatacaacaccaacatatatatatataacaacaccaacatatatatatataaaaatatatatatatatacatatatttacataagtctattcttctaaaataataaagtcacatcattgaatcatcaagttgtgtatgtgattcttctgaaatctgcataattttgaacacaatataaacaaataaatatctttataaatatgtataatatgacattcaatagatgataaatgacttaaaaagtatattcaacttaccaaaaagtctgttggccatgcaataggtacccaacaacttcaccaattttcttaaattgtccatatgctctaattaattgctcgtcacacttgataggaacttgaacaataacttcagaataaaagtctccaagctcttttcctccaactttttttgatgaatctttactaataactagagcaatagcaattgttttaggatcattagtaatacttttatgattaaccacttctcccacctgtacaataaattatgacatcaatatattgaatttaatttattaataatttttttaaataatttagtaatacctaaattatatagttacaataatatttacctcaacaactggagtatcatatgatgaacatgaaaacaacagctggcgtcgaggttccttgttatgtgatgtacaagcccttttgacctacacatataacaatattagtaatttactttagtggttagtaatctttacaattatttaaaagtaaaatctcaactagttgtgaagacgtggcttcgtcattatggttaaaatcctgcacaaattacattcaattttaagaactacaaaatattgaataataattaaaaaaaaagtgagagattaaagatctaacgttatcaagtatagttaatgtattatctacattgtcattttgaactttagatcttaactcttttagttcagattctaaagcctctatatatttgctttgatttcgcttcttactggatttgttttcccacacatcagatgggcaaacaccaaaaccataagtgcgaacagaaccatatctttccttacccattatttcagaataagtgtcattcatgctcttttcttttgatatatctccatttatttcttctttctcttgtaattttacctatcattaatttcatataagtaataaaacaatatactaagaataatacatgaattaagaattactgaattataccattgtttcttgtgttgtttcatccattacactcttat

SEQ ID NO: 54080 - DNA, 1610 bp, Cannabis sativa
ggagacaaactagctggtcatctcagaggcgaagggggcaagagtaggaccgacgaagcggttgaaccagtccgtcagggggtccatgttcaggtcccaaagattcctgaaggcgtccttgcgcaaggtgttttgttcctcctcccggaagatcttcttcagggcctccacctcagcatatccctggctgaactcgtccagggcgtagttatgtttggcgatgcgaagcattttcctttctttgtcttcagggaccggggtgaggatgatgccatgcggcacagtgtactcctccgcttcggaaggaatcttggagtcagtgctaacagccggagtgtccctcctccgtggccgcttggaagactcgacctcaaccattttacccttccgcttggctcaagggcagtcgcaatctcgccctcatcctcctcgatttcttcttcttcgtctaccaagactattgtgcccaagggggcactggacgatgacctcctgggggtcaccagttgggatgaagccgaaggcagagaagcgtccgggctgtaggcctcggaaagggtagccaggaaatcttccattggcttggctgctgcaacaaagaaataaacaaagtgttagaataatcaaaagaaggcatgcgccctacaacaaagaaataaagctaatcctaccccgactctctaatttagccctagcaaagtcttgaactacagtgctggcttcgtcatccccaagaaagttgtctgaggggagaaaccagatggaggacaagtgggttgaatgatcgaggggaatgggcgtaggaggtccagagcccattcgggaccgacccaagaaatggcccaagtgggagaaatagtattctttggcatgatccccccaccaggtggaaggcatcctaaacttacaaaggcgttcatcaaatcctatgggcctatattgggtatactcttggacagaggggacatgatgaattactaaaggagacttaccggaacctgaagtactggcatctggagcaccagtattgggaaccgggaccaagggcttaggcctagagggcctccaatccgtgcaagcttccagacgaagggttctcccagctgcagcctgggccttaatgtaagccagctcctgccgaagtaattatatccactcggagcgccctcagccgaagtaattatatccactcggagcgccctttctgcggctggagtccttacattcggatagatcaccttagaaaggttaaaatcatccaccgactgactctcggatatcagcttggctttttgacaattctctgtcgtgactaaggttggagggccttctgtcgtaagtagagaaagtcttagcccgctggaggaatacttgagtaggcgcagtccgcagatagggagggatcctaacccactccgtaagaagctccggacggtccatggcctagaagccggaggaaaagaagaagcggtggcagtactccttcacatacttttgatagttaaaagggatcggaccctcattcaaaggatgggaccggagtccataaaaaccatctttaaatttgtccccctacttggggacagacacaagttcataaaagtataaaa

SEQ ID NO: 54081 - DNA, 659 bp, Cannabis sativa
tttaattccacatgtagtggatagataatctatcaataaatcacccatgtatctctttcctccaataatattaataataattaaaaaaatgacacatctcaatgttattaatatctcttttttatattattattatttatttatttacatttgcgagaagaaaaagttagcttgtactttaaacaaatccaataaaagttaacgaataattttttttctgttttatggattattaatttttggaaacgcgcccaacagcttagtgattaggccagaaattactaattattaactaaggttgcaagaatctaatgttgggtaagatgatcaatattgattgatcacaaaactttaactacctaacactaaataagaaaaaccgtcatcagtgcaattgttgatgtttgtgcactaagtttctgtttgattgaaggtaataaaatagaatgaaatgaaaaaaaaaattaatttcatttttttatttagttgcattttaaaatatcaaaatgttattttagtagaataagctttctatctgttgtcggaggaatttggacaccgaaattcatgtgagtatttaatgctattaagaacacttggataaaacttgtgagtactcacttagagtagcaagtattattaggttatttttagtatta

SEQ ID NO: 54082 - DNA, 2788 bp, Cannabis sativa
tttaataatatataatatcaattgtataaagtttgtttggaaactttttttaattaaattttttgtttttaaaattagtaaaataaaaatatttcccaaaataatattctatacaaatatttttactttttaattttttaattgagaattaaagttttgaaaaaaaaaataactttcaaaattttttaaaacaatttttttatcaattatttggattcccaccccaacctaaatcttagaacctacacccgtacccggacctagacccgacccggatctcggccctggtcctggactcgacttaaaagaaatcaacaaataaaaacaaaaataaaatttacaaaatgcacttttgttttttctttttaaattaaaaaataaaaatagttatagaaaacatttctatcttttaaaatcaaatttttacttttatttttatgattaaaaaatttaaaaataaaaatattactagatgccaccatatatttttcttctttaattatattttattactcgtttactacattgcattgcattttgacttgtgtacatttgtagtaaaaatattgaaatcaattttgggtcaactattcttaataactaatttacattcaaataataatttattttacatttaaaaaatgtgaatctcactacaaaataaattataaataattagaaattagaaaatatatatatatacatgattatcaataaaattagattttgaaaagtcaaaatataataaaatattaatatagatggaacatcttaaatgaaaagaagtattatatatatattatgtagtgaaagtagggccaggccacccaattaaggggacgaggttcacccaattatataatgtagcttcgtttctgcatacacatcattattaaatataaacataatcatatatattgagattttttttacaaagaaatatagagaattgatagagtgaaaaactattaaagaaaatactattgaatatgaaaagattttatattcactttctgctcaatgtataagagcaatatagaatattatatttcatagattttgttatcaaataattttttctacaatcttgtatttaattgacagatggacttgttctcctaaaaaaaaaaagataacgtgtcaaggttataaatttcgataaatagttctcgcataatagaaacacacacgaagatagttatcgaaataaaggttcatattgtacttctggaggatcttgaagcattcctttagatctttcacatgccccagcctttttggacttgactagcatgtcgtccacatacacctccatatttgaatattttgttcacaagcccttagtaggtggcccttgtgtttttcatttcgaagggtataactttgtagcagtataggcctatgtccatcatgaagcttgtatgctcctgatctggcgatgcatcataatctggttgtaacctgagtgcgcgtccatgaaacttaggatttcatggacagttgtggcatccatcagctggttaattcttggaaggaaaaagtagtcctttggacatgctttattcgggttggtgaagtcaatgcacactctctactttttgtttggttcgggctctagcacaggattggatacccaaagtggatagaatacttcagttatgaagtcatgggcccgtagcctctcgacttcatctctgagcgcttaggcacaatctttgtccaataacttccttttctattgtacaggtcgaaagtttggatcgatgttgagagcatgggtcatcacggaagggtctattccgaccatgtctccatgtgaccatgcgaagagttccaggcctgcccttggaattttcatcagtactaattttatttctgaccctaaacccttcccaatcttcaatcttctagttggagaagtgggatcgacatccagttcctttagctcttctaccggtccaaagttgtttgtaggatccccaaagcgaggatcaatgtctgcgcccccactttatgctagacttcattgccatttattgggctcttcttcagagctcttggcggacatcttctctttcttggttttagacaaagccaagttgtaacaatgacgggcagattttcggtctccccttaaacatcctaccacatgcctttttaggaattttaggcaaaggtggtagatggatgtcactacctttaggtcatacaaggctggtcagcctatcatggcattaagagccaagggaacatcgattatgataaatcgcgccatcagagctctagtggttggattttctccaatagtgaagggcaatctgatgtaccccataggtgcaatgccttggccaaagaagccatacattatttgagtacagggtgccaaatcagttagctggagccccatctttttgtatgttgatttgaaaagaatgttggaggaggctctattgtccaccatacatctttccacagtcatattcctgatttatgcagtaatgattagggtggtaattgtgtgggaaactgacttgagcagcatctccttctatgaaaaagatagtgggctatccaagctttggttgcttagatcccctttcttcgacgaataagatgtcacttttagccttgtgacggagtgtctgagcattcgctccctagatttgttggtctcgcctgtaatgtggggtctgccaatgatgacccctaagtgacccgccactagaggtggcatacgatctccattttaagcaccttgtgcctaaatttagtcattctgcatataacg

SEQ ID NO: 54083 - DNA, 752 bp, Cannabis sativa
gctttgctgtgactattggcgattagacaatgatttttatgtataagtactaaaagttttatgtgtttaatgctatactttctatgtcataatatgtttgtcattgtaatatttagatgagtaattggttatttcatatattttttttctttatttgaatgctattatccaataggataatatttttcgtgaaatacagactatgatactggtgcaccatcctaatgtaaagtctcactgctcttttgtgaatggtcaatttctttgggtagtcatgccttttatggccagaggatcttgtcttcacatattgaaagttgcacacccaaatggttttgatgaagtggttatagtatatacatcttcatggccacatgcatagagatgtcaaagttagttccttattattattcctcattggtcattgttcatgtttttgtcacaattcattgttagctttttttcaaattttcttttgttgcatcaaatgcatataatccaacgctcattattattttgatatacatgattttgtaggctgggaacattctggttggtgcagtacatagtgcatttaagcatggggattttggtgtttctacttgcctttatgattcaggggattttcctcaattattaattgtatcactaaagtagattatacctagcataaaatgtagtatacgtgcctcgcacgtaattttttactagtgatagatatagtaggctaaaaaaaaaagatatacaaaaaa

SEQ ID NO: 54084 - DNA, 2082 bp, Cannabis sativa
gccgtaaatactttgagatgcttcagtttaaaaaaaggagaagaacattctttcttgaagttttcttgaaataggagagccttcatgcaaacatatataaaacatatgaattagtaacggaataatttacaatataaatacttaagttaattaaattttcaattgcaaataaatacttaagtttaacttttgacggtaataatagttaagttatatttatagaatttctatagatacttggtcgttaaatgtcaagtcagatcaatcatacttaaaattttaataatttagatcaatcaagaattgtcacgtgacaatttacttaacacttaacaactaagtatgaagttaaagttagatatttatattgcaaattactcttaataatataatcttcaaacaaagatgagaatcaaataaaagaaagaaaaaaacatatttaccttatccctactaatttgaacatataagttcacaatattccaagaggaagtgagattcgaaagaaattccattgcataagtaaaccaatatatgttgtaattccaatcattaaacattaccaccttttccattggacttattttgaatatgcgatcatcataacaaaattctgttaattctggagctgattcaactacactacatcttatatataatggaatttgaattttcaatcttttcaagtgtaaacttgaaatttttaaacattctaatgcccaacgacatcctctcaaagacaaattctcaagaagaggaatatcagaaataaatgcttcaaatatgtattgatttgcatttggccaaagcaatgagagattctttattttcttgcaagaagagatgtttattgtgcctggatcaacataacaaagaatcaaagattcgagattaatggcttcaatatgaactcgaggattctcgttctcataatcaaatctaagttcaatgatcttgacacttgaattttataatcgaaaattctcatcaataattcggtaaatatattgatctatatgcaatttgtcaaagaagtgcaacgcgaaataaatttagatagtcaaccgtcgtttgttgacgatgaaaatcgacatgacaccaacggtagagtttttaaatgtggaaaattaaatgaacaagaagtatccaattctacttctttcaactccaacacggtcaaatattttgcgctctctactattttaggtaagcaatattagtagcattcataaccatagaactctccacatatgagaagacttattttcttaacctttttgtcaacaacgaaagttaaccatttatctaagaggtcggccttacttcttggataagaaatcgtcatcttaagattaaatcttgttacggttgaacgaccctaaaatgcataccctttttgcagtgatccaggcaatttttcaaaagattgaaggattttttattaaaaatttaaatgcgggaaatggatgccagtaatgctttgaaagaacgcatgtttgaatcacatttttagtatagagaaacgaacggatgttaaagattactccttcaggaagttccgaaattctatcatcaatcgttgtcgtttcaaccattttttttccaaataatgttttatccacaagttgatcaaaaagattccaagtaataaattctgaaacgtgaacagtaaaataaacaattatccaaataaaatatcagtgtttaatcatcaaaatggaaaacactttaattaattaatctctaatatatcaacaatatatactcaataataatcattgttggggtttgttagaaactgttaattgttagattggttagtgtttgttttagcataactaagtcataaccatgtgattgagttttggtaatttgatcaatgctaaaagtgtcatcgaagtgagtaattacctgaatgattattattgacacttgtatatacgtgaaagtaatacttctccaactagaatctcgtaaaagaattttgccacaaacaacgattagtagtagggctgtacatcgatcggtttagtcggtttatactatatattttccaacccaatataaagatcgggttataaa

SEQ ID NO: 54085 - DNA, 603 bp, Cannabis sativa
ttagacctaaataaatataaaaaattagtatttttataatgtgcacggtgcggtttgaacagtatattaacaatttaaaaccgtaaacggtaccacaccgcgcggtttaagaagaattcaaactgtgaccgtactacaaagaatttcaaactatatttttttgcggtgcgggcagtttgagcgatttgatgaacaatcctatctataagtgttaagacaagattgagtatattttctgtatttgttgatgctatagagagtatatctaataacttttacaaaatatatattttgttaaatgatgaaatagtgcttgagatattttttttttaaaacaaaacttaacaataattagagatattatgataaaattaggtatctaattatactaaaaattatccttaaattagttatattttaatatattatggataattaaatttagagtattatttttaatttattatttagtaaaatagagaaagattcggtaaattttacaaaatttaggactcaataatagcattaatccataattcttgcaaatagcaaacttggtatccaaaatggcatcatatgattgtaactgaagatgacgatatg

SEQ ID NO: 54086 - DNA, 695 bp, Cannabis sativa
gtctatctataaataggtagtggtcccccagaaatactagtatgtattctctctctccttccccataagagaaaatactttagaaagacaatgtattcttagaagatcaaaccttctctccaatctccagcaatggcttcaagttagtactttcggtcatcttttatcatcttcttcttctttaatttaacaaaggttatatagaattatgatttagggttttttatattaaagcacttttaggaatatgtttagatctgtgatatatatttttcttgagtgttttataaatcctaacatttctttctattaaaaagtggagtctaaatagtcttttaaaaataattacatcatcatacaagctaggggtgtttatccgatccaatctgcactattttgctcatagtgcatctgatccgcactaggtgtagattctatattttggatctaatacaatccacgtagtaactcaaatctaatccaatccaatccgtaaaagtacagattagattggttattttgaattggttactttttaatatttattaaaaaaaattcatataactaacaacaaaataaaataaattgttattattttatgttttcaacaataaattaaaataaatgaaacaaaaaaataaaaaattcaaagaaaaacataaaaaaaattgtacgtataaaaaaagtttaatttt

SEQ ID NO: 54087 - DNA, 6915 bp, Cannabis sativa
  modified_base (6821)..(6826): a, c, t, g, unknown or other
gcacagtggataagtttaatttaatcagagcacagtgaatagaagcctcatcaacctgtataaaaccatcatccaaaatttctgccacattgctgaaaaatccatgggtgtactctcgaagctcactgtactccaatccaaaaccctgacataagatattcaaacgaattaatatgtaaaacatttggattattatcagtcaaaataaatttcgatctcattacagaaattgcagcttctatgaaagggggcaaaataggctccatcttagctcttccaatggacatagcaactattccaactagctcagtagccctagctcgtgcacggagatcctcatcattcgtaagcactaagaatgttttcatcaactccaaaaccctctcagcatatgggatgaaggcctgttctgcagcacctgcaactgaaccaattgcagactgcaaagaaaatagcagaaaagttaagatattacatagctaaattaacaggggtaccgaccatatgttcatccgaatgttctttcactgctaaattatgggataggctattgtctgaatttaagtcacaaaagggcttatttagataaagcaaagtcaagggtagagagaaaagctttaaaaaactaccgattagtattatgttgcttgttatcgataaaaagagcattttcttaagatgtagggtatttatgagatgaagctaagatttgggtcaattataatttacatatatttaagatgaagttgaagactattttgatttctgattgataaagagggtcaaattctactgtgtaccatcttctaatggggtggaatttgttctcttgtagtacccaacatttaaattaataataatttgttaaaaaaaaatggttattcaatgagctgcaaggaagatgcatggtcttaccatgcatgtctcctgcaaattacgagcgctattttgaagagctcccagtagtttccccatcaaaggatcaagaaaaggaaggatttcttctcccatgttctcgcaaaatgctgccaaagcataatatgatttttcctgtgtatgtagattaacgttttagtcttaacacattcataaacaatctacaacagtctcccagaatttaattttctcccatattattaccttcacttcatctgatgtgtcttcaagggcattcaaaatgcaaggtagaacactttgatagtgagaaacaatttcaggctgcaggtactctgcaaattgacctaatgcaaaagatgcagccccccttaccatttgttccgggtctcttaaggcccctaaaacaatatgaagtactggttccagcctatctttaataaattctgaacagccctctgaaatgacacctaaagatgtagcagcagcttcacggaactttggatttgcattttgactgcttaaggaagcaaattccaaaacaggagaaaagatatgcttcggtagattcaaagccatagtgtcaatgacctcagcagcagctcgatctggtgctagatcatcgtcttcatcactattatttgattcagctagtaacggacacataacttgtagaatagggacaactagtttatgttttttaagggaagcaggtttgtattttgctagccaagaaattatctgaattgcctggacaaaggaaagcatgaagatcattttttaaaaacaacttacaaacgtgaaagcaataaatcaatcaacttaacaaagctgcaccagcagaggcctgctagagaaagtacaaatatatggatgtgtgtgtgaaaaagtgtacatgcatgcatgaaaaagtaagtgtaagtatgtgtgcgaaatagtgagtgtacatgtgtgtgtactataggtcctcttctccaacctgatggcgtgtattagaatccaaactttgactagagcaaacttcaagagagaactggacaatggatttaacagaatctccaagaagaggagcaggagattcaatcagctcgtcaaaaatttcaaacgcaattacagcaacatcctcctcaccagcagcaaggcattgtcgagaaacatttaaaatactgggaatgaattctcgaaacttgacctgcacaagcaaagatataatcaatactgaagagcaaaattaagatatcatgaattgcaaatgcaaatacagacataagctgatagaaaatattggaaataagaacatcccatgtgacatagaattaaaacccttttacatcattcaccatataagaataactacccaggagcagaacattcgccattaatataataatatttcaatctggaatacttgtgtccaaatcaatatcaccactaagtccatcacaattttctccaaagaaaaaggtatatgcataaaaataaatacaaaatcttaaccagactatgtttcctatattacattagtagtaataataataatgataataataatgattttgactttgttctaagatgatattcagaaaacaatttcatggaacataaatctccaatacaatttatttcaccacttttacaaatcagatatcaggaacttttcagcatgtcaatttactttataatattatttggctttctatcatgtctgtttattttgtttcatgtatagtgttctttctacttgttcgctgacactgctctattttatgtgcagtcgacaaggaattaccaaagaagtaaactagaaatgaagcaaacagaacacatcttgggactataataaactaggtttttctctatctatacatttacataatgaagatactcagatatattaagactgtttacaaagaacactgtattcaggtagtgacacttagatcctctagcatcctccagcaatgagactaagttcatgccaacttatgtcttgtgagcttaatttagaattaagctagtttagactttgaaggccttccactattagatacttgaccaagtataaactgatgccagagattttcctaaccaacaaaaatatggataatatatagaaataagtaattgtgactgataaaacaacttgcatgatgcaagactaatagctctttattgtcagacactgaaaaacctttctatttgtttcctaattttggataacatcctccattgatttttatattatactattgtatcacaaagattattcaaacttcaatgtgggcttttatgttctcttaatgctattataatgtcaaagctattacttccagcacacacctgcgaagcaatactcaactatgtttcatactatgttaaataacacaatcaaaagtgaacggacaattaacgtgggaaaacaaatttatctacaaatacatttacaagtaacatagttaaagaagcatgtcccgcaaacaatgtctatggcaaaaatataatcatggtaagttcaatctaaccaccagaattagcaccacatactcaccacttcatcaccatcatgtgtgaattctataaaagatccaactgccctggataatagtaaaacaaatccagtgagcactcaggaaagtttataaaaagctttgttgggggtgacaataactgaatagcaatggaagagacagagagagagagagagagaagagagcttttacttcagagcagcaactctaacacgattgctagtctcatcttgcagacacttcagaagaagagcctgcaaatctgcgaaatgagggcgaaatgaagttccgatcgtttcagttaaagaactgaaaagaatcaatgccacctaatattaaccaaagaaagaaaaatacaaatgcatcagcctcctttatctagtaagcacaccaaccaagcaaaaagatacatactaggaggcgctaactgaactagcacaattgttggcatgaatattttcttcattgaaaaacaatgatattatttctttgattattccctacaataaacgtccataaatattatccactataatttagttgtcgaaatttttagatattcataaatattcaattcatgaactgccaacaatctcttgactttcagtttaaacggtggagaaaaatgaaaactagtatgtcaaggtttataggaaataataagctcccaataaaaagaagaacagaaaaaaaaaatgacattaactcacttctctatgttcctcctgtgcactctgactacattgaaagagaaagggcaatagatcgggccactccccggttggaacagcatattttgcaactatactaacaacattcgcactagcccgtcttacaggaggactgaaaaaaacgtcattataccacaatcattttctcagtttcaaaataaaaacatgaaggagtaactcaaattgcaacggacattaccacctatcgaacactaccttacataaacaaaaaacatacatgaattgagatattaagtcaaagcaaaagcagaaaaatacacacttgtatcaataccaatatattcaagcaaaccaacaactataacaaagtacatgcaattcacttctacaatcaaaagcaaaaatatcaacaattcaaattatttccaccttccctctcaaattttcccaatcaccaaacagaaaaacaatctccattgatcaaaacaaagccaaaaaaaaaacaaaaacctgtgctccatggtgatgctctcaatgagtgactgtttgacaagctgcttaagctgaggcgagagcttagcccaatggccagtgatcttcttgcggaggagaacggcagcgagttggcggacatttggggttttagccgttcggagatgctgaacgagcgcaggcaccacctgaggatccttggcgaggcgcttaatctgctcctctgcttgacgacgagcgtcattgtcaggcatcaggaattgtatgagaagaagctccagcgattgcgccatttttgattgaagttggattggagagaaggttttggagtggctgcgagggttttttttggggttttgggtctgcaatggcttttggttttgcttcgtatttaagggagaggtttagtgttatttagtggggacaattgggatgagaagtttaatgtagttgtttaactttatgtatattattataggttcgtttcgtttcgtataatgtggctcggtctttttactgtttagtgtttagggacattttcacgcgctgtttgcgcctacatacagcccaataggaccactattagtctaagtccaatgtttttttttaaacgaaacgagtcaatggtaaaaaacactcactagtgtagtgttgtaagttcctgagtgttgtactggttcggttttatatgtgctttttaaaaaaacaggtcgtgtcatggcgtgcaaaaaagaaaattatagattgtaccgtgttatgttaatatttttggaataagttgagtaatactattttttttgtatccattaatcaaaaatattctcatattacatttttgtgagtaggttgtcaaatatacactcactctccacttaaatctagcacataatttaagttaacttaggggtataatagaaacatcatttataaaagtgggtatatcttaaagaatatagaaataaaggtaaaaattaaaacaaataaagtaaaatgaatatacaatgtaatttccttaatatttttaaagggtagagtcactattttcgtaccgtgctcggattcatgttgtctttgctcgtgccggtccgtattttttaaacagattagcctattttcatatccaaagtaaaattcgtgctttacatttttcatttttttttttttacaattactaaagtgtatctatattttataattttagttatatttatataatttttcaacaatattttacaaataatcatataaaaaaaatttaccatcattaaaattttaatatttaattataaatactcaaatttttatatcacaccatataaataaattaatatataatattagttttttagttttaattatataattacaatattcagaattatatttaagctctattattattttaatttatttaaaataaattcatgtcttattattaataataaattataaattttttaatatttgtcgtgcttttcgagcttatcgcatgttgtgcctttcacgctagtatggtcatgcttacgtgtcgtgtctttcgtgcttctcgtgttgtgtcatacttaaggacataattttcgcatcgtgccgtaccaatttgtagcatcgtcgtccaagccactacttttttgtgcctagtcgttctcgtgtcttctgagctcatgccagttttgtgccatgtcaaaaagcttggcccgtatttatagccccactctcgagtagggtagttgtaacgccctaatgattaagcacgctacagtgactttctaattacagtgcacacatttgttaatcaaagagctttctcgaaaatcatgataaattaaaattttgatttatctttaaacttttacaaatatatacatatattcatacacaaatctaggatctcattttataaaactttacattcacttttcagacatgtcgcacaagaattacaaaatgaagcccaagtcgtcccgagatcgaactctccaggtcgcaccgtctcaacatgtacaatcattcccgagccctgaactgactgatgttcagctttggcatttcctttacctacacatgaaaacaataattgtgagtcaataaactcagtaagaaaagcataaagcatacaatatattactgacttgtatttaggtatacatacacctaggagtgttcgcgcggtgggtagtgccgtttttaaccctttttttcaaaccaacccgcacannnnnnttttctaattttccaaactgcacccgcactgcgatactaaaaaattacaaaaattgcaccgcaaaaaatggtgtggtgcggtgcgattt

SEQ ID NO: 54088 - DNA, 1362 bp, Cannabis sativa
acaaggttaccactttttgttatgatccatgggaaataaattttatgattgttgttattaactcttttacattatgtaattagtttatagttagtttttatgatacatggaatataagttttaggatcgatttcattgacaattcttgtattttgtaattagttaatatttagttttattgttaacgatcataaaattgattactaattttaaattttataaacgttattttattttattttttattttttgtattatgtattcttagttatataaaattattctaaaatttgaaaatataggtaggaaaaattacatagaaatctgtaattttttttcacctacatttatgtttcattttaaccaacgtaataggtgaaaaaaaatatttcaaaaacttacgcgtcatttcaaaattgacggtataagtttttagtgacagtatttaaatggcacaaatgattttgcgtcatttataaaatgacgtaaataaaaaattatttgcgactacgacatatacatcagttttgtaaactgacgcaaaatgtttaaatgtcacttagaaactgatgaaaatacttatttttgtattagtgaacagacacactcattcaactagccagttgcgccttgacaaccaaggcaaacttggcacctgctcagttcttcaaagaactaagtcttgttccaaaaagaacagatatgctagacaaccaacacagatacacctacaataacataccttcaaacaaagaccttggcagagagtaaggactaggaggatagctacaaggtgtccaatcctacacaacataacacacagaagtggtattctaacaccaccaagagtgtttctaagaaagaagttgctagctaatgacagaagtgcacaaaggctcttaagccgggggccaaagcctatcgaatgcagacgagatccaaccacaacatcgattgagcctttagaaggctggccgaccatatcctcagcaagctggccaaccatagaatccataacctggccagccattacctccacatgctggccagccatggcctcatccaactgtgcaggaaacgctccctcaatgtggctggccacctggtcttgccctggctagttcgatccaccagcagactactctcatacttctctacatgacagaggtacacaacatcttgctagcaggatctcttgacaatagggaaagaagaagagaccaagccaactcagagtagcatggctacctataaagagttaacaggcccgtcaacaaacagatcaaggaaaggaatactttgcaagagaattactccctgaagaatattccttaacaacaaatcccttccagcaagcatgtt

SEQ ID NO: 54089 - DNA, 1214 bp, Cannabis sativa
  modified_base (748)..(762): a, c, t, g, unknown or other
tacccagaccggaactgagacccgcacttggacctaaatcttggacccgatcccaaacacagacttgaacctagatagggatctttatacgaacctttcctccgaccaagacctagactaggatcgaaatactggacctagatctggaccgagatcctgacccagaccctaacttggacccgcactcacgacccgaactttgacctggacccaaacctagacccagatctgggtccagacctggacacaaacccgaacaaagactcggacccaaactcaaactcccacacctagaatgtgacagaaagctagacccggacccgaacccaaactctaacccaaacaaggatcagaaccaaggacttagacccagaactaaatccagactcagatcgggattggaacttctgatctggacctagagttaaatccggacccgaaccataactcagaccaggactcgaactctgacccgaactaaaacccaaactcgaactcagaatagcaaatggaactcaaaccgaactatgactagggccaggacaaggacctaaacccaatccagaacccagattaaaacccagacagagacctaaacccgaaccaatacttgggctcgaacccgaacttagaccgggacccaaaccaacacaataaccgggacctggacccagaatcaggatagggacctgggaaacagatctaggaccgggacctagtacccgacccagactcgaacttgaacctnnnnnnnnnnnnnnnacccggcactagaaatggaactagactgggacccgagatcgggattcatatctggacccatggcatggataaaactcgtagtcagtgtctggatttcggacccagccttggattcaaaccctgagaaggaaccgaacccacacccagttctgaacaaagtcaccaacccaaaagtggacccgaacacgtaccctgtgacctaaaattggaactaaatctggaagtttaccgggactggtactaggacttggacttgaatcataactgaaattggacatagatatagcactgtaaccgtactccaaatcagacctagacccgaatagggagtcggaccaggatcctaaccgaaacctggactagggaccagaatacgaacctgaactcagacccaaacatggaactagactaggaacacagaaccagggacgggacctagaaccgcaccctag

SEQ ID NO: 54090 - DNA, 6103 bp, Cannabis sativa
tttttccttctaaacatgatttgttaatgttatcctagcaactcttgttttatactgtagtgcttcttcaacttacaaagatggtgtaaattcataccactaattaaagctatgctgtacttgttacattttcttgggttgtttaatgttgtataatgtatacttcttgcatcagcgattcatgtaagctaagtcctttatggaattagacgtgtcaaatgtcaataaatcataaaaggtagctgctttttgttttaattgcaagttggtgacatgtcattatctgactcattttccacttggctgactgttgttgtgctaatgtaaaccaatggatcccactctcagagattaggaacaatatcttattggtatgcattgtatctgtctaccttgattttgtctgttttgtatttgttaattgcacattatttgttgataagagtgttattttgaacatttgttttacctttttcaacctgtgttccaaggtcagtcttgacttaaaatcaagttagttgtagtacaaattagcatactatatcaattagcctacccctgattgtagtactagtaagtcatacaaagaactaaatgtggatttactcagccttctagttaaattaatttgacaatgagtttcttttttttttttaatcaatctggaaaatatgagtaattgagcagtcaaacaattaggacaaaacctttcgctgatttacctcttcaagttttttccgatcaatgtctcatagtaacgaacttattgattcaatttatatgtgtgaaacctgcaagatcaccctggtacgccatacaatttgcaaatagatcaagaaaagtgttcataagttcttattcaatccaagtgtttggataatataccatatatgttataaagatgcatgtggaagtgctttcttatataattccattgtacattttcttaatctctctcatgtaagcacatatcttcgtctgttaggtaaaagcacattggcgtgtgctctgagtcatggcctgcactcaagaggaaagcttacttatgttcttgacggtgacaatgttcgacatggtctaaatagtgatcttagttttaaatcagaagatcgtacagaaaacataagacgtattggtgggtctatattagtttctgacacatatttttatataaaatttagttatatttttctctaagtactcttttttttttcttctcttcaaaaggcgaggtagcgaagttatttgcagatgctggaatcatttgcattgctagtttaatatctccatacagaaaagaacgagatgcctgccgtgcactattaccagaaggagatttcattgaggtatgtggttatcttaatgggattttcttttgctgattttcagtataattgaacaaggacatagtttctatgatattctatactattcttgttgcaatatcaggtatacttggatgtgccacttcaggtgtgtgaaagtagagacccgaagggtctttacaagcttgcacgtgcaggaaagataaaaggtatatttctagaaattttgtattaattaagatatagtctgtttgaatactttgttttgaaacattaatttggcatgctgcaggttttacagggattgatgatccgtatgaaccaccatcaaattgtgaggtatgttaatagaggaagctagctcaatacaaaaacttgagattcacttttgctagaagaaaccctttaagtattattttctgcatattgagccaaaattagggaggttaaaataggtacttctttgttatctagtttaataatttaatgattcaactaaatgtgtcaagtttttcatttattttcttcacttttaaacccgtacgtattgttattaattttttggttttcatctattgctcgtatattggtatgagctttaacgtttacactaattatatgtgatcagttttttagctacacaacataatgattactatttaagtaactttgaaatgatatgcaatttgaaatcatgccccatctgtagtacataagttgttcatttggttgagtgtcgtggcaccttaggattacttgtattattctcagtattacgttaatttgcttttgcatttgtctgttatattactcagatagtcttgaaacagaaggcaaaagacatagtttctccatgtgaaatggcccaaacagtgatatcgtacttggaggcaaaagggtatctgcaggcctgagagtcaaacagcaagaaggcgccactacctggtttccaaagctattgcttccccagtataggaaattcctcgtttcctaccatatctggttccggtaattaatcgatcaattaatttgttttaatctttgtaagtcagtttgtgttgtggttagtggctccctattttatattagtaatacaccccaactatccaattgaattcatatatggcaaaaggagtttcatcccacttcattgccatataaaaaagttagggaacaatatttattctagcaaaaacaaataaaaggaaccagggggaaggaattggctttgttctattgtgaattatatcagttaataaatgaattctagtaaatgagtgaagttcttgctaaacatttgttgatatgagtaatgtaaatgcattgatttgattgatcagttctgccattttaataatgaaaaatagttagcagattgatgaaccttggttagtaatttctggctcggtttatttgaaaaaggacctgaactactgtgctttgggctatactgaaaattgaattatatattctgctagagatgttatatgagataactcagaatgtactgcattctacacttgctaacgcaaacgaacaatgctaattctactgagccaaatacatagaaatttataactaagatcataccttagcttacactgaatgtaagtttctcaagtaaccaggataatagattcaattataaagaatggaacatcagttgaccttggcaaaaacccttctgcttgtctatatctttatgaataggcataaggcatagcagataagaaatccagtcctctgtgacgacgaagggagataaagcatagcatcagtgaagtggttatggacaccataactgagctcacaacatcgaaagtgatcgagaatcgtctctcctgaagaccccaaattgtccaaagaaacatttctaagcgatccatccactttggaattccttgaactagcagaatgaaacacagatgaaggtggaaagatgatttgaaaagaaagaccaaatacacactccaagattgcaaaaaccaatccttttccacttagaagtgagaagtgatctgtctaagcaaggaatgatgatggtaggggatccttgaactcttttatatgctttttaactcttttttttttttgaaataggaaagttgggttttgaagagagaacttattttacgttgcttccaagttgcttcttaatgtcatactttctaaaacaaagattttcctaaatccatgaacagccaaaaaaaaggggttgcttggaaggaaggtaataataattttggcttggaaccttgttaagttgtaactgatagaactgatattacataggaactcaaaattttatatttttaaaatttatatattgttatgttttgtagttttccactaagtgaccatagttgatggtgaagttggctaccaaaaattctaaaacagagatagagaactccccactcttatgtgacgtacaagatataatgattgtggttttggccctttggggagcaaatggtagggactagataagatcttaggccttagcaaataataaaaaaaaatcaatgaaaccattagttatgttttctaaaacaaactattgttaaatttaaattttagtggtattagattagagcttttagagaaagaaaaataagttttttgaagtagaatgtgtgatgctgatgatggtattggattgaaacctgtcattaagacttttagtgttaaattattttgtttagtatctgtaattgctcttccaatttgagattcctattctaataattttagatcattgttagaggtttgtaataagtatactatccaggttgttcttaatatgtatttttaaatataccaattttcatttttacaatgtacaattaagatcaagctagctatctaacatgatgtttagtttggtaacggtgataaatggtttatccaataacgattatccacgtttaagttggaaaacgacatatcagttttaaatataatctacaataacggcacaattttatttggtaacaaaatgttcatcaaagattcgaaggtggttgacgttgtttttttgcaacatagcttttaaaaatgtgttactttaagttaatgtagtttttgaagatcaagttctataacattaaaaggtttttaaaatgtaattttatcagtggcggcctttttctatttcatataaaaacaaccaataataacaacaacatagaatcaaatagtttggtacgggtggctaatggagacaattcaagttggaaatttcatttgcatttctctggcaagagagggtagccatctctctcctctaatctttttcagttgggctactctttcctcttccctttttgctgcttcctttgctgctgcttctttagcttccattctagccaatgacttctggcatgcttttcttgatgcagccattatatcttctccatcaacagtaacagattggagtctttttttgaactgtaacccaaaccaaaaagaacttgaggcaatgtcataattaaaatcaggtggaaagtaatgaaatccatcatacataataccttctttgatttctcatcaatttcttttccgggaagaattttcggtcttttccttggttcttgaggttcctctggtcatataaacatacttttcaattacaatttctcaaaatttcatgacagcaactggcaagattaaccgggcaagagaagaaactcaaagtgtaatatggcaatttcgatttcaataaggtgtgctcaaagcagtcatatactgattgcgacaaagatcttgataagcaaaccagttttgtagaatgcaacttgtaaaaaaaaattcacaagacaaactaaactataatgcaagatgagcaagaataagataataaattactaatatgaggatgataatgattaattaggacctggtgtgtaagaacatgtaagcttggctgagcaaagaagaagaaaaatggacattcatggtaaagagtccccattatgagtatttcgaggcttaaagcccaaagctttttcaaatgaagaaaatggtgattgacagttagttacttaccggtaggatcaagttctattccagggttagaattcttaaacaaacgaattacaccttcattgatggtatcgtcaactggttcattaataggatgatctttcaccatcaccaaactttcctctaagatttcattcaaaagcttctgtgcctgataagactcaagacacttatttaagtcaggaaaccttaattattcactcattatattccattgaaatttcttcaatgactatcattcagcataaaaaggaagataaaagccagccctaattcaatatattattcatacaatcatttcctatagaactcacatagcgaaaaacagaaaaatgaggagattaaaaaggaccttgatttggtagtgtttgagttttttgtttcggcggtcattgccatcatcggccgaagtaagacgtcgcttggcggccacgtcagaagagccattaataatggaagagacgtaagtagaggttgcggtggccactgaatcgattgctgctctccacgcggcatctccatcttcctcaccactactactatcactcgggtctcccattaccaattgatgactcagttcagatagccggcggcgactgagttccgattggcgaagttaccgcctacctaaaacctcagctccagcaaattactggttttgggatggatattaccagcatattgggcttggaaggccttaattaaggatgggcctagatgcaaaataaaaaggg

SEQ ID NO: 54091 - DNA, 820 bp, Cannabis sativa
  modified_base (42)..(46): a, c, t, g, unknown or other
aacctccttccactcctttgccttaatccaactcagcgcctnnnnnacacccaaggcttccaccatttcgggctgcatcactcctgaatgcaacagctaaacgcctcgaccaacgcaccaattttgtctctaattattcctgcgaagctataagttccattctctaaaaaaatggcaacatcgacattaatcttcaaggtattaacagctagtttgatccatgtttcatccccatctacatctgtaaggaaagaagcagtgggaatcataattgtatcttgagcccgagtccaatctgtgaggagggctttagctaaatgaacaacgctctcaaccgtggggattttcttagaccaaactaattcattacgatgcctccatatcgcccaacacgtcattgcagctagccttcaattttcctcatctacctgctgtaggaccgaagcaaaccagttggcaaaagaaccaactgctgtaagattaacaccagcagtcaactgttgccaacatgccttggcaaaagagcaatccaataagctatggtagattgtttcatcagtttctttgcacacagggcatacgacatcaactggcacatgtctagagcggagtcttatttttgtaggcaaacaattagtagcagcccgccataacaagtctttcacttttgggggaacacttagcttccaaagagtattccaaaacatggaattatcgtcccgtgccccccaattctttgctcacttgcaagaacttataaactgatttgactgaaaaatagctccagctttcccaactccaataccaagcatcacataaa

SEQ ID NO: 54092 - DNA, 1874 bp, Cannabis sativa
taaaattaaaaaattataaattttcaaataaaataatattaggtgtgccaatataaatgtaccacgggtacaaaagtgtcaatataagcatgttggcaactatgaaaaatagacattgaatttgctaacagttaaataatttggaagactttactattaaaatttgagcttaaagaattaagtataaataaaataataattgagaaaatttagcccgaaaaaactcaacaaaatatatgctctcttaaaatgatctaattaaactccatcctactactacctattaattatgataaatattagatgtattatgattaatctataaatatttacatcaagaggagtttgatatttattgattttatgaaacgtgttaaaattaattaattaataaataaatattatttgtttaattaataaattttctataaaacataaaatgatggcacacaatgattgtgtgagtcctcacgcacaatactaaatgacatagtcttgtagtatatataatcatatatatattcagtgacggacacaataataagagtgtgggggctatagcccccactaaaaaaaagttagtgtgaaaaaaaaattaaatattttctatttagttaaataattatacaacaaaatagtaaaaagcccccacaaaataattataattttaatgtaaagtaaataataaatatttttttaataattaaacccccacaaattaaaaattctggatccgtcactgtatatataggaaagaatatgaaaaactcaatcaaagtctactataatgaaatgagggagctgatattatggacttacatatctgaattaatgggaattcatgtaaataagaaagaattaaattcaagtactttcatctaactattttgaagtgtttttttccaagtcgatgcaccaaataataggggagactcgaacaccacacattattattgcattgaatttttctacacacgtcttgaacgttatagactagtcttctcacaaaatatatcagaagtaaatgaaaacaaaacaaacataacttttaaataaaaacattatgttatttaaaattaaaagtgtcatattattattgttataattaaatattatgtcttattacaaataatagatatatatatagatttttgttatgtatagtatatttatttaaaataatatttagtttttattttattatatataaggattatatataaaaaaatttgtatgtatacctaatttaatttaatagtaaatatatataattttgttagtatgatatacatgtttttttaaatattaattaatttagtattattataatttttatgtagtatataattttaaataatatttggatggagtagaaaaacatccctatgtacagataaaaatattgtcaacgtgttatttaataattttattaaatgctctccattcaagtttttttcttttttcttttaatttttaatcaaatactgaatttctctgcaccctcaaatacttcttaaatggaatttgacgtgtgatgtgcagaataaaatccaaaatcacatacatgtataaacatctgaacattttctctatagtttttcttttcccatggtctaagaccattccatccatagtcttttccatggtctatgaccatttcagtacctctttatataagccaaaagtagtttctttcgatgatcttttgaaaaattccatttcaagctgagaaaaaacatacacttcaaaaaaaaaaaaaacacataaattgtcctaacttacaatccatacacagtcaagaaaaaaaacacaacaaattatatgttatcatctcagcacagtatatatacgtttagacttctccttaaacccca

SEQ ID NO: 54093 - DNA, 722 bp, Cannabis sativa
ttctttttttttctatattttttttcttctaaaattttctaataaaataatattttttaagaaaaaaaatcatattttggtaaacttataattgatagaagtcatagtcacagataaggcttcacattttacatactatagtagggccacattaattagaacaatacaaagtcattcatgctattattatatggcccaatagatactcaatatcactatcatgactaacatttgataaagagtaattgttgattttactccttgaattttttatagaaaaaataatatatggggtaattctctttttttataatgctatttgttccttaaaatatacagtttattaagaattttttctaaacttttatatttacaaaaatttaatccttctgttagattttgtcctattatttcatttaaatactaacatatctttgcaaattagtaaatttgtaacttaaactttgaatactattaaatcgtatcccctcaaaataaaaatataaaaaaatatatttttttagtaaatcttaaaaaattaatttagttctaaaaaaaaatcattttgaataattaagaaaattaaaacgaaattaaaattttgaaactaaataactaatttaaaaaatatatttatttttttattaaaaaaatctattttgatataaaaaaaatattaaaaattcaatttttataaaaactaaattttacgggaacaagtt

SEQ ID NO: 54094 - DNA, 1111 bp, Cannabis sativa
tacctatatattttcctctttttttcttagtttttcctacactttgaccatgagcaatatctctcaaaaccctagctttagcctcactcttactgaagaggaagccttgattcataattttgatcatgtctctctgagttgcaatcttcaatccgagtttttttgtttagtttttaaatttctcaccccaaaaacttttagcctgactagattggtaatgctatgaaggatgcttggatagctcgctttccttttactttctcagagtacaactctggatattttctggtctgttttggttgtgagggtgattgatggagagttgttgagggacaaccttggcattttgattgttcttgtaaaatcccaaaaatcaaattttaataattggggaatatgttataaaatatgggataataagtatgtcatgagtattatgggtaggattataatcttattaatctaaattacatggtcactaagatttttgatataaatgactaaatacgcgtaatttattaaatacgaagatttaattagaatatgtgggtatgatatatgatattagtaaaataaaatatttttaggtccaacaactgtggagaccctatcggtggccagaaatatcacaacggtattaatttgtggtaccaatggttttgttaggtatgattaatatggtgtgtatcgaggtattttgaggtaattagttatgaaaaaattacccttcagttaagaattacttaagaatgaagttagtggataaatagccttttcattaagtttttctttaagttaattccttttctttattggtgaagtgtgtgcgggtggaaattagtagataatactagatttaattagttggataaacttaagaaattaaaaccaatccttactctctctctctctctctctctagggtaagaaggaaccaaaaacccaaccctaagtcaactaaattctaatccattctcatcctttctctcaagattttagctaaggtaggtggtattgcatgaaggaagaacaaggtaactctagtctttagtctctctttgaattgtaagagtttgagtttgggtttgtgtgtgttttaagtgttttgttt

SEQ ID NO: 54095 - DNA, 904 bp, Cannabis sativa
ggccaagatcatcgatgccttcaaatctctgggagtcaaaatcgtccacgacgatctcttcgaccaccatagtctggtaagtgcgattaagttggtcgacgttgtgatttcaaccgccagcatgctcagttgaccgatcagattaagttcatcacgaccattaaagaagaacttcaaggcacttttcgaaagaattaaaactttattcaattaacaaaaataataatattttttataattatatattattttaatcagctatatatatggaaggtggagcttttcctcgtcttaagaagttgacgattgaaagttatcgttacctccggtgcttaccaaaagaaatacccacttctctttctgaactacacattttcaattgtccattgctaaaaccacgagtggagagggagacaggggaggactgactaattattgctcacatcccaaatatcattgttaaagacagtaccaggtatgatagtttgactcgtcttcttcttcttcttttttattattttctattttatattttgtaattttctgttgtaaatgatttagttatatattgttagaatatttaatggttgtgagatgatattaatatgtttgtttgacacaattaatttatattttaaaattaagatttcattcagagtttcatcctttatattgaacaataacttcaatcactttggttgcttcagaggcctttttggaaattcagattgattaattggttgctgtactaaatagatagaagaacaatcatatatggaattaatagacaaatctattcgcagcttctgtttgtgactgtgttctcttctcttatcagcttagatacttttctttccttttaaatttctaattctcagttattggcaatggcagtgttgtgatt

SEQ ID NO: 54096 - DNA, 1040 bp, Cannabis sativa
ctatatagtttaattcggttaattcttccatttttatcataataattttaaatgattgggacgatcaattttcccaccttataattaattaggtgtgttatattatatatattttatgttatattatatattgatcaggtagattttacctgaatttgtatagatatttgtgaatgcattaattaattatacgtgaaatgctttgcttggaaggaggattcattattatttaggatactcatatgtactattaattttaagtttgttttgaaaaattagcgacaaatttgtcacttactgatcacgtgtgaaaacgtatattatatgctgatgtgtatactgtatacaagtacacatttatgtataacaatacatataatctctattttcgagaagactttttttttttaaaaaaaaaaaggaaagatataattgattaagataaatctttttttttttttgaaagagattaagataaatctactggtaggtcaagaagcactcaaaaattgtagacaagtttatgtttaaatacacttttttaaattagtaatagaggttgttagtatgtggacaataatattcgtcaatcgcaaaatgatgttataagaaccactactaataatagctaataaagaataaatatctaataaaattgactgaaaacttaaatttatgtgaaatcataaagatacccgagatcagacctagatgaatggtaagcagctctgccacattaacagaataattgccccataccaaatgaccaggccaaccaaaccacacttgtagcatcctatatcactcccctcaatccaacaaagcccctccctggaaccaaggttccacaatttagataggtgcaattggatgttcaaggatcatctcgtaggaatacaggaaatccaaatggacaaccaaacaatcgttcaactcttcctcctcacccaccacggggtccttagaggacgagagggaaaaaatgtacacttatttgagcaaaaattgtgtaacgccctaatgctaaggcacgctacagt

SEQ ID NO: 54097 - DNA, 1410 bp, Cannabis sativa
tgcttctccttgttgctgaaatccttttaagcttcctgatatgttgcagcagtttctgcaactctgttgctttcgtcccccattgcagcctctccttccattctacaagacacctgctgctgtattcacattgaaaaaataggtgttgtaccgattcattacctttcccacagagcaaacaagttaaatccacttgtgtgttgtacttgcttattttgtctttagtcttcgatttatcccacaagactagccataagataaacttgtgtttgggaatgacaagtctatcccacacatgtttgcaccaatctttcttctcgggcttgctaaacaacaatgaataggtgtttgatatgctgaatttctgcataacaaaggcagcccgatcaattttagctttcacctgattcttgactccaaccaactttttccaaaaccagctgcaatcggtgggggcttcataatcccaccagcacctatctttcaagtatacattatgtatccatttgacaaacaaacaatctttcttgctagctatgtcccatacatatctagtcatagctgctgtattgcatttctggatatctctaagtgcaagtccgctagcacttttggggagacaaacatgctcccaagccactaaaccaggacccatcgtcatttgagttcctttccataagtaagatctacatattgcctcaatatccttgagcaacttctttggtaatatcataatctgagcccagtaagtatgtatagctatgagtacaacattaatcaaagttactcttcccatgtaggacaagttttgagaactccaccctctgattttactaaccatcttctctaacaagatctgacattcaaaattagaaatttctttgagcagataggtattccgaggtacctgaatggtagggagctccttttgaattgtgagacttccaggattcttccaacttcagtatctgacatgcctgaataatagaccaccgtcttctgctcattcggcattaaacccgaagttgaagagaagagtttcagccctcttaacatcaacatgattgagataaaatctccatgacagaacaccaatagatcgtcagcaaagcacatgtgattcagtttcagtgatgagcatctttcatggaatttaaagctaggcatttcaccaatagtttatgatagttggttttcagttgctatttaaatagttgttcaaccttttgatttgtcttttggtcatgtttttgtttcagcatatgagcactatattctattaccttaggaaaaaggtaagtattcttctactgtaacattgaattttgcgacaactgattgtctttttgatgattccattcaagcgttgtaccacaagttcaacaaagccaaggcaatgaaaactaagat

SEQ ID NO: 54098 - DNA, 1329 bp, Cannabis sativa
tggcctatcattgtattgaacgctaatggcacatcgatcactatgaattgagccttcgttgtcctttttgtaggaatttctctaattgtcaaaggcaagcagatgtatctcaatggtgcaaggccttggccaaagaacttgtacatcaattttctacagggtgctagatctatcaattggagccccatcttttcataaaatgtcttaaaaagtatgttggaggaggctctattgtcaatcatgcacctggcgactgtcatgtttcctatttgtgtagttatgaccatggggtcattatgagggaacttgacctgagtagcatcttcttctatgaaggagatgacaggctctccaagcttaagctacttggatttttttttcctctacaaccaagatgtcacttttatgctcacgacagagattccgagtatagcgcctcatggccttgctggtttcgcctgctatatgcggtccaccaattatggcccctaggtgacctgccattagcggtggtattggatctctatttttggcatcttatgcctgtgtttggttgtctttcatataacgacgcagatgggcattgttctttctaatcaagaactcaatttctatctttaagtgcttgcactcgttggtatcatggacaaaattattatgaaatcggtagaatttggaggtgtacctcttaatcatttccctccttatgggaggaggattttggtatggaactatggactttgtagcggcatagactgttttaggagttgttgttaaaagggtgaagcatgtaaagctcctttccatctcctgagagtcttgtggcttaggggaattattaaatatcccctttttgcctttttcttggccaaagtttttgttgccacgtttgcctccattgtttttgcctttggaggactggccagaactaatcatgttggcaggtatgtgggacaaccctcagcactcaagtcttgtcctgatcatgcctgtcttccacctttggcctatcaagcagcttcttcaagcttgacaaagccttcttctcgaccaaagaaatcaaccatgttttgggttgaatttcggtgaatgtccatctacaactcacttaaaggtagtatgccactcatgatggcagtgtaccttcctacctctgtcagattcttgaccttggtggctttggtcatgaatctttggaggtagtctttcaaagcttcccctggcctctgtttgacctccactaagtcttctagcctataatgaatttgttgagaagaagagaaatgtgtgtagaactctcttatgaaagagttccaagaatcaaacctt

SEQ ID NO: 54099 - DNA, 533 bp, Cannabis sativa
atttctacactacaagctactacattacactacaacactacaagctaccacaatataagttacattactacaagctcccatatacgaagcatcaatggataaataattttttttttttaaaatcttgtttgttgttgttatatctagtttagaatgttgtttgattgcttgatttgtgggttgttggtgttatcttgctgttttgtgtgttgtaatgttgctatctgtgaataccacatttttcctagtttctgctatttttttcgcctggtctgatggtggcccgatattttatgaaaatgggatgacatgcctaatgtcatcaacctcaaaaaacagccttccatcgaacatatatcgaactacatcgggcccacatcgggcccatgtcatcaaagtcaaaaacagctatgatattatacccatcggaccctaactctgaacccatcagaccatatcggactgcatcgggcctatcaaactacatcgggtacccttttcacccatcggacttcatcgggcccacattgggc

SEQ ID NO: 54100 - DNA, 884 bp, Cannabis sativa
aattgggcaattttttcattcccagtgcatacaattactgcttccaagcatgcatggaaaattgcgcccataataagaatgtcatcgtattgtttcatcattcactcccagaatgccgatattctcatagtagcgatgcattcctaacggcaaaagctcatttctaccgattgcatcaaatatcatttagaaatactctgaatgatgttataaagcttggactatgtgtaggaatgtctacacattctataacttcttcgaaatcgatattctatgtatactggatcatcatagaatagtaatggaacaaaagtttgtgtccttttacaggaaaattgtcaatgtttattctctttcttcctcgccttcttgagctactcagggtcggccctgaagaaatgggggcctaagacaatataaaattttgggcctcttaataaataaataaatatttaaagaaaaaaaattgacctaaaaaaattaagagaattatcccattatactattttttaacatttttttttaaaatttacggtttggattacacgtgtagttgctctggtagtttttatgtgcagtgctatgtgctacaatttgaagggagttcaagctatcagcactttagaaatttgactagaagaatagattttttatttttttatgaatcagaaagtttatattgctcacaatcaactttacaaactataggcaccactcaaggtccataaccgactatacattagctcatggtaagtacttacatgttatgttaaatcagttttaatatatactttctttttatttacaaatggtgaaaccactctttacctatttcattcactttcttcgtccagaattgacagccaccttggtttgttgcacca

SEQ ID NO: 54101 - DNA, 1478 bp, Cannabis sativa
  modified_base (103)..(110): a, c, t, g, unknown or other
cgtacggtcggttttatacggttataatttctaaacggtcggttacggttttcgtaaaataaaaaccgtaaccgaccggtcggttataaaattttaaaaaccnnnnnnnnccgaccgattttcacccctaattaaaattttacgagcaaatagtgcaaaaaatacaaaaaaaatgcaataaaacccaaatctgtttttttttttcaagaaattaagcaaaacaaattacgagtaagaaagagagggaaggaatgagttgtaagggggtttgtgactgagctttcgattttgggtcttggttgtgtgtttaagcttctgttttctaggttcatagtcgattttaggtctctcggtgcagtcaaatttggtagcctcgatctcttatgcgtgcaaaaacgagtgaggaagatagagaggttgaaagagaaaatgagttaaaggaaaaatagtgttttcaaatggcgtgagcaattttggagtcaatgcaaagataggcatgaatttgttagggtgtccaactttgagtcaatttttaattaacactcacttttaagcataattatctaaattttcctacttatatgtgcatatataaatcacatacaaatttaacacacaagtcacttttaataagtgaaacattccatataaaaatagttaattaaaattacttgtcacagaagcatgtcaaatttaggtgtacacatataattaccaaaataggttgtcttcttccccttatatagagtctcagtaggggtggcattggcgattcgtgttcgtgtgaagacttatatattacaagcaaatgtcaaactcgacccatctattaattgcctcaaaaactaaaacccaaacctaaacagattgacctgaaccgactcgttttactcgtttatataaagaatcatatttaattttggtaacttattaactcattaacatattctaacaaatttaacacaattacaatattattatgacacatttataaacaaattaacatatttatctcatgtttaaacaaaacatataattcacatataataaatttaagactctatactcttactcatacataagtcactatcatatcattttcaaatttaaaaaataatccatttaacaaacgggcagcccgacccaaggtatagacatgctaggtttgtgcatacaacccacataaaggcccaaattttttctccttttgtaaacacacattatttttactaataattttaaaaaataccacatttttttctaaataaaaactaaaaaataatttttatcttataacccactaaatttcaagaccaatcctacaaacaggttaactatgtaaacccaaaaataatctaaacccattaacaacaaatccaaactcatttctttcgtaccaatttcaaatcatgttatcgtgtttgactcaaagtcccactctttgtctcccatcacatcccatataatttgacacgtaa

SEQ ID NO: 54102 - DNA, 1671 bp, Cannabis sativa
  modified_base (584)..(601): a, c, t, g, unknown or other
ttcaccccttttagcttccctttttataaattaggatgaaaaaagggaagctaaaggcttacattgtagtagtgcctattttatctattttattagatttagtgaatttagtataattttgtgattttttttttttttagcaaaagtcccacatggtttgcagatgatgagtatgttgtatttctaagctataaattaagtagtcttacattcactttattttgtcatgggtgattgaaattgaatatcaatcttgcctaattagttataatttaactaattaagataagaaataaaaaataaatataatgatattaatattaaaccgaaacatgatcttccttcaaatcaatatgcatgcatgcttatcagaactaaaaatcaacataaacaagaactaacacatacttgaatcttcaagcacaaccaacagccacaattctttattccaaatgtgccttgcaaaatcaaattctgagaattaattagacaatacactgaagcttctttaactaattttcaactgtggattgtatatttataaggcagagaagaacccattaagtattattattattattatnnnnnnnnnnnnnnnnnntattattattattattattctacaacactactcttttttttaagtgttgtactcatttagtacattcttttgggaaatttttatatatttttatatatatacctaatagtagtaaagagctaagtggaaggcacttatactaaactaattaacgtatgtggttattataataattaattgaagcataacaaaatttaatttataagtgtttagtttttttataaatagaaatacctatttacttaatatatttataaacatatatttacccatttattataatatactttttaatttaagagtgacaaaatttattattgtatcctgcgtgtgtaaagacggaaccacaaccatagcaagagtggtcatgacctcctaataaaattaatgacgaataacacataaaatataaatagtctctaataatacataatctaaagtatatattataaaatataaattaattatttagaaagaattaacactttaaattaaatttatacatttagaagttaaataaaataaaataaaatagtggcttattaattatttattttctattacttaaattaatattttctttaattgtttatcaataatttattattattactacaaataagtatatttttctaagtaccacctattacttgttatattttttatacattttgcttaaaataatttaattatagaagttaactgagatttgtcttctttaagtgagtattaatagaaatagaaatattttattcatatatattttctttgcttcataaaatatttaataaattttacaatttatttttcgcgtgctaactttatcaacatttacaatatgattgatacaatttttttaaaaaatttaacatttccttttaaatatttttttaattttttaacatgttatgaaatttttgtttaatactaaaatttgaaaatttagccccctttacatttaatttgttacatgaaaagttatagggactagttagcaattgttaatactagtataaatatgtaatactattacacaaatggaaatcaatgaatgaaatgagaaaaattag

SEQ ID NO: 54103 - DNA, 1293 bp, Cannabis sativa
aaagtccctacaaaaccataaaaaaacatctaataagggcattatagtacaagaattattcctttaaaataaattaataatgataaaataacctataaataccaaaactatcataatattattggccataaattatatagggtgatagaataaggttgaaagaatcctattgatactatcatttactcagcccctaaggctgaggaaatgatctctgttcaaaataaccttttaaactcatacctcaacaactactaaattattgatgattgaacatactgaaccttaaatgacttatttaatgaaagtgataaaaaagtaataagattacatataaaagttgtgttaaaagttaaatttaaactgtctaaccaattattaattatagaattttgaaaagggagttaaatatattaaatttaaatttaaactatttagcgaaccatttaaagttgaggtttataactgaacaagcagtttcttttgtgtaactactgtgaaggcagtcattcaatgtaaaatacaactaaaacatgtgattataattaaattatttaataaatgtcatatcgttatattctcagggttatatactaaatctgataaggacgcatatcaattgagtttattaatagtcattgtgatgtatctcacttatggaaaagctacgaatctgttgttttaataatttttagttagtgaacctaccaaagctcaaaattaattaaaatatcataatacaacttaattatgattcatgtaatagacacttgatttatgcatgatctaagaacaaagaacaaatgtggaatagtgtatacatgatgggccagtagattgattacacccaactcgggattgggaaaattgcacaggtaatacttcaaaatatatatgtatatatgtatataaatcatatggatggaaaattcaaaaccagaaacagtagatggaatatactatagtaaaataggaccgttgaaatagttttgaaaaatgaacaaatacagatttaatataagaaacaactactagatatagaagaaagtaatacacatgtaaataggctacttaagctgaataaggaatatcatcactagattatacctctgccagccattgcagcaccaacaagaactgaaaaacatagacttaacataaaaaagatggaaataagaaagtactaaactaataaaaggacaacagaaaaccacagaagacttcagtaatgcagaatacaattcatttcttgtattttttagtagtggcggtatcctcattagctttcagtct

SEQ ID NO: 54104 - DNA, 1054 bp, Cannabis sativa
ctatttccaagtgaaaaagaatgcctattttggtaaggctatttgggtaccaaaggctttaaagactaacatcaaaggacccaaagttatgtaggtaccaaaacgaaagatataagtttattttgtaggtatcaataaagaagaattaaaattggctcttaagtgttaatgcttaaagaagaatgtcaagttcctacattaaccaacaagtctcaaaaagcatagaaaaagaatgtgtcaattcttgtacacaacccaaatgaataaatttgagtactgataatatcattcttatttattctacttattttgatgagactaatatgcatggatggaaagaaagtggaatataaagtatttttgctaattgacttgcttttaatctttcttgtttattctcttatgcatacatgcttatttggcacggaagatactatttctatgcataaaagtttttattagttgagttttgacattttcgaactatacatgctgaaaaatacagattataagtcagtatgctaatttatagtgaactttggacatgcctttgaactagtgaatatgtaaatttttgcatgtttggctaatatatgtttttatatgtttgaacatgtccaaatgagtatttagtatgcctataggtttgttttgattgaaatatgatttgaacaaaattttggtatgcaacttgcttattttcaattttttagggcataataggtgaaattcgccaaaatttcatatcattgagaaaattattgttttgaaagattgcacatgtctaaatactcatatataaactgtctcaaaaagaatttttcaaaaataatgtacaaatctcgattttagtactatcttgtataattttaactttttaaggcctaaaagagtgtttttcaccaaattcgctcaattttcaacacttttcaattccgtaagtttttgaacctcacatttaacattattgaactattagaaaaaaattctttcaatttgattgcataaaactcattttcgatagatttctaattattgacttcgcttttagcca

SEQ ID NO: 54105 - DNA, 908 bp, Cannabis sativa
atatatatatttatttttttttttaatttttcccatcaaataacttttttgaaaaactaaaccatgtttttttttaggaattgtataaaagctcataaaatgtgtaaattctacaaataattaactgtagtttgctaaaatatgcaaagtgccttttttagaaaatatgatgggatgaggtggtatggcaaatgttattattaatggtattaagttttcacatattattaatgaaagattttctaacgatgattattattggtcatagctcgataacaagtaattatttttcgcctactatttcaaaataaatggatttttttcggctagttactgaatttggatcggatactcattagatagttttagtgtagtttagaaaggaagatgagttgaggtgtattggtaaaaagtagacatatttcaaataaaaatttaagtcttatactaacctctcaaccacattagtgaagagctccaattcatcaagtgtaccataaacatcatatatgtcatctattattgttattaaagcatttacttttgtagccattcttcttaaacttttgtagtgtggctcaaatgaaactcctattgtccataaaaaattcaccatcattctatctcttgcaaatttcaacttttctcccaaaccagtgtttttccaccacctacatgtacatgtaaaaaaaattaatacacataaaataggggaaattagaaattttgtaggttttatacttttttgtaaaatatgatttttttttttaaagttattttataagaaaactgaaaaaaaaaattgaaaaatatgaaaataatcaagattaattgggtacttttatggtaactagagaaagaataattaacttttttagtccctgtacttatgacactatactatgatg

SEQ ID NO: 54106 - DNA, 799 bp, Cannabis sativa
attttcatagttgttatagttttttatgtttaattgatcttactattttgttttttcagttatgggataataaatttggtaatgaagattttcataccacacgagtgacttttacttgctcgtttaaaatcattgaaactatcatttctattttgatccccgaacataatgaattgtttggacaaactgtttttgagttctttttaagaactccttcttatgttatgcaacactagttgttccatagtttgtcttttagggaggttgtccagccaaatgaaaatgggatgtggtttaatgttgctttgcggatgctaaggtttagcattgaggagttcactttggtttcaggccttgattgttcgggtcaatgtgatatgttgcacatttccctattgtcaatgttgaagtacttcctgaacaagtggataagtatgaatgttaattttttttgttctgttttatttttattatttttatgtttatttaacatctctaacattgattctttgttttttgttgtttctagtgattgtggtgcgtttgttgctgtttttgctgagtatttcattgaggggaagaatattccagctgattttgatgttgaggagtatcgccttaggctttctgtgttgctatacaagtttggacttttgaaacagattgataatgttgaaaatgagctagaaagccgacctaaatctccaaagaagacgaaggcaaaagctaaagggaaagcgagagcaaaagcgaagtgatttgaattcaagaaaaatactctatgtttatcttttgttgt

SEQ ID NO: 54107 - DNA, 1945 bp, Cannabis sativa
tctcccaactccagacagttcaaaaccaatacaagctcatggtgctcaaacctcccagggaacagacaataaatggtacccagactcaggtgcaacaaatcactgcacttctgatgtgaacaacctgatgcaaagcatggattatcatggccaagagaagctatatgttggcaatggatcaggtttggctatacatcacactggtagtgcttactttaaatctcagcactcagataaacctctaattctcacaaacttgctgcatatacctgagattaccaagaatttattaagtgtctctaagtttgctcttgataatgatgttttctttgaattccatccttttgtttgttatgttaaggacctgaggaccaaagccacaatcctgactgggaccctcctcaatggcctatatacttttgatccaggccaattccaagtcttgtccaagccaacacaaccttatcaaacactgcacaaccctgacctgaatcaagcctgtcttgttgcctcagctactagcaattctaccccagatcatagtacttgtactcactgtaataagcctgttttgtcaaactttgagttgtggcacaataggttaggtcatcccaatgagagagttgttagaactgttatgagtgcttgtaacatttctgatatcaataaaagagataattttgtgtgtgaagcttgctgttttggtaaaattcacaaaattccatttcccaaggcatctgttactgtttacactgaacctctccaactcattgtctctgatttatggggaccttcacacacactctctcacaatggatacaagtactatatgagttttgttgatgcttatactaggtttacttggatttatctccttaaaaacaagtctgaagctcttagaacctttctcaatttcaaaacagagactgagcttcaaataggcaaaaagataaaagttttgcagacagattggggggggggagtttagatccttcactgaacctttgaaacaagttggcatccttcatagacatccttgtccaaccacacatgagcaaaatggccttgttgaacgaaaaaatagacaaatagttgaacatggtcttagtcttcttgctcatgcctcacttcccttaaagttctgggatgaggcattcagatctgctgtgtatttacacaacagattacctacccctgtactgcatcagctctctcccattgagatgctgttcaatattaaacctgagtactccaacctaagaacttttggatgtctatgttatccaaatataaggccttataacagacacaagttggcttttcgatcatctccctgcacttttgttgggtacagtttgaaccataaagggtataagtgtatagatagttctggtcatgtttatatatctcgagatgtgatctttgatgagtccaaatttccttttaaatctcagtctgttctctcacctgttgcatcagacggtactgatactttaccatctgctacaattcccacatctacatacactcctgagtttttatttcctgatgatcactctcagtcttcatcccaaacacctatctttcaccctgcaaatatagccatgcctcaactctctgtatccacttctactcaacctatgcatgcccctgattcactttcacaatccaacactgtccctatagctattccacagcctgctatgtctgcaactccacctgctcctctctcaattcccaccacagctgtttcaaagccttctgaagttcctcaggtacctgtaaccaacaaacattcaatgaaaacacgagcaaaatctagcatattcaaacctaaggtttatttggctcttcaagaaccaacaagtgtcaaaatggccatgaagcaagaaaaatggctcagtgctatgtctgaggagatgggggctctaaaaagaaatgtcac

SEQ ID NO: 54108 - DNA, 782 bp, Cannabis sativa
atcttattcacctataaataggggcaaaatccatggaaaaagagatgacaaattgagagaaaatactattatttacttttattgagaattataccctgaatcaaaataaatatccctaataagaaggagtcgtggagtatgtagattttaagtacaaaatcacataaaatatctggtgtttatttattattattgtttaattctttagtaatttattacgtaaatgctatatatttagttaataaaaatatgcattaataaccatatcttggctaaatgttccattcccgtcatgtttataccacttctctgagtttctttggggattctaccacatgggcacttttagtccacactctttcttgggttttcctgaagcttcttgaccttgacacaagagctactcaaattctgttctaggacctctgctttgaaccatccaggaagcacttcttgtctggatcatgccagaccttacccagaagaagtgggttcgcgtatgtgtggatatatacacataatgtccataaatagtcaaaatacattgggctccaagaatgagaatgtccacaaagactctgggccttcgacgcaagcttgggcaagtttttcgtcttggtccaactaccaacattccccgggagtacaacccccatgaccttttgatgcaaggctcctgctctttaccgccaaagttggtgaagactccattctgttcgtccaaccttttagtgttatggcccatgcaacctctttccgaaaacttatccactaaacggtcg

SEQ ID NO: 54109 - DNA, 1177 bp, Cannabis sativa
tgcatcttggcccatttatatatgtttgaaaaaaaaaaaactaatatttaacttcattttatagtgaaaaaaaatgtaacttcattaagaatatcaattcagtccaaattacaatataaaatgaataaaattatttaggagagtatatataatctaatgcaatctgcaccattcaatttaatctagttaatctgtaaagtgcggacatccgcatttatgcgaattggattgaattaaaaattttaaaatcaacacttatacggatttgatgttgattcacatgccaaaataatcaatctaatctaatccatgcatatttatttatattttaaaaaaattatatatctcttgatttgttatcaaccacttgtgaaacttttgaatgtctttgacctgatattgacttaaactatgtatctcttattctttttcccccttttactgaagtatcacttaattaagacctataatttcagatagctctaatttgcttatatatgtattgttgtttatgatctgtcacatgtaaccaaatccagacgtgcaaattagaagttagttggtcggttattacagttaattcggttaactgttatttctagttacaattttgtattttttgcctttaagttcagtttgtatacatagctagataactcattctttttggtaagccttgtacatactctctcattgtaattctctccaagatcaataaaacatctcaagattattcaatctgattattgctttctgttcattagttcttgactggtttttgtacaagtattgttgcaacattgctacaacattgttgctgtcagttctgttaattttacctttgattcttagtgttcaatctcgattgcaaaggtgatctttgatcacaacaagtggtatcagagcaaggtgtttagctcaatcaagattgaaactcgagaacatcaagaaactcaagaagatggctgcagcaagatttgaaatcgacaagttcaatggaactaatgacttcggattatggagaattaagatgaaggcattgcttgttcatatttgaatttcagaagcaattgatgaagcgagtctcaaagaaattgaagatgagaagaagaagaaagagatagaaaccaaggcacacattgccattcttctcagtctaggtgatgaagtcctaagg

SEQ ID NO: 54110 - DNA, 1087 bp, Cannabis sativa
aatcaatcttgtattctctcaatcttaataatttaattttcttctcaagttcttttttgagtacacacagaagtgggagagttttctctcacactcaattttttttcgtttttgattgtgagaatcttatgagcaaggtagagtctcctcttatttatacttaaccttttttcacttgatttttttttatctagttaaatataattgatattataaaaatctgtttttaaattgagttaactaaaaatcgttagtaactaatttgtgtttaaatattatatatataaatacggtttaatttatttacgtagtaattttatttgaataataattgattcagttgttgaaaaaaatctaaaagaaaagcgcaatttttcatttagttttacttagaaagcgcggcaaataaaaatcggtggttaccacatatatatatactcttttctatctactcttaatttgctcaattacttttttattccattacagagaaaatgggtgagagaatgggtgagagaatggatgatgagcttctgcaaacaggtatgttctatatatatattttgttttgcaatattatttcttttatttagtagataattttatatacgatcaaagataaattgcaaagactctatgatctcttgttttttcaatttgatattagagatgacatattaaaataaccaatgcttccttagtgtttgggtattatatcactttatatactataatgaaacaatagtattctcccctgttttttaaccttttgacaaaaagaaaaagaattagcaattttcataacatcttcttgaaattttttattggctttgcttaagagcagttgtaaaagggaatctccttaagtgggagaagccacaatcttaaatctttgagctacaaactcagttgttgagtcgtcttggatattttggaattgaatttcaataatttatgtgttcgatttgctgctgctgcgctcctctaattagataatcaatagctttgatatgttctaatatcatcatacagaagtgaagatgcttagtttttttttctggaattttgtattttattttcttgtaat

SEQ ID NO: 54111 - DNA, 1125 bp, Cannabis sativa
taattatttagaggcacatgagagcactcatatgactataattggcccattgagttatagtccaccatctattaatctttattaacccaataagctacataaccctttagaattagatgggtatgtgaaatataaatatatatatatatatattaaggatgcatagtgtgtgttaaggtagatggttagacactaagtggatttgctccacaattgtctctttattactcttcactctctagcatatttttagtgtattttggacttggatattcaacaatggctcaatatgaagggataagcaatatgggaagtatattttcttaactattattgctctaaataaatgtttggatcttggataaatttaagagcattattagattattatttgattgtagtgaatacaatgctctagcttgattattcttttaacaattggtatctagagccaaagctattaattttagagcttaatatttttgtacttaacccacttattcaaaaaaaaaaaaaaatcggattaatatgttaatggatgatatgagattaaatttttttgttgagaatgggttttttcttgtttttggacggttactgtattttctttattatgagattgtaattttttgttgagttcattaatggagaaaaacccatttcgggtgcatagtaccttggtcattatttttgttttttttgaattaaatgggtattggattgtgatagagggttgaaaatggaacaaaacccctcaaacaatgtcagatttggtggccggagggggtctatcagacctggtcacgaatcgagtcgcgccgatccagattgcagacccgcatgtgagtttttagggtgaaagggatgacacgaaatgacatgtcgtttgcctctgtcgagccaaacgacgtgtcgtttgcacactatagttcagcccccatccgagaaaaacgacggatcgtttggaccatgtggcatgtcgtttttctccaaacgacatgtcgtttaccaaaaatgacacgtcgtacgacacagcaaaaaaaaaaaaaagaggaggcgcgtgcacaacctattttgggccctttttcaccattttgttccatttttaatttttctatcatttac

SEQ ID NO: 54112 - DNA, 1403 bp, Cannabis sativa
tctcaaataggaactaatttattataccttaaatcataattactattctgacattatatgtatagttataatatatagtttgttctgaatgaatatgtgattacatattttggtgaatttttctgagttttcttatatgattgctaattattatattttgtgtgtcatataactggtttctctactttttagttactagtcactaatgttttgagtttctaagttgtaatggtatcatgattagaggaggagttgttgttattgaaactgaaactgtatttattatattactaatcttaaacatgttcaattggggtgataggatctgtctttaagttataacaagttattggattataagagaaatcaaatgaattgttcctatgataagaagaacctcttaaatcaaataaaagtaaaaaaaaaaaaaaagaaaagggaaacctgtcagacaaccgaccgaccatccccagctagaagaaccagctgagaacgatcctctacagccgtgataaatccgaagatcatctagccgttaatcacgctctgatcggacggccacgactcatccaccaggtttggtttcctgtctccttagaagtcaaggatacagaggtacgagcctatagaacagatcctgttcaagtaaggtcgtgaactgaaaagtcaatgcttcaatataagaacactatttattttgtggagcctatcgatgtgggataaaataacaaagtaaacagcaatagaaaatggtttctcttttgtcttttttaattgtagtgtaaactattctgttttgggttttaatgtttgaatgttataggagtttgaagaaatggaaggtcttaatatccgaaaatttgagttggaattttagttagatgatgagccaaagatgaaactagctagatttggagttaaatatccttaataatcttctttatatatcttgagcattccaatgtcaaccgttgcttctaaagcttcctttagtttggtgattagttggaacattttgttgtagataatgttgatttggagaaaattagagtggacatttttatgatgggattgaatgaagaagcatcacccaaccacctcaaactctgttgtagttgtttttttgtgtgtttgatgagaagagtacagtattctgatttgtgggattgttgatactttttgcttttgttgttgtttgttacacaagtctttaattaaacattttaattgagtttgatagaatatgcttaaaatctaacatgttgaagattgttgctttattttctcattttcttcaacatataaactatacatagagccacatctcaaggattctctttacttgaagagaggattgtgaccccaacatatgttgatggacaaatttggcctcttctattcca

SEQ ID NO: 54113 - DNA, 873 bp, Cannabis sativa
ttttaaaattaaaataataatttgtaccaataatattttgacacgtggaaattttgaaaaaaaataaacagctcagttaaaattgggactaacggacaaataaaaaacatcatcttgaggactattaccgctattttttgaggttggggacttatctgtatcaaactgaactttttgaggacttttaccgcaaataatcatttggcaaggcttattaatgggcttaattttcctgttaaattttggttatccttggagattttaatgttgtacgttttgatggtagacaagagagaaattaagttttaagggatgagattaagacttaaataattgactagatttggggaaggtagagtgtttgaacaaaattggctccaattttacttggacaaacaattaggatagtcatgaatcatgataggatatattctcaaatttttcatgtgtttaagaatgaagcctatgggaaatagtttcatatcattgttcttgtattgttacttctgttgtgattcaaaatattggtataaaactttttagattttttaatttttggatagagtacaaggattttaagtatttggtttctaaaatttggtgctttagattgaagcacaatctgaagaattttaataattgttctatagaagatgttgaggctaactatcataaagctaaagctctctatagctcaattttaagcccaagctcatccaaaacatgactattttattgaggctgctaattatagttctcaggctagaatttataataattttttggttcagaggagtaagatcacttggttgaataaaggtgatgaaaatactgtctatttttatgtttgcaaaaagaaaaggagagaagaaa

SEQ ID NO: 54114 - DNA, 658 bp, Cannabis sativa
atctaagatcctgataaaataaattccaacaactggacaatcatgtcccgcatactcccaagttgttacacttagttattgtaaggtataaaatatgctaagtgtatatcaactgatctgtctcgtcaatagtttcttatgtatagcgacgtatttgtctcactatatactatccgtggatatttcgagtaacttcacttattatttgagataagtgaatcttgtccctggatctgtgtattccgaggtaggatggtgtctcgtcgacataggcattaatagtttggtattcttatctttcctaagactacacagtcaacatattatgaatatactctattaattctatatttagtgagttattccttttttacattaaatgatacaacattattatattaagtggttcacattccacttaattgagacatgtcaccctctcaagtgtagccgaatttcggatataacattaagaatctctctcttttctgaataatgaataataataataacctattctattgtttttagtcttttgtgcatcttctttttttcatgggatctttcagttttaaccaaaaaaagtaacaatattagaaaaatacttctaggtggccaaataaacaaatatacagcccaaataaaaaaaattacacaa

SEQ ID NO: 54115 - DNA, 1000 bp, Cannabis sativa
cctaataaaattacttttcaaatatgtatatatatttaataaataagatctaatttaatacatatgaaaattctttagtatggtttcaaaaaaaaaaaaactttaatagatagtatgtatataattatatatggaacactttttaataagtgttagttatttatttttgaaaaataggcgtttatagattaaaattaaagttagaccttatggtcattacaaaagatattatttggtatagaagatagctcaactataccagtaacattattgacgaaagttcacttaagcacattatgggccgcaaaattacaaactctaagaataaataaaaaattacaacttaataaaaatgtagagagatgtttacaatgatgcacatagttaccaatcccccaactagaacatgtttccttcagcgtcttgataactgtctcagaatcactctcaatcatcacaaaagggtgttgaaacgaaacgacagtctctatggctaacaggcaggccgcaggttctccaatgagggggtcaaagaagtagagcatatttttagccacccacaaaatagattatgtgtgatccctagccaaagccactacgcacatggattcgcatccaactttaacatcacatctgaacttgacccaatcatctagaggaagagaccaaacaagagacccaacaaccttcgatgaggcaaacaaacaagacccataatctgcgtaacaaatagagtcaatacaatgtttagtgttactcaaaaagttattgtgtaccttatcgttacgtgccctccaaatcgtatccagcacaatcaaaacatataggaacaagtacttctcaacatcaatccccttaaatttcagatttcactaaaaattaacccaatcccaaacacgacctccagaatccaaaactggcacaaccaccaaggagaagaccaccaaaggtgagaagcaaaattacaataaaggaagagatgttccatcgactcctctcc

SEQ ID NO: 54116 - DNA, 2023 bp, Cannabis sativa
aatattgtttgttttaggcctaagtcctcacaaatttgtttgtaggcacctttccaaaagatctcattccaatagagatagtattcattcttaaatactcaagatctttcatgtttttagtcaatgtgaaattttgattgtacacccaacaatcctctcctcaaataaaagaccaccttgcctcccttcagataattacagatctaaattcaagatcatatttctaacccccttgcaaaattacaaatcgaatacctcgattccaacacttaagatctccttgagtaagctagatgaatctcttcaccagctagattcgaactctcttcgaatcagatctgaacctcagacgcttctagcagcaagcttcacctcctttatttggcaatccgaagattcattcacatggttaattttgggatctggctttgataccacttgttaggaatgtcgaacatcatttatttctctattggtatgatattgtccgctttgagcctaagtcctctcgagtttatttttgggtaccttccctaaaggtctcatctaaaggagatattttcatccttaaatacaagatcctttccatttctagctaatgtggaactttaattgtacacccaacaacactattggtgtctagcaccctaaacccaaaactaagcagcaccaaaagaaacgatttgccaattaactattacatttatgacatgtattaagttgagaagatctttggagttacttcattctttgagaaggatggttcccctatatatgcataccaatcctccttagggcatatatattggggcgtttacaactatccaaattgcaccacacctgatgagccagaaaaggcacccaaaagaaaagtgctgcaaagaagctaaaaaaatgagaaaacagccaaaaggatattggcctacttggcgaaccctcaggaaaatttgcctacctagttaaatattcttacaaaatactagttcacgaggacatttagatgacagaatgggaatatgaagatgataagcataagccattactcccatgttacaaaccaatgaagtttaaaccaaatgcctcacatctcttcatgctaaaaggtagttgttaacttgaaatatttccttggtgatgtggatatcattgtttaacacgtggcatggcatcatagagttgagtagactcgagtcataggagtcgatttgggaagggaccgtatccctacgcccaggttgacttcaggatctccaggatagaagtttagacttcaataacttgaatctgactcactatctttcagtattctataccataaagacatggaccaagcaaactcggggagaaaaccacaaacctaacccttggaaacggggcctagcacccaggttgacttggtactaggctcaacgccccaggttgacaatcaacttgggatgctaccttcaattgctcaaatgccaaatgccaaatttgacgcgaccattgaatcctgaatggtcaaaaatagggtaggatacctcgtcctcaagttcagaagccttagaagtatcaaaaacgagatcctgggagctcaggagtaagtacccagtgcccaagttgacaaaaggcctggtgcgttgggttctgcttatctgattctaatgttctttcgatcgtccgtctagtttttcacaataacaaagatccatgaagttagagaagtcaaatttacaactttgcatttctcatgaacaacatctctgagaattggtggccagcttcgccagcacacagatgctgactaagtgatgttaaaatatcatttagtcaccttaaagtgcatcccttgatgtttttacacttaccagcatccaggctgatgtcatatgttgacgtcatatgtcaacctaggcactgagatttcaacttgggcgctggatattaacctgggcgctgagtcatgaactgccttcagtaaaacaaccattactcaatcaattttgatttgattaatgcgatttgcgtttcgaagctaattcaa

SEQ ID NO: 54117 - DNA, 1471 bp, Cannabis sativa
tagtgacccacttttgtgcgcgtcactaaaggattaatggtgagttttagtgacacgcaagaaaagactctaaacatttaattttagtgtcttataatttgggtcactaaaacaatgaagtgtcactaaaaggaaatatcataatttctatcatttttttgtaaaaaaaaatatttttgatgtatagtgacgctccaaatgtgacttgacaaacatgtagccacacgtttagcgcgtcactatatcataaatataaatttaattaaaataataataaacatcaccgtacatactaaaaaactaacttgatatatattttcttaaaatgatatatataaacatagatatattttttaaaatgaatgatatatatattgaattggtatttttatttttgaaaaaacaaaaataattaatgctcattaaagagcacatacggtacaattttcatagaaaaaaaaattattacttcatactcaacaacccacacaatagaaaaccctaaatttctctttttcctcttctctctatttttctccttaggaaaataaatccctaaattttctgagcctaacccgacgatttctcctccttcacttctctcttacgggcggttgtctagcccagctccggtggagctctctccatcgttctgcatcatcctcctctctcaatcgccatctctctctttacgcacgaacctccgctccagatggccatttttgtccccaaagacccaaatgaagaccaacaatcgtcccttcatcttctttgagatccatctgttggtttttgttcgtttcatcttttttatcacaatctatctttccttttatgtgcaggtcgtagcagttgggggtttaggcttgcatcgggcttgcgccatcggggttcgggttcatctggcatggttgcatcgtcggcgattgaggttcatgaggttcgtattgggattctgtttgggtgtgggctttcacagatgcaatggacattccaagatatggttggagcttggtgatggagttgggatttgattgtatttttaggtttcattttagtttcacatttgtttctttacttcattttgaaattagtttttggattttttttttctgtaaaatgtacaacattgttatttatataatttttctcatctaaattaatattttttttttgagatatatctatattaatattaatgcttataaaattgttgtaattatcttattatgaaaaaatttgtttagacttttatagttccagatctatatttttttttgataaatcattatgtatatatattcctagtgtacaaataccaatatcaagaaccaattaatattccatttaacaatattcgtctcaaagaaaaacaagagaaccaattaatattaatcggctaaaaaaaaaaaaaaaccaattaatattatttatttggccaaaattcaaaaaaaaaaaagaaatagtgtac

SEQ ID NO: 54118 - DNA, 1241 bp, Cannabis sativa
taacgaggattaggctattatcgaactgctcggggctgaacctctatagaattcttgtgtctttacattgctttactatatatcaatggctataaattacttttcgcttaataaatatgactcactatcgttggctaaaagcgaggtcaacattttggtgattttattgagagcagaatcaagaatcgctcttcattcaaaatctaaccacaagtacgatggtggtacatactcgtaggggcctggttgatccagcaaatccacaaggtgggatcccctgtgcattgcagaacctaggaaacgcaagggttctgccagctgttaatcctgagcaggcggcaaacgttcgtcacggtgtaacgacccctgtagatgaaatcgctcctggtgtgtaggagacttggaataacagttcagcacccaactagggcattcataacacagccattccgcctgctaccaaaactcaaacgaccattggagatgatactgagttacaaaaccttcctgctgctcttggacttgtgcagggtcatgccaataccctacatcatgatcaagaagaactctgggctgctgtggtaaatctcgcgtttgagaaacaaagacgttcaggggagagacaaaaagatggaagagttaagggctcatcatacaaagatcaaaaatcatagtgggcaagctactgtgttgatacgaaaagcctaccaaactgtaggacagcaacctctgagtatcatccccctaggtgagagagacaaagatgcagcgatgaatacttcccagactgcaaatggtcagccgcccaatccccgatcacgagttccactcatgggcctagcagtaggcgggcagaccttctctagtaattcatcaggagaagtcatacatgatggttccaaccaggttaacgctgccattccacctgtcaaccaagcgaatcaatctctaagacagccaagcacttctgtatttgataggttggggacaactcatgacctgaggagtgatctgaatagaaggagagaagtagatgatcagattgtcacgataatcgtccagcccggagcccgtgctcaagttctcgctcagaaagagactgatgtgattcaaatcgaccagaatgccgagcagcttagcccagctgtataagctcagctagacgaattgaaaaatttgttccaaggcatggctagaaagaaaaacaatgatctcgagctggaccgagcacgtggaactcc

SEQ ID NO: 54119 - DNA, 1542 bp, Cannabis sativa
tttattaataaggaaatctgattatattgaaatgagagcctttcgcctgcctctctctcatagtttccctcacgacatagttgtcaatcgcaaaactaggggcatgtgttatattgtgaattttttacctagaaactcgagaccatgctctcataaagatgacacgtggactcaatctcctcgaggagtggtgagctgtcagaaggagaccacttgagtataaacctcgcctgatccaaactcggcgagatgatgtgaccctgacagagtctagtggtagtattgtgcctcgcatggtacaggaccaaaaaggccgcatttaaggctcgcatataccaagatatatgcgatgtctataaagctttctcctgtaaatcagtaaagatcgattctttacttagcgagctggtccagatgacctaatgcgctcgatgaaccgataaggactcgcacatcctaagtcatcgacttttacaagatatccgtatacgcggctcggataggatgcagatatcttaacacatagactcattagtcctttacacatcctaggcccgcgagcttatgcaagaatatgaacagacaacttacaccattaaggtcgcatacgttgctatatttagtgaattgagtcgaaactgttcttcatttgttccatttgtgtttttattgattgaatattgatattcaatgtaaaacagtttcataattaattaagttttgtataatcaaaggacacttgctatgtatgtaaaggagtgatccaatatgaaatggatggacagaatatctttgcaacagtggactaagaagaccgtgatctgactgaactactataattcccttgtgttcattatattgctctttgaatacacgccattctaggttgagtactcgcactttttcaataaataattatatttttatttttatttggtgttgtcaaaattcatccaacaacagttatgttattattgttttcatgttgtttgttaaattattttagagttgtttttagttgttttttatttttcttaaacgcaatatttttattttataattttaaaattttaaacataatacttttataaagttagtatagtgaaaatataaaaataaaactccctattataatatttttataaatttcttcattttttgtaacttccccatttaaaaaaaaaatctggtggggattagttggcaatttcacactatcgagacccatttaattgggattcgtaggcctacagtatacagtattgggtgagtttcatttcataattttcctctccatcaaacacctttagattgggcttttgtacgcctcgcttatatctttgggcttaacaatttcattttgttgattgtaggcctatggagtaggctttttctccacaataggaagcctgccaataatggcccaccatggtaaaacgggcactttaatctttaattttagaccggcttcaaaaacaactgaagaaggtccacttcgtagaacctaaaaccaaatcaatgattcaagccatggaaggacca

SEQ ID NO: 54120 - DNA, 1408 bp, Cannabis sativa
ctccagaagaagcatgagcatcatcatcgaatggttttacagtgattcagggataataagttgtatgcaaaggttaagcagtgtgaaaattggttgttagagttatctttactggggcatattgtagggaaagatggaataatggtttacccgagtaagattgaattagtgaagaattggccgaggccaagatctgtgatggaagttcgaagtttcctcgatttagtagggtattatcgactcttcaccgaattattctctatgatctctatgccactaaccgagttaactaagaaaaataagcgattcatatggttcgataaatgtcaaacaagtttctaggagttgaaacagcgattaataacagcaccagtgttagctttaccatcagatctagaaaagttcattgtttactgtgatacatccagacaggttctgggatgtgttctgatgcaagcagacaaagttatagcttatgcctcccgtcaactgaaagattatgagcagagctagccaatgcatgatttggcgcttactgctatagtatttgctctaaaaatatggcgacactatctttatggtgaaaaatgtgagatttacactgataataagagtctcaagtactttttcacccagaaagttctaaatatgacgcagagaagatcgctgaaactggttaaggattacgactgcaagattttgtatcactgcgtgaatgccaatgttatgacagatgcattgagtagaagaggtcccgggcaagttttcaccactattacgatagctcctcaactgacctcaaagatggtcaatgcgggaattgagtttgtagtcggaaagttgcataacttgacactccaatctgatttgcttgatagaatcagacggcgcaattggaagatcctgaactaattaagattcaagatgaagtgatggctgctcggcctaaggacttattaatctcaaataatgaaatgttactatataaagctcgggtttgtgctcctaacatttatgagcttaagaaggaaatcctcaatgaagcccaacccacaccttgttcactgcatccaggaaccaccaaaatgtatcaggatttaaaaccctacttttggtggtatgggatgaaaagagatgttatagattacgtgtccaagtgtttaacttgccaacaaatcaactcagagcatcagaggccagcagagttattgcaactattaacccttcctgagtggaagtgggaggacattgtaatggatttcttggttggttttcctagaaccacgggaatgtattattgagtatgggtcatagtggatccattcacaaagtcagctcattttctgccaaaaaaattacatacacagtggatcagtacgctgaactgtatgtaaaggagatagttcgt

SEQ ID NO: 54121 - DNA, 1398 bp, Cannabis sativa
gaagaaaaattgttagctataataatgctttaaaataattcatttatttttcttctatatatatatatatgatctctgcagtactattaattcatgacagtaacagaccattccataggtacatcatttattattattattattataggtatttattgaaactttagtatattatatatatatagtcccttgtttggttttacaattctgtgggctattattatgaatagaggtgagttagtaagaccatgctcaagtaagtgtcctttgaaaatggtccaactttgattattcacatttttggcataatgagtacttatgtatatgacacattaatatgtggagtccagtcataaatcaaacaacaattaatgcctacatatatatatgaagagattattgataaatgagaaatgttaaaaaagtacgagtactatttattaaggtgtattatatatatttatatatagtgtaattaaatattagattttatataattatatacaataagttttgtagaatattgttaactaattgtaaggtatcattttgcctaatagcaatgctttatatatgaatgaatgataagtgctaattacaatctcttattataaattcttagtcaaccttacagctgaatgacatgtcggaatattttttttaattttctttattatagttataatttcattcttgtaaaatttttaaattttttgaatagtttacattttacaatgctgaaaataaaattcctgatatattttaatttatcacgcgtatttaaaaaatttcaaaattattttcaacattgtaagctatttaattttttaaaaaaatttacatggataattttgtaactgttggatcttattttaccagaatctatatttactaacatgtatgttgataataaatatataatctataacaacctaaataagaataaactttaaaataatgaaataaacacaacaatgttagaaaaacctcacattagttgtagcaaatgatatgatttattccgttcagttctttaatccttgatcttttttgttgcagagtatgatcctgaacttagactctccttctccttcgattgtctttatcatagtcttctacaaatgtctgagtaccacattaaataatgtaagtttgtactcaattcacctttggaacatatttttgagaatgggaattcaaaatccatagtatatgcctattttgaaatttgtgaataaaagagaagacgaagatgagacattaagtttttttaatcttcttctcttttttttttatatagctacacatagggttaagtttagatgagatggacttaaaataaaaattcgggctaaaatctaactttagggtcgtatttttcatgggatttagagttag

SEQ ID NO: 54122 - DNA, 862 bp, Cannabis sativa
atgaaaagaaattagactaaaaaattcttttggatgccgaaacaagttaagggtgcatcagtacatcttttttaaggagtgcattataaaatcaccccaactaaaagaatatttattttatatttttacgaatccttttaaataatttttttagttacatattttacgaaaaataactttttttttattacaataacataatagttttgtttgctttattttttttttatagctagaagtataaaataaatataaattttgacttttttttagataagtataagttttaattattttattgtttggataactattatacaagatctttttacataaaaagtaatttcagagcatttgaatattattaaaaaagttttttttttttgagtaaattaaaaattatttaaattattttaattttagcatagtttctcagttcttttggaaaaagctacaaacatagcttcttctaaaatgacattttaatttttatacaaacactcttaaaatgaatttttttttattctaaaaattaaaaaagatcttataaaagcatcaacacaaaaataacgtaaaaataactatttatatgttttcttaaaaaaataaattcataaaaatgttaaaaaaactatagatttgtatttttataaactttttatcatcttgggatatttatgaaaatatccattttcaaaataacataaatagtgttaaattaattattttaaaaattgatgtagtagtaacgagttaccataatatcactaaaaaaaaattgataatagtaattagttactaccatatcaaatgtattaacaccaaacataattattttaaataataattattttattgctat

SEQ ID NO: 54123 - DNA, 1182 bp, Cannabis sativa
ggtggtgagggggggtttgggttgggttcagtttgggttgtagacgagcacagagagagagatggggttgagttatgagagagatatttttagattttagacaaaagtgtcatattttttttagtttgaaatgtattggtttaaaaataaaacattaagattttttaagtatagaaaattaaatttcccttttaaattctgaaaagaaaaagacaattatcacacaaattctgtctgagtcacacaagtaactgagtattacgtaacatctcctcatggagtaggaacaattgttatgggtgcaatatttcgatttttacttaaaaatactacttaaagtgacatatattttttattcttttactaacacatcatgaaagtttaaatatttttactatgattaaattttttatgaataatttattttataattatacccttctatggaattctatggaagccataaaaatatatattatataaatataaaaataacttaaaaacaatgtgaaaacaacaatctgcaatttatgaaaacaaaaactaaagatcttctcgatcacctacttatgtctttgattattagatttattttcatgttaaaaaattaaagaaaatttacataaattattatttatagtaaattttttacacttttatatttaaatatatttttatatatatacacgatattttataaaaataatacaaaagcaataaaaaatcacataaaaataatatttaaacaacataaaaataatatacaaataacaaaataacaagagtacaacataaaaataatatgaaaacatcaaaaaaccatattttcagtaaatgaaaccttaaaactcataaatatatttaaaaagcaaattaacctttggattaaggtctacaataaattactataattgtacaaatattaaaagttatttaggtacactcctctatctattttgatatttaggagagctttttagtccaattaattatcataatcacacaagtgtagttatttaggatttactgtaaattcaaaaaattctgaatagtttatcataccgaaaataaaatacaaataattgcttaccgcacgtataagaaaaaatagtcacgaatgcaacaaaatatttaaattttattttcagtaccataaactatttgaattcattttgaaaattt

SEQ ID NO: 54124 - DNA, 887 bp, Cannabis sativa
taattatatttaggtttaactatgctgactttttacgtggcaacatctaataatttgttatttttttttattttaaaaaaaaatcacccaataattttttataaaccgaaacttctcttatatagccacattttatatagaatagatatggataccaaatgtatttttttatgtttaaatttgggattagaagtaagcatctatctatcatggataatgagagagagaaaggagtgcgtggagaagaaaaagagatgaggataaggagagaagggataagattaaaaatgaattatttatcttattgattgatagtttatcatttttctttgtcaaatattttttaataaggatttagtagtataacatttgattttggctccaatttcaataaattaggcaccattagatacaaattgtccaatacaattatgaattggtgtattaataaatagtttattagattaaaatatatggatccaatattaaatgaaagtaataattatatacacgttatgtcagatcaatcgcgtgtaatgctacgttattaattaaaaatgtgtttattttgagagtatgtaattttactgtttataatattattaggtgggtatttttcataaatcttacagatataattaatgtgtcaattattcttgaaaatattatataataataggaggtctaatttcgatctttaattaacatcttcttttccaaaaaaaaaaaaaaaaattaaaaaatatgttcatggtgctggtggcctttatataaatgctacaaatacaaagctaaggtgtcctgcacaagctgcactgcatcccacgtatatgcataattatatattactaatcctataggcctcttcctcttgtcttggctataaa

SEQ ID NO: 54125 - DNA, 979 bp, Cannabis sativa
gcttgtactatgttaggccatacggtgctaattgtaataaagaaaaagggttttttttggaaggaaaagagtgcaacgagcaagaagaaagaaccaaatagtggggctaaaaaaaagtgaaaaatgatgctgagatcgtagggggagctattatggagaaacctgaaggcaccattgtgaagaagaatgaaaggaagaaaacagagaagaacaagtcaacaactacagtagattcgagaggttcaggggactggattacacctaggaagaagaggcaaaaactagtggaaatagcttgtctgaaggccacaaccagtaatggatatgatgtgctacagaataatagagatggatttggggaaacaactaagacgcaaccagttaatggacagtgttagtttaaggggatggaacattagggggtttaataagaaggagaagcagaaagcgcttctagaggtttgtaaataaacaaggttggttttttggctcttttgaaaccaaaataaatcatgatagggtgttagatgtgatggaaaataactttaggagctggaatttctactcccgccctattatttcttatagaatcatgttattatggcaagctagctatgtgaatgttgagattcttgtggaagatgctcagtttgttcattgcaaaattagaaagattggggacaaagatagttgttatgttactgcagtgtatggaagtaattccatgacagaaaggatttctctgtgggacaagctctcgactcttggtcatctaaaagatcactggattatttttggagactttaatgctatgtttagctatggagatagaagtggaggtcgtcagatcacacctagagatattcaagatgctcaagattggttggcaaaaggctaggtgggggagcttcacagtatgggtggcaagttacctggtcaaataaacatgaattgagggacataatttattctaaactgg

SEQ ID NO: 54126 - DNA, 1134 bp, Cannabis sativa
tgcttctgatttagagatctagagagaaagacttagttgatagtattgcactatcaaattgaagtaattgctatggatggaattgaagtaattgctatagatggaattaaagtaattactatggattaatcatgtacgcatacttaattattatatataatagttttatggttcatcgatatttaatggaaaattttaaacaagtttgtcatgttccattattctagtttgaataattgggttatttttacccaatttttgtaagaagatctttggctgactgtcattgataggtatgatttgtcacatattcattcaggataaaaatctaatattcttcacattattttaatgcttcacaatcggtggcttatgtgtcattcatttagttaaagttgttgtagggtttgtcctatttgatgtaaacagcttggtcagtctatttttattgatttcgctcgatgaacaatatctacatgtaatgaattatgtctgatttacttattaattaataaaaattctatttttctttaaaaaaaaaaaaacaaaacaaacatacatgaaattatgattaatgatgatgagtatataaaagataatattaattgttatactaatagaagcgggcctgtctcaagccaactgggggccttgggccaaaaaatttaatgtaaaaattatagtgtacttattttattttatttgttttaattttttacttttatttccatattctttaagatatatccacttttatagatgatgtcctcattatacctcttaggttaatgtaaattatttgttagacttaggtgaatggtgatgatatattgggcaacccactgacaaaagtgggtacattttaatgaaatataatataatgatatttttgattaatggatacaaaaaagatgtatttatgagcttatctcaagtttaattaaggttttctatatgatttttttttatatatattttttttatatatagtggtagaaattttgaatataatattttaaaaatataattgagtcgtttttctcaataaaaatattacatatagtatcttaaaattaaattaagtattttcttaaataaataatatatagtaaaagttaaaaaatgatattttaa

SEQ ID NO: 54127 - DNA, 1720 bp, Cannabis sativa
ttttcattattaaaatatatagattaaaataaatggttaaataataatatgtttttttttaaataatgaccttaaaaaaaaaacattggattttcattgctggtcctacatggttaattgtttcaatgtgacctcgagatgctagacttcgttccccttatgggaggttatccattgaagcatttacaccgtaagatcttgaatgataagtattttgtatgttttcttttctattagactctcccctacagtgactacttagaaataaatttacaaatatgaaacaatagtagcagctcataaaataagaataaccttcactctcgcctaccaaaacaacgttggatttttatttggatcatataaaagattgctaaaatggtatctattttagatgagctgacaacactatttaactaatgttatctttgactctcgcctaccgggacactgcattttattttgttgtaaaccttggaaaataattaaatatattttattttggtatttttggaaacatattttctttacttgttattttctgaatatgtgtatgaatttatttgaacaagtaatttatttctctttattgatgtttgtagtgtcaaaatattgtttaacaatcctcaccccaatcttcaactagtttatgcctttgcaaataaactccagagtatgaagatgactcttgatcagagtatcacttcatacttgctcatgatgaactttaaattccagaaagaaactatgctgggaattgtcttattaagagagcaaagagttcattttattctcaacagcttatcacttgagtttaaccaatttgaggtatcttttatgattaacaattagaactcatctgacatagacaaggtggatgctgaattgcgttcttatgaaaagacattgtccccaaaaagtaatttagcgtatcgcttatcagttttacatatcttgtgacttaggggcctgtaaactgtcgagcagcagtttctacttaggttgaccaaaatacctgaattcagaatcaaggtaacattagtataataattgcgtatatttttgcatgtttagcgtgcatatttataaatatctaatagataacatatcagtaatggcggtattagataaagttgcagtgaataccaacagctttatgtttggcgtagtacagattgacactatcacatcggtacgactagagtactgagtataggctaatattatggtcatcgtatttttgtacaaacattctagactcagtacgcatgggactctggacaggattgtaattgggtgtatgggtgcctagttataatctaatttatgttatattatgattatgcttttcttactaactatgttgactcacatatattttttatatgtgtaggtaaaggcaaagctaaaactgaacagcagtgaacacgggtagatgaagattgtacatatccggacggttagacctggagtgttagatctttagggtagtaggctttattttgatagtcagtaggtgacaacttttgtaattaaatatgttgtacaacagttgcaactttaaagatgggatctcggattatgtaaagtatttatgtattcaagttttaaagtttaattaagaaaattttaactactcataatttttctataatccctttgattagcaaaggagtgcacggtattaagaaatgatgataacacacctaaattagtgggg

SEQ ID NO: 54128 - DNA, 899 bp, Cannabis sativa
taagatactggtaaaataatttccaacatgtacatgtccacagcactaaacaaaaaagaaattaattaatgaattgatttgtaacataatccaaatttaaaaatttatagtttactttttgatacaattcataatatcagtcgggataaaattattcgtcgagttgagatatgcaatactttgagtattggcatggatcataattgtcattagtggtcactacagaataaaacatgttaatccagtcagcttaccaatcgatccattagtttgttacatttattaatataaaaatatacttactgtgaattccacggacatatcaaccattgttcaggttgcatacccatcaatcactgacatatattctctgaacattgttcgagtttaccagcttcagttgctactgaagcaggattattaaatgtgtatgtattcctcaatccaccaagattacgtgtgttcttacaaataattaaatttaaaaagattattaataaacaattctaaatataattttttgcttagatattaacttagttattaactattatacctgcaccaaagacacataaaagtatttctaattttctgcagctcgcacacatcttccacctcatctacactgatctaacactcttggccttctcttccgaacatttctggtttaatataatatttcttgatttcttagcagaccaattcttcagaatctctaaaagttcaagcaattattgtgtctttgcgggcggaatgtaccgtttgacagactgcttctttagcctcattgggtgtatcggtggctgagtcagtagagccaagtgctctcttaaaactttcttctttcctttcatctacatcaaacataacattaattaaaatttcaaaatccaataata

SEQ ID NO: 54129 - DNA, 3629 bp, Cannabis sativa
tgcttcaaatatagattgaatttgactgctattttttattttttccattaaaatttgcctgggttgcacaaattatataactttatctttctttcttttctttttttttttaagtaattaacattttattaaaaatataataatcttatacaagttaaaagagactaaacatttcataaagcatacacaaaaaatgaaaaattatctaatgaaacaagttgtttatttattggaagaatatgaatagctaatgtatatatatttagccacattataacataatttctacatcctaaaacaattaatgatcttaaatcatacaaaaacaaaaacaatctcgaaataaaaataattaataagggtcagaatcaatatgtacaactattaatgttcaggaaagaatccaatatatagccactacaatcaaactttatcttcttttttttaattactttcaaactttatgattactcttttcaaagtttgtaagtttttgtattaacattactcggcaaaaaaaaaaatgtatgaaactaatttatcttatatgactaattgaaacttgaatcaaaatcacaaagtactgatacacctttataacttattggttttggtgttaaaaaaaaaagacttattggttttggttggtggctttattttatttatttttgttttatatatatgtagatgaatagttaaataatattaagaaaatgacaaccacggaaagaagaaagaagaaaaaccgaaaatcaatctttatcaatttgtcatcaaatcaaaattgttgatcttatctttaacatatgcttctagaaaattgtgtgattttgcataatgaatgtaatttaaatattcagaataacatgaataattaacatttgcatttattcttttgaattatctgacatcccaaaagaaataattggacggtctttggaagcttgggctatcaagtatttacatatagttgattgtgatgtattatttggtgtccaaaggacactacaagatgaatttggacactttcagcaaaaaagaagaagaagatggatttggacactttaattaattttatttgagcatgaggtatgctggcaacttgaattgacttccaaattattgtgtcacttttttctaaaaaaattataaaatgtaaattaatataggaaatcccattaatataataagaataagaacagtactattaagtgtttattattaattattccataatttgtttatatataccattacttatgatttgtaatttcaatgtttattattatctttttagttgatgtttacttgtatgtaataaaaaaatgacaaacggttaattaaacaaggtagtatcaattttatataatggtaacgttgaacttttgtatttgtagtgctgaaaatgatttcatgtctgtcgagttagcatggttttgagcataatcatgcaattaatataatatttaattatttaaaaataagggtatataaatattatttcaaactatataggtattcaaaaaatgagtaggtacatatcaatttgatcatcatcacgattatattattgatacggatgggtggtatccgtttggtaattaactctaaaaacaaagatactatatagtatatacttaaaataaccgaaaaaaaacgtacacttttttttgcttttaaaatgagaatatagtgttaaattttcaactttgagcattatattataaagatctatgctgaagctggtacttcgctgacagctgagcttcatgccattcaggatggattgcaagaaggctttcattgctgattgggaaaattcagaattgagtctgtagattgccgggttaacaatgaacctagctagtacttgcagagaagagatggtctggtgataggctaattttagttgtattttatgaaggtttagaggtgcatttcagttgattatatttattttgtgtaaaattatgcttattttttacttgttttaggtttaagtggtaaaatccataatatgaattaaaaatgagaaaaaacatattaaatgagataaataaaatgaatttatcatggaatttagggttttaagatataattgttaagtagttagatagagttagttattagttaaacttaactgttatgttaagttaagcctttctttaattaacttcaagactgtacttgtatataaagagcactgctcttctcaatcaatacaatgagttcatttcatttacttttgtatattcaacatggtatttgagcattttttctcgcttccgccattgtaatctgctgctattttttttcgtttctttgttttcgtttcttcgttgcctgccatggcttcttctacccaaaacactttcactcctgttgtcttctctcacaaagtttctgtcaaacttgatgaaaataactttctcctatggcgtcctcagtcctatctgccattagagaacatcgtcttcaacaatttatctctgcttctcattatcctccacgaaaatttctcaatcaagaagatgaaatacttaacaatgtcaatccagaattcgtttactgggaagtgcaagatcaactcctctattcatggctgctgtcctccatgtccgatgggcttctaactcgcatagttggtgccgaaacctctacttaaatctggaaaacacttgaggtatatttcgttactcaaacctcagccaaagttgatctttacacaacccaacttcaaaattgtaagaaaggttctctatctattaatggatatcgtcttcgcatcaagacacttgtagatcgtcttggttctgttggccatgttatttctactaaagaccatatttctaccattttcaaaggattaccatccatttatgatacatttgtgatctctgtaaattcaagaaatgatcaatatactgttgctgaaattgaaactttgctgctttcccaagaacatagaatggattctcactcaaaagaacttgattccattaatattgctgccaatcgtggttttagatccaaatcacacaactctacatctttttctcaaaatgcagaaacttgaaatactactgatcatcccagcattggtcgaggatcttggaatccttatgctgtttcaaactgatctggtgcttcgaacatggttcctccctcgaattctagtcaaggtcgtggccattcatccaatcccaattcaatttctcagtctcaacaaagtaacttgaagcctgactgtcaactgtgttcaagaacgggtcatacagcagcaagatgctaccaacgattcaactacgattttctaggtttaggagcaaccaatatttccaagcaatctgtcatcattgctacaacagatagtgttgctgatcaggcctggtcccctgattctagagcaactgctcattgtactgccaatgaaaacaatctcatcaacaaacaaccctactttggccaagaacaagtgcatatgggtgatggtgctggcttccctattcaaaacattagtaacactctccttcacacttctactacacataaacctttacttttaaatcgaattcttcatgtaccacacattcaaaagaatctgatttctgtctcaaaatttgctgctg

SEQ ID NO: 54130 - DNA, 1652 bp, Cannabis sativa
atacatgtttgatgattttgattacaattttaactattgattattgaaggtggtggaaggagtttgacttcaaaagtaagcaatctttttcaagagacagaatagtggagtgttacatttggaattatggagtatattttgaagctcaaacttcccaaattaggttgatgatgaccaagttgatttctttgcttactattattgatgattcttatgatagctatggtacacttgaagagctaaggccttttactgaagcatggatgttagaaaggtatttaattatatataaaaacatatgaaataagattgtaattggatattgtagctgcaatggatcttttatagattttcaaaaaaaaatccaaataattttagatgtaaaatttttgattcaaagagcttcttgtactcgtacaataagttgttcgcattttccatcctaattcttacattctaaatttgttagaattttttcaaaaattaggtgtaactatattatacactattatgtaatatgaaaaaataaatttgtagtttactataagtataaatatacatatttacttaattaatatgatgatcattaggtgggatatatctgctactgaaaatttaccagagtacatgaaagtatgttacaagaaatttttagaatttttcaatgaaattgaagaatttacaaaggaaaatccatactgtgcgagctatgttaagaaaggggtaaaaaaatttcctatctttttttctttatataataaatatttatttattttgtgaagagagaaatgaactttcatcattaacatatatgaatttattgattttattttttccagttgcaatgtatggttagagcttatagtaaggaagcccaatggttacacaataaatatatgccaacatttgatgaatattatccaattggacttgataatgctggatctgatgagctaatatcaatggccttttgtggaatgggaaatgttgtaacaaaagaatctatggattggatattttctcagccccaacctaaaattatacgaactatgtcaattgttggaagacttatgaatgacattggctaccacaaggtataataataagttatttataatgattgtgaggtctaaattttattattaatttatgaatattatttaaaaaaaaataaaaaaattaatacatatattgtacttaatatataagattaattgcatcaaaaatttaaaagtaattgtcataatattgttggtcaattaattggcatatatatcgttacacgcttatcgataaaacatgtttattttttcttacacctgacactgacgcacacacttctctagagttttttttcttttttcttttttcttttgacattttatttttctctctccattctctccatgcattagtaataatgaatctgatcattctctctaaatatataatatgacatatcattataatagcatatatatatatataattatacttttattttgtcatatcatttatttttttttccacacatagaataaaatatttaatatttattaaaaaaattcttttaattttatttttttaatttaaaaagtaaatatatattaaataacttcatattactaaaaaagtatttttttttatatttt

SEQ ID NO: 54131 - DNA, 586 bp, Cannabis sativa
ggcactgtaaactatttgaaaatttctaaatatttacattagtctcgaataagctataacatatgtgatcatgaaaaaaaaaattagattaaaaaaatttattgatatcaaaacagataaaaattctaccaaaacaatcatttacgcatctactaaataaattctttaaatatattgacggctaaattacctaaactttaaattttttaacacttaaccacaaaaaccaaaattttgacggcaaaacctattaaactgaggtttcgttttgcactacacacttccatccaacatctcagttaaatgccacattagactgcccacaagtacacaaatgtatacgcggtaaatttttagtggtccacacaatattacttattaaaatattataaaaaataatttagaaattataaaaataaataaattataaaaaatatattttttttttctcttctttctttttctttctcctttttcttctttttttttttcttttcttcttctgctgcgtgcgagaccaaaccccccaaccctaccatttcttctctctctctctctctctctcttgttgggaattattttacca

SEQ ID NO: 54132 - DNA, 931 bp, Cannabis sativa
aataataatattatgttacttaataacaaaataggaatccaccaaacaacattatcaaaatttattccaagtataattatatagagaaattctatggtaggaactatagttttgttcctatattatggacacatttttttaaccattgatttacatgacttttaaaagtcaaaattgtatgaaatgtacatatttgtaggttatcaaaatatcttatttttttttttttaaaaaaaaatcggacaaccaattaaaataaattaacacccaattaaaataaattgattttaaaaaattaatttttaatgttatttatcattttccatgtaagcccccttttggtccattctcattattccttccttctatcttttgaaacacccacagccacaacagagtattactccattctaattcttcattccttctacctttcgaaccagccacatccaaaccagcggagaagctactgactggagatgacccaactctacagggatcgatccaactttaacgtcattgttcgctaccgctaactccgctggatcggaccgtacaggtggtccgtatgtaaaataattacacatcacatattggtctcatagtattgtgtttggattgatattcacatactagcctaatcaattaataaggttattctctttaaaataaaaaacaaataaaagaaaaataaatcaatatttccttaacattataaactcaaatgttcctaaaatctatattgtagccatatgattttcataaaattttaccaatttctcaaccaagataaaattgaacttaatttaatagcagagtatatataagaaaacaaaagcaaaaaacttttaggaagaaaaagaagaggaagacttacggaagaagaaggatgaatcagttgtgttggagtaaacctccacttacactgata

SEQ ID NO: 54133 - DNA, 646 bp, Cannabis sativa
  modified_base (592)..(615): a, c, t, g, unknown or other
aaaaaaacacaaaaaaatactcataaagggggggggggtattagaatatcagtccaatttagtttagtccttttgctatttctgttactggtgtcagtaggtagttattttagttttgttatcttagttgttagctgttacttttccttgtttagtggagcttattaagtcggttcccctgttttataggttagattgtttcttctattgtaattgctatatatagctttcttcccttgtactgctcattcaatcaatacagactttactttttcattttctctctttcacattatggtatcagagcggggaatgaatgcttccccctgatcgatccaagttcttccgctgcactcgccctgtccttatctccggcgacgccttgttcttcccgagatctccactcggcgcaatttgtcttgctgattcaacaatccttcttgtatgagtcttcaacatgtcgagcgaggatcaatcgcaatctcagacagagatcggagactcgactccatctgcaacacatattcccactgtacagacgaatccgaatctgcagattgggaatgtaaagagtcctcttgaagatccgtcnnnnnnnnnnnnnnnnnnnnnnnnagataacccaggtaatgttcttgtatcccaa

SEQ ID NO: 54134 - DNA, 552 bp, Cannabis sativa
ccaaacccaaacctctctacacaataaatacaagtgtttgaaagggttaggttggacttcaaccattatgtagtgtttcaatttactcatttatttatttatataagtatgtttctattgtttaaaattacctaaatggaggctgagtagtagtagaaccttccttcagaaaattataaactctagagactagaaagtgtttcagttgaagttcttgactactagaggctatacagtagtactactagaattcattcatttcaagatacctacttttctatatagctctattacaaagtcctacttatgaaaaataaaactctcatatttctgaaccagaaattatatggtttcccattatagaaacactttggtcaagtgggacattgaagagctcggagcaatttgaggatttttcagaattaaatttgcaaaatacttttctggttgtcattagcaaaacaagtctttggcagggataggagaaagacagagaacactctggttaggcttagattctctaggcagttcatttctcaagcttcataattt

SEQ ID NO: 54135 - DNA, 1698 bp, Cannabis sativa
  modified_base (1648)..(1651): a, c, t, g, unknown or other
tccacgtgtcccctcttgactggtccacgtatattgggcgattttaggagcaacaagtataattttctccaatttctaaatttgatttcatctctaatgtaaatctaaaaaaataattgaaatttgttcacattaattacaataacattaaaattggattctaatcagattagattggtaattggatctcaatttaaaaactaaattaaaaactgatccaattcaattatatctaatgcatatattaaaaaattatttatatttatatataaaaaaaataaaatttatattttttacgtaaaataaaatttatattttaattatacttttactgttttttttaattatttttaacatttttggttattttgtttatttattttcataaattttgttctattttattactagcaatattttaattttagttattttaaatttttaattgcattaaacttgtaaggataatatttttatagactattaaacttaattgaagggtggtatatatttaatttttacgtatttttgttcatatttttatgtaaatattaaaagttcagtatgtaattgaatatctaattagaaaatcgatccaatgcaattagtaattggattggattttgagatctaattgaattggatcggatgatgatttcaaatctaattattattagattggatcgaattagaagaaaaaagttggattgggacagatgtccaaccctactacaactataccgtcaccatcaattcgaagttggtgacccaaaaataaaaccaccctataaaaaatcttactttttgttacaataaaatttgtgactaaaagtaaacaagttgtgactattataaatcatcattcctatgatgtgactaaaaattctatggctaaaggtattagtcacaaaaataacaatttgttgtgactaaatttgttttttttaaaaaaatataaatttcatttaactagaccaactcgacctcaacaatattagcaacatcaaaagggagattatactctgaaaaaatacaattagcatataaacaagatgctccaatcataaaatgagtagcctggttagctgactatttgacaaaacacaaagaaacatccctaaaagaagataaaagttatttacaatcctcaacgacaccatcaaaagtggatgacaaaacattcaagtttctaatagcttgtacgtaccaataccagacaatcagattcgataacactaatacccagaaaattattcttcaaccatgataacacttccttgagagtcatggcttaagcaatctcacgaagaacttgctcaatctgcagtcccgtaatcccagctagacccgacccttgtgatcccgaacaaccccaccaacaccatgccttccctcatcgtcaaacagtgcagcatcaatattcaccttgagtttttcataacctagtttagaccatagttcagccccatccgaaagataccaagtatcaaatgcaggaagcaaacttttttcttgagcttttttccactgatcaagagtgatatatacgagccaaattaactatgaactccaccaactttttctatccttccacaatacttgttctctaaaactaaattagtgataacttgtatctaaatattatatnnnngtcacaagtaactttttgttgtaattaaaagtcacatttagtcacaa

SEQ ID NO: 54136 - DNA, 1033 bp, Cannabis sativa
atggagaattgtaagctggctgacttgaagttttcaggttctttcttcacatggaacaataaacaaaagctagaagagaggatattttctaagattgatagagcaatggttaacaatcagtgggtgaatagatttccatgttcagaagccgtgtttctgcctgaattgacttttgatcatagtcctattttggtatctatttactaagataacaactatgggaaaaagccttttaggtattataatatgtggaaaatggctccagattatgtccaaatggtgacacagtcctggaaagaagaagttactggctcgaggatgtttagtattgtgcaaaagctgagaagattaaaggcagtgctgaagcagattaataaggcagggttttctgaaattcaaaagactgagatgttgacaaagtcattgcttgcagaggttcaagggaaattaagtcatgatccacagaatgaagaattgatgcagcaggaacagtgtgtaaggaagaaatatgcagaaatcagcagggcatttgcaagcttcatgactcaaaaaactaagataaattggactaaatttggggacgataattctcacctattccatgcttctctgaaattgagaagactccaaaataaagttttctcgattgaagatgagtttggaaattggtgtgataccccagattcagtccaaagtgcattccttgagtattaccaaaggctgttgggatcgaagataccagttagaaggaaagttttccagtcagttgttgatcttggacctaaaatcactgagcaacatagacagattctattggcagagtacacacctgaggaagtggaaatagctgttttttccatagataagataaagctccaggcccggatggttacgggagtgcttttttccaggataattgggacttagtgaagcctgagttagtagaagctgttagttcttttctcaactctggaaagattttgaaagagattaacactactactattacattaattcccaaagtttcttgtcc

SEQ ID NO: 54137 - DNA, 714 bp, Cannabis sativa
aatggaaaggaattcaattttgttccattcttgtgtgggtgaaattttatttaatagaattccattccaatggaatggattttccatcagtttggcggaatggctattccttccataagaccaacccaatagaaagtgaaaaagaaatgtatatattttttctaatattaaattttataccactttattatattctatttcattccaattatcattattgttcctctcttatttgattttatgttataaggcgaattgtgaggcagacacagcttaacgccaattattatccctgtaatgattaatgactaaggcctattgacttagtatttgtaggtgtctgcctgcattatttctccataacttagaaccagaaatttgtaactgaaatagaaagatagtaacagtaacaaagtagaacaaagtataagagagctacatgagagaaagtagaggtaattgctttaaagatacaaggggattttcaaaaaacttaatatacagattcaagattacagggtaaagcaaattataacagaattacctaagttttttatttttttaaaaataaaaaaattagagacaaaggtcaaatgtctaggactaacctactcctatgtttattgagatcccttgcttatggcagaggaaaaccttggtaacataaacacttgggaaagaccttctcgcacaacaaaaactactaacacagat

SEQ ID NO: 54138 - DNA, 698 bp, Cannabis sativa
cagcaaaggagctatgggacaacgaaattgaaatgtatgctgaccttgaaaatcaatctcaaattttcgggttaatcaaacttagagaaataaagcaaggggaggacagcgtgacaaagtactttaattctttgaaagaatctggcaagccttagatcttttcgattattgagtggaaatctgcagaagatggcaaacaccacaagaaaacgattgagaaaaccctatctataagttcatggctggtctcaatgttgagtttgatgaggtgagggggaggattattggaagacagcccctacctccaattggtgtagtattcgctaaaattagaagagaggagagtctaaggagtgttatgttgggaaagaggacacctacatctgttgttgagagttcagcgctagccaccatgggcgcaggatataacaagaaccccccatacgtgcagaaaactgatgagaagccacgtgtttggtgtgatttctgtaataaacctcatcatactcgagagacctattagagaatccatggcaaactagcaaactggaaaagcaaggcaaagagagaaaaggcaagtcgaaccccttctacacatgaagttgagtccagccccttcactaaggagcagatgaatcactttcatgcattgttgaacactacctcgttctcacccggtattcctactgcctctattg

SEQ ID NO: 54139 - DNA, 1345 bp, Cannabis sativa
ataatatctatacataaaatatatataaacaaatgattaatgatatatatgcttctaataatttgtacactaaaattataaccatattctcctaactacaaattaagaatattgtatctatcactcttattattttttttaaaaaaaatatatgtttcgacataatatataaaatgtattttgaaagtaattatttttctaatcaaactcaattttttttcaaaatattttctaatataagcgttatatatatatagaaatcaatataaaatatgtataaaatagtataacaatgaaatttattcttttattgtatatataaaatacgtatgtatatatatatatatatatttatatatataatcacatctaaagagcacacaccaatgtagcctaaaaaaaattcatagatcacctatttcaaaaattaaaaaataaaaatgcattacttaattataaaattgtacatgtattgcacttaacatcacttaattaaacttagttaaaaaaaactaattatacgtgcattacgcgtaatatcaatctattatatttatatatataacaatggagaattataataataataataataataataataaaacttaacagaattatgagttagcatcttttattcaaccccacccgtccccacaaaatccataacaaagaaaatagagcaatacacatgcagaagttgttatctgcaatcctcttcatattttttattttttatttttttttaaacattatcaactaatattatgtacaataaattgttatatatatatatatatataacacttctcaataaaaataatattgttaatagatacttaaaaatataattataaattttaatttttaaaatattaaactattagattttgaaccactacactaataatattaaaaaaaaaaaagcttaaatttttatatttaatttaactacttaattaaaaaaaattaaaaattacactataccaaaaatatatttatataaaaaatatttaactcaattttttttttatttctccctccataggcaccttgcacaagttcgttttattaattaaatgtataattattatgtatcaattaaattaattaattgctcaaataaaaagaaaaaaagttgcaaattttaattaattgcacatcaaaagagagatttttttatgtaaaattaggattagattaagatatataataaaataataaaacaactactcaccaaaaagaggctcttttattctactttttattcatttatttatttaccatgaatgagtttaagtttgtgaggatgttacttaattaaataataagacatagaaaagaa

SEQ ID NO: 54140 - DNA, 1507 bp, Cannabis sativa
  modified_base (892)..(895): a, c, t, g, unknown or other
actccatcagtatctgcgccacattagtaattagaatattttgataattaattgaaaaatcaattcgggtatatcaaaatctgaccatatatagaatatcacgtaattaattttgtgtagattcaaatgaatataaaactatttatttatttaaatattaattcctttattttatttcataattagaaaatattgtaatattctcccacgtagtcagtatttagactaaaacattcaaattcagcgttcatcattatataataaatataagaatcatagtgatatgtcctcattatatgttgagtattatttttcatttattataaaatatttactcatgtactttatatagcaatatacttaagcgaataaactctaaactttatatttattcaggtcctctaaaattttctcaattgtaaaattaagatgcgcataaatatgagaaaaaaatataaataagagtttcattaataataactttatttgtacaattacataagggagctaagtctcatgttctctacatgatccttgaatttatgaggtgtcaagcctttttgtcataggatcggtaatcatcaattcagtgctaatgtgttgaatgaccactttattttctttaacacgttctctaatagctaagtacttaatgtcgatgtgcttgcttcgacttctacttttattgttcttagccatgaaagcagcagctgaattgtcacagaatatctttaacggccttgttatggaatcaacaactctaaggcctgaaatgaaactctttagccatacaccatgtgatgtagcttcaaaataagaaacgaactcgacctccatagtagaagtagcagtcaaagtttgtttgttactcctccaggacacagctccaccnnnnaacataaacacgtaaccagatgttgatttacgtgaatcagtacaaccagcgaaatctgaattcgagtagccaactacttctagattagcggtttgtttgaacatcagtttgtaatccttagtaccctgaagataccttattaccttctttgcagctttccagtggtctatccccgagttactctaaaatcttcctaacactctgacagaataagcaatgtcgggtcttgtgcacaccataacatacattaagcttcagacagtagaagcataaggaatgttcttcatttcttctctttcaaaatcattctttggacactggctcaaatttaatttatctcccttcacaattagagcagcgctcggtgaacaatctttctaaaactctattgatgtaagcttcttgagataaacctaagatacctcggtatctatctctatgaattcaaatgcatatgacataggatgtttcacccatgttctttggaagaaattatttcacttcacttagcaatcatttatcattggatgcaagaagaatatcgtccacatataaaacaagaaaaaaaatcttactctcactttccttcaggtatatgcattgatccatgac

SEQ ID NO: 54141 - DNA, 1179 bp, Cannabis sativa
tatttagttataacttctcaattagaatataatttacttgatcccaagtgtattcttgaatagaggttctactataccactattaaattatgtatatgttgacctcaaaaagtgatcaactgacaatagggtcgtatggatctaacactggccacgtgttacacaaaaacataatagaataagaagtaaatgcacaaatttgttataaaggttcagcccctgataatagcagttaatgacctactccccttttggttgtattaataccgagcgttaacactattcagatcggtataggtgggatctgatataacacccttaaggatacaatgtatgaattgggattggcaaatttccagtgatgagagttcttgtataggcatgtgagagaggaagtgaagaagaaaagagttatcaggcttaggcttagagattggaggctagtgtcccgcgtaaactgagcttaagctttttaggttagagttaaggcctttatataggaagccttaaactctaatttacacttaaaaccttaaatatttgtatatttaattaattaattacaaaagaccaaaatgccattgaacttagatattatttagttattatgttgggcttttagggccaaattcgtagcccagatgtagttgtgtgcacaagaaccctacagaacccctcttgcccgactagacccctgcggaggtagattgaccgaccatggtgcagttcaaaggctggccggccagctcttgtgagggagctggtctgtcacttgatgctcgtttgagtgtcggggtctccatttgtttaggtgctaacttggccttcttattagtgagttgtactaccacatggtactaattttattaatgtaagcatgtcacgttaggaggacaaaaatagagataacatttgtcccccaagtccttgtgcggacgtttgtacagatttggacttaccaattggtgcgatcgagactgtcgtagcctttgctaaataaaagtttctacctttttagccttttaaaatacatttccttgactgtctaatctcattcactatagaaaaataattgatttagctgtcttctttgatatgttggtgaagtaagtgaagaaagggtccaacatgtactatataagtacttttttttagggaaaggcctttttgcacttttca

SEQ ID NO: 54142 - DNA, 872 bp, Cannabis sativa
cttacttcaggaagaagtaagcacacacacttcaaagacgaagggagttcgctgtttgatgatagttcaaaaatcagattcgtgaagtatgttacaaagggttgcggcaaagatttagagggagcctaaacttgtataagtcaattgtctttgtaatttttgaaactttactaattgatttctttctttgggtgtggccccgtggactaggagtgttcacaagaacagtgataccacgtacaaatctgttgtgtcaagtgatttaatatttacaattattttttatattctgccagttctggtttgtttctgcaaaactattttctgtagtaatagatttacattctgttgatgtaaatgtttatagttttatatatttttgtaatatttattgatatttgtaaaaactcagtttttcaattggtatcagagtgggacactaaactcttagtgtggtccttttaacggtttcatgtgtttttgtgtaaaatgtcattttttgtagaagaaagttaaatttctagaccacaattgctcaatgattctagttatccttattggaaatttagaattagggctttcatcaaatctcaagatgagaaagcttggaggatagttctattaggatggtcttctccaattgagacagatttcaaaggtaattctaaaataaaatctaaactggaatggtctattgaagatgataaactttctccttacaatagcaaagctttacatgctatatttaatggagtaggtgaaaattatgttaagcttatatcgtcttgtgaatctactaaggaagcttggcagatccttcaaactcagtttgaaggaacatatgatgttaagcgttctagatttattatgct

SEQ ID NO: 54143 - DNA, 667 bp, Cannabis sativa
ttttttttttgttattttgtattttatttagtcaaggaatcacaaaataagtgaaaaaaaattagcaacatgtcggccatatagtaagtgacatgttgcctagtgactaaactgaaaaaaggctaagttttatgccacttttgctagccattcgtcatacactgattatcctcagtttcttgatgagctccaacgaccataccagccacaagggggtagtgatgacgattcacctgctattgatggaggtgatacagctatggacccgtagtcttagctgctttggtttgttttctctcctttaattttattgcacagtgggacactgtttattttaagtttggggatgggaaggccatttttatgtttttaatttttttattttagtttttaagggtagatttaaagttttttattttttgttggatgactatatcaacattaacttatgacctatgggattcgataataaacttatgctaaactctttgatattatttagtatgtgtgaaaaacttttaaattgtgtgcttaacatgttatgcttgcttttgatattgtgatatgaattatgtgttgttctacttattcaatatatattgtgattttatatgcctatgtagacttggtttgatttggttgatattgagataactagaacttgtgt

SEQ ID NO: 54144 - DNA, 929 bp, Cannabis sativa
  modified_base (891)..(898): a, c, t, g, unknown or other
accctgacactcatttaatgtaccctgagacccatttaatgtatcacagaatacattaaaagtacatcacggacaaaattatatccctatatattatattgatagatcaatgatacttatgtcaaggcattataaaaaaatcagctagagttaaatatggtacttaaggctgaagtaacaaggactatcgagtattgtagaataaaataagcataagactgttcaagaatcaagattgttttttataatgttttactgagtacatgaaaatagtcagaacttgcacctgcaaaggccagaaacagaatgcctttagtccacattatccgaataaagtataaaacttgactaagaccagaagaattcacaactattcatgcaatttcattaatcaacgttccacctcgttattacttacttttttgtaaaaggcttaaaattgtcgtgtccattagcggacttagaatttttttttttattttgtggtaggagtgttcgtagtgcgggtggtacattttttgactatttttttaaactaactcgcacatgcgatttttctaatttccaaaactgcacccacaccgcgaaacttaaaaactgtaaaaacctcgcactggaaaaaatggtgcggtaatgcggtgcaatttttacgattttcgcggtttggactatcacaaaataattaaactatcacaaatacaacaaagcttgagcaacacttgtcaaaaataccataagacttgtcaataaatataaaaaaaaaaaataagtttcaacaatataataattagtgaattttaggttagacatagtacatattggaataaataaatataaaaagttgtatttttataatgtgcggtgcggtttgcggtttgcggttttgaattnnnnnnnngcggttcaaaccgcaccgcaccgcgcagttt

SEQ ID NO: 54145 - DNA, 2861 bp, Cannabis sativa
atagttacattatgtgatgaaggtcgttgagtattcggttcaagaagatggtgatgatgtgaaaatagatgacgacagcaaggaaaaagcagttagtaataaaaaaaaactcaaagaaaaattagagcttcatagtaaggaagacgacaatgaaagattcacatcaaaaaacgctaaaattaactggccattcaagcagatcagaatttgtgatgacaattaagtggttcctatcttcattttagaaattggtgtctagatttcatgaaaatatttaagtgttgcttatttgagtcctgtattttttcatatttagtttattatttatgtctgttggtttataattttaaaaaaaatgtaaatatttaattttttttatatatctatcccttataattttttctcattaagaatactacaaaatttattatatcttattaagtaatctttcaataagtaaataaatttttaaatttgataaaaaaagattaacacaacttaactagtttaaatattttgtcatattttcaaaaaaaatatatatatattttgtcatagttttcatttattttcattgtgaacttaaaaattacaaaaataaaaaaaaaaaacttcatacaaattataaattagtgcaaattgagaatagctcaagtgtccatatataagattgcgggtggtttgtttggtagttggggtgtatgaggtcaaaacccaagtgtgtaacagaaaaataaaaatgtatgaataaaacatgcctctttcaaaaataacaatacaatgcttaaacaccgtgctaatcaataaaatatgttaccattcataggccaaattatacatacttatcttacatcatcaatattattttattaaatggcaatttgaatattactcaacactctcatgtggtgtacctaacttacatacttatattacataaactagtacaacttgagaatagctcaagtatccatataaaacattagggtttgttcggggttggggggtttatggggtcaaaactcaagtgtgtaactaaaaaaattatgtataaaatatgtatctttcaaaaataataaaatacaatgcataaacactaataatgataagcgataaaatatagttaccatccacaggctaaattatacatattcattttacatcatcaatattattttattatatggtaatttgaatattactcaacattctcatatggtgtactttctatactattgttgatacccatcttacatactcatcttacataaattattacaacttgagaatagctcaagtgtccataaataagattggagggtgcatttttttgggggttgggaggatgtatgggtcaaaacccaagtgtgttattgagaaaaaaaaaatgtatgcataaaacatgcctctttcaaaaataataaaatacaatgcataaacatcaattgtgataagagataaaataaagttaccatccagaagccaaattatacatactcatcttacatcatcaatattattttattacataacaattcgaatattactcaacatctcctgtagtgtacttttcacactaattttggtacccaagtttattgtcacgaattaaacctaaaagtaaaaataaaaaagaaaaacaagatgcatcaataactattatatgaaatataataagttgtaatggaatgatatatgaggtattaaaattttcaatggaaactcactaggcgacgacgtaattgatgtatgagattataagaaccattcaatctttctttagattcaaggaccttcgtgaccaaaaccttatgcaatccaataatcattgtcatcaaagtatcaactttttgcacactcacctattatacaataaaaataacttgataaaaaatactttgaaagttaataatatttttataactagactaaaattaatccaacaataagtacaaatacctacacattttatgtgtttaggaattcttagagactccatgttaacatttgtaggtatattaatgattgtagtttcatcatcttcatctggaatcacaaaattttatagaagaataagtatatcgttattttcagtgtcaaaattttatggggaaaggtgtgaaattttaaaggctgattctttggtgtgaaattttatggcacgtatgcgcacaatcacagggggacaggatctaatctggtgtcagaagttatgtaaccatcgggcgtagttctgtattaggccttaaagagctttagggaagtcatccaaagtcttccttaaacagtcaatacccgatcaccctggagttcatgagaccctcgcttgcctccaaaagcagaagcacaagatgagaactctcaagaatcagcctggcctttcacagagaagcactcttccaaatactgcaatattttttgtgaccttgtctagggaaaaggtttatgatatgaggtttggacctaacatgacaccattttgtggctttcaagtagaacccttctgagaacagggataacatttaaccccaatctcccaaaacatgaaagtatcaggagcttgtaacctactctcggagcctaaaccttttagagacgttgtggtgcgccttggccacgactctcaacatgagatgacacaggttgtcattcgtgggctagtttgcagacaggcatgggacgaaagcaccatgctgggatgggacgatggtctaatgtatgcaactaggttggtggcttgtctcgagggcctggcaacatgcgtggaggcatggcgccttgaggattggtccatagacgtatgggagtccttgggcgacgagggagactattcagatagtatcgagtggggcatgatagaa

SEQ ID NO: 54146 - DNA, 3857 bp, Cannabis sativa
ctgttgttggtgggaataaatgcacgtgaaattttatacatttgcaatccttttacaaaaaagtttgttgcagttcctgattccccatatagatgggattattgtagatatgcgttagtagtattaggttatgatgacaataaccttgttaagtataatgtcgtcaacatcggaatgagagatgatttttcaagtatcccaccacgaaaattattccacttattaattttttcttctgagactggacaatggagtgattcaactgttaactttctagcggaacctctaagtaaatgttatcttcgaaataccattgttggaagcaatagaacaataatatacatgccatatggttcagtgaagacggaaggcattgttgcattgaatctttactcaaaaagatatcgtttgattggtttgcctcaagagttaggtcatgattggcgttgttcaaattctagggtacatgtaggagtggttcacgggaaagtgcggttggctcaatttttttggtatcagaaaaagcagtgttatgtttttaaagtatgggagcttgttgatcctgaagataataattacctggataatgagggcatgtggagttggaatttagtgcacaatcatgacgaaatgataataagatttggttgtatgaatttgttgcggttcactatacttgctctccatcccgacaacaaagatgtgttcttcttttctcgctccaataataatgctagagataacgttgagatttatcagtgtcagatactcggtcaaaatcgcaatcaaattaaacttatttatcatcttcctccaaaatatcgtaattatttacgtattgttcctcttctgcatccatggccaacccgaatttgattaatgtttgatattacatttacatttacataaatttagataccaggaagtcaaccaatgtcataatctatctatatttagttaatcgcaaaatttatttgtcctaaatcttcgttacatatttcagctatcttccaacttcagcagcaatgtctcaacaattttcagctaaaaaaataaatcttattttctatatacattagttaattatagagaagagcaagtagtacaattcttattcattgctacactgctccagttaacagcagcaaaatagcccacccaagctgaataatacagtaacatatcatatcaaacactactacagtttagaatagaaaaaccataactactaggcttgtgtggagggtttaaggtagttatggacagtttagatagtgtgccattttactgaaatacaatctaacaattttacaattttcataattcaatgattaaaaaccatatttattctaacaataatataacatcacacacaacacaaattgagtctaaaaatgagtgttgcatttcatcaaacaccttccaaacaatcttcaataccaaactaactcaaatactcattaacccaaaaacacacaatcttcaatttttaatattttactcattttaactataggattttatttttgagcataactatgcaatctaatgtctataattataaataacatgtaaatactaccaaaaaaaaaaaaaatagtaacaattttttagtcagctattacaaatttacaagaacatcttttgattggtttgtttgggcctaacccttaagctactaaggtggttcggctttaagggagaaattttatttttgtgcttcttaaattatatgtttgcaaaatttatatttttaaggtaatttggttttacttaagtcgttttattttgtagtgattcatattgttactttgtatatattttgactagacaaaaataatttcacaagtgatttcaattttggagagttgctcaccaatgtggtactagttttaatgtctcatagaacaaaagcttttggctatggacaaagacaaccattaaagtttttaccttaaaatattagtggatcttattgcctatttttggtttagttatcaaaatatttaaagagttaaatatgaaaattttaccattttggtttcttttatctaaatttagtataaagaatagtatattgacaaaatttttactatcatggtaaaaaaaaatcaatgaatgtcattttcaagtttttttaggtctttacaatgtcattgtgtgttgactttctagtaaaaaaatgctgactttacaacaaaaaaaccaaaaaaaaaatgttgactttatagaatctttgtacaacaacaactctcctagctcagttgtgaagatgaagttttatcaactcttctagggtttttttgggacttatgcaaattggttcaagtacacaattttgagaatttgaaagcacatgcatttccttccatccttgctcgatttcccaagaaagagccatatgaatttctcttaactctacttccacaagagaactgactacctcctgattggaattaaaggctcaagagtcatcttgattgtttatcattactactgcaatcccagtagagccattagaccaagatgcatcagtgcagattacctttgctatttctggcattgagtacttctcctcagttgacagcttcttaagagttaagaactccctagaaccaaatcgcttctcaatattctctacgttacgcatttcagaaaactctttgaaggcagatccgaccttcgcaacaacagcaacaatatttggaggactcccattaaagcaaacactatttctttgagaccaaatctcgttaaaaatgcaacctacaaagataagaaacttagacctcaagccgctcgataggttagaaagcatgttttctaagaattgaatcaaatcaactctcgaaatcttatcaactaaaattagattagggccagaaatccataatacctttgcaaattcacaatctcgaaaaagatgcagaatatttccgacaaaagaacggtacaaagaacactctttttcagccaagaaaaggagtttactctttgtaggaagagccaagaaaggtagtgttatatgtgaagttaattagtttaatttaggtttaatttactacatactatcacgcacgtaaatatcatattattttaagggagccaatttattttcactttttataattatttcaatagaatcgatttatttctttgtaaatttcttcaattatatgtatgtggttataattaaatacaacataaataaatatcttaattgctgagaaatttcagtatagtgttattaatcgtggtttatttatttaatggaatctcttttgatattttcttttttatttttttaatttttttttgtaacaacgcttattgatgagggctcctgttacgaactaaattgtttccacaaaattaattttttgatccattataataggaataattaattatatatttatttttattttatatattatatactttttatatactatatattatatactttgtatattatatattatatactttgtaaatgttaatcaatataccttggacataaatgtttcggattaattaccatagtcttaattaccaatgtctgattagtttttattttttacaacaaatagagttttattcacaggtgatttcaattttggagagttgctcaccaatgtggtactagttttaatgtctccatacactttttatctcatagaaaaaaactttttggctatggacaaagagtttttactttgaaatattagtgaataatattgcctattttcggtttaataagtagaattaatggacataaatgtttaggattaattaccataatcttaattaccaatgtctaattagtttttttttttacaacaaatagagtttta

SEQ ID NO: 54147 - DNA, 1695 bp, Cannabis sativa
tctgcggtaccggccataacggtaagtcgtacgttgtacacgcacctattcgtacatcacaaacgctacagtaaagagaatttcaaaaaacgtatggagagaatttcggagaattacgtggcttcacttgaaaaggaatggaaagagagattattgtgttgtatgtgcctctctggtattgggtggctatataaccacaaattacaaatgaaaaaaactacgttcaacagttacaaactatatgtcttcatcaccacaaaaaaaaaaaacaataatatatatttatatgtttcacgtgttactcttcataaattaatctttatttttaaaaaacaaaccctcataattctgtaatcagttcaatttcaaatgatcgagagcgtaatatatgaaatttctctaaaaatttgataataaaaaaatatcatgttcgcaagtcatgagataagttgtaagtacttgctaggattgtgtatatatataatattaaattgtacatatatataagtatacacacaccaacagaacaagagagtgataatcacgtactaataaaaaattaattataaacaaaatttagtatagcatttttttaaaagtttatattattttgagtttttttaaactaaaatctctcaattatcactctatttgcatttaatttaagtttaaattttggcggtaaaactctgaaagtaataaattgtttacaaatttaaagtaccatctatttttcacagttaactaccaacatggactgtttatgtgtacaatcttatacgtgtgacacattcatattggtacacctaatattatcatttaaaaaacataaaattaattcaaattttatactattttttattttataaatattttattttttattttttttataatttctatttaattttgaaaataatttttaaataataatattaagtataccaatataaacgtgccacgtgtacgaaaatatacacataagcagttcatggtggtaattaatcggatgacacattaaatttgctaccggttcaatagtttggagagttttactgctaaaatttgaacttggatggttaaatgcaagtgaaacgatagttgaaagaattttgccaccataaactctattatttttatcaattagaaaagtacatacgtagcagctgcatttcaaaagaaaatggagggttttcattttataagttcgtaaaaatattatttttttttttaaaaaaaaagttattttgtaggaattttcttttaaaaaaaaggttataaaaatatagggaggaaaatagtataacccttttagttatcctagggtaactatctttacctgtttttcccatatttttaaattttttattgattttttgaaaaaaaaaataaaatatatgttatgaatgactgtatatagtatagaatatgtagtataatctcaatgataatactacaataatataggaatagtattcgacttgtagcagtaaagtataatgattatatacattatacatgcatgtattcacctatatatatgtgtaactttgataaagaagtagaagtaaagtgaagagtagaaaagaatacaaagtttattactcatatatgtttaaatttataacatgttatcagcacgatcactctatctcatcatactcatatagttgataccatgtcaaatcttgtgaa

SEQ ID NO: 54148 - DNA, 669 bp, Cannabis sativa
aaatctgtttatttattagaaaatgactacacaagtttaggcaagtccactattaaagaagcagacgcacaaaagggataacaaccctcccacaacttattacaatctgaggccaaagcttctttggccaatgagttagcagaccggttgcaatctctgctgatatgctgcacggcaaggcagtgaacaaactccggggtctctcttatatcatctagtaatgcactccaatccatttttgcttgggaaatactattcaggtagttcacaacacgaaggcaatcggtttggataatgtaaggataggcaaccattttgatagctaaatggatgcccatccttaaagctagcacctctgccacttccaccgaataagtcccttgttggtgttggatttcggcagccaccacttcacccaggtggtttcgaattagtgcaaccagcccaccattaactccattctttggcacgctagcatcactgttgaggcagtaaacacctggtttaggcgactcccatctcttttctggttttggattcacctctaaggttgtttccttcgaatggtgttggttcaataactcctcagcttccatttggcccatttgtcccataactcattgggcaatagtttgagattgaggtgttttttgttcctcctattccaca

SEQ ID NO: 54149 - DNA, 919 bp, Cannabis sativa
ttagaatttaattatacttattatttttattaagggccaaatttttaaaattagaacatggcctctaaaatatttaagacggccatggttcctttaaaacttataatacttaaatgtgattctattggctaaacgatgtgttccgatattgccgggcacaaaacatgaaaaatgtaaaatttcatatatggcataaataatacaccttgaattcaaataaatctccatataatcataaatcataaataataatctagctcataacctaattatctactaattctcattaaaaactaagtggtctttacagtatactataataaaaatagagtattgtttattctgttatttctctcttctctctcaatctaatatggtatcggaacaggttcacctgtagctattcttcttgtttctttcctccatggctcgaggtggaggaattcagactcgtaactcgaacatgtccaatcttttctctctctagaatcaaacactcgattattctctgatgatgctcgaaatccttatttcctttctagcagtgattatcctggagccagcttggttctaaagatcttaattggttatgaaaaatttagctcatggcgtcgagctatgcaagtggctttaatcgcgaggaataagttcaaatttgtcaatggcaagctccctacacctgaaaaagacgatgatgaatttgaactatagaattgatgcaacaacactgtcatttcctagattcttcatgttgtgtcaaatgaaatagctgaaagcatcatgtatatggataatgctactacgatctggtctaatcttgaagaaagatttaaccagaaaaatgctcctcgtgtttttgaagccatttgaaccaagtaatctcttgttcaaggttcaaatttcactcaactcaaatccc

SEQ ID NO: 54150 - DNA, 1079 bp, Cannabis sativa
tctgagcaagtcaagggcggatccaaacaggttagggcccctgccccaactttggtgttgtgcgcagaggccaggagaggcaaagacatgtttcagcactacgtggctcggtcgctccctgaagtgagtgaacaactgactagggcggacagtgaattatccccggagctggtcttgggagtagttctgaaggaaatttctcgagtaagttccgtctatcacttttctttcattcttctgtgggtagttcagaatttaatgcattctccatataggctagtgtgaagatggcctacgcctactctcgagccaaatcgactgctgtcaagaaccttgccacttctaacacgatgcgaagggacgtggactttgccaagaaagacgttgaggatgcgcgggcccagctcgaggtcgtgaggaaggaacttggagaggcaaataagaaactccttgctgctaagaccaaggttgctgagctgaccaaggagctgcaggatatgccatcgaccgtgcagcttgaggcagacaatgtttctttatctcaagaaattaccagtcttaaagatgagagagagagagagtcttcggactcttcttcccaggttggaggatgaggccaaggacaagaagacaagggagaaggaacttgaggcagaggtcggaggacctaaaaaggaggttgagagccaaaagtccaaggtggataagcttgagagggatgtggataccttagagacagccggtctcgagatttttaatcacttttggaaggccaatcccaaagggaattttgactacctcggcacttctaaagacatgtatcttgattactgcatggctcaggcaaccaatgagaaccctgaggcgaccacttccacttttcctaccgatcagaacattgatgctccttccacctagatcgatgatcctccggctccttcagacccagttgatccttaccaagagcctgggactcccgctgtttgttttccttctctttgtacatatttttttaatatgtctgttcggcccgtagaccttcttttgagacaaagagaccggccaagcggtctttaaac

SEQ ID NO: 54151 - DNA, 1402 bp, Cannabis sativa
gatcccaattatttcagcaatttccgccttgactaagccaaaacgacttacagacaaggccgcaatcaaacatccattggaatcacgagccacacaactaacaccaaacttgttcttagcttcaaaaatagctccgtcaacatttaccttaaccgtattgaacacaagtttcatccaacactcacatgcattgttaatatcattaactaacaacgctcacatgcattttttgtttttggtagatgaagaagttataaagaatttttttatataatgatatatatattatagttataataaaaattttgtctatttttttgaatttttttaaattatttacaatattaaaaataaaatttaaaatattcagttcaacaatagactaatttaaattttatttcaacaccattaaatgttaaatattagtgtttcttaaacacagaataaaaaaaaaataaagatataatttattaatgtacaacaaataaaaaaagtgatgccacctgaaaaaaatctctctcgatctctctatagattatatatagcatcattttatgtaagcacattttgtgaatcaacgtgattttctctttccggccaaagaaattgcggctctacgccttcatgcgtgtcacatttattaaatggtcatatttatttgtatattaacatgtcaaaatcgtagggttccaattaaagtatagcatacatcgacttgtctattaatggtattttttattttctcaaaaaaatagaagaaaaaaggaaaagaacttgtagagattgtgcttgctctcgcatatatttttatatactactgaggagccaatatataaatgataataaaaaaagtacatatattttctctttgttgaagctaaaagtaaatacaatatcataaagttacataataaaatttataaggtaaccataatgtaaagtttaaacaaaaaatttaaaaaaaaaaaaaaaaacaaaaaaaaacaaatagtatgtcaacatgtttgtatattatttttatttttatttttattatatattgttagtactcttatacaaattattaaaaattattaatgtcaaattaattcaccaaaaatatcacaattttatatataattaaatcactagtataaatatgtattaatctatcaagtacttatatcgatataaacaagagaaactacaaattcaacttaagatgttgatggtcataagtatctattttattattattatccttattattattttgaaattgacaatgtctaaatgataattataatatataacaaataaaaaaaaaatcaaggaaccatatcaaatgtctaatatcttattctcacaaaatttgatgttgtatttttgtaaattatttagtgaagtttcttactttggttca

SEQ ID NO: 54152 - DNA, 1228 bp, Cannabis sativa
catttaatcacataatcttgaatagtttccactgtgctgacaacacaataaacaagaataccaatgtgataaggatttggatgaatttataaatcaaataacatataaataatcacttgaaccgaatgacatactagataagtaatgaatataaatctatttctttattgataattgaatagaaaagattacattgaaattaatagagttttatttagggcacaaagcgtgacatgactttcttcagtattacaatgatgagaatgtgtgttagagacttgcaaagtgatgagaagaaaagagagagaggttaatgccttattatttctgagctcttaagtgcatgtgtagaattaatgaaatcatgtccctttcatgtagggttaagaccctttatatagtattagaattttacaatttgttagtcaaaatacataacacacaaaaaaaaaaaaatatccctagaaaatagggtagttatactctgacaaagctttcctacttttgtaggcagttcaagttgttttgaagttgtaggtgtgttgtggacgatttggagtcttctagaaggcctatgggaaaagtacaattgttagagcataatacgtgcattgaccgacctaccatatttggaggctgcccggtatatgggatgtcacgcttggctggccagctcgaggtttggccagggtcttgccaatgcttatgtatctctgtcttttctggggattttgatatctggatgaaattttttcagaaaccttaaagatgtggatcttgtaagtctccatggtcttcttgtttgagtctatgttgcaaccttgagatcttgaaggataggggctgcacaatactagcatgaccgtttagtgctgacctgtcttccacgtgtctgctgcttttgaccacgtggagctgctatgtctggtggagaaaaatttggataataaggtctatcatttagtttttttattagcaagtgactcatcattttttttaattataggctggtaacgctttttttaaagtgttataactttgtgtaattaaagggataattacacatatactgaaatttctaacttttttacttttacacggtggggcagaatttttttaaaaaatactgtgtaagttttatactgcgtactctgataagttttcactgttgttttacggttgttttttagttgttccactgttgtttttacttgttctattttgtgtt

SEQ ID NO: 54153 - DNA, 1152 bp, Cannabis sativa
  modified_base (73)..(76): a, c, t, g, unknown or other
ctcggttcatggttcagtaagcccgtacttgtttagtactttaaataaatgtgaatgtgaaagcatgttaggnnnnatattagattttaattaattattaaatcaccataatcacctaatctcaatgcttcataaagcatccttaccactcttaattcacgagctatgtatgtcactattgttgcccgataaagcgaatgataagtatgaaatctatccgcagtttcaacgagtaattactcataatggtaatgaccgtttccaaccctcgatcataatcgaggcacaacaaacacatatcaggatctcgatcataatcgagacaataacaatcataattgtttctcatttaaccattagcggtgcataacacttttcttacctcaatccagtatcagcgtccaggctgacctgagtggaaacaaagtttgacgatcccgggtcctatgtcacgacaacaaaattcgataaatactttaaacaaaaactccaagaacaaaccctaattcccgtaactggacaaaccctaacttccaatagctccaaaataagctaaacaactcccaaataccctaaaccagaccttgaaaacccccacccaaaaaccaaaattttgaggagaaaccgtagaatctcccctgcagaccaaccggttgatcggttctaccataccagaacaaactggtcgaccagttctggcaggcaagggactctaagttttcacccccaaaatcgagccaaaacctgatcaaacctgtcgaacagctccagaacagtttataaacataaaaacaaggtattcaattcaccaattcacaacaattcatcaaatttcacaagttaccatgttagaacctaaattggaccctaaaattcaaaatttcttactccaaacatagcagccattaaaaacacttaacccaagctcaaacctactctaaaacaagcctataaacacaacctcaactcaatttaaccctacagccacgaaatcacaaaactttaatctaaaaccaacttaaaaacttgaaaattcttaatccacatagcaaagaacttacctcaaagtttctaggttgtcttaaagagtaatatcagctagaaatggatggattttgctctggcttctaggttgtttgaaagaaagaggga

SEQ ID NO: 54154 - DNA, 2086 bp, Cannabis sativa
  modified_base (1476)..(1491): a, c, t, g, unknown or other
  modified_base (2013)..(2028): a, c, t, g, unknown or other
cattgttagtagatccagaatcaacaatctaaaaggatttgtcattctttaaaacacatgattcaaaaacaaaagcattaccttcgttcgaaatttctagaagtctgggacatctttcttcctgatgtcccttcttatcactatatgaacattgaagagtacgactgtccattgtttcaatatttgaacttgaagaagcagcattgttagacgtatcatacttaattcttttcctcttactcaagtctgcaaaattggagggtggcctccttgtaggcaaactccgctcgtaagcacgcaattctgcttcctgcttatctacagcagatgagttaaaattattgatcatataagatacaacaaaaccattatattcaggtggaagactattaagaatgaattgaacccactgttctcttgataaatcaattcccagcaaatttgctttctggaacttcagattcatcatcattaggtgtgaattaatgcttttaccaggatactttttcacactgtagagttcatttgcaaaggcatgttcaaggaaaggttcggggtgtgggttatctattttgactctacaaatatcaataaatagaaataaatcatttggttcactcaaattcatacaaaagttcagaaaataacatttatgtaaacatgtttgtaaaaataccaaaataaaacatatttaattattttcgaaggtttctaacaaaatgatacagtgtcccgtttatgcgagagtgtaaattccgggggacaaagtcaaagcgcttgatcctttgccccatactttgagatgctcctccccgtcgatcaagcagggacgcccattctttcagcgagctacgagagagggtctatttggtcactatgcctgtgggtggaaaaaccctcctgattcaatcccggtagatacatcttttgtttcaagtcataccagactagccgacctaccttgtgtctctgtatttagcgagctagtagcaatccggtgaaaagctagtggcacgatagcagtttcttggtctcaagccattcaatccattcaaagatatcatctattgaatagagtagtcaactcatctaaaatgaaaaacattctagcaatcttttattcgattgaaaaaagaatctgacgttgtcccgtttatgtgagagtcaaggtcattcatatttcttgaacttctaccaatgtttcatacttttgtaagtcttactcttagcagccactattggggtggacattactaagaataaaacactgagaaataatatttatctttcgatattctacggtgttaaattgctaatgaacgttcatcgattagggatgattactcactaaaataagaactatgtagaaccaacaatggatatcgaatgtctctttgataaaagctcattatttaaaatgtatatttatctaatcacttatcttagtctatatattttaataataaaaattacttnnnnnnnnnnnnnnnnaaattaattaaaattaattttaaactttaatttaattttctaattaattttcgaaaaatctatcataaaaatataaatttcaaaaattgattaaaatataataaaataaatacttgaaaaatatcttatttaagttgttcaaaaataataaattttcaacttaaattattttgtaaaatttaattaaatatcacattaagtatcttgaacaaatcatcttaatttaaacaatattccatttaagttgatttaaaattaacaaattttcagcttaaaaatatttaaagaaaatctgaataactaattttctagaaaattctacttaattattgatttcaaaatattctaatttaagttgatccaaaattatttataataactgatttcaacttaattttttttttttatgaaaattaaataattaagtatctagaaaaatccaaattgttataacttcttaatttaattaaatacagaaaattacatatagtttatccaaaataaatttcattaaactaagtnnnnnnnnnnnnnnnnaatttcaaaataatctgatgaaaaattaatttcatatattttgaaattaattatgttg

SEQ ID NO: 54155 - DNA, 1037 bp, Cannabis sativa
aaaaaaaaaaaaaaaggtgatatagatgttaagtaatttttgtatttattttaaatacttaatataattttaataattaaaaacaaaaaatagatttaatttttttaaataatttttttttcttaatcaatattttaaactctaagtccaacctaaaccttgaaactaactaagccttctaatccaaatccaacataaataaaatcaaataaaaataaaatttacaaaacatacttctattttttatttttaaaattaaaaaaacaaaaataattatagaataaatttatatttttcaaaatcaaattttaacaaaaacgttaccaaattactcgacataacatttgcatgcttgcaactgaaaaaatgtcaaaccccatgtaatgaataaacatacaattttaccataatgaattctttcttttggccagtagtatagattaatgtccctattaatatgagatgcaaattcactagtcgctatctcttaaaatagacatccaaagtttgcaataaaaaatcaaataaagatgactgggaaagaaaacattatgatacaaaaccgagccacagacacatttgcaaatgaaagtactacatcaagggaaaagcataaaagaagctacgctaaacaactacgagtacaagaaaggcaacaatattacttctctcagaaaagtgtggatgcaagttcagaaacctctgttttaacctggtcataatctgactttagtttttccagttcctctgggctcagttctcccttggcgggcttggtcattaccagaacgcagcaagttggcctctttgtggcccctgcatttgccagatcctgaagaaacaccattggtcagaggctacataatatgggctggagagaacaaaagaacagagagctttcacatcctaggggtagcctaatagagacagtaatgatctatcagggcaagctaatataccatatataaagaacatttctgttaggggccatggtgcttagcaccacattgaggcgtcctataaatagttaaagtaag

SEQ ID NO: 54156 - DNA, 905 bp, Cannabis sativa
tttgcgattttttagtatcgcggttcgggtacggtttggaaaattagaaaaactgcatgtgcgggttggtttgaaaaaatgattaaaaaccgcaccacccgcaccgcgaacacccctatcgtgcgctgcttatagaaattttaaattatatatatgaatatttatcaaataataaaatcatatcaaataattttaaatttatttttatgtaaaatttaaaatatatatttattaaaaacaattatataaagaactctaaacaattttttttgtttaaaaaaaaaaactatccatacaatttcttatatacaaaaaatatcttcaaatatacattgtgaaaagaattaaaaattgaacaatactaaaaaaaaaatatagatataataaaacaaaaaagaagatcgtaaatttattaaaaactcattcagataatttcaaaagaactatcattatcgtatctcacttatagtcaccactacatttaaagttgatgtcatcaccgtattgccacgttactgccttatgactcagctttataatatatagataaataaatatagctaacttgaaatttttattaaaagatattactaatcaaaaattgaaaaatatgagtgatattggaataaggttttaaaaataaaaaataaataacttctttatgcacgtaatatatattaatatatatatactacataatatatttaatatatacataaaacacataatatacgttatatttgcttatttaaatttttttaattaataaatcaattaatatttatatatttagtaagaaattaataaaataagagaattaaggacataatagataaggtagaataaaaccaatttagaataacatgtcactgccttcttgttgctcctaaaatcgcccaatatac

SEQ ID NO: 54157 - DNA, 2943 bp, Cannabis sativa
gtatgaatattgggaacgattcaaatggttatgtgctagttgccctcatcaccaaataagcgaacaagtccttatccaatacttctatgaaggcttgctaccgtgggataggagtatgattgatgcagctagtggaggtcccctagtagataagactcttgtagcagctagaagcttaatttcaaatatggctgccaattcacaacaatttggcattcgctgagaccttaccccatcatcacgacatgttaatgaagtgagcgaacccttagagaaccaagttagttagcaattagctcaattaaaatttgtggtacaatagcttgctttaggccaacaagtgagaccatgtggaatttggcaaactgtaaggcatgcaactgacacttgccctacactaattgagggagagattgaggatgtgtatgatgtgggtgattttcctggtcaactaagtcagatgtactatgaacccttttcacaatcttatacgcctaattggaggaataatccaaaatgctccacagtctacacatgcaaacctagtttcaactttcaatagcggcctccatataattttttatcgagacaaactcaagcaccacaagctacactgcaatcaaatgccaaaccctctatcgaagacttaattaataccttggaaactaatactctaaggttccagcagacaactaaagcctctttgaaaagtctagagaatctgtgggccaactctcaccatcgtataattaattgaaagctcatctattcaataagtttccttcttaacctgagaagaatccaaaggagaatgcgattgcattaatattgagaagtggaaagtaatatgatcctcctacaatctcgaaaccaaatatagtgccataaaagtcgcaagttgatagcccaattgatgaaacagtgtcaccaaagccaaccaatccttcacaaccaaagcctacctttgtcataccaacacctttcccaagtaaactaaagaagactaaaaaggaagaagtcgacaaggaaattcttgagacatttcgcaacgtggaggtgaatatccctcttcgtgatgctattaaacaagtgccacactaagccaagtttttaaaagaactatgcactaataactgcaagttgaagggtaatgaaaaagttaatgtgggagagaatatttctgtggttctacaaaagaagcttcctccaaagtgtaaggatcctggtactttcactattccttacaccattggcaataaaagtattgagcagtgtatgttggatttaggagcctctataaatgttatgcctttctccatatacaactctttgaatcgctaggtcaacttgaagaaactgggataattattcaacaggccgataggtctaatggttatcttagaggtgtccttgaagatgtattagttcaagtcaatgaattggtatttccagcaaacttctatgttttgatatggaaggtgaatccattccattctccattccaattttgttgggaagacaattcatgaaaacgacaagaactaagattgatgttcatgagggaacattgactatggaatttgatggggaggcaattagattcaacatttttgaggccatgaggtatccaagtgatgtacatgttgtttattctcttaatgtgttggatgactctctcaacgagtctaagatctgcataatgaatattttttggaggttgcaaacgagaaaatttggtgatgaatggtggtgaagaatttttcgatgagatggtggatgtaataaccacactcaatagtgattttaacaagatttataaaaaggtatcgttcttggagttgccaatttcaactaagaaattacagccttccattttacaaactcctatacttgaactgaagacgctgccaaagcatcttaaatatgtttacttgtgggagaatgagactttgccggtcataattgctagagatctcaaccatgtgcaagaggaaaagttaataagagtgcttcaggcttacaaaacttctattggatggtccattactgacatcaaggaaattaactcttccacgagcatgcacaaaattctccaagaagaaggatctaagccaacatgtgatgcacaaaaaaggataaaccccctatgatggaaatggtgaaaaaggagactttgaagcttcttggtgtaggcatcatttacccaatttcagacaatcaatgggtgaaccctgtttaggtggtgccaaagaaatctaatatcacaatggtgaagaatgaagataatgagttagtgccaacaagaatgtaaagcgggtggcaagtttgtatagattactgcaagctgaatgctgtaatgcgtataaatcacttcacattacaatttattgataagatgtttgaaaggttagcatgtcatttttctgattgctttcttgatggatatttgggatataatcatattgttattgctcctgaagatcaagagaagataatatttacatgcccttttggtacatttgttttcccagcatatgtcatttgggctatgcaatgctcctacaaattttcagcgatgtataatgagcacattttctgactacattgagggcatcattgaggtcttcatggatggttttagtgtttatggcaactcatttgacaagtgtcttcacaatctcactttgatccttcaacggtgttgttatcctgatatttgtcctcctcacatggcagtgcttacatggacaaaatcagtgccacgtggcaatacatctcacaaacgagaaggccaagtcagtacctcaacaaacggagaccccactcaaacaggcatcaagtgacacaagcttcctcacagaagctggccggccacctctggctgaccccatggccggccagcctctggacagtaccatggtcggccagcctctagatagtacc

SEQ ID NO: 54158 - DNA, 1139 bp, Cannabis sativa
aggaggggtgcatgatggcggtttgtgaggcgaaggtttctggttcgatggggtctgagaagcaaggatgagcaagagggaaagagagagaatacagagagtttgggagttttttttttttgaaatgtgagggatgggatataactaaaagttgagatataataccaatacaccccttatctaagttcaccccattaatatatatatatatatatatttttttataaagacacccccattttattacaaaattagatcttattaaatagagaattacaccccaactttttaataaaaagaccatcatattcagttatttttctccatcgttaatctccctccctctaatgaaatttggtacagattgaacttaaaaaaatattgagaactcagtaccaatcaatagataaaaaattgaaaggagataaaaacaaacataacaaaccacacaagagaagatacattcagagtaagaaaatgaaataaaacaactgagagaattaagcaacaaaaaaactgagagaaatatattgcatatggtaacatcaatggtatataaatttatttatattgtatataatgatataagaataacatcaattatatataaaaattcatatatatgctcgactacactaattaaatgagaaaatggtaataaaaatttaatactgttttgttcaattaataattttttttttttaatttttagggtttgaagatacacattttaactatctaatgaattttagtaagttaattaatttttataatgtaacttaattttttaacttgtctattttagtcatttcacaaaagataaaaatgtatttaaatatttggtacatttaataatactaggggtgtaaatataattcccctaccaattatgactacctttaatttctttaaccaattttactttaaattatgcatgaaaaatcaaattttccttttaatataataatgtttctaatgaaaagaaaaatagaagacattcagagcactagcaataaatatctctctcataaaaaaaaaataaataaacacctgctaaaaataacaaattcacatcatcattttgtaaaaactacttttgtcactataattttctatttccagagtaattattagggatg

SEQ ID NO: 54159 - DNA, 668 bp, Cannabis sativa
ttttattaaagaaagtgttgcctttgaaattgatttcctaacttcccatgtatgggaattaattaaacctattttctgtggtattcaagcaaaaagacttgaaagtgaaattccaacaatgataatgaagcgaagagaaaagctacatcaggaaatgataaaactagactctcaattggcgacatgtgagaacattcttaagactcctgggctcaaggaattgtgtgctaaagcttctgcaaagaagtggaatagtgcaggtgaaggtttattttagggcataacttagtttttagtttatttttgtattatggatcacacctattttactcttctttgaactattgtatgtcttttctaattaaataaatttgtaccattcccatctacattcaattatattttagtggcattgttttgttttgtcaaaaatatatttttaatatgggtaaatactattttggacccgtgttttgcaaaaattactaattggaccttctgttttgttaaacgataaaatagaccctgtatttttcaaaattatacaaataggaccgtgaactggttttttttttatcaaactaaaacttaataatgatccaatctagagatgttatgataaaattagttacattttctgtatttgttcatgttaaaaattgtcttaa

SEQ ID NO: 54160 - DNA, 1108 bp, Cannabis sativa
aaaaaacactgacaaattaattaagtattaacctctaaaccaaattaaatcctccttatttatatttttagacataatataatcaattttatgtttatatggaagcaggttgtggcagagatcatagcaacgtttctgttggtatttgtgacatgtggtgcagctgccattagtgcaaatgatgagcatagactcccaaagctcggagcatccatcgtcggcggcctcattgtcaccgtcatgatctactccgtcggtcacatctccggtgcacacatgaaccctgctgtcactctagcttttgcaacttttcgacattttccatggaaacaggtacatattatattattattactcacatatgatatatgaatgattggttgttgtatatatgtaggttccattctatgcagtagctcaagtaacaggtggaattttaggagcaattacgctacgtgaagtgcttaacccaatacaacaacttgggaccacaacaccatctgggacagatgctcaagccttgatcatggagattgttgttacctttgttatgatgtttgtcacttctgctgtcgcaactgatactaaagctgtatgttattattaatttctaatttctatctcttttccttaatattattgattattaattttctgaatatgggcaggttggagagctagctggtattgcagtgggttcatcagtctgcatagcatcaatgtttgccgggtaaacataattattaaaatataacttaaataattaataaaataactttaattattatttacttaataataaaatattttaaataacttatttactattttattgttttataaaattagttaaatatttattcttataaagaaatttaaaactagctagatttacttgtattattattatttaaattaataattaagtaatagcaaccactaaaaaaaatatatatttagtgataataacatgattttttttaatgacttaatgtggctttatattcacaataaaaaattacttgtgattaaaatatagtgtttatatacaagttgtcactgatttagttttagttacgacaattattatgattaaaaataaatttag

SEQ ID NO: 54161 - DNA, 1297 bp, Cannabis sativa
aaaaaaatcaagtcccgatttgggccagttataaataagaataacctctaaacaaatcattcatataattatacctttagttacagaaatctaaataaaaataaacaactaattttaaataaaactaatatttacgtgcctcggcatgtaacttttacttagtatatatataaagcaacgaattttattaatttaacaatatgaaataactagtaaatagcccgcgcttcgcgacgggtagttaaatttttttaaatgatatatatgaaataaattttatattttatgaaatgataactaaataataaaaattgaatcaaattttgttaatttttatataatttttcatcaatattaaaaacaaaatgtatttaaaaaattacataaaaaatattaaaatttacaatttgatataattttacaataggtgtgatatttaataatgattagaattatatatcaaattttaaattttgatatttttgatgtaatttttcgtttcataataagagtaactattatacaattttttatctaaaaaaacaaataaagagatatcttcaaacactataattaaaaaaaagataattaaagaatccccgagataaaaaaaaaacaattgataaatctatagaaaactcatcatatgaaaattgttgtcatcagtatctcatttgtagtagtcgccactatattcaaagtatatgttatcatcgtatctcacttgtagctttcgttactatatttaaagtcgatgatatcaccatttctcacttgtagttatcattatttttcctattacgtttaccctgtacattaaataaattaaacattaagttagctattcacattttatatgtaaattattctgttataaagtcattactttaaatcaataataatagtaaaaaaaaataatgtatgtttaatattacttgaaaaatatgtttattattattattttttttttaaaagaacataagttcattaaaattaagaacaaaagatgggaaacaaaagaaaaattatttttccttaatacataccaacatgtttatttaatgaggccatttttttttaaaaaaaaatatatgtttatttaatgaacacagcaaaatgacttgcagaatgtcttagagatgtttaaagattttgatgtaacattatcatcgagaaaaaatataagatttttattattctaaaagaaaaaatatagttaatttatggaaaaaaaaatccaacaaattaagttaataatgctaaaaaaaagcatgaagaaaaagagacataccacttt

SEQ ID NO: 54162 - DNA, 846 bp, Cannabis sativa
  modified_base (545)..(545): a, c, t, g, unknown or other
gttgattgtataaaaggaaagttagctgctaaggttagaaagagtaagtcagacaggtgcacagatgtattggagcttattcacactgacatttgtgggccttttgtttcacctactatgggcgggtataaatactttatcaccttcattgatgaattttctcggtatggtcatattgagctcatttgtgagaattctgaatctttagatgcctttaagattttcaagattaatgttgggctccaaaagggaaagaagattaaagctgtcaattattatagaggtggagagtatgatgggcgttatgatgaaacttgaaggaacctcggccgttttccagatacttgcaggaatgtggcattgatgcaagatatacaatgccaggtacaccccaacagaatggaattgctgaaatacagaattgcacacttcttgatatgtgcctagcaagtcggttccaaagacgcaatacgagctgtggtcaggcaagaaaccgagtttgcatcatttttcacgtttggggatgcaaagctgaggtaaggccntataaccctaaatctaagaagctggatccgaagactatcagtgggagtcgtataggctacactattggttcaagaggttctaggttctattgtccctctcacaccaccagggtgatggaatcagactaagctgtttattttgaggatgaatttggttcaagtcaagggtcaagagaaattgtattcagggaagagcgtgtttatgtctctatagctgttgcttccacttctgcttctaatcctactaatgatctcgtgattgaacaagtttcaatgaaagctcatggtgaaccttaagatc

SEQ ID NO: 54163 - DNA, 843 bp, Cannabis sativa
attcgatgggttcttcttctacaagaatttgatttagaaataaaggataagaagggcacaaagaatttagtggcagatcatctatcaaggttggaactcgaagagagtcagaatataagggaggttcagatcaatgagtattttcgtcatgagcaacagtttctcttggattctactgtaccttggtttgcagattatgtgaactacttggctgcaaacattataccaccagacttgatgaggcaacagttgcaaaaattctactctgaggtcaaacactactattgggaagagcctattctctataagaattgtgctgttcagattattggaagatgtgtgacggaagaggagatgttctctattttaactcagtgccataacttggaatgcggaggacattttagtggaaatcgtactgctgcaaaggtcttacaaagtggattcttttggcctactttatttaagatgctcaccaatttgtccaagaatgtgatcgatgtcaacgaactggaaatatctcgagaaggaatgagatgcctttgactggaatattggaagtggaactatttgatttgtggggcattaatttcatgggacctttcccgtcatcatacaataacacgtacatatttgtagctgtggattatctctccaaatgggtagaagcagcagaaacacacctgaatgacggtaaaacaatgctaaactttctttagaagaatattttcaccctgtttggaactccgagagcaattataagcgatgaaggaagccattttttcaacaagcaatttgaagctctacttgcaagatatggaattcgtcatagaactgcactcc

SEQ ID NO: 54164 - DNA, 903 bp, Cannabis sativa
attgcataaaatacaattcaatataatacaatacaatacaatttaataaagaaaattaaattagagttagatatttttggtatagtgtaaaaaaaatataattaattaactaaattaatcaaggttcttttattattagtgatcattcattaaaatttgatagtttaatattttttaaaattaatatttatagctatatctttttgtaagtaaccaaatgaataattaatgaaaagtgttctatatatatatgtataaaagagatgaatatacatcaaaaagagaaatgaccctatcaattggtacaaaagtagtctttttatagaattttacaagtacaggccatttagcaaaaaaaaaaattgtaagaccaaactgcaaaataaactctaaaagggcttcttttttaaaatttattcacattaggtatcttatacttttaaaatgtaaacacacagacacacatatatatatatatatctagtaagcaaccaacatatttaatatgttaaaggcaatcttgcaggccctctatactggcctgtgttcgttgtggcagtagctgcttcgatcatagctagccaggctatgataactggagcattctctatcatctcccagtctttaagtctagggtgttttcccagagtcaaagtggtgcatacctcttctaagtacgagggtcaagtctacataccggaaattaactacttgctcatgattgcttgtgtcatagtcactgctgccttgaagaccacagaaaatattggccacgcatatggtaaaaaagacttgaacttgaatatgtatctatatggtatgatcaactcaatcatggtatttattcttatacatactacataatcatatattgcaggtatcgcagtggttactgtaatggtg

SEQ ID NO: 54165 - DNA, 1124 bp, Cannabis sativa
gtctgccagcaattactctcaactggatctgcgagagcacttgaatcggaagaaacctgacctttgccaacagcttggtcaaaagaaagaggttccaatccaaatacggataaacgagctagaggaaaagttcaggagatatgaagtggggtaattagggaaactatctcgatacgactctaacgaagagcttgagccgtatcatccagacataatgaatgccccttttcatttaggatacaaaaacctgcatgtcttgtcatatgacaaaaccacagattcggtctcgcatttgactaactttaacacaataatacgagcgaggaatgtgacaaacaatttacgctgtattttgttccccacctcgcttgttggattagcgagtgtctggtttaactagtttacccatcattcaataactttatgagagcagttgtcaagggattttaagaaacaattccagtggtctaaggataggcgccccaaagtagcctcgctaaccaatataaagcaacagcccgacgagacacttaagacgtacttaagttgttttagtacggctggggctagggttaggaatttggatgacaacacgcaacttacagcccttcaggtggggatctctactgatccattaaccgtagggggcgagttgtgggatgacatacaaggacgtccagtgagaagcatcactgagtttaactaaaaggctcaggtgttcgttcagaaggaagaagctcgaaaggaaatgaatctgttaaaaaccagctcgagaggcaaacccagcaatgtttcaacaggtactgttcccacgagagttgacaactcgagggctcctggttcgggggctcctggttcaaagagaaatgacggtattaaggaactgcgaaggatagaaagaaacagaagaagcatgataagtatgtgccagtgtatactatttatactgagctaaatgaaactcgggagaatatttaccttgcacatgaggaaaaggtttccttcggcaagcccgagcccataaggaattcaaggagcaaaagagatcctaaaaagtattgtaaattttataaggatatcgggcattcaatcgacgaatgttgccaattgaaagatgagataga

SEQ ID NO: 54166 - DNA, 841 bp, Cannabis sativa
ccaagagccttggggtcttgggtctcctctgtcccgggtcaaaatctagatcctggtccagttctatctcatgtcttttgtcctggttcgggtcttaggtcaaagtcatgggtcttggtccccgattcaagtcaaagtggatattcccggtcttggttagggtctcagtccgcgtgtaggtcccggtttgtgttcagtaatggtccttgtctcagatcgtggcctggtctgggtctaggtcacggttgggttctcaggtcccaggtctgagtatcgggtcctaggtcccagtcccagtcccagtttgagttctagtcttagtccaggtttaggtctcggtcctagtccgggtttgggtcctagttgtgatctcagtccggggttcaagtacgagttctagtactagtcaggtttgggtccgggtctaggtttgggtttgggtctgagtccaggtttcaatctatgtcttggtccgggtcttggtctaggtttgggtctgggtctgagttcttgtacgggtctaggttctggtccaggtctcgagtcacgggtcctaagtcacaattcttggcgtaagtctgggtcggggtttgggcctgggtcttggtatcgatccctgtctgggtctgggtctgtgttcggttctgcgtctagatccagttttgggtctaggtccaattcctattccaaggtcctgattctggttctcgttccgatttcgggtttgggcccgagtcagggtttaggtcctggtctggaaatggttacaagttcgggtcttggtatgattccaagatccagacaccgactacgggtgggttccgagccccgggtcgttggt

SEQ ID NO: 54167 - DNA, 1046 bp, Cannabis sativa
agttctcagagatgttgttgttctacgaaaaatgagaggctcaaaactcttcatattcgagtggttttcccatgttagaaatgagaaatgtgaagttgtgaatttgacttctctgacttcatggatcttagctgttgtgaaaaactagaagaacggtcgaaacagaattgccatcggataagcagaagccaacgcaccacaccatttgtcaacctcagcactaggtgtttcttttctgggctctcgagttgtcatttggatacttccaaggttcttaaacttgaggacgagttctcccaccccatttttggccattttgaagagaattatcggatcaaatttgacatttgaatgatcgaaactagcgcagcaatttgattgtcaacctaggcgttgggctctgtttccaaaccctcgggtttgtggttttcttcccgagtttgcttgaatcttaattatttctaatgatagaaaaaattctcaaaacactttttcgagaaactgattggaaacagcccaagttgacaatatgttaacctggttgatgggtcctagttttggccccttagaagtttcgtttggtccccgaaaatagttgaatctaaatctatgctgagaatggagaatatgcctaaaagagttctcgaaaataatttagggatgtcaatctgggcgctgagtgaaaccctaggtgccaaggttgacttttggggtgcaggttcatgtaattttagctcccgatgtcttcatggtatagaatactaaaatatagtgagttggaaacaagttactgaagtccaaacttccaccctaaagttcccaaagtcaacctgggcgcagggctagggacccctcccaggttgattgctacgactcgtgtctattcaattatgttacatcatctttcttgccacatgtcaaacattgatgtccatgtcactaaggaaagtttttggtttaacatttgccccccaagtcaactttacatttgtgtggagttgacttgatgacgtgaactgagtccgtttctctcaaaactaccagat

SEQ ID NO: 54168 - DNA, 562 bp, Cannabis sativa
atgttgtagttatttaagatactttgtaaattttaaaaattcgaaaaaattttacatgtcgaaaataaggttcaaataatatgttacatgtgtgactcttttattttatatacataagaaatagactatttgaatattatttttttatattgttaattattcttaatttttcaaaattttattaaatatcttaaataattataacgtccacaactataaaaaattaatctattttttttttctaaatactggaataataaaaaatacatcagtagtacacttttttttgaggtgcattgtaaaagtacataaacaaaattattaaatatatatatataaaataaatgttattaactatacgatatatatgtcgttcactgtagctagaacgataaaatagtgttaaaaatgctgctatgttggaggtgccgaagtggagtatatactaaatttgactgttatgctatgctatttaataattaatttaagtaggtaaaatttaatgttaaattacatcaataacaatacgaaaacactgtattttatcaattctcaacttaaa

SEQ ID NO: 54169 - DNA, 855 bp, Cannabis sativa
tgcatcctggcaccaccaaaatgtaccaagatcttaaaccctacttctggtggagcaggatgaggaagaatatggtagaatttgtatcccggtgcttagcatgtcaatagatcaaggctgaacatcagagaccggcaggtttgttgcaaccttcgacacttcctgagtggaagtggcagaatatcaccatggactttttggttggattacctagaaccacaggtttatatgattcaatttggatggtggtagatcgattcacgaagtctacacattttctactagtaaaaaaaacctttacagtggatcaatatgtagaattatacgtcaaggagatagtgagattacatggtgttctaaagactataatttcggatagggatctgaagtttacttctaagttctggcaaagtctacagtgcactactacaaaattgcctttttccaacggtttataactgtcttttatactatttcccaacggttcctaaaaccgttggctatgtgggtgtcataaaaatatggaactttaaatgacagtttataattgttgaaaaaaatcacattaaatgacagtttataactgtaaaagaacgattttaaatgacaatttataactgttggaaaaaatattataaaaaataaattattttttaatatatatttttaaatattaaatatatataataatatttatttttatcaaaaaataatatattttaataatttacaatatatacaatattattctggacaaaaaatacaatagaaaataaatgataaatagaatattacaacttaatctttaactaaatattctctgaacaaaaaatatataataataatattacagat

SEQ ID NO: 54170 - DNA, 856 bp, Cannabis sativa
gttacaattaaaatgtaaccattaagtggtcaccattagcaaattaaaatagttagttaaattagatcagagcctaactaacctaatcggttgcaatccaagattcaagattcagttagtgattcctaagtaacatacttaactacacatctactataaatagaaggaaattaaatctagaagacttacagctccaaaatgactcctcaaaccacagaatgaagatcttggagatccagatccagtaagagatactctcgtgttcaaagaataagaacaaaagaagagttagagagatagaaaagtaagaggatcggttcgatccaagagagagagagagagagaggaaaaacaagatagatatttacatacctgagatgaaaaaatgagctaccacccgatcaatgtgtcttggagctttgaaacttgatgtaattgctgatcgttataatggattgtgactgagcttctcagaggcagctcaccaaggacgtagccccaaatttttggtggtgaaccttgtaaaatcgctctgtgtttgttctctcttatcctcacatctttacttaatttgttcttcatcttgttggtgcatgtctctctaaaccagcttaagaacagagttgttttcctctcaaaccttcactcttgattaatttttttgtcctaatttattttgtcattcaaagatctattcaaacaagagattagtgaagaaaagtcaaagataagaaagaaaatagtaaaactatacgtgtcaaacttttgccattaattcagaaaagaaaggtcaaaattggccttgtgcactaatgtgtgtgtatgtgagttgtgtaaggagataagtgtaaattcg

SEQ ID NO: 54171 - DNA, 2681 bp, Cannabis sativa
atatagagctcgaaatgagcttcctagcgatataaataacgtcaaaaacggatttccgagtcaaaagttatggccgaaacaaaattcagccttccccgatacattccaattggaattctggttggaacagccctgaaacaactggaattccatttttctaggcacaaaaacatgaaaaatctcaacttttaagcctccataacaaaatcaaatctatcccaatcaccacaaaacattccagagcatcaacatataacatattaaacctattttacagctcaaacacaataattgcaccaataatcaaaaagtgccattgttgagcaagctttgagttcatgaactcaaacttgctcatccacacaattaaacaataataataactcaatcgggtctaaatcttcaacaaaataagcattctataatcagattaacaataatccaaacaaactcaacacttgagcaaaattcaattcaaccacataatcaagagcttgaatatcacaacaagctttactcatccaaacaataataaatagggctaaaaagatcagactttctacttctgaaaacaaccataaaaactcactaataaataaagatgcatagcccacaattaaacacgttcaaacaacaaaataatcatttataaactccaatccacttcacaagcatccaagaacactcaatacccaaagacatgattttatgatcatcaatttcagcaacaaaactcagaattaaactcaagagtagcaaagtttgaagcttaccatcacccacaagcttccatcacccacacgcttccatcaccaacaattaactccattccaagtaagatttcaagattaaagcaaaaattaaaaatgattaactaggaagagaaaaaggggtttggctagggctaaacaaaccagaaaaatgaatttctcattttgtaaaaattcccttttagataataattaactaatgggtcaaaagaccaaaatgctcatagaacctatatatgacatatacataaatcaagggcaaaaaagtcattttcatcacatacatactcaaataaatttcaagttattcactctaccataaaatgccactataaaatcccaaaaatgtatttcgccctgaacccggttcagctcaaaatacccgattgtgactatactgcaccgacttgtcagaaaatacccaaaaaaggacacaacaagtatactttataataatatagtcataagcacgcaattaaattcaatatatagttttacctctctcaggtcaaaattacgaaaatgccttgggctcaccaatggggtcttatcatgtcattttccaatttcattcacatattataaattatataataatataattctctaataaatacacatttaactagttaggattttctaatcaaattcttaatctatgggtattacaaatttagtatacctttttgaaatatcttatattatcttagcaatttgtaaacagggcttaaggattttctgaattcatacccgtttgtctacactttttatcatttttctgcaaattcattttcactaaatgagcttttggcttatattgccgtatttaggtaattacccttgttctgttgttagtctaagtgtgtttaaagcatgagatggagttgaaagctaatttttttgtctgtaatttctgtacactcatttatctttaatttttgtggatcacatttcatctataattgtgtagacaaaataataagaacaatcatcacaacgtgttgatgaaggaaattgtggaatgtaagccaattaaatatttataacaaaaaccagtttgtatgtactacatatatagccaagaaaagtatgtaactaaatcttctattaatttcacatttctatatttaactttgagtttaattataattttatgtgtatgttatgtgtttgttctattatttctttgagttcaatatgcattaataagtgaatgtaaccaccacttatcattatttttttttttgtgatgtttttttacatattttttactttacatagttggtaatgcatataagtgagttactatatcaaaatttgaagcagatacgactctgttttcaattatttgtagcaattttactttaaaatatggagatcttaaataagatgacccttcttttcgtactccaagtatatattatttgttgtaatagacatattactagaaatagatttcttgaaagttcttttcataggcaccaattttgtcaactaaatatttttagaatgatacatgctagtgactttgcttgtatagaaaatacacgtatggatagaaaaacatttggtattttgtgtcaccaccttagaacgatcaggggtttgaaggaaacaaagaatattgatgttgaagaaatggttgatgttatcccaatttttgcactctaacgtagcatcacacaatggtgatacgtggaatcaactacgggtatctgctcgcaagacacagtctgaacaagatacatcatatgcatgctcaaaacgaagcaatgagcaacccttgcagaacgacaaacacttagcgaattcagttttcgcattgtgagtcatcatggaaatccctataacttggggatcaggttacaaagacatggcaagcagtcaaaatcccacaatcagtgtattctg

SEQ ID NO: 54172 - DNA, 867 bp, Cannabis sativa
taagtataattatttagggtgttacattacctttgtacacacttggccagcttattttgctaatagctgatcctacaagggacatgaccccaaacttcttaaagaagtaaaatatatttattatatacaataacatgtcaaaaggccacgtgaaggaagaagattgtaaaaataaaatggtgtagtcaaatcaaatgtcaaaggtactaaaataacaataataattttatctttttcttattatgacaattaattgtcacttatctcaagtccaacatagaaaagttatcctcattttaagctaacactagtactagaactcaaactacataaaagctacaagagatattcaattgtcatttaatattatgtatacatatattgtagcacttacaaaagtttttctctctcaaagtggagctcatcccaatgagtatacataatgtcctcacaaaaattatgagcaacaaaatctcatataaaacgaaatatgagatgatatatctctccaaatatatttatgatgcttgaccttacacatatacctttatttaatataaaggttacgcttaattacaactcattcttatattactgatataagaactcagttcgttgatataatatctgcctcaattccttcgcctcatcagtagtattttgctcattaaaaaattatattcaattattcattctctcattcctttacttgaatttatcttgaactctaactagttagaattttatatcgaataagatgaggcgccaataaatcaaagataaacaatacacttgtcttgaaaatcactgatgcaataagccctcatcaagacaaaattactcatagatatattcagtctaactact

SEQ ID NO: 54173 - DNA, 1404 bp, Cannabis sativa
ttaatcatcttgtagaggagatgatctttgtagtgattttgggtaatgatcattcaagaaaataagacttatggttttctaattttctctcttgatgggggaagagagaatagaaattgactcttatttcttggggaccactaccaatttataacctcataattaggttattaattttaagtatttttaatttagccctttaataaattagaaatatctcttagggtatctacatacacatttagtccatcatacgttaatacccaacgaaccataattactaaaatgatcactttatttgggtcaaattttaaataacaatacactaatatacatatgagcccatattgaagatattaacccaacaatctttccttgggctacatatgttttctaatagtgtatatctttatacacgcttaacttttgctatcataattataggtatttcaaaacaatctcgtccattaaatatactaacataggatcaaagcaacttttacaacatttagcgtagctaaacccatcaatggtcacatatatcaatataactaaatgacataaatcaatcatggatgtgtagcatgtaaattacatgcaaatgtgatcttagcatgcctattttcaactggtcccccttaattgagatcaatcttttattagttctttctaaccttatacttaaacctcaataggaagaaaatatttagagtattcaaaacttaagtccatactttatccgcagaatcaaattataaatatgtgtcaacttgatagaatattccaaatacaaactcccagtaaactagcatattcttaaataataccacatccatatatgagcaacaagctcttgaaaaaccttatgtggtatatccttaatgatccagatcacacaaaatatggagtttgtccttattatgttctatagacaccttattactctgaacttcattttaataacaattaaatcaaagtcaatgtgcctttgaccttgtagatcttatgttattactaaaatgcaacccgattgatttattgtcacaaaatatatctttaatagttttcaataatattcctaattttgcagccatatgtgacaaaaaaaatctcataattaaaatctttataagatcagaatcagaaatcttaatgatctccaaaattttctattttttgatttctgataagtgaacatatatgtaacgccctaacaattaagcacgctatgacaactagtaaaaaaaacctaatcttgctaaacagggattactagaaatataagagcggaaaaagttaaacttaattacaatagaatgaaaatataacttgtaataattttaaactttacaaacaaaccaaaaatacaacatgttttgggatcccacaaaacttttcacaaaa

SEQ ID NO: 54174 - DNA, 1351 bp, Cannabis sativa
ttctatgttatcactaaaacgttcgtggctaaatgtgttagtcaatattaaaattgaagaggcagccatgccactggagttgagtgcccctaatcatgtacgaaatgtagaggaccacaattgaagtgttttctcattctgatatcacatatgtcctattgtccttgaaattttcttttgcacaaaattaagaaattaacacaaagaaatattagctgacatatcacattcattgtactattgccatatacgactataaatttggcatttattattgttatctgtgtttctagacaagggatatgtgtacttctaagcccctttcacaggcccaattaagacaatgggccaacccaccaaaggagctagactatgactccaggtctagtaataaaattaatagatccaattttactaaggagtaagaccatccctaggtccggaagggcatctcgcccagaagaaagaagacccatcagggcatatttgtatatgggttattcctgaaaggacgattcaatagacgtccgggagctatggctaacatagctcctctctcacatagaatctcatagtatcaagaccttatcccctgtgtcagaccatgagagtgcatgtacacccaaaggatacatgccctttgtccaacaactactactctgacgctactgtacacaaagggaggtgaacgcgcgccacctatcaccatcaaatggacccccttgtacggataaccgttgcctcataggctgggcctcacctattcagcccaatgtcaatattgtacttgtattaaccccattagtgggccatgtttacatgcaaaccctagcaggtttgggtatatccataacttgactctagtctataaatacgtcattaacctttcatgcaaaaggttcgagatcaattgctaaaatgataaggctaagagctaggattcataaactaaggaaagaacacttgtataagattcaaagacttttctagctaataatattgactcgtggactagagttcattagcaatcgaaccatataaaaatcttatctataattttatattaatttcatctatttcttaagctttctttatattataccaaaatctaaaaagctcggtaaatattttggtgctttcattgaaagctgagaaaagctatgataccaaagttgtaatctacaataattgtaactaccagaactgccgtcgttaagcctgttgctcgtgaaggtgatgacgacatggacgacgttaatctgccccttgtacgtgcccagacgggtattgtggtggacaaagaggcgtggaaagcaggcaacttctctgctcgatagaatcaacaacgtga

SEQ ID NO: 54175 - DNA, 1062 bp, Cannabis sativa
aacttcgtgacagaagaagttcagacattaccacaagtttgggacatgaagtacaatggcacaggtttgggactctaacactttgtattttttctggttgtggcgtgaaatatatggaatatacgtacaagtgttagtcatggtggtgtttgcccaagagtgggggatatggttgaatggtacggacggtatttgacagaatataaggaggcaaatggtggtaagaaatagaatggttcagccagggaggaggcgagatggtgtaggtcgtaggtgaactgtgtcaaaattaatgtggatgttggtttgagggtttaggaaggttatgctgctgttagttgtgtagtgcgtagaaatgaaggggatgtaacttctgcggctgccaaaattatgcagctctaatggcagagctgttggccattaaaaatgggtttcaggttgggatacaacgatatttctataaatttacggtgaaatcagactgtcaaagagttgctcaactatttcaagagaaagaggctagttgaagcgacattgacggactgctccatcagattaaaagtttaatgcaacatcctaatgttgctggtttatcttttattttaagagaagccaatcaagtgactcacattttagccaatcaagctttgttatccaaaactagtgctatgtggattggggtgttatccccttgtgttcgtcaagctcttcggtttgacgagtctttttctatgtaattgttagtgttgaatgaatattttctgtttcaaaaaaaaatatataatttttaaaacaaaaaaaaatcttgtatattttttcttctttttttttttttagaaaaaaaatctataactgatattgttttaaatactatatttatttaattatttagtttgagtttaaaatttttaatttacttttctttcacttttgattttttctattttttgaatgatagatttaaattttattaaccattaaattcctttaccaaaactgataaaaaaatcagttgggacatcctttaactaaagctacgttcaggatgaagaatgagaagct

SEQ ID NO: 54176 - DNA, 862 bp, Cannabis sativa
ccagaatcaacaatccagatgggttttccattctctaaaacacatgattcaaaaactaaagcattattattgttcttagtgttgagaagtctgggacaacttgatttaaaatgtccattctgatgacaattagaacattgaataatatgactgcttaactatttttggattgttcgtattgttggttcaatctgttgtgaaagataatctgaggaagtggaatcactttctctatccttctcaactgagcctcaagcagtaggattgtcaaaggaattattcttaatatcttcaactttcctcttgcccttatctgcattactagagaaggatctccatgcaagtgacaatgtccgttcataagcacacattttagcgtccaacttgtctatgtcagacgagttccaattgttaacaacaaattggttaaactcaggtgataagttgttgagaataaaatgaactctttcctctctagattaaacaattcccagcatagctgctttctggaatttcatgttcatcatgagcaagtgtggagtgatactctgaccaggagtcatcttcacaatttgaagttcattcctaaaggcatattctagatgagaattggggagtgggttgtacgttttgacactacaaatatcaataaacataaataaattattggtttaataatatcatacacaagtttagataataacaagtaaagcaaatatgtttgcaaaaataccaaaaactaaacatatttgattatttttcaaggtttgcaacaaactgatacagtgtcccatttaggcaagagtcaaagatatcatctattgaatagagtagttaactcatctaaaatgacaaacattct

SEQ ID NO: 54177 - DNA, 805 bp, Cannabis sativa
  modified_base (134)..(141): a, c, t, g, unknown or other
atttcaaggaagaaatccttttaagggggggatagttataaagaccgcttagcttaaatttggaaattagcagataattagagttgtattatgaaaattagttattaattctaaattattaatttatgatgatnnnnnnnnattcagaatgcattttatatgtcgtatatagaaatttcataattttgcatgtttagtgcccagcaacattggaacgcggtgtatggcttattagaatcacatcttagtatttttagttagcggggtgggatagttagacattgggaatgtcgggaatagtcgagatttaagaatttcctaaaatacccccttagtgttctttttatggcttttatgtgggaagggcattttggtctttttcccacttagtaaattgtcctttcttgtgatttcttttaatttattctaatctgaattttatttaattcttggctgattattttaaataaaactatccatttttaattcatttgatgaaaaaaaaataaaaaatttggataaaacattgcatttctctcaaactctctctctcattttcgaaccccctagaccagctagggtttgcttccattttctctcaattcaagcaagtttctgcaagattttggagtgcttaagctctaggtaagcttttgactttattctcttgagttttcttgaattttaagaagatggatttgcatgattttgtgatttatgttgttgtagctgctgttagggtttggtgttgttttctggaagttagttatgttttttaatattaatttaagcatgtagtagtggc

SEQ ID NO: 54178 - DNA, 578 bp, Cannabis sativa
  modified_base (193)..(208): a, c, t, g, unknown or other
taagcgtgtcccacctagggaaggtcaagtggaatgattctaagactatgtaggtgtgggactaaatagctgaagagggcttaaatggattgattgatactacttatatcaacaaggtgcatcttgtttttgggtagcccatcacgaaagaactccatggttaagcatgcttgacctggggtaatttcaggannnnnnnnnnnnnnnnaagttttcccaggaagtgtgcgagtgaggaaaaagtaccgtggaaacactcgtcttggtttgtagggtcagtcatcagtccatgaagcagccagagtgatgtgatcgtgtataagagccattattccgtgggtgtaagggcccagtggaggcttgaagcgggggcgttacatgaagcatgtaagatggcagttccatagaaccatctcgtcatttccaagacacgaagacaatccctataattgtgggattcagtcagagaataaaggaaacacactttaggttcctattccttacattgtaattatacaattaatacagtttcctattttattcattatagacaacaagaaatcattcctcatttattt

SEQ ID NO: 54179 - DNA, 1136 bp, Cannabis sativa
  modified_base (1098)..(1100): a, c, t, g, unknown or other
tgtaataaatactctcataaatactaaagactcgtggactaaggctcattaattccccaaccacgtaaaaatctcgtgcattaatctttctacaactttcttacatattataaaattggttgccaaaaaccttggtcaacaagaacgatctcagctctgcactattgatgaagaatattacatcaggtgagaaatccaagtcacaactcgactggtatttctgatatttctctcatttctttctttaagtgtttttcttttattctcactaactctctcttctttattttgcatgtacaactaaaacacaacaactttgagagctcctctctcaatcctgggtctgcggctttctggtatctctcaaaacttaagagattggtgagactcttccctccttttatagctttaggtttagttgtaaagtgtgtaacagaatttctgttgcgaaacagaaattcgattacaccaagttgttaatgttgttgtgtctggtgagtgggtaaagccacgagccttttacttgtaattttcatcttctttgtaaaactgtaaaacaagtggtccaggggagatctaatttaacaatttccaccttagatttctcctgggacacttgttcttatagtgcatcattcttcaagggtcttagctcaagtggtaatggtcatccaccattaccaacccctaataagtccatgtagtgcttgaacttggttaggggtagcaccgtagtagcaatatcagatgggttctcttctgttgggaccttttctatctgaacaattccttgtgtcactttatctcatataaagtgatgcttgatttccacatatttggtcatgtcatgaaagacaggatttttgcataagtggatacaactttggctatctgagtatacaataggttcttcattaagtagccttagttcttctagtagtcctttaagccaaatagcttctttaattccttcagttacagctacatacttagattctgttgtagataatgctaccacaggctgcagttgtaccttccagctgatgcaattaccccatagtgtaaagaaataggcagaggtagatttcctactatctnnntcacctgcatagtctgcatcactgtacccagtgatc

SEQ ID NO: 54180 - DNA, 656 bp, Cannabis sativa
ggccaagtctccataatgtaaggccgccacatacagggttgttcatacaatccataccaaaccccaaccaatccagactaaaaccatttcagaccgaaacaaatgaatccaatgttaatggttttgttaatccaaacagctctataattctctggtacagtcatggttttagaattttcgctagcggctcaaatcagaccaaatcacttaattcttttacatttacttaatatgttgtctttgtctttttaatgaaatattgatgtttgagagcaatattagacaaaatattgacactatttttatttattgtaatttatgtactataaattttgaaccaaatcaatctgtttttaagtggattggtttactttgagcatttttggttttgaatttttcaaaaactgtaatactagtttggttcgaaaaaaatccagaccaaaccaatcagtgaacagcccctagccccctacataccggtagttacacgcttcttttgtccaccggagatgccccttctcatgtcatcaccaaccataatatctgcacaaatatctagcccaagaatctgaaaattttcaaaaataaaacatgttagatttgaacaaaagaaaaaataaaagatattgagcaatggaagtaacaaacctttagaa

SEQ ID NO: 54181 - DNA, 1850 bp, Cannabis sativa
  modified_base (1513)..(1513): a, c, t, g, unknown or other
aatataaaatatttatttatcaaaaaatcaattattttttttatttccttaaatagaaaatcttttctttaaatagaaaatttatttctataaatgaaatattcttatagtgggcacttaggtggggtacgctcggtttgttttgggctaatcaatttattaaaaagataaacattcatttaaatttaaatttaaaacatggttacaaatatttaatatggttgagatattcctcaaagtagttgagagattctatccatgttgttggagatattttcaagtggttgagatatgacctcaatcgattagatatttattttaaactaaatatttaaatttaaaatacatacttataatagatttggtgacggatatttattcaaatatttaaatattattatttaatgttaaaattgataaatatcttatttaattaacgtttattattattttataggatattgacagctaaagcacgtgaactttaaattttttaacacttaaccacaaaaataaattttttgaaggcaaaactacctaaactcctattttgttttaatctgtatccctccgttaaaaagtcacagttaagtgccacaatggactgctcacgtgtacacactagtacacgtggcaaatttttagtggcccacgtaacattaattataaaaaataattagaaatatttaaaaaattaaaaaataagacaaaaaattaaatatataaaaatttaaagaatcaaaaaaaaaaattaatttttttttttacttttacttttcctttttctttttttcttcttcttcttcttcaaattataatctctctctttctctctatcttccagttttccctctccttctctattagccatcaacgaacccctaacccccaatacccaaattaacaaccaatccctatacccaaaaacccctaccccgattctctctcggtctcgtgctcctctctcggcctctctcgctctcactctcatctcttgtctatttatctatttgacaaaaaaggatagtgggcaacaagtccccatctttggtcactaattgttgaagacgttaggcgatgaacctcacccttcctctctcggtattggtatttttttttcaaatctatatttttttgtttaatttagagaaaatacttgtgatggtaataatggtgattaattttttttttttttatgtttaatgaaaatgtggtggctatggtggtattgtggggataatagtagtgttgataatggtattgtggtggtgatgagggtggtggtaatggtgggacagtggtgataataatggttaaggttgaaaattgttgtggtgggatggtggtggtggtaatgggagaaggaagaagaagaagttggattgctagtttgagaagaaagagaagaggaaagaaaaaagaagaaagaagaagaaaaagaaaaaagaagtaaaaaaatatttttaatattatttttttaaaattttgaattttttaaatatttataattatnttttaaaattaatattacgtggccactaaaatttacaacatgtacaagtgtgtacacgtgggttgtccactgtggcacttaattataattttttagacggaggggtacagagcaaaaggaaatgggagtttagtgttaaaaaaattaaagttgaggtgatttagctgtgaatattctttattttattggttataattaatataataatataaacctaaatcaatagatacgtattatttaagaaatctaaaaaggttcatcacttcatcattttctctctagaaaactttttgctcgtgtgttgaggtaaaagtaagatcataattatattgtgtat

SEQ ID NO: 54182 - DNA, 1471 bp, Cannabis sativa
agcaccattctaagaaagaggtattatcatgaggaatagttgttccaattccaacacgatcccatacctgtttaacatgagagcatgtgaccaaagcatggattaccgtttcttcttccattctacagatcgggcagagagagtgcacattgactctttttgtttgtagcatacaaagtgttggaagacaattcttccctgctcgccacagaatgtttttcactttgggtggaattttaagttgccacatagtattccaaaaacgagaagcagtatcatcatcattgtcccatctaccattagcttgttggagtactttgtaagcacttttgactgaatataggcctgaagcttcaaaagcccaagtcaaagtgtcttcatgaaccgaaggttgcaaaggaattttctcaattagcttcctgtctctttcttcaaataggtcttccaatatttccaaatcccaacctgtgccatctatattcatgaggttattcactctcgcatgagataaagtaggatgagaagaagagacataagggttctcaacacaaggcagccaaggttcattgaggatatttatacttgctccattccctacacaccaacgaaggcctttcctaacaagttgttgtgcctcccaaacactacgccaaacatagctaggattgttccctagagatgcttccaaataagaactagtaggatagtatctagccttgaagacctttgctacaagtgaatccgattgtgagataagccgccagccttgcttcccaagtagtgacaagttgaaatctctaagatgtctgaatcccattcctcctttcttcttgtgtttgcacaatctgtcccatgagagccagtggattcctttcccagacttgtttgaagattgccaccagaattttgtcattgttcgctccatctctcgggtaatgtcaagtggtaataagaacacactcatagcataactcgggagagtttgggccaccgttttgattaagatctcttttccagcgcgtgaaaggtatttagtttcccacccttcaattcttttgcgaactctttctttcaagtaaccaaaaacagccgtcttattgcgagaaatagtacttggaagacccaaataaagactattagctcccgcaatggtcatgccgagcctttgactgatgttgttacgcattatcatggttgtattagtactgaagaaaatagaagatttggagaaattaacttctgtcctgatgcttcttcaaaagtactcaatacttcctggattcttgttgtttcttctattgttgccttacagtataggtaactgtcatctgcaaataacatgtgtgaaattcgaggtgcactatttgcaactttacaaccatgtaacagtccccgtgattcaaaccgacgaatggttgctgaaaggccctcagcacataagataaaaagataaggggatagtggatcccct

SEQ ID NO: 54183 - DNA, 715 bp, Cannabis sativa
tcttagaagatacatcaagcttgcggcatataattgagagagtatttatgcgtaagtcaattactttgtatttttgagatctatctaatgaatcttatctctaggcgcgaccacatagactagtaacaatttgaaaggattgttaaaaccacgtacaaaaaccttgtatattttttacttttatgcactgtttgtttttctgatttcttctggaattacaaaattgacttctgtagctacaaaaaaattgtatcagtaccaattttattattccgcatttaattaagtatttgattagataataaactggaaatattaaaatatagaatttcagtttatataacaactagaactactttgtggtacattcgagaagaaaagacacctcacccaaaaggtggaagacccataaaacaagagaaatattccctaacacgcataaccaaaaagagagaaaaattaactaacaatgattgtctaattgccgcaattagacaatcattgcctaatcaaggcaatgataatcgaaaagagagaaaagttaactaataataattgcctaatcaagtaattaaacactaattagtaattacatcagcataaaagagtaacctgtgactagttgctatctcattttctaacaaggtaagcaagtaaggaaaaataagtaaacaatagttttatatccatccaactttggctacttgcttctatt

SEQ ID NO: 54184 - DNA, 847 bp, Cannabis sativa
aaacagtccctattttgattgattcttttcgtcttctctagtgaagtcgccaaaattaatggtggttctctttctggttgagtttttgtttcggttgcgttacattgctgcgtggttgcacgatagttgcccgagaagcatggatcctgggttgaaggtgtgtgtaagtggtatttgtgtaatttattttatttgggttgtatatttgtttatttggctagctgcaagtatttttgtaatattgttccttttttttggttaaaactgaaaaaaaactccttttttctatgcatttaaattttattctattgcaccaaagactcaagaccagagaccgattatgcaaaatgaagatcagcaccgatccaatttgcttgctttgctgtgacaaggctgaaactccagagcaccttttctttgattgtctgaaaactaaggaatgtttacaggaaatcaaaaggtggctgggttggagaacaatacacacaggtctcactaacatcattaaatggctaggaagatcaaaggagtcaaagttcaagctgcaagtgtaaaccagaccggcttatggcagctgagaaacaaggttttatggaccaaagaggagcaattaatcccagccctactcaaggagttaaagctaacttgaaacttagaattgagatgttttggccaaaaaaagtttcaaagagagatacacaatggtttcaaagtttcaaaggttttaaagctaactatgtaatttaagtataaatattattattatgattataaatatgagaaccttgttttagtagaagttgtattgatatttgaaatttaagctattagtaagctatatttgaaa

SEQ ID NO: 54185 - DNA, 1090 bp, Cannabis sativa
  modified_base (34)..(46): a, c, t, g, unknown or other
tatgtgttttctttttatcgttttagaagttcannnnnnnnnnnnnaatcaacatacttgtgagtagacctaagatcctggtaaaaataaattccaacatgaagatccctagaacactcaggtggagcaacctggagaaactaaggatgttcctgaagacgaacaaccaaatgatcaggcaccacatcaagaagtgcctcgaagacctcggggatttacaacccaagggaatgaaaataatgattttccagagtcttctcttagaaacacgagcagaagacaaccctggactagggaataggaaatccctcgtggtaacgagagaaatcctgggactcaacctaggacaagcgggttgctgctgagacatcttcaatgtgcttctcaaactgatagggaaggggcacacacaaatgccagcagggggcatgtatcaacccattcccaaaggagaaggcttgtacatgacgaggcatgttctatctcgagacgtacgagatctcgtgatcacagtcgatctacgggaggaggggatagacctcggcgtagtaatgatcaagaaagtgtgagttacacaaggagtagcaagtctaagagttactcaggtacaaggtctacaagttacgatgatcgaagacggacagatgtttgtgagctattgaatcagaaaaaacctgatctatgtcaaaaacttaatcaaatccaaggggatccgatccaattgcgaatcagtgagttggaaaacaaatttaagaaataccaagatgggaaattgcctgattatgactttgacggggagctcaaacctttccatccaaatattatgagcgttgaattccctcagggatttaagaatcctcacttctcgtcacacgatgggactacggatccggtccctcacctcaacaacttgaatacaataatgtgagccaacattgttaaaaaaaccttacattgtattttatttcccacctcattgactgggggagtgaacagctaattcaataaattcacacatcactgaattacttcttgggaaaacctatgtaaagatttcaagaagcagtttcaggcagcgagagacatgcga

SEQ ID NO: 54186 - DNA, 973 bp, Cannabis sativa
attattacattacatacaattaattttaattttaattgcttacagatatttttttaagcataatatacatataatatttatacctttactactaactagtatttaatccaatttggatactaattattttgggaaatttcacatttttcctttaataaaacctccaatatcaaaatttagaccttccactaatttgtacaaattaattccattgattacatacacttcccattttatctttttttttttaaaaaaaaaaaattgttaaaactgaacaaacttccctctctcttttccctctcgtgcacctctctctctctctctctagaaaaaactcaaaactaccaccactatctctctttcctctctctcttccctgtcaaatgtttgtttcttggtgggcggtggtggaaaaccagagcataccccaatcactcaagagtcttacacccttataatgggtaagttgtgttttaagcattttgttagactttatgtagtttgctttcgttatatgtgtcgtatttgttggaactggtattttttggtctgaaatggttaagatctgacagatctggttttctgtcgaaatctgggttttctggatgttatcgacgctttatcgatgttatgtcgatattttgccaagaaaggtcagtgatgaccattatcgacatgttgtcgacagtttgtcgatagcatgtcgatgaaaaaacaaattaacatacataagttatttgagaagttttcgacattttgtcgatagtatgtcgacattaagtcgaccaacagtgtcaacgatatatcgatgcaatgtcgatgtattgtcgattttgaactcaaaaattaaaaaaaaaaccataaaacataaaataacataaacgttcattcaaataagaaattaaaataaaacatgaaataacattaaaataaaagttcattaaaaaaaaaaacaaacattaaataaaactca

SEQ ID NO: 54187 - DNA, 1360 bp, Cannabis sativa
ttataaaatatttacaaaagttgaacaataccgcgcaaagcgcggcttagttctctagtaatattataatccatttacatacatatcacatatatttaaatacataaaatctagcatattatttaatgtatatacactcatagaactgctctaaataccaattattagttttatggtactaaattagatatgcagtgaaaaatttaaatttctaattatcattgtaccatagcccaagaatagccagatgtataaccattaaatcaaaatatatgtatacatgttgataactatcaggggatcctcgaaacttcttgtaagttagattcaataacctcataccgtagtattctaaattgatccaccacacacaagaagtagtgtgggctactaagataaagtgtataatttattttcgataaattctcaatacatgagcaaaaactatttgagagtaaaaagtattttttttcttttctcctctgaatttcagaaattataatgtgaaaagcttttcctaatttctcaaatcaggtttctatttatagtagttaattcttaattaattaaattatatttaattatttaaataaatatttaaaactgtattcggttactaaaattcctgatgagggaatctctccactaactttgaggaaatatctcaaccaactcgaaatatctttaactacttttcaaatttaaatatttatctaattgaattaagtaaataattatttaactaaaaaaagataaaactaatagggacaccctactatagggtaggcgcctaccttatctcaattaagataaggatggtatcttttgtcctgacaatttttgtttcaacaattattgtcttgacaaattttatcttttttcttatttaattaatttgaaaaattatttatttattacaaaattaaataattactattttgtcaattcaaaatatattttttcgaacaacataatacaactctttatccctaccattgacagtgttttaaggtggcgattcgaggaccttgtacctataattctaaactccaataaattagattatttattgagtctcatcaacaaaataataccctttattaattccataattattttactatatatatggaattgaacacttagtaattatataattatatttactgagttttattacagtgtccattgatataattaattccagtgattagttctctttgtgtcaattcgtaattaattttagtcaaattactattataccatgttaattacttctttaccttttagtatcattaattcactagtagaagtataatttagatctcatctaaatttgcgtgcaactttataattgtag

SEQ ID NO: 54188 - DNA, 1077 bp, Cannabis sativa
atggtctgtacttacttgaggttgccacactttttaaattttaaagtcgaaccttcattcaataggttcttaaacttaagagctaattttttttcttattgttgcatgtattaaatttttctatcggataaatgatagacacacattaaatatttaatgatattgataagaaaaataatagaacaaaaaatatgaataataataacaattaccttctcattaataaaaatcatatcaagatttattaattttttattcttcttagaatgtcatgtcacattctcatacttctcctttatatatatatagattgtacaattttaataattttcttttatagtatatatataacaaaattaaagaaatattaaaatgatacttatatattttatttaatcttatgattgtacaaaagatatttcaaaattaaacatattaaaaattcaaatttctgtaaaagaaaatctgaaacaatagtaaacatatagagagtaagtccactcacatcacagtctttacattatttaaaaatatatatatatatatatatataagtattttttttttctgtgttttgttttttttttatcattattttactttaaatatttacattacattatatatccttttcactactgtatttttttcttctaccttaaataatatatataatacaaaatgattaaaatattatatttttatgttagtagggtaatcaaaaaagtcaaaaagaaaatattaacaaattttactataatgatgtgaacctatatctatatttacctaatgaatgaggtaaatatttgaggtattataaataattaattaatttagcttttctagtagggaattgatgaggcatcataataagtaattaattaatttgaggttacaaagagtttggggtaaacaatatcttcaaaaacatttcatttaaaagaaaaaattgaatattttaatttcataaggaaaaatttgagattttagtttattaaaaaaaaacagaatatttttaattactaaggaaattttagattatagtactgtaaaatgataaaaaaaaaatctcaaaag

SEQ ID NO: 54189 - DNA, 987 bp, Cannabis sativa
aaaaaaaaaattagaaaaaaatggtcggtttgaacgggttaaccgacaaaacgataaatttcattacgcgggttattattttctttttgcttaattggatagattgcacttagatttttgtaatccgtctttacattaaattaaataaaatatagcataaactgtcgactaatgtacacccctagttagtactccaattcgaacccgtccgtccaataaacaggtccaatctaatttcaacggattttgaatggccagacttcatacaaatggattctgatggattgggcggcgaggcagattgacagatatttcgttctcctaccttaaacataagccttgctaaatttcctttttttaaaaaaaaaaaaaaaacctttgctaaattttagtgatacatattttggttaaagacgacagagtacaaaattacaaatactctttgtgtagttgggatgggacagactaccccatgtagctgtaagccaatactattcaaaagcttgtttcctaagcaaaagaaatctaaaggcaccactcctctagctactctctatttttcttctcttccttcacaataataatcaatgattaaacaaaaaagttatatacataccaaacacaatgataagtaaaaatatcagcagccaaccccaaaatccatctgccatagaacaggatgataaggcatctttagcactcagtgacttcttacataatcctgcaaaattttcaaccaacgtgaatgtttagacgacatatgccagtgcatgcaataatacattaaatttaattcattgaagtgtctttaccttcccaatcttgttaattccggttcttcaagaagcatgtcctgcagaggctttacgtctttatcttcgcttgcacaactactaaaaaagaaatagaaaattaatgtcatccatgtcgatcaactacttgtagagatgacatgaagctaacaagaatatgtactattgtttcgtg

SEQ ID NO: 54190 - DNA, 1513 bp, Cannabis sativa
taatatatgtatatatctacatataaaaaatttgatgtatatatttgagtgagggctttagcccacacatgggctaaagtccctccgtccctgcaaacaacccctaaaggaatacaatgatatcttttaccaagtgaccaaaataggtggatttgtgagagatttttgtaacttgggtatagctattgttagtctcatctagtgacatgttagatgttgcaggtttgactactcaactccgagttagttatttcagtttactaactcaggtacacctcatattgagttgcctctataaggctttgagttttacttctttaattaggtgacgatctaaaaatgaatttagatgattattacacttgtaatgagtgcgaagggttgttgaagagaatgtgtatgtttgatcacatctctcaagtgagttaatttgtaaggtgcaagatactattgttgataagattaactttgtattcttttattattgaagatccaataaagattagccaaatggtatgtcttggtaattagtcaccacaagaagagtgataaatctccttaaactttgtctctattttatgtagtttaatccgcatttatttctggtttatgtcattgattgattctgttattctagttctacaattcttgttttatttgattcttgtgttaatttacaacaaaatatatagctttgtaaacatgtaattttagtagattgagtacaaagattagaatcttttatttgaaaagagattgtaaggcttgtatgttgtgacagagagttcgagagaactgagtgagagaaagaaaggagaaatcaacagggaggagagttgttcttcaaaggatatccgatgtgttctccaccaatttcgaaggctttgttcaaggtgaaagttctgtactgtgtaacccgctgtgtttagatcaagttgtaatgtgccattgaaatagtgaagatcgaattccttggagagttcaagaggagtagctccaaattagagtgaatgtgatccactatgattttctttgtatctttcactttctgttcttagctttatgttcttgtcttggctttgttctttgtctggtttttcttgtgattgttttccagataaggtttcaagttaaggttgttggtaagtatattaattctcacacaaggggctgaaccataaaaatcagttatactactgtatatttataaatcaatactaaaatataatattatattctctaaaaaaatatatatataatattacattaatggacaaagttttgatttcatgataggtaactcttacccgtacaactaattcatccagcaatcatcctcaatcctaataaaagtattgattcaaaaccaagtgatttttttcacctactaaatctaaactatttccagcgttctttacacacacacaaaaaaaatatctaaactattttaaaatatatattttgttttatgaatacactgaatcttaataatacagtacaattcagtgaagaa

SEQ ID NO: 54191 - DNA, 2329 bp, Cannabis sativa
cttataaaatagactcgttgtcgttggctaaaagcgaggtcaacaagaaggattttgggcaaaaaattggccaactttattgttacgtattaatctactacagaaatttctcagtaaaaaaaattcaagaaaccctaatctcatcctagaacagagcatgcacatacaattcaaaacaacaaatttagaaaatgcattgcataaataacaccaatgtacctgatgttgataaaggagaggctacgttgatcgttgctaggcttggctcaggaagttgattgcacctttcttgaagacaagaagttgcaacaatcaacgagtcaattttttctccaaaatctagggtagtgatctcctttgttgtagtcatcctaatcactagagaaggaagataagggtattctcatgccctaatcctcagtaacaagcaaagatggaggtccacagcgttttttaggttggtgaaaagggactctccttgaaggtaatttgaagttctgggaatggtaagaagacttgtgcgatttgaaagattgaaaatttgaaaaagaagtaaaagtggtaactgaaggtcacttgaggtatttatacctcaagaaagcaatccacatgaagaaggactagacagctatgatcttttcttcacaaacgcgatctctatccaacgattagggagattaacaatctatgtgtattctcatatttaacgctctccagaataaaggtgtgaagtaatgatgaagatgctctttttcattttttgtgtcagtcagtgaacaaccattgaaatgtagctgctcttggaagacgactcctcgatagtcgtgccttgtcacacgcttgactgccacatggacaagccatcattatagatggaagccagcctccgtgctcgaacaatgttcaagatatccttacttcattcttcgatctccacgtgtccaaattaagagatcagagcaagcttccaccatgtgcaacatactgaaagcttggggttgaatgttatctgcatttccggcactagacacgtggattccaggtcagcatttaagaccctttagtgggaccctctcatcaatgataaagtgggccaagtccacctggatatgcctttttgggagttatcttggttccgtactctcagagccttctgccttcatcttaatcgagcctggaagataccttcggtgtcacgagcccggaagggcaagatgttgtgttcctggaacacccttccaatttccctatctatccttgcctataaataaggaaattatagctgtcagaccacgtcagaatgttttatcacgattaaaggggaaacttcccataacaagcgcggtgtagttatttcagaataacttccctaccattagcgaatacagttttgactcgatcaacccaatttcaatctacctagtcagcaaatcgtgttcttcataggctgagcttcatcaaaaagcccaaagagatggtttaattgtaaactccctagtagagggaaaaggaaaaatgctaatgtaatcctacaactactataactaccccattaatctcatggattaggggttgaattctcttacgtactttgctaaggcaaacatacaaacatacatcctatctatttctcaaagcatttataactaaacagcttacaaaataaagcagactcgtggactaaggctatttagtgccccaaccacataaaaaacctacttgtctcttgctatattttccctttcgattattattacttcaattcttattatttgcattctgtttccaaaaatctcggtaaacaagttaaaataaaaaatcaaaatacacgatagatacagccaaaaacaagtcatggcaacttggcacacatgtcagtagggtcaacatgtacattgctagagaagactgtcacctcatggatgctctaacttttctttgccttcacctgcaccacagagcccccgtgaatcacaaggactcagcaagaaaagtaataaaagataatatatgaaataactatttatttatttcactattataaaatgattaattaataacattcaagagtggataatataactaaccatatgcatggaaataaaagtaattgttatcccaatatttgtcctaatgacgtggcatgctcatgtggacagaaccagtgccacatgacgtacaactcactaaacggaagaccaagttagcaccgagcaaacaaagatcccaacactcaaatggagatcaacagaccaactccttcttataagctggacaggccccttggctggtcagcctagggacagcaccatgtgttggaatatatttt

SEQ ID NO: 54192 - DNA, 844 bp, Cannabis sativa
ataataatttgttattaaaataaagttcgttcttaactacttaaattttattgatttttaatctttatttgatttcaacattacttttgaaattatactaaataataacactttctaaatttattacaaaattatggtgaagaaatattaggataatctaatatatcatagagaccttaatatatttacaagttatattactctaagggagtatgtaattcaatgaaagataaaaatatctaaatattatcaattggatgtaatttatatatatatatattgttagcttatatatatatcttttaaggggtatatatgtaatttaatgttaaaaagctccaaatattgtgtcttttattttagttatagattatagatgaaatagatatcatatatcaatgtaattatgaagaaagacacaacacaatacaaaattattttgttaataacatatttagcaacgcatttggtgtgttgttgctaattcagctagagcatccgaacttattagtaagagtgtaaatagattgggtcatatttgatccggctatgatccaacctgatccaaatcatatacgaattcttcctgtcccgccttgctaaattatatcaaatctgacccacgttatacggatcggatctgatccgatcttttttatcaaaaattttaattttatatccattttaatttgtattagtatttgttaacggtctgcactcgttaacgctatagattaactttttcacctaataatattgttaaactttaatggaactttgacttcaatgccaagaagaaagaatttcagaatctttataatatttgaaagttatatcttataaa

SEQ ID NO: 54193 - DNA, 1081 bp, Cannabis sativa
ttataagtgaaattatttgtttttctaaaaagaaaacaattaaataaataaatatttatttttttttatttattattattatttattattttttgaataaaagtaaactttcattaaccgagtacaatattacgtaattcaggacttaattgataattctgaaaagtacgacttgggaaaaaacaagagctacacgccaaacaatgagcggttttgttcacaaatcgttcaacaaactgaatagcaacatgactcaaagaagataaaataattttgcaatcattaaccagtaaaccaaactcagacgccatatgcaactcactctgaatagcctgaacacagaccagactatcaatttccagcataacattttgccaattatgacgttggatccagcttaagacttccttgatcccgatgatttctgcgatctctggcctaacaattcccctcctgctagtagtgaaggccttgagaacttgaccagcatggttcagggctaagcaacccatcccaaaacggctaacatcattaaatagagcaccgtcaacattgaccttgatctgatcagaaactggtgtagtgcaatgcacacgcgaagacagtcctatcgaactgttagacaacgatgtagtagtacgaatgtctttaccaatcttacctaatctatctcttatgatagggaatatgcttagctttttgaaaggttaatttgttgtgacggtccgacattatttttaatggggtgagaatgagtgccttgatgattttatttcgagcaaaaaaatatttattatttattttttttgagaattttttttagtttgttaaagtaattaatgataaatttattgacatctttttttgcttgggtaaaaggtttgaaattcacctacctcttttgaaagagattaaagaagaaaaattctcctatatactattttttaactttttttaaaaaaaattactatttggattgttccgataatttttatgtaagttgttatataaattttagttataatttaagttgatccgttagttgttatgaaattttcacgtagaatttcataaaaacata

SEQ ID NO: 54194 - DNA, 682 bp, Cannabis sativa
aatttcttatttttcggcataacatacttttgtggagctttttatttgctctaaatttagagatgtactctagaatgaataactcgaagcagtgacggatccagaatttttactttgtgggagcttatttatcattaaaaaatatttatacatatattatcatcactcttactagatttatttaattttatggaggcttttctattattttcgtctataattatcaatttaaaaatattacatttaattttttaaaaggcaatatttttgttagtggaggttatagcccccacattgttacttatgggtccgtcttgactcgaagtaaaaaacttattagtgattgttttcttttttcttttttagtatttattcaattattataattctgtcatgggatcaagatttgaaaaatactaagtgtaatataaataccacaatacaaatgaatattgtgagacaaacacacacaaatatttttataatacttgttcatgttaatttaaattaggggtgtatcaaagtgcccacaccacacaaactatctgtaccatattgcataaatttttttaaggtcttgtagtgcggtttgagaaattacaaaaaatacatatgcactttgatttaaaaaaaaaataggccaaaaccctcaccgcctgcacggtaaacaccttctaaactt

SEQ ID NO: 54195 - DNA, 1053 bp, Cannabis sativa
taagttgctttcttctttctcatgtttgttacattgtgtggattagttacttgatttgtttgtatcgttatcatctcatctggttttgggagtttttttagggtttaaactgttcatactagggttcaagcaatatgtaggttattttaagatctccaagtcattactttctggtttgataaaattctctccagggattgggactacttttttgttgtagcaatgtcccactctggttcaggaatttatcgtctagaaattttagagtttgagttccctacagaatcaactatcccatataaacccaacccatcaaaacccacctccaaattagggctaaacaatgctagggtcagggaacacatagtgagaacccaacaggaagatatttctagttgctacaggcgcttcttgcaagaaatgtccgaaggtagatgccgattcttgcgagaagcagcctggccggaacctcccagcgtgtcctttattcatgtggcaaaacctttgtttttacccaacgtcacaattgcttttgaaccaggtgacttggattttgaaattatgcctcccaagccacgtacgtctaaaactccccaggatcccaacgtaacttttgaggctaagttgatagaatcaaaggtgcgatctatttcaggctacacgggcgagatgctgaaaacctgtggaattgaacttgggcaatcatgccaagttagatcagtacgagagggtgagttcagttgctaccccctgcatgcttttccagcagtaacccagggaccagtggtgagaccagtaccagtggttcaacaagcatgggtgcctggagccttgagcatatcagtgtaggggccgcccttcctcttcgggactagttcaaagactatataaaccacattggagttgccccattccagctgactcctatctcctacaggattcttgttagtctgaaagtcttgtacaaaattatgaacctggggtgtcccactccagtagagattgagtatctttactcagttaaggttgttccatcgaggaagaacgctgcag

SEQ ID NO: 54196 - DNA, 3346 bp, Cannabis sativa
ttttaattttttatttgtgactaaaaataaaaaatattgtagtggctgttaacaaagcgagaaaaatgagagaatgacacttcaaaaaaatcatttcaaacagtgatgatatttctaagataattcctaaaagagtgactagcaatatttcaggctaacatcacaaaaatagcccattcttttacatcattccgggctagcttttacaatggttaatgcttaagaaacagagaaatgaaaatggaagaaagaagcatttgatttcattgaattggaaaagtgacacattgaatcaatatatatacaaccaagcttagagcaaactaacaaaaggttagttagaagaagtagacagttgtaacccaactaactttaactaacttcactaactaacaactaactaggtactcttaacagcctccctcaaacttaaggtggtgaagtagaccacaccaagtttgtcaggaagaaaagagaaccttgagcttgatattggtttagttagtgaatctgcaagttgatgttctgctggaacatgttgaaccaagatttctttgtgcatcactttgtctcgaacatagtgaatgtcaatctctatatgtttcgtgcgtgcatgtaagatgggattggcagagagttgcaacacactgagattatcacaccatatgactagaggggttgccaaagattgcttcaacttagataataaggactggagccaactaacttcagtgaccacaacagcaagactacagtactcaaccttagtagaagatttggagattgtagtttgctttttggattgctagtcaatgagattgccacctaagaaaatgcagtaacttgttgttactcgtctgtcaccagggtcagccgcccaatcagcatcacaaaaagcttcaagatccatagattttggacatttaaggtgtaaaccatagtcaagtgtgccagtcaagtatcttagaatgcgtttgacagccacaagatgagactgcaatggagattctataaattggcacactttgttgacaatgaatgctatatcaggtcttgttatggtagcatattttttttttgatcaatcaatcatgaagttcattactccaaataacatattacaacctattatgccttttaaatgaagacttgaatatcaatctatacgttttctttgtaatctttccaaacacctatattagttacaaaattatttctataatctgaaaaaccaatctccatccgccgcctgcaatttctttggccaagtgcaggatactcgattcttcacagccatcttgatcaagtttaccacttgttctggtgtttgttgtcctgaataccataatacatcattctagttcttccacaaatggtacacgagagtagctactgaagctgtatacacagctttttttaacttggtgacttttgttctttccagccacctaaccaatcttataagagttgaagtttccagattccatcccagccatgtttccaccaaagaaagacaaagagtagagaaaggacaagagaagaaaagatgttcagaagtttcactttggttcttgcaaagcaaacagaaatcttcatcaataatcttaaatctatataacctgtctcttgttctaagtctatcctgtatagctatccataagcaaaagctatgtctaggtatattcaatctattccatacctcatggctctaattaactttgggaggattggggtaaaaagctttgtatccattggatattctataagtagcagcagcaaactgttgatccatagtagctttgactttaattatttttgacatgaatcaatttcctccaataccatcttgcttgcattggcgcttggtaatcccaccaatgctcttctttgatgtatacacaatgaacccatctaatccacatgttatcttgtttgttcgcaattgcccaaacatactttgtcattgctgcaatgttccactctactatcttcctcaaaccaatcccccctgctgtttttggttgacaaacaaaatcccaagcaattagtccagagccttatgtcacatgttgtcctttccataagtaagctctgtagatagcctcaatatctctaattgttatggtagcatattgcaatgcagaaacaagtgatctataggtagtggcatcaacaacaagttcacttccaaagcttgacaatctaagcccactgttcataagagaactttgagtttttaccccctgcatgttagctttgcagatgatgtcttgaatgtacttttgctgagaaagaacaacttcatttgttgtaaaaataacctgaattccaagaaagaaatccatgaccctaaggtcctttaaggcaaacttggaactgagattaaagattagggttgaaattaatgtgattagtgttgttgcctgtgataagaatatcatctacatagatgagaacataaatggtgctggtagttgtgaataaagtgaacaaagagtgatctgttttggtagggttgaatccaagttgaagtaaggcatcagacagtttctcaaaccaagctcgaggagcttgtttgagtccataaattgccttgtgcagcttacacactttggttggatgattaggatcaatgaaaccaggtggttgcaccatgtaaatgtcttcatgaagatcaccattgagaaatggattgttgacatcaagctgtctaactgtccaacccttagacagagcaatggtaagcacaacgtgaatcgtcacatggttgactacaaagatgaaggtctcatcaaaatcaaatccagcttgtcggtgataccctttggcaaccaatctagctttgagtctactaacaggtccatccaagttttctttgattctgaaaacccatttgcagcctatgggctctctgttggggggaagattcaccagagtgtaagttttattcttcttgagagtaatattttcttcagacattgtagccagccacttaggatcattaagagcattcttgactaaggtaggaataagtgaagccattaacacttttggttttctaatcccaaatttgcctcttgttgtcattgaatgtttgttaaccactattcctagttggttaggtgaagctgaggcagcatttggcatggttggttggggcaaatgtactggtagaaacagtagcatttggtataactacatgatctgcagcatgcataactgtaagcataacgtagatataacattgggggcaaccataggtatggcagtagtttgtgtctcactttggtgttgcctagtgggattggtggtagtaacatctggagatgatgaaacatcattatct

SEQ ID NO: 54197 - DNA, 959 bp, Cannabis sativa
  modified_base (58)..(65): a, c, t, g, unknown or other
  modified_base (887)..(910): a, c, t, g, unknown or other
cggcagcaacacagttccaatacaaacaagcagaaacttaatgagaaacaggtaatcnnnnnnnntgctttccttcagctcattctccagcaaagttagagaaaacctatactccttggcctttaaaattaggtcaaactcaacgaggtcacggtcacttccgggtgccacgggttctccccatccttgattcccatgacatcctcaaacagcttcgacgatagttggatcgttcttccaaatatctccagctgagaagtggtcggatccacgtgatcgatgagccaactatcttagcatcgatgtacggagcatcctcctttaagaatgtagagaaaccgccatgtctgaccatttctttttgagcatcattgagaagtgggactattctacccaaacgttcgaaggagcaacagccaaaaacttgaacatcccctaccccttcattgttctcaatccatggctcagcagaaaatgtctcctttaacttcttccctttccctctaacaccaaccttcgagggggaagcctcgacttcatatgaagctcacttctcaatctcttcctcactaagcagcttaaattgctccttaaaactaccaaggacctacaatattaagattctcgattattaagtaaagtacgctaaataaaagataaacaataaaagatccatcacacactccatgtcactcacatgtgcttttgatttatctttatgtgcatcaacataagcttcgaaattggcttggctgcatcaattaaataaaggaatggaattacaaatattattttcaaaactagaaaatattagcacgaaaataactaccacaaataactcactaatatttcgtctaaacttccttcgaatccttcttttttatctnnnnnnnnnnnnnnnnnnnnnnnncaacacccctcttccgtttatacaccattgtaaaaacctattacacaag

SEQ ID NO: 54198 - DNA, 977 bp, Cannabis sativa
cgaacacaatgttcctttaccacagctatacagtagacaatgttttactgaggtaagtgtgcattagtgaggtaattgtgtattagtggtgaggttactgtttcttataaagtagagttattctttttggtcttcaaccctaaatctctcctcatttagatattaagtatactcttttatcttcttccacttcctttctataaatccatcattttttttactatcaataaatctatttgcttctgcaactagcaatcatctagtgattatatttggttggtgatcttttctagttgaatcagctcatagttcattaccctaatttcgaaagtggacgcactgttagtgtccaaaatggtttacttagtatgaacatcgattaacaatccttgatattttagttatttagttgagttgtactaaatatctcactaggaagaattgttgtgggactataagtcagttgttggcactactacaaaattggcttttcccaacggttattaagagtgtcaattatgaaaaccgttggaaaaaataagtggaggtttttcccaacagtttagaaccgaagcaaaaaaaccgttgggaaaaatcaataccaaccagtggagaaccgtgggcaatactaaataatttttttaaaaaaaaacagtgtatgcctacagtttataactgttgggaatactaagtattccccacagttataaaccgttgggaatacttagtattccccacagttataaactcttgggaatactaagtattccccacagttataaattgttgggtatacttagtattcccaacaattataaactgttgggaaaaattctttttaacatgttattttattagaagagttctattttcaccccatcaaatgataattacaccccattattagaaaaaaaaaacttaaataatttttaaaaattactcttaatatgtttttaaaattttttcctcacattatt

SEQ ID NO: 54199 - DNA, 996 bp, Cannabis sativa
cagtgtaattacatggtcagacaaacatgtcaaattgtgtaattacctccaattacacgcaaatctaattatattgtggctttccaaacgcaccctaaatgtttagctaatgtttttattaaaaatacaaaatataataactttcttattaattttatgattactttattatgtaaaataataagaaaataatataaatactcattatttaatgttacagttaaaaatattaattgttatccgtatttctagatggaggacatgtgtaattctaagatggttttagctaattgttacaggcccaatcgcaggcccaaccaagataatagacggaatccattagcgaagtcaagtcgtccagatgttggacagatgacacatccagacatgatacacctcctgcacaacgtctcttcggtgtcattgggtagatcttctgaatgagtgactaatgggcatatagatctttagcttcgtatcacaacaatttattgccaaattctacaatatcaagactttatttccaggattatgtccatgattcgtatcttctaaataaagaaataaagtaattatccatcaagcatatatatgtctttattatccataacagtaggatacaatttgacaattattaacgtgaagtggcttccacatcagctaaagattaatgcttcatgggccaaactttatcaaataagcttaaagttaatgtattacatgtatttactccatcagagggcaatgtgtacatattagaaccttagcgctataaatataagaaaactcatttatgcaaagggttagaatctcattacttgagtgctcaagataattcaagggttcaaaaatttgtgtaaatcataaaacttttccagtcttaacataataatattgactcacggactataggtgataactctatgaaaatagagttatttatatctttttgggcattaaattagctttgttctcaagtatttttagtttatttta

SEQ ID NO: 54200 - DNA, 1720 bp, Cannabis sativa
  modified_base (457)..(460): a, c, t, g, unknown or other
aaaagtttctagggttaccttagcttcaaggatgatcaattccttagcttcaatacagaaaaataccaagcttttagggtgaatccctctggtttttgccccagccaaaagagagaaagagagagagagagagagttctatttgatttttctttcaatttccttatttttctaaaatgagacttaaggataaaccaattaatccttgttgaaaaaaataataggccatgtgtcacaacctagggcagccactaagtattacccttaaatgactaaaatgcccttaaagcctacaacttaagcattttccaaaactaggggtaaaatggtcaaattctataaccctgcttaatcccaatattttattttctccaaagtatttctcactaagatataaggttctaaacttacccatgtgatcaaactagccatctatcgcatttttcgttgtcgccgannnnaaattacaaaaataacatatttcatatataattcataaaatatccctagagtttaataaaatctcagaaattgagaaattataactctagtgcccatttctaacaatggggaccataaataattaaattcataaataattataaaaatatcagaaattagtgctaattttttctactaatccaaattactaaagtgcattacaataatggtgttactacaccaccttactattgttatgataataggtagtaagctttatccacattcacagcacgagattttagtcttttttttttacattggaagaatttcaattggctcaaatcatgtttgtttcagtagtataattatctttgtccatgcatgtttagatttgggagattctcagatttttattggccctatgatttatggttagattgttcattataattgttattgctatggttgttattactgaatttgtattgacagatctttaactgatgatcattgatatgtgtgatttgtcacatgttcatttggattggatatccattcttcgcgcttctttgatgcttcaatgcttggtatttattttttgtcgtagtaatttgaatcactcataaaatttacgatacagatatccgcaaaccgcggacaggaatctcctcgaatcaggatagctcatcgtctaattgaagggcacactttgccaaaccttgagctgttaaagtaagcgagcaaaacaaggggtgaaactactcttataagttagacaataaagttataacccccttaaacaacacataagaagagttggaaatttagcttgtaacattgaaaaactatctgaaaggtctcaaaataacagccaaaaaataaattgtattaaaatgtctatctacaaagaaaaataaatatatcagaaaaattaaactcttagagtctaccacttgattcaatcaaataaaatataaactaataaaaaaaattaataataactagccaaatatattacctttggctagtagcaataagccaattaacaagatagaaatgtatcacaaacttttttgaaaaaatgttaaattttattttatttgaatgactttaattctccatgaaaatatggaatatttaaccatactaccctaaataattaaaggtaagccataataataggcgcaaaagccttgaaaggcagcaagaccaacaaactgtggctcatcaattcctcacaaagtataatatttttcataagacatgaaatagaaagt

SEQ ID NO: 54201 - DNA, 1682 bp, Cannabis sativa
gaggacctccttacccgcccgagatagaaatttaccttcccaactggtgattcgctttctcatcctttctttaagaaaccccaaaacaacatttttattcctaccaacaatactcgggagacccaagtaaagactatctgccccagcttcttgaacttgcatcaaactacaaattcgtctccttatgtccacccttgtatttgaactaaagaaagcagacgatttatggagattaaccttctgccccgaagcttcttcaaaggtgcgcaagagagtgagaacacgatttgcttcctcctcggaagctttgcagtacacatagctatcgtcggcaaaaagcagatgagatataggaggtgcactacgggcaaccttgcatcccgtgatgagttttgtagcttcagcatgtttgatgagtgatgaaagtccctcagcgcacacaataaataagtagggagacaaaggacagccttgacgaatacctcttgtgggaaagataggccccagcttctgaccactgttaattacatgatagcggacagacttgacacatccaagagctaaaccaatccaacgatcgctaaaacccatagcgcgaagaactgcttccaaaaatccccactcaactcgatcataggctttactcatatccaattttaaagccatataaccttgtcttccatttgttttcctttttaagtagtgcataacttcgaaagccaccataacattatcagaaatcaacctacctgatacaaaggcgctctgagtttcagagattgcaatgtcaagtattcccttcatacggttagccacaaccttggaagctatcttataaagcacattacatagggagattggccgcatatcactcatctgggtgggattcttcttcttcggaatcaagactatatgagtatcattaaggccatccgggatcaccccagtatcaaagaaatctcgaacaaattcaatcacgtcgtggcccacaatatcccaatgtttctggtaaaaacccggtgtcattccatctgggcctggagatttgtcgggatgcatttgaaacaatgcatgtctaacttcttcttcagaaataggcaccaacaattcttcattttgttcttgagtgacaacagggcgaactctattcagaattgaaccaaggtctatattagacgtttggaacaaatctcggaaataatctatgatgacagtgtccaaccccgagtcccaagcaacccaacggcctccattgtctttgagttgagaaatactattattccgcttccttgaacttgccacagaatggaaatatttagtatttttgtctcccgagttgagccaatattgcttagaccgttgtttccaaaaagcttccctttgagctaaagcttcggtgagattgtctttcccttcttggtgttgttttagtgacatcggatctttgccccactttgaattgctaatctgtctcttacattgatcaattctcttctgaaagttaccagtaatctctctaccccactttcccaacacctccccacacctgagaattttttcttgaatactgaccaaacccaacacctccccacacctgagaattttttcttgtaagttacatatttaagtgctatactatactcattttaggaaaggagtaatcttgaggaagcaaaatctag

SEQ ID NO: 54202 - DNA, 851 bp, Cannabis sativa
  modified_base (636)..(640): a, c, t, g, unknown or other
ttataattcatttaacatttgtttagactttagaggcatatttttaagcattaaaaaatcattgacagatatattgaattttgacacatttagatttagctataaatatatgaggaatattaaaatgcacgagtaatgtttaacattttttttttgtttccatattactattaatataattaagtatcgtatctcatataatttaataaaataatttttagataatattgttaatcaatcgcaaggtgtcacctttagaaagtgttagacaccactgcccaataacaatactctttatatatatgagaaattaatgctaaaatgtatcattgacgcctagaatatacttaaagtgtaacgtagcattgcttaaagtgtcatattactatcaatataatttagtattaaatctcacataatttaatttaatttttattataaaatattattacagtagaatttttatctaagaatatacttaggatgaaacaaattatattttaattgagaagttataactaattaaatagagttacactagaaaaaaaatcaaaacaccaaaaaatatcaatgtcctaacaataacaataaacaatccttaatattatattataataaaattatttttgagtaaannnnntatttatacatgtattataaatttgaaaaaaattattaattttaaataataaatttataaattatatatatattttattaagatataattattcttatatatagatatttttttttaatatgtgacttagaaaatatataattaattataattaagaagttatttttatataattatattaaattaagatttttttttataataaattaaa

SEQ ID NO: 54203 - DNA, 1914 bp, Cannabis sativa
ttttttgataatatctcgttatttttgtgggtttgtaactatctttgagcttcttacgagatttaaatatttgaatttgccactaaagatgagggtctcctaagggtgtgacatgatcgctaaccagatttaggaatagaagctaatacttagggggtgacacccccgagaccaaacatgagaagggtgtcaattgttatctcggggttaccccccaagaccccttctatgttctgtagtcatggtgtcatgaggatgtactcatctacctttgagaatgtcattatgtccatggtggggatagtgtcatctaccccctagactaatttggcccataggtatgtggtgattatttatcctcacctatgaaggtgttagtccatcatttttcctttaggcacccaccttcctcaagctaggggtaaaggtaaccatcaaacttctattccaatggttatgacccccatcatgattaacggttaccccaacagtcacgactacatattttcattaattcagtcccggtattttcgtgccacgtgtcattactcttgcaacatcatcgtcgtcagtatttgggtaaacactaataatagtaaatatatgtgtgttattgtacgtatacaattatatatatactagattaatattatgatacaatacacgtgtaattagttatattcttaatttttattttatcgacatataatttttattttaattacatatattttcaactatataattagtttttttactaaaaatatttaatttaagtattatttataagaggaaacataataatatataaaatttgttgttaattataattttacttttattaccataatatttttaaataattgaaatatcatacatttttttatttttttaaataataataacaaaaatatatttttttagtcaaaagaataataataaaaagatatatattttttttaaatatgtgcaagtttaaatttgaatagtagtattttaaaaaagaaacaacacttttaattagtcatatttttgtataacattgacataaatatatgtccaaaaaaaaaaataacatagatatgtaaaagagaaaatatatatatatgcggagaaaataaatttttataaaaattttattaacttatatggggataatttataaaaataaaaaaaataaaataaaataccttatatggggaatgaaaataaattgagaaagattagggaataaaaattgataataaaatatgtattatataacatcttcaaaccatcgccacatgtgaagaagctacaatgttgagctaaattacctatttattataacgtattactcacctcaacttcctcgctcttattcttcaaaatataaacaaaattaaataaaaataattaaaaaatgagggagaaattattaaaatgatatttgaaattttgaagaatgaatagtgggtagagaaacactatttataatctaaaattttgagctattttaactcacttaatataatccctttttaacaatatttttactttagctctttagttgagattgctcttaaattaattacaattaaattttaaaaaaatttgtgttttctttttttgtgttctctctctttcttactcattttcaccaatattataggacgtacacttttaaattaaattaaaattaaattcccaaaaagaacaatttttttcttcttgcttactctcttttaaccaatattgtaggacctatctataccccatcaaaaaaaaaaaaagtaaggaagattaagtgacaagctgcacattaggagtggagccagagctaaagagttgggggggcaatatcagacagtgcaatatacaataaatttaaatttaggtgactttaataccttttaaggatgtgtgtcaattata

SEQ ID NO: 54204 - DNA, 1772 bp, Cannabis sativa
agaacacaccattggagaggcattcaatagccccttcgatctaattttccctctactatcgtgtagcgaggcactgaatacaagagttttcatgccttatctttgtcagttggaagtttttcgttgagaagatagttgactattggtgtcatccatgtgggcgagctatctagcatctcatcatcttccttttcacatatacttggcttgtttaacatctcaactggaaccaagttcaatccatccaattcattctacgaggctagttttgcaaaggcatcagcgttagagttttgttctcttggtatttgctcgattttgaaataattaaacttttccaagttctttcaaaccttctataggtatttttccatttttaggcccttagcctggtattcccctaaaacttgatttacaatcaattgcaaatcactatggcatataagatttttaaccttcaacacctcagctatcttcaaactagcgatcaaggcttcatactcagccttgttgtttgaagtgtcaaattgaaatcttaaggcatagtgaaactagaagccttctggtgaaattagtattacccatgctctcgagccatgctcattggatgctccatccacgcacagtttccaagtatccgcatctcgctaaacaagcgtattttcctctagagctattcattctatcaagaaatctgccaaagcctggcccttgatggatgtttttgggtgataagttatgtcgaagtgccccagttctattgacaattttatcaatcttccaaaagcatttggttttgataaaacctgtctcaggggttgatcagtcaacaccttaatcggatgtgcctagaagtaaggccgtaacttgcgagacatgtagattaggcataaggaaagtttttcaagagggggatacctcgattctgcccccaataaccttttactaatatagtaaataggttgctggtgctttgcttcttctagcactattgctgcactaatcgcattgtccgagatagctaggtagagtagagtttctccagttattggttttgccaaaactggaggtgttgacaaattcctttttatgctcttaagggcctcctcgcattcttctgtccattcgaaatttttgtttcctcgcaatacattgaaaaatgataggcacttatcagttgacttcgaaatgaatctgttaaggtctcccattcttcctgttaaggcctgaacttccttcagtgtagttggtgatggaatatctatcaaagccttgatcttctcaggatttgcttcaatgtccctcacgttgactatgaatcccagaaattttcctgaggaaactccaaaggaaaacttttttgggttaagtttcatattgtactttttcaatatctcaaagcactctgcgagttctattgtgtgatcttcactcttcatcgatttcaccaacatatcatcgacgtagactttcatgtttcttcctgtttgtctcgcaaacatttcattcactagtcgctaatatgttgccccaacatttttcaaaccaaatggcatgactttataacaataaagtcccatgttggttacaaagcttgtatgcttttggtcagggacatgcatttttatctagttatatccagaatatgcgcctatgaacaacataagctcgtgtccagcagttgcatccactaactggtcaatccttggtagtggaaagcaatccgttggacatgacttatttaagtctgaaaggtcgatacaagttctcca

SEQ ID NO: 54205 - DNA, 937 bp, Cannabis sativa
tgtaagacttaacccaatgatatatatttttttaagaaccctataataagaaccatataataactaaattaaaactgaaaaacaactaattataaacagaaaaagtgagaggcataaagcatttaaggttgaacaattcatcgtactaactacatcaaaaaagttatattaacataacaaaacaagtctttgaaactaaacaaagacaacaaaaattatacattaatcttttgagttgcaacaacatcattatctcgccttttgcaacaatattagaattttaacacaaacaatagtgcattctcaaattcttacaatcaagcatggaagaatcatcctaatttgtcttggggggtggtcaaggagcaagctcaagcaccgcaccagcccaaggaagacaatcatatccactggattttccataacaaccacgacattcacaacatgctcaagaatcccaaccgagttctttggagagtttaatacaggattatatggccaaaaatgatgcagtgatacaaagtcaggcagcctctctttgaaaccttgagttgcagttgggacatttggccaatgaattaaaagctaggccacaaggttctttgcctagtgacacgaaaaatccaaggagggatgggaaggaacaatgtaaagccattcaactaaggagtggcaagcatctgaaaaattctaaggaggaaataaagggtagtggggagcccacttcaatccaaatcgacgaaaaattgagtaacaaaactgcccaagaaattgctgaaactagcccagttgatacagcaaagggtcagcaacctgacagtcagcaatttgcactagtatgttctagtcctaaaccaccccttccatttccccaaagatttcggaaacagcagcaagatgggcaattcaagaagtttttagatgtgttgaagcagct

SEQ ID NO: 54206 - DNA, 1360 bp, Cannabis sativa
  modified_base (1208)..(1212): a, c, t, g, unknown or other
aagtttagacattgtctaaacttgctcaacatcacaacattgcagtgatagacctcctcggaggtacagtgagacatcaagcatacaaattcttagacttatgttaaaaaggtggataattgtggtgtttttagacataagtctaacataaatgccatgtggcactctcgggttggatatatttcaaataatagttttgttagttggttttggggggagaaatattttctctgtacataagctatataaactctaatcctgatgtaattcaagtgtgcttaatttgagagacaccagattagagagagagaggagagactgagtgttttgggaggatcaggagcttgactcctttgtaatcgatcttcctgttgtaaagatcaaacacttgtactcatctttgattcatcaataaagaaagtatgttgattgtttcccggggatgtaggcatagattgcattgatctatgttcgaacctcattaaagaaaaggtgcccatttctatttttcagtttattacaattaattgcttattgttcatacttgattgaattttattgctggttaattggattgcatttttcggttctggtttatgattgattgttctttgttgtgtatgttcttgaatgaagtgaattggaattcaccacaaatggtatcagagctcggtggagaagagaactgacattcaagaactggttcaagattcaaagaactcaacctgaaaatgtcatcagcaagatttgaagtcgacaagtttacagggacaaacaatttcagtttatggagaatcaagatgaaagctttgcttgtacatcagggaatctcagaagcaatcgatcctactcaacttgtagaaatcacagatggaaagatcaaaagggacacagaatcaaaggctcacagtgccattttactaagtcttggagatgaagtcttgagagaagtatctgatgaaactactgcttctggtttatggatcaagcttgcttccatctacttgtatctgaagaagaagctttatgcaatgagaatggatgaaagcaaggaattaatatgtcatcttgatgaattcaacagaattgttcttgatttgaacagcataggtgtaaagctcgaggaagaggatcaagcaatcatcttgctgagttctctacctaaaacctatgaacaatttgtagatacgattctctatggaaaggannnnntgaccatgtcagaagtaaaggctgcactcaacccaaaagaaatacaaaagaaaactgatgacaggggagattcgaatggtgatggtctttacatttgaagaggaagaacagataagagggaattcaagaacaagttccgaagtaatag

SEQ ID NO: 54207 - DNA, 668 bp, Cannabis sativa
cattcatatttgaaggagtcaaagtcatatttgaaggagtcaaagtcaagtcaagcctaccgctagttacagccctgaaggcacaagggatgatacgtgtggggcaagcatcttggccagcatagtagacaagtcaagagaaatccccctcaagcaagagaatgtccacatagtatgtgaatttcaagaagtttttctgaaagacctaccagggctacccccagatagagagatagaatttgtgattgagttggcaccaggcactgcaccaatctcgagggctccatactgtatggctcctaatgaattgaaggaattgaaggctcaactacaagatcttttaaacaaagtgtttatcagactaaattactcaacttggggtgcgccagtgttgtttgtcaagaaggacaatagtatgcggatgtgtatagactacagagagctgaacaaagtgactataaagaacaaatatctcttgtctcgcatcgatgacttgtttgattagttacaaggggtgatcgtcttctcaaaaatcgacttgagatctggttaccaccaatgtgcgagaggaagatatagcaaagacgatatttcgaacacggtacgggcattatgaatttctagtgatgtcatttgggttaacaaatgccccaacaaccttcatggat

SEQ ID NO: 54208 - DNA, 1967 bp, Cannabis sativa
ggatggtgataaatgctccaaattcttctttctctctgctgctattagaggaaggagaaatgccattgagtgcattttgaataaacataatgtctggataaatgagggggaattaattggtcaggaattcttggattttttcaagggtattttctttggatctaatcatgacaggccgttggattgtggccatttgtttagggaaagggtttctcttgaggaccatgtcgaggttgttgggtgcccctcccgcgaagaaataagaagtattctgtttgccatgagtaatcataaagccccaggacctgatggaatgttcgttttattcttcaaatactactgggagtcagttggggatgatttctgtgatgctgtcactaatttctttgtcaaaggaagaatgcacaagggtgtgaattctacgaatgttgtgctgattccaaaagtgcaaaacccgaagagaccaaatcaatttagacccatctctctttgcaatgtgatgtataaggtcatttctaaaattattgcaaatagaattaagcctatcctcccctctcttatctgccctactcaagctgctttcgttccaggaaggaatattcaagataataatgttttggtgcaagggattatccactccttcaataggaagaaaggaaaagagggcttttttgcgatcaagatagaccttgttaaagcttatgataggctgagttggacttttatagatcatgttcttggttgtttcggattccctcaaaaaatttgcagttgggtctctcagtacatttctaccacctcactcaatatttgtcttaatggtggtccagttggcaagatcatgccttcttgcggtcttcgccagggtgacccattatccccctacctcttcatctgcgcagcggaagtgttttctagactattagaagaagcgcttgggaacagaattattcaagggataaagctaagtaggggggtccggtgctatcccatattttctttgctgatgacctcatcttggttggtcgggctaacctaaatgaagctaaattcttttgcacttgtctggaaaagttctgttcgtggtctgggcagaaggtcaataaactcaaaacatcaatattctttagcaaaaataccccagttggaatgaggagagaaattaaggaagctctgggtatagacacttccgaaggggttattaagtatttggggttgcctctcttcagattaagacaaaaagatgttgactttaatttcattcttgagaatctcacatctaaacttcaggggtggaaggctaaaacattatcaaaagcgggcagggctacccttattaagtctgtgggactgtctttgcccatctatgccatgcaaaccaccaaattgatggtttgatccgcgatttctggtgggcctttgagaaagggaaccgtggcctttgtctctaagcctgggataaactttgccttcccaagtatttagggggactgggatttcggaaaataaaagaaatgaaccttgcctttttggctaagtaggggtggaatttactaactaggagtcagtcgttatgttgtaagattctggaggctaaataccttaggggaaagtattttctcaactgcaagtacaaagactctgattcctggttttggaagaatgttgcaaaagctagtgtaatcccccggaaaggggcatgcaagagggttgctgatggaagagacactagtatttggagggacccttggatccctcacttgaaaggtttcgtcccgaaaccaaatggaagtgtagttacagataataactgtgtggctgatctcttgtctcctaggggtgggtgaaatattcataagctaaaaagtctttttgatcatgagactgttttagctattctgaaagatggaacaccccctggattgggaaaggacaattggttgtggaccttggagagtaatgggcgt

SEQ ID NO: 54209 - DNA, 1354 bp, Cannabis sativa
aagtttgaaattttttggttaagggttaaatttcacgaagcttcgaatgatcaaggtaagagtcaaacaatgtgagaataaaagtagaatgttgtaaaccacgaagttgtaagaattattgcagagaaaataacaaagttttgagcctagattttctatgtatcttctacaacaagtcaagaataatggcattttctacaatggaaacccagaaattaaacatgcaaagttaaaagagaaaagattgacaaattactcactatttgaagcctaaacaaagtccagacgaagctgctcgggtggctctgatagaaatctcatgataatcttggagaaaattccttcttattgctctgcgtatgtttagtagagaaaatggtgaaagtaaaattctcaaggacttcctgccttatttataggccaattggtgaaaagaggtaatcattttgaaataccttagacacttcgatttccccccaaatattgggaaattaaaaataatcaagtgtaaccgccaaagcatgcaaaaaaaccgggtttcgaggcactaattaattcagagccttaattagccaaaaaccgaagagacacctggttagactcagatcgaatcacgaatagatgcgcgcaccatgtgtcactcattcaaatgtaaaagcagctcggataaagtctccacgcaacttctgaagccccatgcagactttgggggcaaatgctatcccaattttggcactctgacatggcatcacacgttggtgacacgtggaaccgattctccatatctgcccaaaaaggtgttccgagtagagcaccacatataccttcacgggggaggtcctcctagccgagcagtgaacaattcgaacagcatatcatcacttcgcatcttcatcatttacaccgtgaaggataaaaacaatccctataagtctgggattgtatcccaaagatatggcaagcagcccaaatccctcaatcagtgtattctatacatttaatgtgtaatcttaccgtttatagacattgtaaacacaaggtaaacaatcgctcaagcacaaagcactataaatggtgatctattctcactaggcaaggggtcgaaaaagttatctaagaaagcatactcatagatatcattgtaaaagctctaagaggagaatcattgtattctttgttcttaagtcaatacaaatcaagaggagtaggctattaccgaactactcggggccgaacctctttaaaaactctatgttctttatttatctttacatattatatcacctaccgcttacaattaagactcattgtcgttggctaaaagcgaggtcaacagaagctatagattccatat

SEQ ID NO: 54210 - DNA, 1112 bp, Cannabis sativa
tagcttaatcaatatatgggttattataattgtttaagattgagatgaaatcataattgttttaatttttaggctaaaagtgacaagtacaaagagataagaaataaatgacttccccatacttgtagccgcaaaagatatgctcgattaatcgatgatatggtaaataattaattttcttgtagcatttaatattaatcataactaatatactatatttataacatgttttcttctctatgtagatgaatggtagtggaaaaaaagaagaaccttcgagagttgatgtgtggactaaggcacacaaagaaaatggagaacctgtcaattcctatgttgctgaaattttcgtaagaatcatcaatttcagcttatattttattttcaattttatttaattgttttttgaaatatgaatttacttatatatttttaaaatatgattatttttaaaggatatattaggtgattcttcataaccttctaagactccaaaggaaaaaagagatcttctttcaaatataataggtcctgaaaagggtttctatgtgaaaggttatggtaaaggagttaccaaaactaagttagcaattacatcgaaaaaagaaaaacatatatgtagaatggaaaatgagtataaagagttaaaaaaaaagtggcagttatgaagcaattgattaactctttcataaattccaaggtaaattaaaatatttttacttttctctattgttagattgattaaacaatgctaggttatttctgtaactttcatatatatatatgtgtgtgtgtgtgtgtgcgcgacacacacacttttgtggtgtagatttttgattgtttgtgcttggcagagcattaaaaaggtgtttcttttggcgctgagaattgattaatgggctgatttttgttgtcccatttccgtgttagactagctgaaataatgaaccaattttaaaaatactaggttgtgtctataattttgaaatggtaggtctattctgtctataatgctaggttcagtaatgaggtaaattacttaaaaactgcttgtacttggaggcctacttcaggattaacttgtattgaagaaagtgttggaaatgttattg

SEQ ID NO: 54211 - DNA, 886 bp, Cannabis sativa
tcttcttgctcttttattgcttatattgattctatcactactcttaaaattgttcatgaagctatgtctcatcttggttgtcttgctgcaatgatagaagagatgaatactttagttaaaaatggtactttggacttggttaatttaccttcaagaaaatgggccatagggtgtaaatgggtgtttacggttaaattcaatcaggatggaacaattgcttgcttaaagtctcgtcttgagttcaaacctatagagtggactattgtgatactttttctcccatttctaaactcacatctgtttgaatgttcctttccatggtagctaatcatcattgtcctttgattaactcttataaaaatatttttcttcatggagatcttgaggaggaagtgcatatagagcaacatcttgggtttgttactcaaggggagttaaggcgagtttgttgtccatgaaaatatttatatggattgaaataaagtcctcatgcttggtttggtaaatttagtcaggatgtttagaaatttggttcgttgaaaagtaagtcagattattttgtgttttataaaagatcaattactggtatcattttgttagtagtttatgttgatgacattgttaatattggaaatgattttgaaggcatctcatctcttaagtctttcattcattataagttttacacgaaggatttaggggtgctcaagtatttcttgggtgttgaaattactcagagtaaacaaggtatttttttgtctcaaaggaagtatgtacttgattttataattgagacaggaaaatcaggagaaaaaccttgtaatgctccaaagaatccagttgtgaacacatgatggggaaatatttgaagatcttgagaaatatc

SEQ ID NO: 54212 - DNA, 1163 bp, Cannabis sativa
  modified_base (1119)..(1136): a, c, t, g, unknown or other
tagggaagaattaaatagtgatttaatctaaatacaaactttcaatatttgtaataatagttgattttttaaaattatataaaaatataaaataattattgctatatcatcattcaacaactataataatgagtgataataaatgaaataattaaatacttgccatttatatattgtataataaattgaaaatagataaaatgtatgattatatgaaaataaattattatgtgcacatatattgtaataaaattatataatgtatatattagtgtaaaatttgtccaattttttttattttattttatacgggtgtaataatataaattctattttttgtattgtaaattattttaaatttatcaaaattttacagattttgatatacaatatcatgtaaaataaattaagattgagtaatttgcggcataaatacgtaagtttaactctcaattgcaaataaatacctaggtttaatttttggcggtgcataatacctaagttatatttctggaactctatagatacctaatcattaaatgttaagtcattatatccacgtgtcattttattattggtatatttgatctaattttttttaagtaataaaaatttaatgacttggaccaatcagggattgccacgtggcaatttatttaaccaggtacttacagaagttccaaaattataacttacgtattattaccgccaaaaattaaacttagatatttatttacaacttggagtcaaacttaggtatttatgctgcaaattactcattaagattataactattcatatatcaaaaacacgaataaagtgcattgatgcacaatattgctataaggcactagcagtatcttgtaattggttagctagtgatatttcataaaaattattacattaatttatatgaggctcaatatttaattataccaataataatataaaagcatttaaagtggagatacaaataagtgatgcaaagctaaaaaataggaacatcttcaatgaagtgctaaaaaagtagcgtattgctatattttagcacactaagaaaaatactactccaatagtagcggtaagttgtaaagtaccacttttattaatcaattaatnnnnnnnnnnnnnnnnnntatatttaattgaaacatacctctttt

SEQ ID NO: 54213 - DNA, 1374 bp, Cannabis sativa
aattaaatttaaattcaaaattttagacatttttattgaattaaataaatttattcaaaaaaaaattaaatttagagtaccaaatatatatgattttaaaatatacaaggtactaaataaatattattgaaaacacagagtacttaatttgtatttaaaacacggtaccacatgtatagatatttgttatacccaaaaatcggctacacttcagaaagtgacacatgtccaaatcagtattgaccatcgaatattcaagaggtactttaacaaaagagtcaagaaaaggctctttgatcatgttggagttttggtgttaaggcgtgtatttgcaaacacacgagatccagctgctggagtgtttaacccaaactaggaaggtcttatgttattgaaacagtagttggaaccggggtttataaattagctcggcttaacgacccgctaataaaaaaccactggaatagtgaacatttgtgaccctattactagtaaatttaaaatgtagatgctgtatttatctttgtaatagttggattcttatattaataaagttaaaaaattttcaagtaattacaaagtttatcttctttaaaattacttgagggtatatatatgtgtataataactggaatccatctagaaatacatattatgttgcaaacccaacaaaattaaaaaaaaaccttttctttagaaaggaaaaatcaaaatagcagttgtaaatgagatcaactcacaaaacaacataaagctatatgcgaattgaatgttctaacgactcgtattaatctggcatgtattataacgaggtaaaagaatgccttgaaaaataatactaaagctaaaatatgaatagatgatctaactattcatatgagcaatcaaaagatatacgaagtagtttcaaaggtgaattattcaaagtattttttaaatttgctttaaaagaaatatgtttaaataaggcagattgcaaactgctttcttataacttagcagaatataaactgcttgcatataacagggcagaatcgatctgctcccggattaaaactacacgcagaatataactgctcgtgtatatacatagtaaattaataactacttaatcatatcaaaagtaaaaaagcaggaacaatgtaaatgtttcctaaagtatcaccgagttggatcaaaatataaatgtttagattgtgaaataaaacgcaaataaacagatatatgtgattgaaacataagatactaggcgttaaaagtaaagataaatgcatgaaaaagcaaagttggctatttaacaatgcaaaattccttacaaaaataatgccactaggggcaactattgtctcagccaaagggccatttttctaaatt

SEQ ID NO: 54214 - DNA, 2696 bp, Cannabis sativa
tatttttactttaggaaaattgccatatagccgagacaatggtttgcccgttgcaaagttggatggctaacattgcttttattttatcttttatttattgcctcatatttttgcattcgaacttaattttcttgcttgcttgtgtttttactcacaatttaaacaattatactttaatcaaatttaaaatactttaaggctttcagtggctcttatttttctttaatattttttaagtagttagtaatctactacgtgcgcgagtagttattatctgctaagctttcgaattgtgagcagttatcagttttgctttgcataaacagttgtaatctatttttagtcaaacttaaacatactttaaattattcatctcgtgaatcactttgtatatttttgattgcctatatgaatagttaagccttctattcacaccttaggctaagtattttttcaaggaatcttggtgcctcattttaatacattcctataaaatgcgagtcgttaaacattcagcttcgtatgtagcttatcgttgtttttatgagttaaatctcatttacaactagtatttttaactttgcatcgttcatagatgacttcagtcatccacttaaaaactttggaaatttttaaaaatggagggtttgcaatatattatgtatttctagataatttccagttaatcatacacatatatatatatgccagtcaagtaattttgaagagtaaaactttgtaattacttggaaaataattcaactttattaataattgaagttcaaaatattacatccaaaaaagatattacatcattggtttactggtagtagggtcgcaaatgctccacgttccaatggttcttcattaacgagccgttaacctgagctaatttataaaccctagttccaactattgcctcgatcacataaggaccctcgaaatttgggttggatactcctgcaaatgcatctcttgtgtttgtaaatactcgcctcagcaccaaatcaccgacattaaagagaattttcttcactttcttattgaaatatctcgtaactcggtgtcgataggctgcattagtgatttgcgactcagtacgtttttcctcaagtagatccaaggaaaatttcaagagttcttagttttctttttggctataggaatctcgtatgtgggttgcaatattgacttctactggcagcattgcctccgagccaaattccagcgagaatggagcctgccctgttgttattttctcagttgtttagtgagcccaaagtacttgtggtagttcatcgatccatctaccttttgcagtgtccaacttctttttgatagtatcctttaatgtcttattaacatcttctacctgcccattcacttgacgccttgatacggacgagaagctcttaataatgttgttccactcgcagaactcagtgaataactccccattgaactgagtcccattagcttttcccaacggttaataagtgggtcaattataaaaactgttggaaaaagtaagtggagatttttcccaacggtttagaaccgtagtaaagacactgttgggaaaactaatgccaacggtagaaaaccgtgggaaatcccaaatagttcttttttttaaaaaaaataaataaataaatgccaacagcttataactgttggaataataagtattccccacagttgtaaaccgttgggaatacccaacggtttacaactatggggaatacttaaaattcccaacagttataaactgttgggaaaagttcttttgagtatgttattttaaatcaaacgttattttattttaaatagataaataataaaataattaatttagggtaaatttaaataggataataataaaataattaattagaggtaaaattaaaatagggtaaataataaaataagacgagttgtatttgaaccccataaaatataagtacaccctattattaaaaaaaaaacaagaaacttaaaatattaaaaaattacttttaatatttttaatttttttctcacattattttatattaatttcaatacttatttatattttatttttatgttttttttaaatcatgtatattttttaagaatataaattaaaattaaaaattttaaaaaaataattaaagatatatatatcttttataaaataaaaattattaaaatatggtatttttaaaattttttatagtgtaaattaaatcttctaaaatttaattggggataaaattaaataggaaataattaataaaataattacatttaacttaattattttttgaaaaagataattattttagtaaataaatttaacttagggtatacaaaaaattatagaaaatcctaacctaaactctttcctcttcatctacttgcttccgcctcctcttcatcctctctctctggtttcttttctgaacagctctattcgctggatgaagtgctctggccaccccaggttccgatggacctcacaaggatgtccccaccctcagaaacccctaaacccaaacccaatcgctttcctcccactcgatcccacctctctctctattcactgtctcaaccagacggctaggtcacgatggccatcctctggtcgagggtggttgaaaaggaccacaccacggtgctcacaaccacggcaaaacctaaaccccaaagatttt

SEQ ID NO: 54215 - DNA, 1954 bp, Cannabis sativa
aataataataataaatatatataagaaggttttaaggagttaatgtgacatgcataaccttcttactttttctagtacctatatttctatttttctaatttctttttaaaaaaattagtatgtaactaataactaatactaaattaatactttctaattaaaagaaataaaacgaaagtcttatagtattctaaaataattaccatgtatactaaattaaaagaaatcattaaaaaaattaaactaaaggcttatagtattctaaaataatttcttaccacctatataatagtttatatatttatatatttgtgttattatagtagatgacatgacattttctataagctttccttccagttttctactctctcattttttttaaaaaaaatttgttaatttttagtactatttaattaaagaattagagtgacttttcattcttgacaaaaatttcttttcaaaaaaaaaaaataaataaacaaataaaaactcccattgaaaaataaattccttgacctctttcatttcaaatttcacatggctatttgtatgggtagtttttcctaatctctctattcttcttttctctcatttaattgatcttttacaattgttagtaataataaaacaaatattaactttttaaagcaaaacataatacgtattaataacaatgaaaatatgtacacacttattcattataatgaatattttttagcaaaaatttataattgaaaaactatttatattctttgtgtaactcttacaattattaaccattaaaactatttttattctttcattaaaaaaaaaaaaactatttgtattctttacatagctcttatatatgtagtgtgacatacctaagttttgtggccactcatagttttaaagtttttagttattatatttctttttcttctaatttttgatgttctatttttatatatttacttgacattaacaattattcatttttgaagattttttattttttttttctaatttttgatgttctataatattttttagatcgacaatgacaattcaatggcatgtgctccaatttatattttatatcaaagctatcaggtaactttttccttgctttgaaaaattcttactaaaataatctttatattgcatatgtatttagatttaatttgatttcattatgtttcgtctttatattttatttccatcatatattttactttttgtactaattttttttttcttctttattctactctctcttataagcttgattatcacaagtttacatcttctattttgatcatgacaatgatctcaataattttaacttaatattttaatttactatatacatatatgtacacacacatacacatacaatatgtatagcacatatatacatattatattttataatgttatactattttagtgaattattcttatgtgttcatcttaactattttttatgtgtggttgactctataacatgtttattttgtattgttatttttaattctatttatatacatattctattattattgataaccttcaaagagtctcaaacatgtgggggtgacattctcaaaatctttcagaactatgtatttattttatttatgtattttcttctttttttctaatttttatattattattatataattattcctaacaattaatatcaatctataatcaaataaaagctcgctctttaaaattaaatttgtgtgtataagctatttcgttttttctctttattgtttttttaaattatcacattgatataatttttctcattattattttttttaatacaacttttcatttcttcatactaattttctctattaattagtataatgaattttttctttcaaaaaaaatataataaatctttatttatgatggcagtaattgattaaaagatacaaagaatatagagaattaa

SEQ ID NO: 54216 - DNA, 1032 bp, Cannabis sativa
  modified_base (375)..(376): a, c, t, g, unknown or other
  modified_base (561)..(562): a, c, t, g, unknown or other
atatatatgatctcaaaattgttgtatccttgtcttgtagtcgggactacgttaattcaaaactattgttatcaccgtatcttatcattatatttaaagttattattgtcattatcgtatctcatccactccaccattataaacgggttatatggatcgtatttagattttattttttgacacaatatttttctaatattttccaatactgtttttttactatacacatatatattatttttaataataataataaaaaaaaaaaaattggttgatacttatctttttttctttatattagtttagagaatttatttattctttttagcaaatatttttttttttgattgttattaaaaataataataataatannaataataataataataattttttggttgctaccaattgttattttagttagttagaaatttttttgaattgtatataaatattttaatttttagttaattaataaattcatatttataaaaagaattaaaaataaaaaattagataactattttaagtgattttaaagtgttattttattaattnnaatgagatatttaaggagaaaatagatagagttattttgagtgattttaaagcgtcatgttttatcatctcatacttcttctttataatatgcataaacaaaatacaaaatcaatactaatgaaagtaacattaaagaaataatgtagaagtggaaagttatttttctatacacattaaattgaaaaagaaaaagaaaaattgataataagaggtacatatataccaatatacaaaatagtgagaggtataaatattatatagatatatatagctatgaatagaattagaggaattaatatatgatatatatatatattgattatagtttgagaaagaaaaaaaaaatgtaagtaatttattgatgggtgatatttaaaaaaaaataatatttttattaatttatttatttttaaaagtagttattattatttttttttttgttaattatgatataaatatatttataaa

SEQ ID NO: 54217 - DNA, 1157 bp, Cannabis sativa
atcaatgcatgatttttatttaattttctaccttgataattattgtcaaatatttaaaatattttatttataaatatatatatatagaatataaaaaaaaaataatttgaatgagattgcataaatgttttttaaaaagtacataaataaatatttttttcattcagacactaattaagtaaatgatattttttaagatttatttcttttatttatgctcagtttgtttagaaaaaagacttcactttgtgtttatattattatatgtatactagtaaacaacttgtgcttcgcgttcgcgacgatagatgtttgaaatttttttaaattatatatatataaaataaatcataatatttaattaatgacaactaaataataaaatcgtatcaaattttaatctaatttttcatataattttgtatgaaaaattaggtgcaaacagatcgatgcaacttgtatttactaaatctcgttattataatggaagtcagacgcgacttgtataacatgatgttaggtttgatccatcgaattattataaaaattgataaatttatagaaaacttatcatatgatttcaaaaccgttctcatcaccatatctcacttgtagtcagcagtacattcaagggtacgtgttgttattgtcatatctcaagggtataacatgatgttaggcttgaccctaatatgtttgttgtatatagaaaataaattaatcaatgagttaactagtcacttttataaataagtgacactacaaaaaaatttacttttagtcacaacaaaacttgtaactaaaagtaaaaaaattgtgattacttttatatgttatgactaaaaggaccgtggctaaaattattagtcacaaaaattacaatttattgtgaatagaagtctttttagttacaatatttattgtgactaaaactaaattaatgacaacttgtatttaaatactatattttacttacaaggaacattttgttatgactgaaagtcatatttagtcataaaaaaattaagttgtgactaaaaagttgtcactaaatgtaaaaaaaaaaatttgtagtgaatctgtaaaattttcttttataaaagtatatgtcaaataaaatctattaattaataatgagaaaataaataaaattgtat

SEQ ID NO: 54218 - DNA, 1577 bp, Cannabis sativa
acatttatttacaaaagtcgggatcccgtatttaaacttttacaaagtattcaaaatatacttagtcaggtcgcacaacgactacaaaatgaaaccccagatgtcccgagaccgaacactccaggtcccgccgccatgacatgtacaacatcatcctagctctcgaagctcactcctgttcagccttcgcctttcctttacttacacatgaaagtagaactgtgagtcgacagactcaataggaaaagcatataacaaataatataataccgacttgtatctaggcgcccatacacctatttacaaggcttaacgaatgagctagaacgttctttactagggtacaacaactataccacatacactacgtaccgacattgtacgtgtgttggtagggtttgtttcgtaccctgagtatcactaagtgatataccacacacaccctgtactttcccgtacttgtgctagtaacaccgtaatgtactcttaaacattgtacactataccaatgcactttgtatcacttccgtacaagtgttggtaatgtattaagcataataagcatgtatatatatatttcacacatacatacactcgcatatatacattacatgttctacgctattcttacctcatttctgaattcaagagagttggctgacctgaacgaaaatcctcgtgttggatggatgccctaatcacataacataatcaggtaaatcacatgtccaaaaccctaatctggaaaacccaacctttaactaaagattctgccatagacaactgaaactataatatcctaagaaacatggaatcacccacccaaccaaggctctgaatggacacgaattgatgaaaagaattattcgagaaatcagtcccagaatcggttaaccagttttacaggacctgacaaaccggttaaccggtttgcaccaggttttcccaaacaattcaaaacctgtccaaaacatgtccaattctcaccaaaccttccagaacacttacaataacatcaaccaacacaacccaaaaattcacacaaaatcaaaaagtgccatggatgaaccaagcttgagttttcaaactcaaacttgtgcatccatgtcaccaaacctccaaaccagcaacaaaacatcaaaatcaattcaaattaaacgtagaaaccgaattataaacaaacataaccctaacagcgccaaactcacaactttgcatattcaaccaaaatcaaagcttcaataacacaagattaagggctctagggttacatttgctcaaaacctacttgttttcagctagctctcattcaattataccaaaaaaatcccaagtctaggttggtcttgtggtggtcgagcaaggaagaaagagaaaagggtgttcttgattttttttttaattttttaatctattttcttccaaaatgaaataaagcctaactaattaatctcatgctgaaaaatatttggctaggtgtcaagccctaaaatagtcacctatcccttttaccaaaagactaaaatacctttggtgtaaaagcataagccaaattaagcttaggggtaaaatggtca

SEQ ID NO: 54219 - DNA, 544 bp, Cannabis sativa
  modified_base (28)..(35): a, c, t, g, unknown or other
taattaatgagttttaatgactaaaaannnnnnnnttgaaaaagagttttcttgtagtaatgaagagagtagaatctgtacgagtttttcatacttacaatattttggcatgaattcaccactagcctcataattgacattatttttatttcttcccatcgcccgttgcttttcaagagaactagtattgattccattacctgcaatattttatcattatttcaacaattcaacattttaatacacaaacaacaatagtgaaaaaaccatctacatttgttctttttgattcggttgtccagctgtcaattgagtgcctagttttatctatatcaataatttctaataaattgtaggtaattaaccaagatcgactttagaacaatgttaaatattttaaaattcaatgcaaattactgatcgatttttttttcctctaaaatgatgtatattaatttacatttacttcaatcacagatgtatataaattcaattttagaagcttcagatcatttttattattgaattcgagatttacgtttga

SEQ ID NO: 54220 - DNA, 1077 bp, Cannabis sativa
caccaccaatctcaactacctcatcctaactccttgtatttcgacaagtatccacctataacacaagcttacaaattcatgagtcaactcagttaaacaatgataaaaattgtaatctacttaccacttacaaggaaactcaatatgctccagctatcaatctgctatcgtgcttcctatcatggttttctaatcatgaactacaaattaaagctactaaaacacgtaaaagcttactaaaccatgagtcaagcttatatatgatgatgattgtacatatgtagatgatctttggagaataacttggtagctctgataccaaattgcaatgccctactagtttaggcacgctacaatattttgtcatttactacatactccttttctaatcaaatgtttattgaaaacatgctaaaaaatgaaatttcttattaaataaaacttaaactttaataaataaacataaattaaaacattttgggatctcgttaaaactttaaaactatttctaaaatatgttttatacaaaagttaccacccaggtgttaacataatgtgagcctaaactatcctgaagatccgaatactctaggtctaagcatcttgatatgtacaatcttcaacaagctctagactcactctggctcaattttaactcttacctacaaatgaaaataatatctatgagtcagaaaactaagtaggaaaatcataaacataaaactttaattacattgtaactaggcatccatacacctaaccatgatccttcctttgtactctagctgatggtaatttggtcgatatactcggtattatggctgatattcttggtactctggccaatattcttggtactgcaactgatatactcgttactctggacgatattctcgatgccctagccaatattctcagtactgaggcttatattcactgtattgtggctgatatagtcggtactttggccgatattctaacatgcacgctaaacatgtatgcatgcttatcttataataatcttaccttgattttgaatacaagtatgatggtaaccctgagtggaaactactgctc

SEQ ID NO: 54221 - DNA, 973 bp, Cannabis sativa
cacaaattctccactcgcaatatcatcaaaagtaagtatattttttttatatatgatttagaattaaaatatatgaaattattgatatgtttatttagatttagggttaaaggtatgtgattttgagtttggattagatttaaggttgaaatagtcgaataagtgttttggggcaaatttggatttttggactagttcgatgcaggtccgatacaagcttgatgtatttttgttgatggaaaaaaataaaggttgaagataatagcccaatgtaagcccgatgctagacctgatataaggctcgatagtgtgtctaagttttatatatttttttttgtatggctcaattggaccaatgtattagggctgttaatctgatctaattcgtatatttttttgtaaaacttagtgcatattttatattttggatccaatattatccgatccgcatagcagtttaaatccattctaatccaatcctcaatagtactaattggatcaattacttttttttaatgataaattatttaatatttcattaaaatggatttttttttttttttttttgaaaataaactattgtttcttatatccaataataatctctttccatttccattacctacaaatcaaatcaatatacacatatgttaatattatatgtatttatgttagatgataaaaaataaaataagtattacaatatatatatatatatttaaatttacactaaaatatatgtaattattactaaaataaataagctagtatatatatttatctatatttagaagtttttttttttttaaaaatattactagaaaattaatatatattatatattataaatttttagatatatataattaaacgagcattagattggatcagttactttttgagatcaaagaacattcaatccgcacaagtgtagattttagatttttcaatccaattcaatccgcgtaagtgc

SEQ ID NO: 54222 - DNA, 1065 bp, Cannabis sativa
tgtacaaccaaaggttttgaaagtattgtaatcaggtgtggtgttgaataaagtttcaatgggagatttatggttgaggacaggtgtgggaagtctgttatgaatgtatacagctgtcctaaaggcttcatcccaaaaatgcaaaggcatggaggcttgagcaaggagtgtgagaccattttcgactatatgtctgtgtttcctctcagctagaccattttgttcatgggtggtgggacagggatgtctatgaatgactccaagttttgtgagaaatggagtgaatgatctatattcaccaccccagtcagtttggagagcaagcaatttggtgcctaattgaagttcagcttcagctttaaagttttgaaaaactttaaaggcttcatctttggttttgagcatgtatatccaggtgaatctagagtaagcatcaagaaagtgtatgtaatatttgtaaccatttaaggatggtgtgtgagaaggaccccaaaggtcagatacaacaagttggagaggtgctgtatattgtgtaagggaagctttgggaaaggggaatttatggatttttccaagacaacaagcactgcaaacagatgaagaaactttattgatattggttttattacaagagttcaatacacgtttgacaataggctcagaaggatgaccaagcctattgtgccacacatcaaaatcagaaagtttgtttacagtacaggtattacagacagcagacaaggactttgaagaggttgctgtgtgtgttggttggagttgaacttgggaatggtcaaaagtataaaggccattctgattgatccccttcagtataagagaatgtgtcacctgatccttaacaaaacaatagtcaggatagaaaacaaagtagacattgttatcttttgcaaatttagatacacttaataggttcttggtaatgtctggaacatgcaataaattttgtagtgtgagtaatttagaagagtgtggtgtgatgaaagaagactcaccaatattttgcacttgcagcccagttccatctccaacatacagcttgtcagg

SEQ ID NO: 54223 - DNA, 1387 bp, Cannabis sativa
tagcttagtatgcttaaatgtaaagcatgatttttaatatatcacctaattagaaatagggtatctatatttttaatatttttttttccaaaatattcttacatttcaaaaaagtttctctctaactctctctcgctctaactatgtactgttttctccaccctaaagcttcaaaattcacgagctcaactatcccgaaactcttaaaattctcactcatcgttggaattctcaacctatcccttattatttgtttttcttttctagttttcacaaggttgttaaatgttgttaaacctctaagcacatctttaaatatcgctaaatcacattcaagtgtttaagatgattagcgatgcgttttgttttttttagtctcattgtaaaatacgtaaaatattgctaaatattgctaattatcgataaatttggtctatcattgcaaatacatcgctaaatattgtaaaaaagtggaaaactaaaagaaaaaaaaatgtaaacgagcgatgggttgagaactctggcaatgggtggggattttggggtggttgagctcgtggattttagggctttagagtgcagacgacgaggcttagagagagactgtgagagaagacgacgggaggggcttgtgactggggttttaggtctgggttcgacgacgggcaggaccgaccttaggcataagcaggctaggctcgtgcttaggaccacacttttcgggtgttcaaaataaaaaatgaaagacttcattaggtttttatttaagtaaaattaagtgtattgtaaataacaaatatttacaacttgattggttggagtgtacgcacattacgcgttggtgtggaatggaatcccataacattttttgttttataagtaaaaacgaattttgtgtgagggcctcaaaatttaaatcgttttaggcccatatatttttaggaccaaccttgacaagaaggttttaggtcggggttagagaggtttttttaaaatgtaagggtatttttgagaatataatatattaaaagtataaatactctaattctaattggatggtataaacaatggactttaatttgtgggctttttatttgtgcttggtctctttagtttgggccttatctgtagggtccttttgtaaacttcactttggttattacataattagtaaagggtttctctcaactaataatgagaataaaatgaatgaaaaatcaataaataatttaatatgtgtattgaaggtttattgaatcacatttaatggatttggacttaaccaatctaatttaattatttattagatattaaattttgtcatctaatccaatctaatcgaattgagtcattcagtccgattcgatccaataaatatattggattg

SEQ ID NO: 54224 - DNA, 2952 bp, Cannabis sativa
  modified_base (102)..(102): a, c, t, g, unknown or other
tattgtatacgtagaataatatatagacaaattacgtacacagtaaggccataatgaaaaaaaaaaaaaaaaaataacctaaagtttttttttttttttttntttcaaaaatacggtctctacaatgaccttcccaaaatgacttttctaaatatttagatgtcaaatcatcatgagctcacccaaataatctaagatctactccataatcgacgtagcttcttcaaacaacaccatgaatgccaacgagaaagcttttaccgaccaccatcaactttgacaagaagctttttctgatcagccatggcaacacgaccaacaatagagatctccatgaaaagttaacaagagaagatcacgattgaggtaaatctccataaatgcttaattacttgccaaattttctagattttcttattaaaaacaaatctaatgttgattggtatatttgctttaattattttcttaattagctgttgttgtttagttgatttacatatattggtggttttagttcatatattttagtatttttttggtatttttcgaaaatatggaatgaaaacaatgaattgaagtttctgggtagtataatgagaacagtgagtgtgttttaaaatttcaaaataaaactatgttgttttaacgttattgtcatgttttcttttggttgtccatgatcgtaaaataaaagatgtatgaaaaatacaataacaacacaaaaataatgagaaattgatgtaactttattattaagaataataaataatgaaataaagaaataattgtgttgaccacaagagaaaaagaaaaatatatattgtattataatatcttgactcatcccatctaaaaataattaaattgtttattcagtaagattaatcttttcataatttttaacattaaaattaaaaattgaaaagacgaaagtagaaacataaattttaaaatataaaaaaaaataataaaaaagttattttcatgttgttgtgaaatttcgtttgcgttattttgcaacatattatctgcaacttgaaaatattatatcaaaccaagttattttcaagttgtagtaaagtttattatgagttgtttatactatactatcaaaaaatataaggcaccaatactttaaatgttttctttcataattaggttgttatttaatgtttttgaagtagatcaaagtaaaattgatagatctgaataaattagtgcaaataattcacatttaaaaaaaatagtgatacatttaaggtcatttactgattatgtcatgaataattgatacactagttttaagtatggaacctctgcaaatttcggtacagagcaatagtcattggaataacaacaagtactaatgtactaagttgattacgaatcaattggagaaataatattaagagattgcgctttgctaaactagtgcagataataatagaaaaactacaatgtaatcgtgaaacaattcaaaaacaactaaaatatcaactaacggaaggttgtcaaccactccaaatcaaagatgacaaaagtctgttattttacataaagctattaactaataagaaaattgatttcacacgatatccattgtgcgtgaacacatttagtaacacagaatcacaatcattttcggcagctacccgaagatgctgaatattgaaaaatctattattatttgtttatcgtttgatattgttttatttgaaaaatacacaatatctacaaaagaataattaagttgttttcatgttattgtgaagcttcttttatattatttttgcaacatcttatttcaacttgaaaataaaattaaattattttcatgttgttgtaaagtttgttatgaattgtttatacactacaatggttgttcaacaaaaggaatagatttttacatgtcaaaacaaaaacttatcttatcttttacattcagacatggaaaataataagaaaacacgcattttgttgattttaaatcaagtggaggcattgataaaaagtgattgtaaatctaaagaaaaattacttatatttagtaatagcattttacaattgttttaaaattgtaaacatgctgtttaattttattactttttaaacatgttgctttcacattatttgaacgttaaatttcagtggttaaaatttatagattccttaaattatttatacaattatttttatatttttatatctttgataaattaacagttaaaaaaacctattaacaattaaaaaaaaaaaagaaaataattatacccatacttgatgtaaaattaacagaataataatagttgtttttcactatactaaaagacataaacaaattaaataaaattataatgtttaatattccatgcaagatacatgtgaaattaactacaaaaaagtttacaaaaatataaaagcaaaatttcttaaaaaaatatttctcttcagtgcatacaactaaaatcaaacacatttctcaatcattaatatatgcacagttgcttcaacattcttggaagtttttgaaacattttcttatatactctaaaaagacttagaaaattgttaactatacaaataagttaaacaacacaaaaataactaaaaaaaatacataaaaacaaccatcgaagccttacatccttaacaaatttcaaagacttcattctctttgccttatttgcttcaaccttagatggaagtggtatttttttagaaccagaagcctctggaacataagagatattatacatttccttctttgcaatacttttcatacccattttaggttcaccttcaaccttcaaattagtggactttaaaggagctttcttaggtttcttagatatttttttagcaggggaaggggacatcaaacctgacctagtgatggtcacttatacacaataaaacaaaaatagttgagaaatgaagaagaagaagaagaag

SEQ ID NO: 54225 - DNA, 846 bp, Cannabis sativa
  modified_base (475)..(507): a, c, t, g, unknown or other
gaataacttgtaaatttatgtgtatgaagattggaaaaacactattttggcgtgcatctagtagtgctttaacctttcagccgtgatgcctagtgggaattcttgtacatggtgaataactatattcaaattgaaaaggagattcgagtttctatgtttaaatgaggccctaataacaagataatcccccgctaattaatattaccaatgtatgctgctcttcgagtttcctttttaggctaccccactttgaagtttccctattcacactaattctcattttctctcttctctttatacctcacttggctgcctaactgaaactcacccctttcgacgtaccttgattgctggttgcttaacctttgtagtgccactaaaaatgtcaaactttcgtaaaatgatttgaactagggtatccttgtcgaaagaaaagaagattagtatcccgaagaaagaataaaatagcacattnnnnnnnnnnnnnnnnnnnnnnnnnnnnnnnnngaggggcaactagtgaagatgccacaaaaataatcacttttccttctaaaataataaaaaagtaggttataattgatcaataataatactcattttttttgatttctcatacacaataatgttaattttattaaaaattatatccatttttgtagatagaatcttcaatgagtgaagacaagcacccaacctaataaagttgttgagtaaggtcaacttttgagccccaagttacttggtgaactttactaagtcacattcctactttagtcttcacaccccaactttagagctgaagaactcctcaagctaacatggggttcctcttaaaaataatta

SEQ ID NO: 54226 - DNA, 1046 bp, Cannabis sativa
aactgatctcacagattaaatatacatcgtaatattttatttataataaatgataatattattggtatttaaatttatttattaattcaaaaatattgtttataatggaagataataattcaattatatataccttttttaaggtatcaacattactctcctcaagagtaattatattattaaggaaataatattctaaggctaaatcctcaaaacaaacaaagtaatgcttcacattatcattctcttgctgacattaaccttccaaacatccccttagtaagtaaatcaaataaagtttatgtagaaaatttagcttacaaaataacaatgataatgagcctattaagtcaggttacaataaaaaaataaataaataaataaataaaaaagccctaacaacaaccttaatgaaagatccaataagctaccaataatcaagtatcaaaaaaaatataaagtaaattaggtttccaacttaaatgaatatctaacggactctacctattaatatctatcaaccaatgatcttctaataaaaattagggtataacaacctcattattcacatacaaaataaggaaaataatcaaattactaattatgacaaagcatctaaaaataagagaattggataccacggaatacagggccaattgatagatctggccgaaaatataacgtcctactaacttagacacattattgtgtttttcttaaatactgcactaacatttgctaatcaaagaacttagtgtaaaatcgtgtttaaaaataaacgtttataataaaagtaaaactttactaaatacacataatcaatacttaaagtttacaaattttaagaccctgaatctatttttcaaacttaaacaaaatatagcataacaatagtgttgtccattgagtacaaaattgagccaatgatgtcccgaagatccgaacactccaagtctaaccatctagataagtacaatcttcattggcctccatgttagataaattaacaattaacccaagatctatttgtatataacatagaacac

SEQ ID NO: 54227 - DNA, 1168 bp, Cannabis sativa
ttagccatatatatattatatataaattaataaaaatttaaatatttctttttttaaaaaaaaaaattcttttaattaaaattaaatatattttaagtgatataaacgtgtgatttgacttgtgttgtcacgttagtgatatttttttttttattttcttttaattaaaattgatgatgaaaaatgtgataccgtatatttaatatccatttctttcactttaatcccacttcctcattattcactcttcctattcatcattttcttccgttttttttttcactttctacttcctcaagttctctttatttttctccattaacatataatttttttattttttttcttgttcagttcttcttcttcatatttttttatttagttttaaagttcttagtcacgttttcagaaaatataaaagttagtgtggttttttttattctaatttttcaaaacttgtttgcaaatatagtttctattgcatctagtattgaagttgtgcagaagatggttagtttttaaattattatttttctttttcttattagttttagtgttattttacggtttttgtcatgatttatttatttgaccctgatttcactgctcttgctccatctcgccagaattaatagttattttctgggtgttctcgtgttgatgtggtggttctgtccgtgggtgtggaagatggaagctatatatatatattttttcttcgttctctttggctatttttgtggttcttttattctcattctcctctaaatacatttgacgagctcactgacaaaagagttttgaagtgtgtaattcttttatatttttctaagtggttatgtctgctttattgctttacaattatttttgtgttgttttagtagtttttttttttattattttgattttctaggactggcttgtaagtatagtcgttattgcatctggtgttgagactgtgtagaagattgttagttttttttaatcatttttttcttttattttttttatttgttttagtgttttttttatagttgttttaccatgattatttatgtgacgtcgatttcactatttttccttaatcacatcggaattaatggttgttttccgactgtcctggtgttgctgtggtggttctgtctgtggatgtggaagatggagacct

SEQ ID NO: 54228 - DNA, 954 bp, Cannabis sativa
gattgatcaagaacaatgcaaacagtttgaaaagtaattcgaattgaattaaacaacagtgaacaacaatgaataaaccagtaaaccaacaaccaagaaccagaaaaatgaacaaagattaatgagcaattatagacaagaatgtagggagaaagaaataaacacaaccagaattatgaggttcgaacaagtgatgatgaatcacttgcctactcctcagctagaacaaccccaaatgcttgaatctttattgagctagaatagagaattacaaagttgacattcaatgtgtacttgacacaatcactaatgaagctcagcttcaattacaaaacaactcttctcgcaaaactctctttattttacaactgaactagctctcaaaaactccctctggattgctactgaaatgttgcagcaaatggctatatatagccttgttgtttagacccaatcctaactgtcagttatgacagttaggtaaaaccgttatgcagcagatagaatgtaggagccaatagtgtctattcctctattagttaccaatcacaacaattatccaccttggtcattaacagaaggaaatgaatgatgatgattagggctgaattggtcttgaatcctcatttagcaattgaggatgtttagcaagtctaggcagagcctaaacctggctaaacttagatactttgtcatcatgtttgcaggttctcttttccaatcttcttcacactaacttcctttttagcaatgatgtccctgatgaaatgtagcttaatgtctatgtgttttgacctctttgatttgaaccctagttcttttgtgaatcccttgagccagacagcttctttaatggcctcaatagctgccatgtactctgcttcaatggatgacaaaactactaccttttgtagattcaatttccaactaatgcatctgttgggttttatgccc

SEQ ID NO: 54229 - DNA, 1038 bp, Cannabis sativa
  modified_base (142)..(154): a, c, t, g, unknown or other
  modified_base (323)..(326): a, c, t, g, unknown or other
  modified_base (499)..(502): a, c, t, g, unknown or other
  modified_base (612)..(630): a, c, t, g, unknown or other
  modified_base (688)..(690): a, c, t, g, unknown or other
gaagaataagtggttgaaataaagtggtcaaattgtaactagagaatggtccctttatggccagccattaagtaaatttttgtccaatattttattcttttttattccatataattcaaccctaagccctagttgaaacacnnnnnnnnnnnnntgatgctctcatctcatccaactctttccacctgccaaaatctaattttctctgtcagacaactagtagatgagagacaccttctataatgattaaaaccctccttcattgttctttacctatttggcctatagtgatagagtaccatgcccatacatagcaagtcaannnntcaatcatagtgagtaagatggtggtaaccaaacccgaaggagagaaagagacccaagctcagatcttgataatactctacgacaaaaaggaacaagggttagagatttgagcagaaggagtcattatattccgctacaaccaatgtaaggtttttctaaactcttatgtgtnnnntttcattgttttagagatattcatatttaggatgttactcaacatatttgttagtaaatcttgatcctggtaaaatattcccaaaatctggcctcaaagccatggtaatnnnnnnnnnnnnnnnnnnntggatttaaaacgatgaatatgttgattgtgtagatttggatgtgttcatgttggttnnngtgttatttgatgaatgtatgtgtattacgaaattttttcatgaaaataattttattttcattctgaaaatattttatttggatttcttgtgaaaaattaagcaactttcatttttacagaactcaatttcgatgaaaaatgaaggagatatgggagtttgaaaccgaggtccattgagtgtcgcaggtcgagcatcatgcgcgcatagcactcggacaaggtgatccatgcacgcatgtgcttcaaacaattccttgtctgaaattgctcgcacgcccacgtgaccctacccctcgcccgtgtgcacaatgcaggcgccgaggtttctcggcaggacaccctgcaaa

SEQ ID NO: 54230 - DNA, 1275 bp, Cannabis sativa
ctcaaatttcatgtccatgagtaaagccatacccgaatcaaatgattgggattttttttttatttttagaaaaagataaattgggaagctgataagaggagatggagattacatatatataaatattcaaatggagattagagcatggattggagagtggagaaaataatattatttgtaattaacataagtgtttaccaagatttttagaaacagatgaaaataataagaactgaagaaataataagcgacagagaaattataataaggaacacataagtttttacgtggttggggcgttaataagccttagtccacgagtcacttttattcagtagtgtattactcataataatctcacaagtacatgaagtgtacattcgtatatgtgcctgagcaaaagtacgtaagagaattcaacccctaatcattgatattagttgagcatttatagtagttagcaattacattagggtttccccttttccctctaccgaggactttagaactgactaatgtccatgggcttactcatgaagtccagcccatgaaggatacaacctgctgactaggaaaattgggcttgagttgatcaggtcaaaaccgtatccgattataatgagaaaatattctgaaataactgccctgtgcttattaggtgaagtttcctctttcatcacgatatgatattattttccagtgttacagttgttattctcttatttataagagagaataaatagaaaaactggaagagtcttccgagactggtgtacctttttcttccagccccacgactctagaactaccttttgggcttgacctatagaaggcagaaagtatcccgagtacaaagccaagataactcctgaaatgacatattaaaatgggcttgacccaccttaccattgatgagggtcctactgatgggtctggaatactgacatagaatccacgtgtcctgttctagaaacgcggataataattactaattaaatattattaaaataatgtataaaatttcatattaaccacataacctaccattgtgatatatatactaggctattgttatgtgtattggattgcacatatatttacttagatttttaatttttattaatgttatgtgtatttttcgttgtataattttgtggatcttattcaataaacaacatcattttgaataaaaaaaaatatttaattgaagtattagtttaaaaagaaaacataacagttgtggaaaaattgcgactaatagtgtagaatcaaatc

SEQ ID NO: 54231 - DNA, 810 bp, Cannabis sativa
ttaaaattttaatttattttttaattttttttaatcattcaaaatgatttttttaaagatctaaattaattttctaacatatccgcatgcgagttgatcacacgatcgatctttggtcggatatctcctgatgactctgcttggacatcttgttatgtatggttaatacaaacctttctaccaaacttcgagggctgctaggagtgtaaccttccgtcgaggtagaatttttattgtttttgagtatttttgaaataatccctagtttcataggagaagttgaagaatactctctttttttatacattgatgaaatttacctttaaataaaatttaattcaaatatatctcttttataagtatttgacctaaattatccttatacactcacataattaagacataattttaaatataataggtaaaatcggtaaaataattgaaaaataggtaaacataataaattttgaaaaaaaaaggataaaaattaaagacattaaattaatttattctagtttcattatgttgtaattgattgagttagcccaatatgaaaagcccaggcccagttacaaaaactaaagtgggtttcattctcttcatccttccaaagtcataaaccctattggcctaagctttctcactctctctttccgttactctcatctctatcggcctcttttggctttcttcagtatcctcactaaccctagaaatattatcaacctcgtccactactgatcggaggctaggaatcccgtttcaatcattagccggataagccattacttctctcacaacaggtactgt

SEQ ID NO: 54232 - DNA, 1218 bp, Cannabis sativa
aggtctaggtttgggtttgattctgggtctcggtttgagttcgggtctcgagttcaggttcaatttttaattcgagtccaggttcgggcagggtatgggttcgtgtccaggttcctttcctggtttgggtctggggaaggtttcgggtctaggtctaggtccaacttcagattcccgggtctaggtcaggtcctacttcgagtttaaatctcggtttagatctgggtcccccatccaagtccagttcctagctcctggtctaggtcgagactcgtgttcaggtcccgagtcttggttttagtccaggtcctagtccgggttcgggtccatgtctcggtcttagccttggtatgggttcatgtttgggtccttatctgtttggatcctggtctgaagtcgcgggtctctggtcccggggagggtttaggacaaggtcaagtccaggtcctagtacgggtctcggtctaggttcctgtcccaagtctcaggtcccagtcctagtcaaggtctcggtccaggttttggtataagtttgggttatgctttgggttcggttctagtctcaggttcgggtcctagtcacagttccagttttgattttagttctgggttttgttccgggtccgggtctaggtccaaattggggtcagggtccgagtctcagtcctattccgggtaagagtttttcgaatccctatctgggtccaagtgtgagtccggatctaggttcgagtattgggtctggtcccaggtttgggtttgcgtatgcgtctgggtttgcatttgagttcatgtccatgtccaggtccaaatcccaatttaggtcaggggcttgatttgggtctgggatcgagtcccgagtttaggtttaggttctagtctaagtcctattctgggtccgagactgggtctgagcacgagttctggggctgggttctggtctagttcttggtcccagtctaggtgtgggtcctggtcacgttcccggtcttgttctagggtcctagtcatgttctcgttcatgtttcagtttcgggtccaaggtctgggtctaggtccaggtcctaggccagcttcgggtcctaattcggttacagttttgggtctgcgtccaggtcttgttcctaggtctcgatccgcttctagtttcggttctagtttcaagtcgcgggttacgggttcgactcgagttttggtccgagtctgggttaagacatt

SEQ ID NO: 54233 - DNA, 665 bp, Cannabis sativa
gttgctagaattacttgatggctggatctaatctctacttctttttcagagagcaacttagaatttattgaggaagatgatctgtccctatttactgattgaggctgaaactcatcgacggcaattgccatcatcaatggaggaaatcgaacctctggttccgtcggagttgaggacaaagagccatccctgtgcacggttcgaggacgaattttgttgctggcggtgttcgtctccgtcttctcttttccccctgcaaagaaacgggttaactgagccatcactatctccggtaagcgctgaatttctgcccgtgtttccgaaacctctttttccaactgagatctaacgtctgaaatctccttctgaatttctgagcggaaggcctccattctttcgtccagtagctccctactagtgtccttctcaggtcccatgaacttggggaagaatttggttttagtttgtaactttgggagagaaccaggctctcgaaatcctgggtattaatgaaaggcattccgccatttttattcaaacaccactactctttctctattttctgcaattgattaatcttgataggaaaatttctatcagttttctctgccaccaataattgggaagattccctttttctgttattatctttccgttatactttt

SEQ ID NO: 54234 - DNA, 722 bp, Cannabis sativa
tgttaatatatttataactagtacttattacttatattattatcttgttaatttctctagtaatgtttgcttcgtttaggttatcttggaattaatagctacgtatagtcctttcaaactttgggtatgtatgtgtagagtaaagctataatgtaaaatatttcttatataataatattgtgatcctttcagaaaaataaaataaagaaacaattgaatattattgtgatgaaaattttatgttgtcttgtaaattacatcttcaacttttaacaaccgaaagacatgggataatttaaagtatttacatacaggtggagtcagccacgatttggtatttggatattttttgcatcaataatctgataatgactggttattcaattctgaaaattaaaattattcatttgcaattttctttagagatattgtcttaattgaatttttttccaatgtattttaaatatttcatacagtaccaaataaattattggatattcttttaatgattttagtataggtgggattattaaaaaaaaataataaaaataggcattgatatatatgtatgtatacataaattttacagggacaaaaattaatatgttggataaaaataaaaaataaaaaaaatatatgaaaataaatataaaaatacgtgaagatagatatgaaaaatataaatttataagggaaaaactaaatatatatatatataaata

SEQ ID NO: 54235 - DNA, 956 bp, Cannabis sativa
ttagtccttgtaaaggttaataatcatatcactaaatatagtacaattttcacactttgctttctagagcgcgctacattaaggagtgtagtttaaaatgaaattaatcaccatttaatttaaataaatgttaagagttggattaaaatctgcttaattagtacaataatttataatacactatatataagagtaatttgcgacgtatatacttaagtttaattaactttctcagtttatagataaatagttaagttatatttctagaattttcgtagttatctgaccgttaagtgtcaagtctttatccatgtgtcattttttttattagtatatttaaattaaattttaaatataaaataaaatttaatgacctgaaccaattaaaaactgtcacgtatgagtcttaatgatcaggtacttaaagttattttaagagtaatttacgagataaatacttaagtttaactcctaactgtaaataattaaatatttaagtctaatttttggcagtaacgatatctaagttataattttagaatttttataagtgtttgactgttaagtgttaagttgctacgtggtaatctgtgattggtcctaattcaaatatactaataaaaaaataacacgtgaataatgatttgacattttaacggtcaggtttctatagagtcaataaatataacttatgtattataactgccaaaaatcaaacttaagtatttatttacaattgaaagttaaacttaagtatttatgccataaattactcaactttcaaaaatataagttaaatattattaccgtaaaatattaaatttaaatatttatttacaactaaaaattaaatttaaatatttatactataaattattttatatatatatataatagagctttgaaattagattttaaataataattgtccaaaattaagaatatgtttcatgtga

SEQ ID NO: 54236 - DNA, 1059 bp, Cannabis sativa
ctttattgatgttgaataaaatagatttcattgaaatggagttttatttagggcataaaacccaacagataactcatcaaattttactttgtttgtggatttggaggaattgattgtgcaacaatataatcaaccgccaaaaattgtcgatgtccctcaaagttccaagatggttccagatgttgatgatattagagacgatgaagttgaagaaattgtaaaagatgtggatgataaattgcttgttgatcgtcttgaagatgaaatggaagatgcgccccagacaaattctaatttggttagtgatgatgattatgattaatggtatttaatattgtttgtactgatgactagttttcgtaatgttattatgtttcgaggaatgactaattgtactattattgtttaatctaagttgattagttgttttgatttttttaaagtaagagctcatatgattttgttattccttttagcatgaaatgtcgacaggttatcatgtaagagatggtggtggggatgacccgttagatcctactagtgtacctactttgtgcgagacttttggtgaatcgagaaaggctatgggaggaatgttttggctaacttggaagatagaagaaaaaaagttgggacgtcgttgccattagcatttgacaacgtctccaacaaaattgtagggttggagagtaaagcctttcctcatttggtagggagagaaattacattacatgttcctagacattttcctagttggggaaatttcttggatcagttcgaacacctcattttaactaagcttcgggtaaatttttttgaaatttatatctaaattaacaaatgatattattagtatgctattacactatttttttttttgtcaaatgaattattattaccaaattgacagtgatccaaaatttgtagctattttgttagctaaaatggctgaaaaatataagacgagaaagaacattaaattcatacatttcaaattaaaattttacaaaaatctagaagattttgaaattgcagtcaagaaccccataatgaactcaa

SEQ ID NO: 54237 - DNA, 884 bp, Cannabis sativa
gtaaaacatattccaacacttataatcaacaacttcatcatttaactaaacagacattcactcaatacataatcacataattgcagtgcttcataaaacgcctttaccactcgctatccacgagctatgtatgtcactatcgttgcccaataaagtgaacgataagtaagaaacctatccgcgatttcaacgagtaattactcaaaacggtaatgatcgtatcttttactcgatcataatcgagtcacaattgataataatcgttcctcaatattaccttgatcgaaagcaagtcacaacaaacacatatgaggatctcgaccataatcgagactatcacaattatatttgttaaccataaacggtgcataacacttttcttacctcaaaccaatatcaagggtgcgggccgacctgggtggaaccatactcgatgatcctgggtcctatgtcacgataacaaaacttgataaacaacctatccaaactccgaaaacaaactataattctaaaaccgaacaaatcaatccccgactaattcgaaataactcaaacatcactaaaataccctaatctaagctctgaagaacaccccgctcaaaattggtttcgaagccaaaaactaggttttcccctactgacaaaccgattgattggtttcactatacctgtgaaacaggttaattaactggttttccttgctgcagaattgggaaactcgagtttttgcaccaaaacccaaccaaatctcctccaaacctacccaaacactccagaacagttcaataacataaaaacagtgtatataatcaatcaattctcaaaaattcaacacaacacccaatttaccatgtttgaaacaaaattaggttcttaaactcaat

SEQ ID NO: 54238 - DNA, 804 bp, Cannabis sativa
cttgtttttttcttttgtatttgtttgcttggtttcagagtacgtagtggtattgagtgatacgttttataggtcattatttgttttgttgaagcaatttgtaatctaaatctaaggtattattttatttttttttcttaattcgttagatgatgacagtgtcaattttattatcatgaaaattagaggacatgcgtggtagagtattataaacttcatatataaaaattagaaaatgaagaaggacaagtacatgttcttcattttgcaaggatgaaaatgattgctaatgtgtcacatatacaaccaattgagtatattatgctatgacaataataataagagattattaaaaaaaaaagagagactaataatagaaaaaaaaacagccattagttattcaaagtggaatgcgtgaaggattttaaatcacaccaaattatataatatatatataaatatatatatatatcgaaaaggcttctttgagtttgagtccgagtactctttgtgaatattggttataatacacctctgttcttagctcaataaagattctaaagctactggggttgttctagcagaagagtaggcaggtgatgtaatcttcatcatcttatttgaatcacgtttagtttttggtgttctgttttatatttatgcatatgtattaaattcagttcattattttcatgttagcattgcacttgttataatccacattgcattgtcttgtgtttcattatttttaatcaagtaataaatcacaataattgacatcagagctcaaacaagagcaatcaa

SEQ ID NO: 54239 - DNA, 1078 bp, Cannabis sativa
ctttgtgttgtgcttttgagataatttttgaggttaagttggtgctttaattcttttatacaactctgattttattgttgagcttgagcttgtgttttgcgtttaacgattcaaggtttgagcttgaatttgttgatattttactcaagtttagagtctatattgtataatttttaaatatgattttgttgcatgcgagctttgattttgacctttaaatgtgtgtattagctctctattatgttagttatattgtgtgggaaatgattttgagatatatgcatgtttggggtgagattggatgatttttggagctgctagaatggagtttctgggttttcaacccaggcgccgcggcctagcttttgggcaccgcggcccgctcgcgtggacagattgcatgttgaacttgttttgttcataacttttgactcgagactccgtttgggtcgttccttatattgttggaaagctcattccgagctttatatgtttatttatattttgaatgtcaattttatattatgtgaaagttgatatagggattaaccctatacctgtgaatcccaaaaattgtgactagggttaccgacactgggtcaggggcactgggggatttggaatctccgcgtttacgggacaattggtaagatagtatttaacacgtagagtatgcacggtggcgcttatattgaaaatgatatatgtgagtaattgggaaccgggactagggttatcaccctaacatgagcggtttattcgtctagggctattaccctagtgatgattaatgtgaatgtgttatgcatagttacatatgagtttatattgagatttaggattatgcgttcaaggaataatcgggttggactcggtgactagaaacgagatgaaccgttttaaggccttattgtatttagacgtgtaagtgtaacaagcaggtctatgccacatacacataaatcggcgtgcgggcgtaacacacgggtctgtgtcatacagacaaatgtgaaatggcattgatgtttatgtgatgtgataattatgattattgatattttatactgtcttgctaggc

SEQ ID NO: 54240 - DNA, 1274 bp, Cannabis sativa
gcaatcaattcctagctatgcaatgagtgttttcctattacctttggatacttacagggagttggagtgtctcctggctaagttctggtggcaaacagactctgttcgtagaacgggtgttagttggatgagttgggatcgattgagtcatcacaaacatgttcggggtttgggtttttgaagtctgtgggacatgaatatggccttgttggggaaacaatgctggaggttgttggttaatgatacgtccttggtgagtaaagtttttaaagctaaatactatgccaacggaactcttctttcaactgaattgaattggatgacaatccgagctagcttcatatggaggagtatttttgaagcaaaaggtttgatacaggctggggcaacccctacgataggtacgagtgaacatacttttaatttatgtgacccttggcttccacacaacatgaatgactatgttattttttcacatcctgcacttgttaatcagactgtaagcagcctttttcaaaatgaattcacgagagtgggatgaagagataattaaggatctctttgatgatagagatcaagagctgattttttctttacaattgagttctactgccatatccgactattggagttggaggttcgaacgaaaggggcattactcggttaagagtgcctaccagttcttacaagaagaaaaaggagcttggcctattactggagctactggcgtttggaaggagttatggagtttaaaagttcacctcaaagtcagcaacttcttatggagggcggcttcaggctcgttaccaacttgtgtccaattgaaaaaaagacatgttctagttaacccaacatgccccttgtgtctcactacagctgaaactattttttatgtgttagttgggcgtgttcatgctcgtgcctgctggaacaggacaattttggatgtcggcggtaatatggatgatgatttcatcaatttgctatttgagctacaatgccgaggaagagaagtcgagtaggaggaggcggctatggttatctgggccatttggcatgcttgaaaagactttgtttggcagtaaaaaagttggactgctgcaaatgtggttacatcagcaagaatgctacttgatcagctcaaagacgctcaaaaaagaaagggcatttctttgccttcattgttcaacaaaggcggtttggttgagcattggagtgcaccttctttaggaaagatcaaggttaatgttgatggcgccttatttgagcatgaa

SEQ ID NO: 54241 - DNA, 1026 bp, Cannabis sativa
agagagagagagagagaggagaaggaaggggctggggaaaaagtaataacacaaacaacaaagaacttacagagaaaagtactgatccaacaatggtagcaagagcaacgacatattctggaaaggttgtacgcatggtccatgtcttctctgatgcagcattagcagaataggcagaacactgtacaatggaggcaaacagttggtaagatgataactaagaaaaaaaaatgttatatgatagtgtatagcatcacaaaaaatatatatgtattaacagaagaacaaataaaaaaaattgtcccaattctagctcaaaatcaaacctggcgtgtggaacctatacatggttgagcactactgaattgccaactattaggaaagccagtcgtggtggaagaaaggtgcctaacagtaaagtccacctctccaataagccctaatcaacagacaataacaaaaaaatagcaagaaattaatagagcatcgaacaagtcagaaaagagaacctttattcaaaaaataagacaaacaaaaatatacgttaatcctacttttaacaaaaggacttgcgaataatcaaaataaaatgcatagttatagcaaaaatctggaccattttgctaaggcacaaatattgaagattgacaaggtagagtaaaaatctgggtggaggaatcagaattcaaaaattgcagatgaatcaatttacgaggaatgcttctgaaaagaattctgaagccaggaaagatctcaacataacctaatatccacaacatactctctcaaaaacattaacctatagcaaagtatattcataaaagctggaaacaattcttttttaaaaaaaaatatatcattccacaaatatggaggttaatatttcgcaaatgacaggaaaataagagaaataacacaactgcacacacaagccactctctgagcaccatgaaatcataacaacttctttacaagtgcaccaaaatatcagccaccatgagtgtccatgatgaataacaacaaaat

SEQ ID NO: 54242 - DNA, 1215 bp, Cannabis sativa
gccgatagaatcacattttcttttgagttagtattttaataatagtggggcaacttagatagatattaagaatgtcaggagtatttgaagtttcagtttgaccaaagtacccctaggtggtaaggatgccttttggcttaggcaaggacaaaatggtctttttaccatttaattcttttgtcctttagtggtattatattatattttataatctaaattaagttatgaatattagataaacactaagttttatccttataatcaaaaattagaaaaaaaataaagaaaccactttctctctcttcaacccctaagctcatctcttttttatttcttcactttcaagttaggtttcatgcatgaatttagagttagtgttgttatagattatgtttgggattgtttgggtattctgaagttaaattgtaagttattgagctgattcaagatggaactgatgcttagtgctgtgtttgagcaaggtttgagttttagagctcaaactttgctcttcaatgattatttgtgtttctatggtggtttcttagttttattgcttggattaggtttattatgagttgtttaggtactctggaagttttgtacagtttggggtcattttgtggtgttggtgttgtttttggggattcctgtactaaactggtcaaccggttcagtatgacttgtaggaaccaaaattccgattgatccccaggcaaaccccctcagaactggtctaccagttggggcattttagggcaccttagtttttcccgtttttacaatgtttagggcatcgatagggaaatttttagtttcgattttaagtccccgaaagtgatttagcgcgccactcatcagttttacgaatattgtgatttaggggcctgtaaattgccaagcagctgttccacttagattgatcgacacacctgaattcaaaaatgaggtaagattaatataatgatatgcatgtgtttacttgtttagtgtacatgtttattaagcctgctggattacatcaatagcggtatcaatatacgtagagttgtattggataccaatagatgtatgtttggctcaaatactaatcgacactatcacctcagtacgactagagtaccaagtataggctaatattatggtcaatagtattgtcgtacaaatgttgtagactcagtaccgcctacagtgcggggatttgattacagttga

SEQ ID NO: 54243 - DNA, 942 bp, Cannabis sativa
tctaaacttttttttttttttttatcttttttgaggatttatgaaatcccaaatttttaaagctaaatgtcggattactaatttatattatgggcaaaacaaaaaattataccaccacttgctattttggcatctctaacagagtgcctaattttttgctaaatttaacccgcaataaatctatttgtttttaattatatatttatcattgatcatgataggctttaatttatacttttaattacaatattagtattaattatttcttaaaatatttaatttattaataaacattaatgatattttaattttttgtcataatttgcatcttaaaatactagagtattgctactagggatatgacatcggagatggtgctaagtactactggtgtcttttaacatttctagatgctaaaagtgatattccccaaggtaataacttttatggaatatcactaatcaatcgtagagcgccacttctagatagtgttaggaactattggagcccaatagcaatactcttagaactattgtgcactaaaacacaataataaatattgtaataaatattttggtaattgaataaatattatgtgtgtgattgaaatatattaaaaaaaattatgtatatgtttgtcctacattgtttacgtgtgaataatttgtaaaatttatattacactcgtacattttttggtaaataaattaagtgtatgattgaaatatatatatgacatttgtttatttatttatttttttgtgcaaaatttagtaaaatatttaaaccttacattgttctttctccaataatactaaggcaaactccaacaagcctctaaaaagtaaaaaatactgtggcttggcagtaaatttgttccaaccacatgactaaagtcacctcgcatataggtttgtataaaatatcccattaatagtagtg

SEQ ID NO: 54244 - DNA, 943 bp, Cannabis sativa
tttacacataaaaaaggaaaaccttaataggaaaaagttaaaccaagcaagaattctattctgttatatacaatagatagatatattatagatatttccaccgaataatcctaatcctattgagaaaactattttaaatttaaattattaattaatcatttttccttttatataacttttatatgtatataaatacgtatccctactcagacttcataaatacatttccatacaatacttcatcaatttctttttacgagctagcttaaaccattttccatatttctcaagaacacacttcaaatatacatatataaatatatatattatatataacatcctctttcttaattaaacttagtgaatacattttcggctacgtaggctgataattagtcgatcaaaggaatattgaaggtagtttatttcttttaatcaaagttaacattattctaaaaataataattttgacatcagtccaatttcttgttcaataaaataaaaatataatttatgttcttattattgttatatacagatcaatatagcaatggagttttttccaggttttcgatttcaaccaactgatgaagtattaatcaattattatttaaagccgacgatattaaatcaacaaattccttataataaaatgatacatcatgctaacatctatgcttcccaaccatcatcattggcaggtatatatttatgtatatttatagttagaaattaatttatttaataattaatcatcactaatcaataaataattaattgtttgttttggtttatagattcgtacgaaggttttgaaagagaaaaggtgaaagaatggtatttttttagcccaagagtgtgcaaaaatggaattcgtgcaactcgaaaagcacacttgggttattggagaatgtcacagtcagcaaagccaatccaacataac

SEQ ID NO: 54245 - DNA, 750 bp, Cannabis sativa
atgtcgcgtgctgaaatgaccctgcatagagaacatggttcagtggagcattcctaccaatggacaaaccagtagggagagtttgaacttctctttcagattcagtcaaggttaatgtatgattcatatcattcaaaagattatccatagaaggaactacaatcgggcatggatacagagagattagtgcaaaaaattcaaaaaagggagggaacagttaattttcgaaaagaagaggttataaggataatgaatatgaataacaggttgttacaacagttaaaaagaaaaagaaggactaactgccacagagctttttaagggcatacatgctcaacatacaagaattccaccactgaacaatctatgttttgtttcttcatgtatgtaattaaataaattatgtttctcgtgacttgtaaaatatacagtttacttttgcagaataattctctacgtgactctaaattggaacatctttatatatttctactaggaaaaacaatcccacttcattaattttgtaataattagaaagtatgtttagcattgttttttatttttttgaattaaaaataaaaacaaaaaataattttaaaagtttttaaattagaaatcgtgtttggctaatatttttcaaacaataatttttatttttattttttttgaaaaacactttaatactttgagaccctgatatgaacaagacttgacaccggctcagacccagactcggaccccagccccggc

SEQ ID NO: 54246 - DNA, 869 bp, Cannabis sativa
ttgttttctaaacaaatataagataccaagtgagcatattccttgtactaacacaatataataataataataataataatagatttgtgtctatgtattttcatcaaaatttatatatttttttgttgaataattttattattaatcatttaaatcttataataaaagttctattaatggagatcacttgaaaagaagaaaaaacacaactagtctactaggaattagttactctcttatcactacaaaaataaatatgattaataaataattataataatttttataagaatggtggattcaattgcaaggaaattaaatagatttggtcattacaaaaaaacttgagaaggaataatattttttgatataacatagtattatacatactaactttttttgttaatacgttacttagttttatagggaaacttaatttatttgtttgctttttgttacttaattatataaatttttgatatattatgatcataaatcaaatttgattattataaaacaagagtttgatcactagctaacaattttcactatccatgtgggatcacttgaagaaaaaaaaaagtgatcagtgggaaagaaattaatataaatatatgagttttttcgaaaaaattctttcaattatcatcactccacttacacttaatcttctaagattaaattttgacggtaaagctcttcaaactattgagctacttgcaaatttaaggtgtcatccattttttacaattcattaccaatatagtctgcttatgtgtacacttttgtacatgtatcaaatttatattggtacacataatattataattttaaaatataaaaactatttcaaaatttataatattttt

SEQ ID NO: 54247 - DNA, 902 bp, Cannabis sativa
gccagcatctttaatttgggcaagggtaaggcattgatgcatgccgagaatggtgttcccatcgcactgtctagctcaagttctgagggctttggaccagctaggcccttgagcatgtcttgtatttgatccaattgtccttgcacaaaaggatctgttgctgcagggggctggttgattggccttcttttattgagttgcagccttaaattggatagaatcttgccggccataccttgggagagggtatacccaaggccagcccgccctgagtctaattctcgtacatggtccgcaagccctaagccgagcagagcctgaccgcccatacttctctgcctggctagtggagtttgtgcgtcaacatggagtagatcacaccaattgttggactttggtggaagtgattaacttcacttctcaaattgttgttttgggtgtttccacccgctctcggtcctcatcaattgaaaattgatcttcgcgtgactcgctccccttagggcggagttctcttctctggccagtcatgggtactactggaggagtttgcccagccatggatactactggtggagtctggtcggccataggtactgctggaggagtctagccagccatggggactcctactagtggttggtcggccataggatggacaaagggggttgttgttgagcttaagatccctggatggccccccatgttgctggttgctgggatcttgcagtttttcgccatttcacctttgaggaaaggtctatcctccttttagcaagggaagatctaccctagttcctcaagaacttgttgatctgcatatcgatagatcctccctaatctatcaacaattctccctcgaagtggatctctgattcaatcctagcctcttctactggttc

SEQ ID NO: 54248 - DNA, 1658 bp, Cannabis sativa
acatatatatttattagcgtttgtatgtactatctaaataaaatttaagaaaaatatattatatattaggtgtgtttgaaaagaaaaataccacaacaggtgttatgttgaacgctattggtgtaatttaatataaagtcccatatattttgatttaataattaatataaaaaactgctaactactactaaatcggtgtgaaaagcctcatttttcttctacttcttccttatcctttgagaagtcagagggtgcttcttcttcttttcttcttttctctctcaatgtttgattaatttactttttttattattcatatgtctaaatgttttgtctctttttattttattgggtatgtgtgctatattgatattcatatactataacttgtgtttttaattattattatttataacaccctaaaatgagagcatgtattaaaataatgttagaattattttatttttagtagttgaaaaaattacaactcaggcattttcttatataacaatatatgttataggtaagtattaaagtaatgaattgcacctttgcttaatccaccatgatgaaaagggtcaagaaagtgaccattattaattaggacttatacatacatttgagtatgataataacagaacaatagaacaaatgttatgtttctcagagattataattcatcagaacatccgacttataatgacagaacaactttattggcatccaaagaaggaaggtttcaactgggattctttactgcatcatcaagcaatcgttatctgggaatttggtataacgaaactggagattattcaatggtagtttgtgttgaacaaaagatttgaggaatgaattatattctcattactcttctgaattgaatatgtacaagtatttatagacttagctagttacaaacgaaaggataagttagttacaatcaagatctgtacaaataacaaactaacagaaaatgaaactaaactataacctaactaagtattatcactaacaactcccctcaaacttagtgttgtagaatcaagaacactaagtttggtcctgagaagagtaaaacgagaacaccccaaagctttagtaaatatgtcagcaacttgatcacagccaggtaagtgacacactgaaagttgcttgctgagaactttttctctgacaaaaaagagatcaagctcaatgtgtttagtccgggcatgaagaaccggatttgctgacatgagaacagtactccaattatcacaccaggctatgggagctcttgttgcagggactttgatttcagacagcaaagattggatccaggttatttcagctgtcaagtgagccaagctttgatactctgcctcagtactactgcgagaaacagtaggttgcttcttagaggaccatgtgatcagattgggaccaagaaatacacaatatccagatgtgcttcttcgatcatcagggtcattggcccaatctgcatcacagtaaccagttatatcaagattggaaggtttctgcaagtaaagaccataatccaaagtccctttaagatattgcaacagccttttaacagttttccagtgagattgtaaggggttttgcatgaattgggaaactctgttgacagaaaaggcaatttcaggtcttgtaat

SEQ ID NO: 54249 - DNA, 1601 bp, Cannabis sativa
acttttagaggcgacaatgtcgcccctaatacccaaaatgtcgtccctaaaaggtgttgttaaaattgttatatttaacttttaggggcgacaatgatttttaaattaaaaaaaaatatattatttgaaatattaatttttaatttataataaaataattataataacaaataaaataaaaattaataattaatatcaaatataaattttttcatttacatagtagcacaataacatgataaaattaaatagttcttacaaatataatattattaactaacacaacttaaaaaacaaaaaaaaaaaatattataatagtaattcttacaaaaaaaaatataattgtaatcttttagttctataactgatcatttcatctctcattctcatcgaactctagagggtttggtggctgacgcttgatgtggttgtagcggttataatgtatgtagtggctgtagctatgatatatgtggtggttgtaacagatgattcgatggggtaaaacaagaacttatttcaaaaaaaaaaaaaaaaataacatgaatttatatacacaaatgtatagacatacttatattatttaaatatatatatacacacacaaatttatattcatatataaaaatatatattacgtatacacaaatataaatatatatactcacacactatatacatattcatatatttatatctttatatatatactcaaacacacaatatacacatatccatatatataaatagacaaatatatatatatagatatgtaaatatatatatacgcacaaatatatattcatatgaataaacataaatatatactaatacatataatctatacatatatatatatatatacagtgaaagtgtaaaacaaatagttcaaaaaaaattgattttagcttgtataattttttaactctatcttcttttctatttttgcccacaatcttaatttgtacatatctataggatatagtatcacaaaaaaaataataaaataaaataaaatccaagaaataaaaagaaaagaaaagtatcaaaatcagagagagaccatccttattatcatcaatcaatctataatttcttctctataacccaaaatttcaaatataaaaaacatgtttaacaaaatatcataagaaataaattaaatgaaaaatttctaatgtatatatacaccagatatgtagtgagaatatataagaaattttttattatatatagttataaacttaccaaaatttactatggaaatgccggctgggaggagcggcggttgcgggtgtgtcgtgcgggggtggttggggatcggaggtcggcaattgatgatgttttgaggtcggattaggaatgagattggtgatattttgaaatgggttagggtttttttttagagataatgaaaaaaaatggggaaagaagaagagtaaatgactcgagaatgggaggtgtgacttttaatgtgcacactgttagagctaggcgacaattggggcgacattgtcgccccttataatgccttgattgtgtcaagtggcggcgacaattggggcgacattgtcacccctaatagtgtgagcgggaaaatt

SEQ ID NO: 54250 - DNA, 1364 bp, Cannabis sativa
gggttgttagacttagttatgttagttaagttcaattattctgttagttaagattttgttactctatcaacagagtttgttatattcagtcgagcctatatatatgtgctcttattcatttgtacaattcaaccaaatatacaataaaagagtactttttcttttctctgttttctctaataatagaagcaatcagtgttgctataatgcaacttgttatacttgatcaatatctacaaacttgttgttgaagctgttaaatcttcatcattatcatcattaacatcatctggttctctgtagattctgaagaggagtaagcatttgtgaccatagatagcatacttctaacttctgagttaccattaagcaacgagtagtcttggcgttttgatatgtctagtgctgtttctccctttaaattcttggtatttgcatcaatgccacatttaatcagcgcttccacaatctaatagttaagtagaattgttcccaccacaacataagtgattaattgttataattaaacaaattaacaacctagtttatcaatctttctactcattttcactgcacacaatacacaaaaatttaacaatagtgttttgcaaaaacaatatgattaaatttggcgacctttttaggtatagcatcacttatatatatgagggcattttttattttcggtaaattattcaaaatttctaaacaaacagacacataactaataataataataataattgtaatttctctataattatatgtatgagccctttatgataaatcaacaaagataactaagagtatgtttgacactgcttttgttttttgtttctaataaagtattttaaaaaatgagaacaaaaactattttttaaaatttttcaaacacaagttgtgtttggttaatgtttcctaaaaataattttaatttttattttattttttgaaaaacactttaatactttaagatttcgatatgaacaagacctaattaggaccctggactcggacttcggccccgaccttgactagacctaaacccgtacctgtacccggaccctagacccaaaccccgagtgcgtgaattgttttctaaaatagaaaaaaaaaaacattttgttcttaaaattcttatttttttgtaactttattttctgaaaattacgttaaaaaaaaaaattcaaatacgcctaaataaaaacaaaacgattttcagttagaataacaaacatgcactaatataatatatggcataatatttgtaaactttggtataaattaagctcgagtagctagtttgggtaagagtgaacgatcttatcaatacaagcagtaagaactcaagcttgcaaaagatg

SEQ ID NO: 54251 - DNA, 1388 bp, Cannabis sativa
  modified_base (1215)..(1216): a, c, t, g, unknown or other
aaaaacaaggaaataggtcctttatagaggaaaaattataatttatgggcacaaataacagggcctagtgcccaagttgacacttggggctggccctgcgcccaggttgacattttatcaattttggccatttaaaatggagtctttttggaattatttaaagcaccttctccccttttagaaaatattgagattcaactaatttcaaggaccaaacaaaatttccaaagggctagaagggggacccagtgtctaagttgatattttctcaacctgagctgttttttatcaagttcggcaaattgttttgggaattttttcgtcattagaaataactaagattcaagtaaactcggggagagaactacaaatttgagtccctagaaatagggccagcgcctaggttgacctagggctgggcgagcgcccaagttaacaattaacctagaacgctgcctttagttgcttaaatatcaaatttgatgcaactattgaatctagaatggtaagaaatgggggaggagatcccgtcctcatgtttagaagccttgaaagtatcaaaaacaaaatctcgggagctctttgggttctgcttatccgaatctgatactgttttgactgtatgtctagtttttcacaaatacaatgatctatgaagtcagagaaatcaaattcacaactttgtatttctcatttttagcactcccaaaaataaagagtttcgagtctcccacttttgcaaaacaacaacatctccgagaatcggtgaacaactttgccagaacatataaatggactaagtggtgtcaaaatatcacttaggcatcttaatggacttcccttggacgtttttacacttacccagcatccaggttaacgtcagatgtcaacctagtggctgggacctgaactggttttagtaaaatggccataaatcactcaatctttatctgaatgacgcgattcaacttgaattttgaagctatttaaatgatctatcaagtcatgtatcgcaccccaggcgtaattgtaaagctatcattgtcaaaatttacccctaagagagttacaaaaataagctctaggtaacctgtagagggacttgtcgagcaccgaaaatcggccatcacaaccagaagctaatttttatcgttagatcataatgaacagtggaaaacaacgcatttgtaattttctcctatttttgtgggcctnnttcacctataaaaggagagctctcttagctcatttttcacattcagaaaactacccacaaggttagagcttctctctatagagtttgaagttttctaataattggtctattattgtaattactatctcgtgagaaataaaaactcgaagtggatgtatccccattactatca

SEQ ID NO: 54252 - DNA, 1331 bp, Cannabis sativa
  modified_base (321)..(326): a, c, t, g, unknown or other
atgagtacgaatgttccacactagggtatagccactataccacatacactacgtacctcaatgtacgagtgttggtagggtttgtttcataccctgagtaccactcagtgatatacaacgcactcccagtacttctccgtacttatgctggtattatggtactctcagaaaacactcattataccaatgcactcaataccataactgtataagtgttggtagtgcaattaacattttaagcatgcatatacacataacatatatatgcactcagatacccatatcatacattatatacagttcttaccttctttccgaatnnnnnngtgctggccgacctgaacgaaaagtctcgtgctagatggatgcccaaatcacattaatcacaacataggtgagtgacacgctaaaccactttcctgggacttaaactttgaaactaaaagtttccctatcaataaataacatggaaataccctaaatatttcaaaaatgggaaaaactagggttccaaaaactgccccaattggcagaccagtacccaactggaagtccggtttctgggaccaacctgtcgaccggttgctacaggtcccccagaatcagaatttcagttttgtgctgggaacccgaaaaatgcccccatgacctcaaaatcaacacaaactttgccaaactttcctgtatacatgtacaatgcatatacaatataatccaaccaaaaattcttagaaaaagtcactaaatcaacttatgcaattaaagacctaaactggagtttcaaaactcaagcttgctcaattcccacaccatagctcaaaactaatatctagggcttaaaatcaattcaaaataaacttagaaattagactacacaatcttttaaccctaacagccaccaacgtcaaaaatcacatactaaccaaactttaaagcttcaaaaagaaataaccaagattctaaaattaccttagcttaattcctcttaaactccttgctgaaacaccaaagattagcagcaaaacccccttggtttctggtttggctgaacaaagagagggagagaagatgacttgtctaatttttggcctttttcagttattttcctattaatccctcaaatgaaataaagatttaatatattaaccttggctgaaacttaatttttctaggtgtcactctagtaggtagccacccaaaacatcatttaatcaaatgaccaaattgccctttaacccaaaactagggtatttcaaaagctaggggtaaaatgttcaaattccataaccccgcttaatcctggtatgtttttttctctaaaatatttccca

SEQ ID NO: 54253 - DNA, 1059 bp, Cannabis sativa
agctttgcccgaatctccagcaatatgtgggcccccaatgataacttgtaaatgttcgtccactggtggaggcagtaataggtcttgggctgtccgttgattctggtcagccttaacatacttttgcacgtgcgggttatttttccttatcaacaattcaatttctcgcttcatgttgttacactcattagtgtcatggccatagtctccatgaaaatggcaaaatttggacatgtcctgcttttctttgtcctttttcatgggagtacgttttttgtacgggactacagactcagtcaccatgtagatcgtctccaggttgtcagtctagacagagaaagtagtgaacttagaaggattttctctaggggtctatttggttttgcctgcgaactttcccttttcctattgccttgtctgccgttgttattagatcttttgccgcccgaatttaaactactagggtactgggggttttgagaagacgcccctaccgagggaacctgtggttggcccggtctaagctcgacatccgccagttgaatggcctctttaagtttgatgaaatcgcttgctcgatcaagaaaattcaccatagagtctacagggacacttctcttgatatctttccatagttctctgagcacttcgatgccccccagtattatggccagcctcccctcttcagttaatcgtgcaactttcatagcctctgtcatgaatctgcttatgtaggctcggagaggctctcttgatctttgcttcacttcgaccaggtcttctaaatgcaatgggagttggcgagaagaagagaattgtgcatgaaacactgaggagaaggctttccaggagttgaaccttcctggtggtaactggaaataccactgttgtgcggcttttgaaagtgtggcagggaatactctacaccgcacatctcctcgaccccttgcaaatccatttgcatttcaaaaatacttgaggtgtgataagggatcttctttccctgtgtacatcttccaggtcggcattttgaacttgaggggtagctccaggacattg

SEQ ID NO: 54254 - DNA, 1463 bp, Cannabis sativa
  modified_base (417)..(424): a, c, t, g, unknown or other
  modified_base (1345)..(1360): a, c, t, g, unknown or other
gaatagatggaaaaccaataacaagatcttttctaactaattttgagatagaatccatactagcatgtcctaatcttctatgtcataaccaagattaggacataattgactaatactaacggttaaacatttatttttactataaaatgaatcaacatcaataacatacacattatccttcctttctccacgcaaaataacttcattggtagaagcactttcaatggagcattttgaggattcaaagataacacaaaaacctttatcacataattgactaataataagtaatttatgttttaaattatcaacaagaagcacattttttatgcatagagagtatacgttaccaacatcaccaatgcccaagattttcccttttgaattgtctctaaaagtgacaaagccactttcctnnnnnnnnaagcttgaaaatctcgatggatcatcgatcatatgctttgaacatccaatatccaagaaccataagcttcagctctttcttgttgattcctacaaaaacaagttcatttgttggcttttggtacccacataactttgggtccttttttgttgttctagaaccctttggtacccatttagtcttgcctagatatatatgcatatttcttcacatgaaaataggaaatagtatggccatcttggttgcaatatgtgtatgtaaagtgaggtacactagatgatttcacaaaaaagtttcttaagaacttttgttttctactaggatcataagcaatgccactttatgaaaaaccacatgattggcttcctagcatgagatcatgaccttctttacctatagtgaaagtatatatgttattctttaggcttttcacataggcatttaaatcaacaatttctttcttatatgaagcacatgtagcacattgagacttacctaaaagttcctttcatttattttcaaaatctcaatttcttttaaaagcatgttggtcttctctctaagagttttatttttaacatgcgatttaccaaaatcatcaaatagttccttaaatgaattagacaactaatcatatgacatatctaagttatcatcatcattttcactatcacaatcattttggctagaaatacttaccccatcatcgagtgccagcatgtacatgtttgctccttcattctttacttcatcttcagagtcctcttcatcactattgggccattctgccaacactgcccttcctttgtatttttccttcttcctcattagacaatcaattttcatgtgtctgggcttcttgcattcaaagcaaattggtagatcaactttgctccttctttcttttgactcactccctcnnnnnnnnnnnnnnnnaaagttctttttgaatttcatgaactttttgtatttcttagagaagagtgccaagtcctccatgtcactacataagctttcctcatcttcttcactaatggca

SEQ ID NO: 54255 - DNA, 700 bp, Cannabis sativa
atatattccaagccctcctttgtcacaccaacaacaacaacaagtgccgcaaaccaatgataatgcatatagtagtgtaagtcaaattgatcaatcagtagaagaatgggaaaacgagatgggcattactctagatgatgatacactaactgaacaagactatgcacctattattagtcttcctccaccacaacaacaacacccacagatttatcaataaaatgtttgtagggaagactgaggatgggtcattattatttattgttttataaacaaattaatacaatattgtaattttctttaattaagacaaagtaaataaaattcatagattattattacaaatacagaagaatgcttattttatgtgcatgcagaagctactaaaataacttaattgtaagagtagttttcatcaaatcaaaattggagagtaaagataggtgttttgaaagaatatgtaaagattttggagacaaaagctgaagaagcaaagctcttagcctaatgcatctatgttacaacattagtaattgaataattagaagaatacaattaaaccaatacataactattctctcaacctggaaagtggaaactagaaagaataatacagccactgactcatcaacctctccgaattcgcgcgtctcgagccagttcgcctttgtgaccgttggattggattagattagattat

SEQ ID NO: 54256 - DNA, 1317 bp, Cannabis sativa
tgcccagaaaactgaaatcaatctaaagattggctaccatgcttgatagatagaccacctagcaattctattcaccctatttttagtgtcaaccttggcctcctcaagctttctatcagcctcaacctggatagccttgttagcatccttaagctcttttattttcttctagtcagccctttgttgcttctcatcttcctccttaacctgagggagctcagattctgaatcattccacttcttgtccatgacatcatgatgctttccggtcagacaaagttctgtctcgagcatctccactcgttgaagccccctatgttgagcatcaaaggacaaaagagatgcctgcgaggaaggaaaccagaaagtataaaaataatgggagtgtaagaaaacaggacaaaaaaaaggactaacctactgcttgagattataactcctctgtagaaggctttcaaaagttcctttatttagtaattcccaatcactagactcgaaggtttgatagcgccgccaactattggtagcatgtagcgagcagagttgcgagccttctgtgccagcttcaatggacaaggggcaggagggctcgaggaagacaatctctaggcgagaaccagagaatttcacctggtgtacaaacccaaggggttgttcactagcgctcgccacagtaggtgcagccttttttggagacctttcaggctcgatggtgagttggtttgcagttgtttttattcttttgggttctttggtagaaaccgaggcttcatttgcctgtgctagacgtttttttagatcttttgttacaagattggggctgagcatgtcttccaaattgagatccatatctgcgaggcaaaagaaatacatcaaacacttactcaaaaatagataatagaaaaatggggaataaacttccacttaaaggaagttaccataattatcagaagatgaagaggaagaactatagtaattactaaactccctagaccctgtgatcatgtttatatcataagggtttattggagataaatcccaacttgaatttggattacttgacctatccaagttggtaccatacttctcggcaatcccgtaatatgaactagtgcaactaagctggacatggaatcgagggtactaactatcaaacctgtgggttatgcgatctatgcagaagttatcccatgtataaaaattatattggctatccctaaaggttactagcgatgtacctcaggatgattcttcttcagcttcctgaggggttactttcttaagatagtggatgcgagcaatgtaatcctggctttc

SEQ ID NO: 54257 - DNA, 1171 bp, Cannabis sativa
aaaaaaaaaaacttaatataataattcattattttcagtttttattttttaatcattactgtaaaaaatgtaaaacatatttaattttatttatttatcaattactatccaccgagtcactcattttatgataaaattaaataaaatatgatgaaatgactacattgccataaaaattatattttaaggagtattatttacaagttatatattctaagcggtacaagttggtagtgtaaaaaatttaagggacaaaaatactaattattttttaaaaaagatataaaattctagcatcatatttttaataatttaaagagaatgtataattctagcaccatattttttttaagaatcaattgtatatctgttatttaattaatatcattttaaatcttaaaagagtttatgcaaggttaaatttaaacttatatatttttactatctattttatataaagtgtgcttatataactgaatttttcgtttatgagaaattcatgggtgattttttatttatatataataaaataataaatattattttatatataataaaataataaaataaaaataaaacaaatcccattagaaattgtatatataatttacagcaatatagattcaattgtattttatataattgggatctagagtttcgtttattgagtattatttctatatggtatactgtttagaaattagtttgtataatgtcgttttcttctgaaggtgcagtggaagtgggattagcacagcttttctatatggtatactgtttagaaattggtttgtactcgtcttgtagagaacccgtcgagtcgggaggtccgcgttgaccgacccgaaatcgataatcgggtcgggccagcgttgttgttgtgagagagggaaagtgttgaagaataaagtggcgatggcgacgccaatgaggaggaaaatgagttgttgttgttgctacggtgaataagctctgaattcatttttattaattgtttggtcttttctagtttttgggaattgatcaaaaaaaattctggggaaaattggaaatggtgaggatttaattttgtatgattgattgagttaatagaatgaaatagtagagagagagagagagattgagtgttgtgttgtgcgtagaaattagaaaagtgaggagtttgatgcat

SEQ ID NO: 54258 - DNA, 890 bp, Cannabis sativa
cagtctacattcatccactaaatgtaactctctcccattttgtcaagcatgtcaatatggcaaattacatagtatgcatttcagtagttccattccaaaaactacagcctgttttcaacttgtgcataccgatgtatggggaccatctttttacagttcaatggaaggatttcgatattatgttagctttattgatgacttttccaaatttacttggatttatccaatgagaaataaatttgaagtgccactgatttttagacaatttaagtcttatgttgagttgcaatttaccacacacatccaagctatacagtctgattggggtggtgaatacaggcctttgcaatctatacttgcgcccttgggcatcacattcagacacccgtgtcctcatacgcaccagcagcagggacgggctgaaaggaaacatcgacatgttgtcgatatgggcctttcctacttggctcaagctcaaatgcccttaacacattggtgggatgctttcactacagctgcttacacaataaatagactccctactccggttttacaatttcaaaatccatttgaggggttgtttaaacagaaacccgactatgcctttctcaaaacctttggatgctcttgttaccctttacttcggccataccagcaacacaaacttgcttttcgcactgctcattgcttatttcttggttatagtctaagccacaaaggatacaagtgtatgcatccctcgggcagagtctatatagctagaacggtcaagtttgatgaacaaaccttcccttataataccctctttcccaaaccaactgctgctccactaataccatcagcaaatcagtctcatgccttccatgtacctataccaccagcccctgtac

SEQ ID NO: 54259 - DNA, 1490 bp, Cannabis sativa
gttagttgtccctgcatctctctactcctacaatttctatataaagtcagtcttttgagaggtttggtagtgtaattctctcaaaaaatgtatagttgattgaattggattagattggatcaattacattttgagtctaaaccaagtatggaatcttggtaattcggagcatgggatcagagttgagaataagtttaattttttcctaattaattacttaatggttgatatcttctgccaaatcgtgtttgtcacctttaatttaactctaatgcagagaggtcttttaggaaagcagtaaagaggtagcttccacaacacaaaacaagcaatgctcgtgtcagtttttccttgttactttgatgttttctttatcattatgtcctttgctagtgtctatcaagtatgtaaccacgattttgctcggccataactgagtgtcatgaataaacttaggagaaagtcatgcctgttatgacacagatgcttggtgagcggtcacaccaagaattatgtaacaatctataatgtaaaattagtagtctactcgtttaattagcttagaggtgatcagttttacatacttcttgtctataataaatattaaatttgtgaatttatacatattattgtcaattacaaaagcccacctaacttaatatattctctgttcacacaatcacacacatatatagggaaatttgaaattgcatgcttacaataccctaaaaaatttttcctaaatccatagtcattaaaattggtcataattgaccaccattactaatttcccacaaataccgctcaaaggctcaaaagttctctctctccctctcgctaaacgacagtacacccacatcccaccaccaccggcttcacctccgacgaccacccaccaccaccgatagcaccgcacgaccacgcacgaccaccaccagcaccgttatcggaccccacagtcgcgaatatgtccaaggttagtttttcctcacttttatctatttatttaatttatgtatgatttaggctaaattgtaagagattattgataggtttgtttagatttgagttaaacctctgtgatttgtgagttttgcttagattttagggtggatcggtcggatttggattttttcagatctaaggttgaagacatcgggccaatattggcccgataccgtccgatgggttacaaacgacagggcccgatgggtccgatatgttacaaaaggctagggcccgatgggtccgatgctccacccgatatatggatccgatagtgtcgggtatgtgggtccgatgggatttgtgggggtcctatggggcccgattgcaggcccgatggtccccctttttagttttgtttcaattttttttttataatatgggtttggttcgattatgggtctgatgggcccgattacaggcccgagggtcccccttagtttgtattttcatttcaatttttttataatgtccgattatgggtc

SEQ ID NO: 54260 - DNA, 1052 bp, Cannabis sativa
  modified_base (883)..(884): a, c, t, g, unknown or other
agagagagagagagagaggtaataggtgtgtctgggtcatagggtacttcaagggtgtgcaaagtctgggcattccgtcatggaatttttctgggcagcggatggttggaggcgacttgatatgggcgtatggagtgtttgttcacaaatgagatgtgtatttttttctttatctcatgtctgatgatgaatttaaatttgtgactttttcatttatgtgggtattaaatttgaaaatataaaaaagggtattattaatttttagggattaagtattttgtatgttggagtatttattcttgatgactgtaagattttcactaaaagatttttttaggtttattttgatcccaaatataaattgtataactgatttgagctcttacatatacacatatattttgaatttgtccgaagcaatttgtatttaacttgagatccaacaatgttccgtttaggtgaaagtcaaagttattcttattttataaacatcttcattgtttcatattgtaaacacttagtctaagttttcatctttggatgtacaactagatgtcgcatttacaaatatttatctgtcgaaatccaacactattctattgtttaacggatgacattcatttgagatttgttctattaaaaataacaaattaagttagacaaacaatgaaaactcaaaatttttactacgaaattaataaccaaaaataacataggttcaatataaattcatacacacttcataaattattatacgtttaacacgtaataaagatatgtaaaaatacaaaataaacatatcttaaataattctaaggtttctatttccaacaaattgatacaatatctcgtttagacgagtcaaagatatcattcattgaanngagtagtcagctcatctaaaatagctaccattctaacaaccttttattcaatcaagataagaattcggtgttgtctcgtttatgcgagagtcaatgccattttatcttatgagcttccactattatttcatactttgtaagccctgctcttaacaatcactattgggg

SEQ ID NO: 54261 - DNA, 1043 bp, Cannabis sativa
gtgtagtatgtagtattctctctgtaatagaatctgataggttgtaatcaatacaaattttctccaccattatgtatccttaatcacaaaattcttgatattataaaatttctctctatatgtctactcctttagggatactgaattctttactttttggcaactacttttgtgttaatcaggaagtaacactagtttttaataaattattgttaccatgccaaaaattgtatagaactttccatatgctgaataagtatccttcctgcaactttaacatttaatctcactgatagagttagagactttaaataagtttttatacttctccaaaatcactactccgcctccacagtaatcaccatctcatcagtagactttctaacattaacgcaagttagcttctccaacttcaaaatccaaattcagctatacacattttttcccaaataataataataataataataaacttatttttaccaggatataattttctagacaaacaccaaaatccaacataccttttttttttatttggttttaaactcaatcaattcctaaacaaaatacagttttgaaattagataaatactataaataaggacgattgtgagggaaagacttgttttacatgattacacaccaaaaattttaataaatggtgacttgagcataaaccaacgtaaagcatcatatgacacatgaatatataaatggagcaaaataaattggaaaacaaacttgaatattacgatgagtaaatataaccagcctaatagaagccctcaaatagctaatctagtcgtaaacagtataacatgataattttcataaccagccttactataacaaatattcaatcacccaataagagagagagagagaactaagtttcaagtgttctctttgctgctgcatcagtatctagaccaaggtggaatatatagtgaagtgggtttgagatacttgatgtagtagcatctggctagttcattgttacaactctgagaatgtacagttaatttttttttttttttttg

SEQ ID NO: 54262 - DNA, 863 bp, Cannabis sativa
ttgaagacaatttttagcacgaactaattttttcataacacatctagatagagttattattaagttttatttttataaaaaaaaatcaactaatgtattatattttgtacaatttcaaaaaatatataaaatttaatttatcatttaacaaaatagaaagtttaattaataatttttacaaatcacgatacaaaattaaagaaaattatcatattaattactcttgaataattaattaaagttgtaccttctttttttggtataatttgacttcttgtcaataatgttaaatatatccatattaattgatcactattaatattgaaaaaaaagtgatcattgtgtcttctagaggagtcttatcatgactaagttgcttctctaatttattattgtcaaatttgtcatatgctaattgtaatttagtactttaatgggatgaggattattgacctcaatctttaagctacgattattaattttcctttttacaaatatatatatgctatgaattttgaattctaataatttttatgaaaaagtattttttggaaccgtgatttatagaagaaagaatgtaacgtctccgttttaaatttttattgtacttttttttacggattaatagctcttatacacgagtacgtcattctatttgctttctatagactgataatactagtttacagatcaacacaagtattttcaacatattttgccatcactagtatgttttttaaaaaaaaactttccaggcaaagacgaaaagtgggttgcctcacctcaatttttttgaaaaatatatgtattttgaataccataaaccaaaatataataatgtaaaagaataataatactaatac

SEQ ID NO: 54263 - DNA, 1466 bp, Cannabis sativa
ccaaaaccaaattgcactcccacttgcacaaaccactagtatctggccttccgtacacctccatcgcactcccaatcacctaaaccagagcaggcttcgtaacctccattgtcaaccacccacacagcagtgaaccctttctcaaaagggactaaacccaacgtatttccttcagagagagaaaccctaggactcaaaacgactttaaatagtattactaaacctcataaaaacctcagatacaaatggtaacgtccataacataagtcagtcaaagatgtgcatcccataaaaagtttccattaaaatagtaaagagaacaaaattttgtttaacatttaagatagatatgttcatagttattaggatagttttagtgttcatgttctggacaaagcagcttattgattagatcaggagactaattcatacagatacaatctaagctgacaaatatggtttcttcattaactaatcaaaagaaaaaaatcaaaaaaaaaaaaacttgtaaaaatatgctttccttctaacaagtcacctcagtcttcgcgagttgaaggtcttgagcagccacaaaaacaacccttcttccgccgttgacgagttttcttactactgtaaatgaagtcccttaggagaaccccagttttactttcagcaaatctattggtcttccctttggtcttgtgttcatcctctagtttcagcaaaatgtactggatgttttgcacctcgaactgcagctgtccaatcttttctgctccttttcgtgcttgttcagttactctcttccgctggacatgtccagcctcttctgactccactgaattcttcccatcaaaagatgagggactctcttccacgtctcttgtcagttgatcattgacatcacctagctgcacaacagcctcctcaacttccagtaactgtctttggaccatttcgaattctgcatagttgactttgttgcttctcttgtttatctccatcttctttttcaaatcttggacacttctttgtagatttgttaacttctgagaatcagatacaagtctctccaagatctttcccctgttattttcttggttttgcaatctgtcaaaagataactccattttgtcaatgccaagctccttctcaacctgtgccttggaagtagaatttctgaatttttgctctctatatgaacggcgtctggtgacagcctgacttggttcagatgccaggtttagagcaataggtttgtcctggctgcagtctttttctgtagtttcccataattcaagcatctgttcatcagtctcaccattctttctcctacttcttccgtacaatgaagaatctgacacttgatcaagctgaatgtctttcatcaatatcccattttcggctttagatttcttggcattgttaccaaacgacacattatttctctttgtcttttcatttgtattgtcttcctcttt

SEQ ID NO: 54264 - DNA, 991 bp, Cannabis sativa
tttatttatttatgtcatgtatataactgcttcgaaaagccgcattaattgtatagactcgtcatgctatacgtttgtatatattttatacgcatgcataaacacatgagttgatgacatggggtttggttcaataatacaactcatatacatattctacattatattataataaacaaacttgcctatatatgtgatttttttttggagctttttgacaattttttataattaattagttaagattccattgagagagtgtgtgagaggtgagtaataataattagtaaagagttgagttgagagtgacctaacctaacctatggcatggtcttatgtatattttattatggtaaagtcctaataaagacaccatatactataccctacattaagggtagtaaccctacatgtttgtattattagtttttgcttcttttggaggttacaataattccaatatgtatctctgattttttatttttttatttttcttttttacatatatatatatattcacaaagtaaccaattaaatatatataggaccccttttccctaccaattataaaaaaagtctttcatgttctaaattaaagttctttgtagaaatactttgtgaaaataaaatttttacatttttacaaaaatttacttaaaaatccacatagtaattaatagaataatttaaattgcaattaaaatttatataataacctacgtaaaagttatcaaagtaactcaaactctaaatttaaaagaaaaaaaattaccctcattcattttaaagtttacttaatacatattatatagaagcctaaagcaaatgattaatttaccagtcattaataaaaaaaaaaaaaataaagcaaatcataaaagatctcaactctcattgacatctgtcccacttgtaattatttattttattttatatattaaaaaaacttctgattttgtgctgcacgagaggctcaattcaataatatagc

SEQ ID NO: 54265 - DNA, 740 bp, Cannabis sativa
attttatagtttgtcttaaataacaataatttacatgaccatgagaaaaaatttaactaaaaaattatttcggatactaaaatggatagagatgtattagtacatcttttttaagggagtgaattatagaattttttaacattatttatcatgcattaaggaaaaattaaaaaatcttttttcttacccggacttgctacttctttttaagtagaaattaaaagtggatggcctcacttacaatactccattcaagagagatggtattaaagaaattataaaattaatttcttattaatcatgtacttaaaaaatatgctcttcccaaaacaattattttccatcattccatgaatataagcctatacaaaattttctcaaaaaaaaaaaaaaaaaagcctatacaaaaactaaataaaatggaagtttgtacctacattctatttaatattgttctgaaaagtaataaaatcaattaaaaaaaactaaccttgtagtaatagatctcataatacaactatggagaatgaacaaaaagagacctgaagaattcattttcaaaaactttaagaatggtaatattaatttatagggctaagtgttgaatgactttatacatatatttatatatactagtggtaaagcacatcccttggatgtgctgcaatttttttagttttatttgtttcctctttccaattttaataattaatgaaaggctaattatgacttttacccct

SEQ ID NO: 54266 - DNA, 1003 bp, Cannabis sativa
  modified_base (955)..(965): a, c, t, g, unknown or other
gaagaaagcgtctttaaacagacagcaatcagaaaagttagatcaacaatggtagaaactcgtaacaatacacgtcagcctcgtcctcctcaggatgctccaatcccagaggacgaggaagtagcctcaagagtgaacgtgggttctgaggagcgagatgaggccaacgacgaaaggtatgaagagaactttgacgagtatgacacgtacgacgaaggtagctatacaaagttactggtcttgaggcaaaaggctgctgatcatgaagctgagatcgcagcccaaaaaaagcagaatagaaaaatgcaagaggtgatggtcgccatgcaaaaagccatggagacgcagacctaaggccatcccagcaggactcgaagaaacatcggaagagtcctcaccaagcactcagaaacccaagactagggaaccaagccgtctacggtacccttccgaggaaaactatgggaaaaatcctacttcaatccccgagagaaagaaaaagctccaggatccgcggaaagtctgctcagattgcccgaaagggaaaggtccgcagaggggcaagctccctaagagtcttggccctcaagatcgagaggaccgaaaaagcgtatccgtgcacctggagcccagagagagaggaaggaaaaaccgaagataccctccagttgacttaagacaaaaaatcaacgaaaaacacggtgatctacgagatcacctagacaagaagaaacatgtaccagtggtctccgcgggagcactaaatgaaagaattttggctgagttggcaacgctgtgcaaagacattgctagggtctcccaaaggaaaagaggggatgactcagattccgattgcgaggaccgggagccatgcgcccgacacatactggaggcaaaactccccaagaatttcaagatgcccaagatggcagcatatgttgggttttatgccctnnnnnnnnnnnatttcaatataatcaaatttatttattaataaagatca

SEQ ID NO: 54267 - DNA, 1586 bp, Cannabis sativa
tttttagtgttttattatagtcaattttttaatattgtcacagtttttattaattaattattccattagtattaaactagtttataaaatcacacacgtggcgtccttatagattaaggcgttaaatcttcattctagttcttttcctctccttcaaactaaatattatgattttcattataatgtctagttaagagtagttttctttttgttaaaggttgtttcaaaactcgagatatgaattcttagtttcattattgaatgttaatttctattttccattatatatcaaattgcttctattcttctatgtttaatgtcatgattattgttttaatcttgtttagatggctgctaaattaggttttactttaatctactgtcatcttaggattactattcacctaatagtctaggtttctaaatgtttgtgacaaattacaatttttaaattgtgatgaagaataaaacctaggttaaatgaattatatgcttccttaatttgctgcctacattaatctatctccacaaatctcaaagcttaatctaagttaaataaattacatgcttcttggatttactgcataggtaaaagagtttattattgagcgcttcgccttgattacatataatagggagatggagataattaactacttcaactttatctgcgggattagtagtttgattggaaactgaaattacattcattaataggaattaagaatgattgtcaagggtggagaataacctttaactagtttctcatatagtagtctctattttacattgttttaattttcatttatgctattttactctaaacctcaaaacccccttctactaacttttgtcactaatttttgaataattaaataaacatagtgctcgtgggatcgacccttacttacaattatactaaaataattggaggtattagaattaaatattagtaaatttgttgtggcttacgacatgcaccaaacccttaatgtacagaacactattgccatgcctagtaaccattcaaatactaagcaaacaccaggtatggaggctttcctgagggatgcaaactttgagcaagagtctaataggagtcaaactcatgggcccatgggccctccacctgatgtggagtgacctcacaatatagagggagccaacatgactcctccacctagtccttctcaacgctctcatgacactaggccccaagaccctataaagggaaagggacctgatattcaacgtgaaggaggaaatcaaatactttacttcaaaactagaggctatgagatccatcgagtacggaccaatgaactgcttcatactcgaaaatacttctgagatgaaatggatgagttgtgccattactttgccagtggcctgatggccaacaatatgaatacttcccccgagtacatggtgaagggttgaacttgagtgagcagttcaattctctctgtacttgtgatccaactgaagactagtttgagggaagtagccactacaacactttggatgacttattctacagtgcatcatccgaagacaatccggagttcattttagaaacataacct

SEQ ID NO: 54268 - DNA, 680 bp, Cannabis sativa
taatttagtcccagtattttcgtgccacatgttgttactcttcacatcatcgtcgttaaaatttaggtaaacaggtggtgtttggtaatttatttttaaattttttaataaaataaaagtaaaatttttgtttgataaccatttttgttttttcaattttaaaaataacaaataaaagtgtattctatatattttatttttatttttatttgttaattttatttaagttgggtccgaggacgggaccaggggcaagtccaagtctggggctggatctagattcggttttcaaggtctaaattggggtaggatttaaaaatattaatttttttaaaaaaaactgtttaaaaatttttgaaagtgatttttttttttaaaaaaatttaaattcttaattaaaaaattaaaaaataaaaataattttataaaacctaatgttataaaatatttttacttttctatttttaaaaataaaaactaattaaaaaaaaactctacacatgtatacacggtctcaagctcttcaaataattaaattttgacaagacaacaattcaaatttgtccacgcaacaaaatcttcttctagcaattattttttaataactcaaaacttatatttttaagtgaaaattacacttttatgagtttttattcaatgcaaaaatatggttttttttt

SEQ ID NO: 54269 - DNA, 4130 bp, Cannabis sativa
attaaaaattaataggaaaatttaccgaaaaattgaacagagtaaccgtagtatggtagctgtgaagactgagaaatgatacttggcttataatgcattggacttttaactaattatacatgcttcttttacataccataatgtatagattacaatttgtttttctttttctttttttataaaaaaaaaaaaaaaatagatgactttataatttaaaatagtattttttttgttattaaataattttataaattttaatgaattcacattaaatttcaaatttacttatttcaaaagaattactaaaaggtaagtatttattcaaggtcgacattgggcagtttagaccattgcacaaagcttctattttttaagatttaatttttttttaaaagtgccctatttttttatatgtatataaataaaaaacttatagctgaaagtttagaaatgtatctttagaaaaaaaaaaaaaaaaaactggtaatataattgtagttttaatatacacgatttattatttgagtatatataaaggacttaactttaaacttttgtacaagaccctcaattttattaacttttatcctaagaaataattttttttattctatctataagtacgacttaatatcgagttctacataataatctaatttaaagttgaatatataaaactcacttttttatcaataattacttataaaagtgcattgcaggtagtggccggctcaggcataggcgggctaggcccgcgccaaaagtccactcattttaggggtccaaaaaaaatacctttcaaaaatgtacatattttttcaataatttttaaaaataccatttatttttatagtaagaacccaaaaaattattttacctataactcatttcaactcaagaccggccttgcacatagttacaatctaatatatatatactagagttatatatttggattggattttttttgtaccacacgatacaaaaatatgtgggcatagatgctatatgaaaaatattagcttaaacacgtacgacatgacaagtgcaaaggcacaacacgaaagtgccaatgtgaatgacacgagttatatctataaatataattttaaattttaattatttatttataaagttaaaaaaaaaacataaaattatttttttttctcaattatttttcaatatatatagtatattatctgttaatttaatatttatgcttaaacatactaaattatttatttcttatttaagtttaaaaaattattgtaaaaaaaaaaaaaaggaaaacatcacttgtataattcgggttcctcaaaatatgagcacaagacacaattaatatttttatttagaaatgaactttcttaaatatggatcatactgaagatttggaacttcagtctaaaaaatagtacctaagaagatttgggacttccattaaatcccaaaaatttgaccacaccaactaaatcaaattaagactgaaatatataaaatctagataaatgttaattggtattttaataatgagttatgaaagcgtttaaggtttgttctatttatttttcaaaatattaattcgattttgaaagggctcaattcattatatgacgcctcttgcttttatgaattgttgtagggttgtatggatattttgagtacatagaaattggaagagttcattgtcttaattggcgcatttggcatagacgtaatacttttgttcacgatcataaacttctcctagatatatagtatggtcaatcctttggactataaactatatttggggatactaagaatgctaatgttggtgggtcttcgtctaatggtcatccttctcttctggggtcgagtgaagtgactactatcgaactagacctgactttaggcaaggtcaacgtgtttgtagatgttaggcttcataatgaagaatgcaaaatagggatgggggttgttgcgtcgaatcctaatggttagtcttcttctcgggtgtgtttctacgtgtaggaacttttgacccttgtgtcgctgaggctaaagttttacttaatggactctctttgcatgtgatttaggtatatgattgttactgctttctctgattgcttgcggttggttcttgcggtaaatagtaaaaatactcgtttcaatgagtttggtattttgtctaataatatttctcatgtttagaaatattttatagtatatccttgtctcattgtaaaaagtctaagaatattgtcgcccattctttagcaaaatgagcttttattttagatgagtcacgtgtttagtagttgagtctccctataaatttaattctctaatttttttaggctcttatgtattttgaaacttttcaagttttgtgcattttaataaaattgttacctctcctttcaaaaataaataaataaattaattaatctatgagaatcaacaaacaagaaaaaaaaatatacaattacgtggaaacttattcagaaacacaatgtaatctctttgatatctaccattatagcataggatctcaaattttctctatttatattttactataaagtgtcacacaactatttttactccattccaaaaaataaaataaataaggaaaagagtttacagtcgttgtcctctttgtttttcatacaggaaatatcttaaaagagataaatgccacaactttgacttttattccaaaagtgaatttcccaaatagtgtaactgaatttaaatcaattgcttgttgtaatattatttataagacggttattaaattgatatgctccaaacttagaaatgtttttcctaatttaattatttaaaatcaaaggaaatttgtgcatgaatattatattgctcacaatatcttaatttattaagatttagttaagcaatacggagtgaagaataactctccttcttgcataattaagttggatttgaagaaagcctataatactattgaacggagattcctaagagaaatgttggaagcttttaatttttctttatcatttgtgaacttaattatggagtgtgtcactactctaaaattttcactaatgattaatagtacttttcatggctatttctcttctaacagagggcttagacaaggaggccccatgtctcattttactcgttgttcttaaaatggaatacttctctcgattggtggctaaaatctctttgagaaaagactttaaacatcatccccgatgtactaacttaaaattgaatcatatgtgttttgctaatgatatatatacactcaattaaggtcgtgttgagaacttttatgaatttctctgaaacttcaggtttccaagcttatgcaagtaaaacatcaatttattattctagtatgtgggaaatgaggatgttcagcatatctagatattgttcgagttatgttagaagttccttgccttttagatatcttggtattccaatttgctaaaaaaaaaatctccacaatgaaatgtgataatatcattgaaaagatggttgctagaattagaatttggagtacttatgcatgtcgttgtgtgttgattaattctgttttattagctatacacacctattgagcacaagtaatgattcttcctaaatacattttagggagaattaacagtatttgtagaaattttttatggaaaagcaaggttgattctgcttccccagttcttgtatcttggtctgaaatttgtcaacccaaatctcgtggaggtttaggaacatcgagcattggaacttcggagctttaagaagatatgtttgtgatattactcaaaagaaagataatttgtgggtacataagaatcaagattggtggagctataatgctccacaagaaggaattggtattggaggaaaattgtagaagtgatggacactatcaaaagtcacattggatataaagattttctgagcaagaaatttgatatttctaaactttgtgacaggatgtggctgaatgattctcctatagaatttggaactctcttatttggaatcgttacaattgtcctaaatacaaatttatatgttagttgccttgcaggcaaagattacaaaccctagatcagctaaaaagatttggctgcattcaatgtgag

SEQ ID NO: 54270 - DNA, 1194 bp, Cannabis sativa
catgattatggtttcttcttctcgcttgatatctctcaaaatatatatttttctttttgttgtgataacttttgcatcataacaagaacaagaaactaatacaacttttattcttagtttctctctctttctatgtcactattaacctcctttttatacatgtatttcctttatatttggaatataactttaaattcttaattagaataagattagttaaattaaatattcttttcaatgaaattactatttcaaatattcttaatttaaaatttatgtgacatattattgatccttaggtattttaaattattatttcattataatttgtgaggcttacgactcaaggattatttgtgttattttaactattgtaactaactagtaactaatcttactctaaattattaactagtaactaattatagtatactaaattactaactagtaactagtcctaatttcaccgaaattttggcagcataacggctataattttaagttccaaaaaatttaaagctactaataacaatttaaaacaatccaaaacaatataaaataatcacaacaacatattgtaataaaaaatttgccacgcatccgaccgcagtacatgtattcgcagaacttacttcactacggatgaatatttaagatattctaactcatctaacatacatattattccacccatgcgaccacagtacaatatatcgtagaacctacttcactacaaatgaatatttaagatattaaaactcttctaagcattcataattaattaataacaaaagttagtgaacgtatacctctagctagctagaaactaatcaacacctaataagtcggatccttgcaaatcgaccacataacttacaacataaagaaataatacaaaattataaatttaattatttaactacttagtaattatataatttatgagtacctagttactgactaattaagttagtaatttattactaactaattactaatgactaactacttagtaaaattagtaaccagttagtaataaaaagatctaactatttactagtaaaaaaataaaaaacacgtgaattgtaatgaaaatagaaaattaaaagaaagaaataaaatttaatttaatttaatatgaacataaaaaaaatagataaaagagttaaatttttttctcattttatatttaca

SEQ ID NO: 54271 - DNA, 848 bp, Cannabis sativa
tatataagttgtaaaaattgttaatataacaattagtgattttacaatgtaagtgtactgatacatttctgtttgtttgagtatttaggaaaaaaaattagtcgaattcttcttcatatcatgtatattatagttatatatatttaaaatattttacaaaattttaaaaaattagaataatttataatatacaaagtaatgtttaaataatttattttatatgtgtataaataaaagagtttgttttcggcgtattaaattttttaaattgtttcaaaattttgcaagaaatcttaaataactgcaacgtacacaatcatgaaaaaaaaaataaattaaaaatttctgttggatgctgaaacagataagatacatcagtgcattacttttaaaggggtgcattgtagaactaggaaacagactacacttcccatgtacttgtattttattttgaaataattaagtcataaattatactaaatttaatttttttttatattttaacataatttttttattaggattttactaaattttttattgggaaatttgattttttttttatgcatttttaaaggcataattggttaggagtacaaatagtatgggtaattgttaaaatagaacccttttgaataaatcccaaaatacccttctcaaaactttaaaccatttctctctccttccctcaaactctctctgccaattcgccacaccccatcgctgcaacccgaaaccccatcagagaaacaccaccactccgacccacgccagtcgcccacacccgaccgcccccaccgtccaccaggccgcccacacccgatcgccccaaccctcaattttttttt

SEQ ID NO: 54272 - DNA, 682 bp, Cannabis sativa
agagactcgcctggccatttttccagccaaccctttagcttaatcctcaattcttcttcagatacaaacttctcatcctctcctggttccaatagtacataagtttctgagctttcatatatccttctccttctcactgcataaatctgaccccaaaaagttactaagaaatttaatgcgtggttacaacatcatatatcaaagtccaaaaattggataccttcactgaagttctgcattggctggccattttaggcatttttgtatggatataacaactgggataccactcactaagtcctgctgatctcaagtgaaacgatggcgtttgaatatggtaatgtgttgcttctttggctgcaaaactagttttttagagacttttcaaacttgataatcttcaattttgcaatggtgaaaatcttttccaaaataatgggaaaaccccaggtgtttatttaattccacaatctcaactcaaaatttgcacatgctgagattacaggctttcatggattcaaaacacaggtagaaagagctaaagacaaaataattatcattgattaaattagttatgtatatgtaaatgaatggagtagagcttacagttgaaccacaggactccattgttgaataactgtttgtccaaaagtttctccataattagtgtctcttttgcctt

SEQ ID NO: 54273 - DNA, 1273 bp, Cannabis sativa
tgattaattgattaataaaagtgctatttttcaacttacccctatatttttaataaaaatatatattttttgagcttctagatataatagataggcctagctgtagctggattcgactctggtagatagaaaatacattcacttattagaggaaattacattatatacctattttattttattattgttttaatttttacctttaattttatattctttaaaatataatcacttttatagatgatgtcttcattagattctttagttaatataaattatatgctatacttaagtaaacaataaaagtatattgaacaacctatttttaaatatgtatattttaataaaatattatataagactattttttattaatgaatatatatatatattaaaaaaaaaattctcaacttccccaacttattagataggcattcattcataatcacgtgcatgttagtgttttatgtatgtattaataattcttcaagtttttttttaatggttgacataatcatacaatattatgcaacaaatattttaataattatacagtattattatcaatattaatatactactacactacactagatatatggagagctttggtgacttccacgccagcaaaaaagtaatacatataattaaaaatctcttaatttatcattaattaaacaagaaacgtgttcttttaaaagcttctcaatatgcaactccccaccccatgcatgcaaaatcaaacttctttttctctttaaaaattaaaataagtctacttaactactcattcattaatacaatatggtatatatagtataataccaaagaaaaaaacaatggagacgaagaaattcaagtgtttgaagtgaattgtcctttaatattgatatttagtaataataatttaactagagacaaaaacattaggagacaataaggggagaggaagtggaaaaaaaaaaagaaggaattaatgagagaaaaaaaaaagaatagaaaagaatacagaaagtttttttttctttttttgatatttaagttgaagaagaaggcagagcacttttaacccccccactcactacacaacctcaaaaatcttaggcgtgacaagcctaagtggggtgcattatcatggtgatacccagtaccaacaacacagcccacattatcatattcttctcttttttttttttttggttcttctttttaacatatattatatataattttcaaaatgctaccacgtcatcaccatttttttttttatttt

SEQ ID NO: 54274 - DNA, 1228 bp, Cannabis sativa
ctcttaagaagaaattcttttataccacaatatttatttttgttatagaattgatgaaaaaaagtattcttccacacagttttggctctggaatagactataagagcatgagtaacaatctcctcgttgctcctgcaaaaggaaccattagggctatctataattcctctcctaaacagattagaagcacacgacaaaaacatgattaaaagccttccaaacaaagtgtttgatcttaggagaaatcttgatagtccacaccaacttctaccaaggtttaaaagagtcaggcaaggaggaagatagagaatctaaaacagagcaagagttagccaaatgataagctaaattgactatgaagtttcttgatggatgatgcccccaaatgaggcaatcgtccctgaatggatctataggaattcaaaggacaccgtcaacctagtaagatggaagatagtgttgaagcttactaagattccaattcccattagcattaataaataaagagactgtgttattaagagaggaagcatcatgcaaaaaagtaagagaattcaaacctggaatctagtgagatttagctaaagagatggaattaccactttccactctccaaacaagccccttcaaaagaagctcccttccccaaagtagactcctctaagtgatagaagaacagtgcctcttaggagcgctaagaaaatcattatgtttgaaatacctagcttttaacaaacaagaaggaagcaagtttttgaccaaactctccaagcctgcttagcaagcagagcttggttatgattagctatagatcgaaacccaagccccccaaaaaattttgaaacacacagactatgccaatttttccaataaaatttgtttttattatttgaggatccccactagaaatttccaataagcctttgaagattcttacaagtatagcttggcagtttgaaatatgacatggcatatgaaggaatggcttggactaccaatttgataaaagtttctttaccagctcttgaaaaaaacttagcattccacacattcattttcgaagatacattttggaccaggtaatagaaacagagttgtcaaccctaccaacacactgtggaatcccaaatatttacaaacaaaaccctcattggtaagcccagatggttacaaaaactttctttagccacatggttagtattaggggaaaacagaatagaagacttag

SEQ ID NO: 54275 - DNA, 2683 bp, Cannabis sativa
  modified_base (37)..(38): a, c, t, g, unknown or other
  modified_base (198)..(202): a, c, t, g, unknown or other
  modified_base (383)..(389): a, c, t, g, unknown or other
  modified_base (586)..(588): a, c, t, g, unknown or other
  modified_base (2325)..(2327): a, c, t, g, unknown or other
atagggttgaaagtgcaaaaagtggtatttgtgaaanntagataaatggttgagaaaaatggcaaaaatctaactagtgtagggcccatatcatggtcgaccacttaagggaattttcgctctatgtttatcattttttttattccaaataaattaaccgtaaccttatgtgaaattagtataaaaggaaagctatgnnnnnattatccaactaatgcttctaaagctaaaaacctagttttctctataggtttatgagacttcttcctttcttcttctaatttttgaaattttatagctttcttcacaaatcaaattcaagcctttaatgattgagtgcatgcccacacataacaagtgagtcctcaatcatagtgtgtaannnnnnnaagaatccaaacaactgaaggagtttcgggctcatatcttggtgatacgttgcgacagaaaggatacaagggttagagatctgagcggaaagagctatttaattctgttgcaaccaatgtaaggtttctcataccttttatgtgtgtttattttcatcattttagaaattcatattaggatgttaaaaacatacttnnnagtaaatctaaatcctggtaaaaaatattccaacagtgcctggtcattcggttgctcatcttcaggggcatcctcagtttccccaggttgttcttcttgagcattctgagggtccccctgagctatctcttgcgtcctagttcgagcagcgaggcctgcctcgtggcctccttactccaggatcaggttggttttgagtgttgtcttcttgagccgccttggctgcggctgcctcccgttccaactcagtgtttcgttggtttgcctccctagacgttgcttgagttgaacattttccaactccaccaatggcacgcatctagtggcatcataggcatcctcctccctatgtacataaccaccagcttcagtattagtttcctcattcccagtttttgggttttggtcatcttcacgttcgcttctcctcaaacgtgttgactgtgtagatcgtgttgtccgtgaattgggaggcctccgtgagcccgccggctcttttccagcaatgagtagtctcttcaggttgattattatcgttttccccattatcagccatggagaaaaaatttccttttggttaggagggattttttttgagcttttttcacgtaggctctcaatgaaagtaccaaactgttaacgcaaattttcagtaacgataattagcctatttttgtgataggatcagcacataaattatcaaaaatctaagaaagaataataaagcaaaaataacaccaagttttttacatggttttgtagttaactctgcatagtccatgagtcaatcgtattaagacttttctaatacagaactagggttctttttctctcaaggattttttgtccctttttctgtacattcttcccctatttataatgacatagggtagcagttaattacatttaaatacgaatctcacaacaatattttttccgaaattgtgggccttaattacgctccacataaataaatgcagtttattatttgaaaatcacacaactgtgatttaaagcacttttaatgagtcaacgctgacgtggattaagacacgctgcaaagtgtatctcgccgaggtgtctcgcttggtacttggacaatttgatttatgttctcaatagcaacaataactctggcagcgagctggagcttttcccatgtctttctgaggttgaaaacataacgcccatctaaaaattgcagttcttggtaccaagatgaactccagcaaccaacatcatttgaatgtcagcttctttctgagagagttgacgcgacggagcagtggaacctattgaaagatgtctggagctgattagcgaaggtaccaggagtatgtcttcctatagcgagatgtatgtcttactaatcgttatccatgtcctccaagctattacacttaattagtataatgtatattttacgctaagtattctaacatccaattcgtcttgtcaacacctttctacacattgtgaggttgatggctcgctatgtattattgatgtcatccttacagttacgtacacagaatggtttctcgttcatacgtgaatcttgtctcgctagagactatgcagtctgcgagttataaatatatcctattgactccgcatttaatgagttatataatttccattatattcgttgattccccaaggacacatgtcatcctctgaagtaccatttatataccttataaatgaataaatcaagtctccaacaactatattttnnntagctatcattcattcacattcataaaaaattagtaacatcttttactaatttaagagtgaaaaagaggtgagagtgttacatatttcaagtgtttatcaaattaaaggatttgcatcgcctattgattattctacacacattttgtaattccataatgtatgttacaatttgacaaaagtaataatttatcacacttagctatttaatctaagtattatattctataaaatcatataacataattattatcatgcaataatgattacaatgcaaatgcatgtaaaattagtcgagtgaattgataatgcataacatacagggccggccctaggtataggcgggctaggcccgtgc

SEQ ID NO: 54276 - DNA, 1769 bp, Cannabis sativa
ggtaaaaaaacagtaatgttatcgttcatggaggagttgaatcgtgggagtaaaaaacggatcattgactgatggcgttttacttcttctgatcactggtaaaattaataaataaataaataaatataaaactttatttaattaaataattaagtgacacctcacccgactcgaattggtcgaacaaatgtggtgaattagtgtctgagtcctcacccatgtgtgcataagtgtggtgaattcattggtattaatttgcaatgaattggtattaatgtgcacaagactggataccccttggagcccaaacccaattctcaaacatgcactatttatgcatttttaataaagtattcctatcccatgtgggactccaaactatcacacacttcactttttaatatttatataatttcatgaaagcagaatttcttcatttttgttcatcttcacaactcataaggaataaggattcaatattcttctagactagagatctcctactatattttgcttattgtgaaaagtcgatatatttgtcaactaaacttacttatcaaatatttctaaatctttttaattaaagtttttcgatcttcagtttatttcataaagttgatgaattaattaataaatagttataatattaactgttttcgtctctccccatcatgcatcattcatgccatggctacaaaaccacatatacatgcatgctagctatatagctctccaatcccatttttttttttaaaaaaacttcaaatattaattgtttattagattaaatatatatttgctattgattatatacttctatccaaaaatagcgtagaaaaaatcagacgattatatattttcattgcgtagtaactttgttgattatattcgtcttgaacatcagtaatttaactcttcatatgtaatttgttctctcgagtcactttcattgggttagataatttttcctttcttccttttttttttcttacggaagatggatgcgttagataattttaaccagcgacattttggtgtgtacttgaaattgactcattaattcattagaagccaacccaaaaaatgttttcattgtcctaacgttagctaaaatcaattcatagtgttgaagagaatatatgtatataataatggaacaagttgtgattaaattcattgataaagccataaggtgtgacttgaattaagtattatatattattagtttggttttgtgtgtgtgtgtgttgcagacaattgaggagccaaaattagagtttgaacttattataggtagggagattattggaaggtgaaaaggatgatgagtgaggaccactaattaagggtttctttccatacctttcttattcacatcacatgtttgtctaaatgccacattacactgtccacaccgtccagacaagtgtgacagccgttcaccaccaaagactaatgtaaatatacatttctcattgttgattatgattttttttatataaatactactaagagaaatgataaagatgattttaaagtcttgaattctatattgtagggatgtttattggatcatatttaatctatttagttattgtatattaaattttatcatccgattcaatataatcaaattgagtcatccgatccaatccgatttaatggatgtattgaattagataggttctaattattagatgcattaattagttttttattggattggatccattcatgtccatttaaaataccatttaagttgattttat

SEQ ID NO: 54277 - DNA, 796 bp, Cannabis sativa
aaggcaaaaatctcattcaacttggaggtaaattgcttcagcttttcgatgttgttacctgtgactattatgtcatccacgtaaatcaatacaaggatcacaagtgaagatgtttggtaaatgaacaacgaagaatctgccttggaatttttaaaattccagttcatcaaagttcctctcaatcggtcaaaccaggctctcggtgcctgccttagtccatacaaagcttggacagtttgcatactaagtctggttgtgttttgtcttcaaaaccacttggttgtgtcatgtagacatcctcggttagatgtccattcaagaaggcattgttgatgtcgagttgcctaacttcccaagacttcattacagccaaagtcaatacaattcgcaccgttgaggccttgatcacggggctgtaggtttctccaaagtccacaccaggtcgttgattatatcccttcgctactaatcgtgccttgtatctttgaaatgacccatcagcatttctcttttctctaaatacccatttgttttcaatcacgttcatatcagccgttcttcgaaccatcttccaagtcttgtttcgaactaaagcatggatttcatctttcatagcagcgttccatccactatgtctcaaagcctcttcaagtgagcatggttctgagcttattttctcccattttgcactgctcaaataagtctttggtttaaaaactccggcttttgctcgagtgatcataggatgtgtaggttgtagacttttaacatttgttgttgctgctgtagtatctgg

SEQ ID NO: 54278 - DNA, 1287 bp, Cannabis sativa
agatgttgctaaagattcaaggactttgagaagaaactttctctaattaaaattaaaatttttaggaaagttacttacaagaaaaaagaaaaaaagtaaatatgatccaaattttaaggatttatctttgttatgtatcttttttttttttttaaatatattaatttgttttaatttatcttcttatgaatgttcaaattttttagttggttgtactaaataactgattttcgtgtttaattgttggtatgttattttacgtaattgaggtttatgttttattttttcttttgttattttaggaaactggttttactgtgtcagatttacgtaatttacttgctttatgtaactagtttttctgtgtcactttttaattggttgtttaacataactagtttcaataatttaaatttatttatatgttaagaattctcttgtggtatgttttaatttttttaattaactagctatttcgtgtttcaatacatcattttattgttttaggcttcttatgtttttgtttctatattaattattagttttgtttaattagctatctaatgtaactggtttttgcagtttaattgttattttttttcttctaagaactagtttttatgtttcaatttatataatataactggtttatgcaatttaattattagtttattttttttttaaggaaactagtttttatgtttcaatttatcttttgattgttttaggttgtattggtaactggtttccctatttatttataatttttgttgttttacgtaactggctctaatattttagtttttgattcggttggtttaaataattggtttctcagttatagttttaattagctgattattgtaactggtttcagtgtatcaaattccaacgtctaacaccagttacaactccaatgtctaacaatgatgagtttccagtaatgaagacaactccgacgaattttttgataataatctgacaacgataacaacttcattgaatattctcattttattttctactttttttgcggttaatattttattttagtggataatgactattttggatagtgactgagttgatgattaaatcttgaagcttttgaaaagtttttaactaattttattttggtattgtatttgatttgttcaatattccatacagtatctaaaatattagtatgtaaaatttatttataatttttgacatccataacataactggttttttttcattaagataacaactctagcaatttactcttattctattttctacttc

SEQ ID NO: 54279 - DNA, 807 bp, Cannabis sativa
gcaggtcacatagatgcgagctgggatttagaaccaatcgagccttttgatatattcaaaattacaggctgtagggattttagcgaatattatggtcttttgaccccttcatctagtgatagctcgccttctagtgattttggtaaatcccttaggtagaaaattatactcctccccttttgaattgcctttttataatgattgtaacgcctcgtcttgttttgtagatatgggttatgaagacatcctagaccataaggggaagaaaaggacatccaaccctagagcccccactctgccgaagtggttcctcccaagaagcaaagaaaaaccaccgcccataagaagaaattactggccaagcctatcgatctcgaggtttcggacaacgagatccaagagcaagttcctcctccagttgttcccaatgccaattcccttcatctcgaggtgaccccccgccactacctctccgagtcaggccatcgagaccctatcggtcgcagttggagaagctggctctgaatttgccttggcatatggggttgcctgttggcgaaaacttcatactctccttcccccagattgggattttctcaatcttaggagtccaaaagagatgctttcaaggaccttcgactgtcacttcatggtatctcggctttattataattatattaactttttatagctctttcatctgtttgcaattctccagaattcttttacttctttttcttgcaatcgactactctcggagcggctcgagtatttggagggcgagactcacaaattagtatctcaatg

SEQ ID NO: 54280 - DNA, 1883 bp, Cannabis sativa
ggaaggcccagagtatcgactcattgtctcttttgtcgatgatagccaatcatggagcaccttttctaactatttgaatcttggttctatactcatccatctttgccttagagtgtgaaccataaagagcttcaagaactgagcaaagagcggataaggagccacaacccaagacttctgaggcaatcccatctatcattgaaccatagagccattcaagaagtaattggtcattgactagttggattaatttcacctgcaacaatctcactaccattaacattagtagtgattgctatatattcttgtggtgtagaaagagtacctttaaggtagccatcaagtttgtgcccccgtacaataacatatatcatagttttccataatgggaagttgtttttgtccaacttcaatgcaaatggttgtttcaaagtactcccgaatggaggcacaattatgcttggagtctaagtttggctacctcttgcagtagttttttgtctaccattttctctagagattgcagagtcaccttcaacgactactcgtgcagttttctctccaataccgaccatggataaagaagacaaatacttgcatatactccgatgccaagttgaaaaatacacacaatattagaagaatattttctcaactcgttgagtttgaggctacgacattacattatatagaggaatttgttattcaaaaatattctaaacttttcacagtacatatgcattctataacaaattagaggtacaaaattaaagaaaaataaaacgaatatcctaacagaattgtattgtattagttatcattataaaatcatgagttgtcctcaatatttggagtgttgcacaaataactaaaatgcacctctaatacattcattttttttttcacaatataaatttgatactgactcttaatttatcactacaaattatttgacataattatgtattaattttattatgtttaaattagttttaattaaaattttgaagtctggactttgggaggccaatgcaaaggcgtaatatgctttgttagttaaataaataataattaaaagaaattgttaccataggggatatttttgttggacttattttttttatatgtaaactaggtagtagtaatttgcaatgtatatttaattagagttgtattacttaattattaatttaaataataataataaaattaaatctaatacgattcaattatatttttaaatatataaaatttaatttatttttaaatttatttataaaaaatatatctaactaattttattaaacaataagataagtaaataaagttagatatttaaataatataactaataatctttttacaaagtataattaattattgaattaacgtgtaattcaaatataaattaagatttatgtataaaaataattatttgattttattgataatattttaaaattaaatttaaatatttaaatatattttttttaaaataattaattgattgatttaacggtgtgagttttaaccttttaactttaaaagaaatttttttaaaaaatccattaaactaataatttcgttagataatcaagatattggttggattagctagagttattattatggttgtatattaacaccattatttttttttgaaagctattaacaccataaattaattagctatactatacgtaattatataacagtcaatggaaaaaaaaaattaataaaaagaaaatttaaaaaattagttgttgctagttttaattggactactaaactttataccctgtagtttaaataaatgtcggtgtcgtcaatgcaggactacatattttatttatgattactattactatttaatggtttctttc

SEQ ID NO: 54281 - DNA, 509 bp, Cannabis sativa
agtgtaaaaataaaaaaattccttcattttataatgttttttatcattttttattatactttcataataattattaatgaataatgaaataatgatagtaattttttgtttttatatatttttatatatatatttaaaataataatagtatttaagtgaaatacggttatgataattattttaattgtagtaaaattataagtaaaatagggtactaacaataattttaaatgtaatggtgattgcaagtaagatacaacatttaattttaaatattcttaataaattagatattttaaacttttgaatttaatttattttatcattttatttttttataatatttattcattaataactcaacatatacaataaaattaataaacacttaaaaaaatatctaaactacataccaaaaataaatatttaaaacatgctccgtatacaatcttatttgtattattttcaacggccagatcatactccacgtgtgaaaccaaatgccataa

SEQ ID NO: 54282 - DNA, 1073 bp, Cannabis sativa
taactaagcgggctttacattgcaagacaaaattgatatttaaagagtgagaattggaagagagagtggttgtaccaatgttagaaatgagcaatttcttaccattagccatagcaactatttcttgactagtcaagggggtaacagactcaagattgtctaaagagtgagcaatatggttggttgcacctgaatccacataccatccaacatcatcaccaaaatccggtatagattgagcaagaaaggcctaaggatcataatcgagggactgttcagtaaggttggcttgaggttgagcagttgaagcctttggtgcgatccaatttctatcaaacctatagtggcaggtgttaacagtatgcccaaatttcatgcaaacttggcataaaggtctgttattgttggtaggtcgaggtccattgccacagtttgagaatcttgatgagttttcaggaccttgtcccctcccttagccattaaagggtctatactgaccatttcttgtaccaacagtaagatttgcaaccatatttgctcagagatctaagacagctgagtgtctttcaagtcttgactcatgggacatcaagagagcttggacttcttcaagtgaaacgagtatcatttcgagaggtaatgctagaaacaacagaatcgaactcaagaccaagtccattgagaagatgtaaaataagatcaaaatcatcaataggatgacctgcaatagccaaagaatcacaaacagacttgatcttatcaacataatctgaaatggacatattacctttgtagagattagttaattgactcttaagttgaaaaattcgtgccttagattagcttgcaactttctgttccaaggctctccagacaaaatttgatgtgttgtagctagccacagtagccaaaattccttctgtcatagacgatcgtagccaagatagcaacaattgatctttacacctccattgtactgaggattatcattaccattgatgagttttgattgaggagcatcattactgaaaagaagattatcaagatcctgacctataatagtaggtatgatt

SEQ ID NO: 54283 - DNA, 590 bp, Cannabis sativa
attgaattagacttagaagattttgatgcaatcttgggaatggattggttgactaagtacaatgctactatagattgtaagagaaagatggtgacctttgaaccagatggtgagatctcatttgtttttatgggaaaggtgcagggatctcggattccattgatatcggcacttaggaccagggaattattgcgagaaggatgtatgggatacctggctagtgtgttggataccacgaaagatatacctgaaggaccagaaaaggttcaagtagtatgtgaatttccagatgtattcccggaagaactaccgggattaccaccaaagagagagattgacttcaaacttgaattagtaccaggagctgagccagtttctaaggccccttatagaatggcaccggcagaattgaaggaactgaaagtccaattgcagaacctacttgatttgagattcacaaggccgagtacctctccttggggtgcaccggttttgtttgtcaaaaagaaggacgggtcgttacgtatgtgcatcgattatcgagaattgaacaagttgacaataaagaacaaatatcctttgccaaggat

SEQ ID NO: 54284 - DNA, 975 bp, Cannabis sativa
ctgaactcactccaaggactcaaatccacaactcaccacccacaatattggtcccttctctccacgaccactgacccaaggacccacggacgtgatgaccactgcaaacctagcgacttctctatcaatcacaatttcaccatcgacaatgttgtcaaaggaataaattgtatgattaatgttgttatctgtgagtagatgttagatttagggtcgaaaatgaccaaatctaagttttaggcaaaaaactggtggccagatctaagcttcgggcaagaaactgttttttgtcaggcccgatggtggtgggatgccttcctgttgttaaaataagtaaaggttgaagatgaaggtccgatggtagtctgatgataacacgatgatatggtccgatggtagttcgatggtggtctgatggtaactcaatgccttcctgacgagcttaataaatggagattaacatatataaatgtaatatggtctgatgataatccgatagtggtctaatagttgcctgatgctactttttttatgtacaaaaacattaaaaaaaaaattggtagtatcgaaccactattggactcccatcgaaccaccatcagtaatggagagtgtagacagtaaagttagaagaaaaaagcatagagaatggtataatatgtatgaatataaagtgtgcttatttttataattttaataatcttgtattcaaaaatttaatatacacaaaatacatataaattcaaatttctcattatatatattacgtgtgttggaccaagttttctccatgattttcttaaacatagaaattaagaactactaaataagaatccttcatgatataagtaatccattaataatattattattctctaatttctctaatatatataaatatatttattagactctttcaacgtgcactacacatatatcatatatgcatgaatgagaatcataatagaccaaatg

SEQ ID NO: 54285 - DNA, 4034 bp, Cannabis sativa
tttagcgtcgccctgatcaacgtcagtagcgaattttgcgaaaaccgacgctaaaagggcttaaaaaccgcctctaaaaggggtttttgtagtagtgctagaaatgagaccaaatacaatattgttttgggaatggctacaagttactacaagttaattatatttgtgagaaatgagctaaatcaaatgttgaatttggcattcactttttagatggttgtaaggttcttaatccatctacagttgggagcaaaggacgtccaccacttaagagaaaacaatctaaaattgagtaaattaataaaaataaaaaacaaaagaatgctcaaattagctcgaagggaaaaatacaaagaaggttagtatatttttgttttcattttaaaagtcagattgtttttttatacaagtattatgtttattaattattatgatatttttattgcttttggtttttctttgaaggcctccaagaaaatagtaagcaatgaaattacaaatactagtcagagtttacaacacaagaaattatcaatgaggttagaaagagaaaataaaatttgtacgtagagtttatcttttgttttttttttttttatttgatttatatttaatatgtatatatatttattataagtgtttggtgttcaaatttctcaagatgtatatgttgatggacaaattcaaagaattgattagctagaaacaactactacaagttaatgaacaagagaatgataatattattggagatcttaattaatttgtctatatgcatatggagacttcaatatatactatataatgatgattatcattgttaaaaaataaaagaatttttgttagtagagaagcgttggttattatttgactatgaacttttaatttaatttttattatttttttttggaataggtgtgcaagaatttttgttaacagacaccgttattcttattaatttgagtaatttttatttatgtgtgcaaaaatttttcatgtttcaatttttatattaatgtctttaatttgattaattttttttttctttgatatacggctgtttttggtgtactttttatatgatcttatataaaaaaacatgaagtctgaatattttttttttatcaatgatataagaatcaaagaaaaagatacaaagtgacccactttcaaaaaaattgaagttaaagtttaatttatttataatttataaccaatgaattatatggaaaatatataaaatggaaacaaatgtgtatgtcttttatatctatataaaatgtgcttacagtcaaaaaatagagaaagtggagaaagtattttctcagctcaaagctcaattagagaccgaggaggaaagatgcatttatagagtaaagggtctaacggctccaatcattacagcagcataaaggtgtgccaggtggcaccgtacatagtgaggaaaacaagaaaggcaaaacagaatttgttacactaaggacaaacagtaaaagtaacaaagtaaaggctgaaaataatcaacactaatcctctgttttactgggtaaatactctgtcgtaacaccacccctcaaacgcaggggtgagtcaaccacaccaagtttgttaaagaagaatttgaacttttgctgtgtgagacctttggtgaagcaatcagctatctggtcttgggaagagatgtgtctgacctcaattttcttctgcagaactttgtcacggataaaatgaacatcaagctctatgtgctttgtgcgagcatggtaaaccgggttagaggctagagcaatggcacccatgttgtcacaccaaactactggggttgcaggcagattgaagtgaatttctttgagaagggattcaagccaagttatttcagcaacaagttaagccaaggcacggtattcaaattcggtgcttgatcgtgcaacaacggactgctttttggagcaccatgaggtcaaagagtcaccaagatagacacagtatccagctatagatttcctatcatttggacagcaagcccagtcggcatcacagtatccaacaacagatagtttgtcattgtatttgatatgaatcccataatgtattgtgccttttaagtaccttgaaattctcttgactgcagcccaatgtgttgatgttggacacttcaagaattgactcaacttgttcacggcaaaggcgatatcaggccttgtgtgtgtgagatactgcaatgccccgataacacttctatattgggtgaaatccttcagttcagtgccatcttgtatagatagaggtttgcctcctgtcataggagttgcacatggcttgatgctagtcatttcgagtctctttaacagttcagagacatatttctcttgggacaaatacatcccagttgcatctcgaaaaatctcaattcccaaaaagtaattcaaaggtcctaagtcttttaaagcaaaaaccttgtgaagtttggcaatgaagttattgacttcttgagaaacattgccagtgatgacaatgtcatccacataaatcaacaccattataacaaacttagaggtttttagcagaaatagtgaagtatctgctctagagttgacaaactgccacttgagaagtgtttgtttcaactcttcataccatgcctgaggtgcttgcttaagcccatagagcgatttaaccaatttgcacacatgactaggcttggatttgtcttcaaatccctcgggctgacacatataaacatcctcctcaagtcttccatttaaaaactcattgttgatatcgagttgcctaacatcccatcctttagaaactgcaattgtaagaaccactcgaattgttgatgctttaacaacagggctaaaggtttcaccaaagtcaaggccaggcctttgatgaaaacctttagcaactaaacgagctttgaacctttgaaaagatccatcagcattgtacttgatcttaaagacccatttgcatccaacaatgttcatccaatcttcctttggaacaagaacccatgtttcattttttagcagtgcaaagtactcctcagacatggctttattccacccctggtgagatatagcagcttgaatggaaggtggttcagctaagttttgttcccatctagcctgagaagtataaacttttggtttaaacacaccagccttcgaccttgtcaccataggatgacctggtttttgaactgtgtgacaaacctgatcttgctgctcatttatggcaatattttcacttcctgctgtcacgtgatcagtagcagtggcacgggcaaaatccaaatcaacataaaggttatttgagagatctacctgatctatgtgtgaaggacttggcatgattgactattgtgttgcttgagtagactctgaatggtttatatcagatgaaacagcaggttgaacagtagattgagtcatgggactttgtgcttcagcttcatttgtgagagagttactggtttgaggtagctgtacaggaagttgaaaccaggagcttggggattggacagtaatatcagactccttttgatagttattaagaaaaccattttgaaatggaaaatctctttcattaaacacaacatgcctagtgatatagactctccctgtggaactcaaacatttataacctttatgaaactaactatgccctacattaacacatttggttgaatgatattgaaatttatgtatttgataggacctaaggcaaggatagcaggctgtcccaaatgttttcaaaaaattataatcaggtttcttaccaaagagtgtttcaattggagatttgcctctaaggacaggagtgggcaatcggttaattaggaacacagatgtttggaaagcatcacaccagaattttaaaggcatatgtgcttgagctaaaagggttaaacccaattcaactatgtacctatgcttgcgttcagcgcgaccattttgttctgaagtgtgaaggcaagagtgttgaaagagaatgccattttcaatgactaaattgctaaatgattg

SEQ ID NO: 54286 - DNA, 1507 bp, Cannabis sativa
aatcatgataaatgataaaagattgttaaattattaataaaaaaaataaaaattaagaaaaatgagaaagcaaagaaaatagaaaatcttttaagaacaatgtatatttattttagaaaaaaattgatgtgtttcttagatatacacaatcattaaagtaagttcttttttacatacttttaaatagttctctttttttcttaactgtagagacaaaataatctatcaattaaaataatttatattaataattaggagcagacccacattgtagcaagtgagggtagtaaaaaaaataaaaaaaaatgtatatatattttatttagttacaacatatatttgtaataaaatattatatttataaacataacagtaggcttggtgtaatggttaagataagttacatatatgttagaggtaaaggttcaaattccactaacaatatattttttttttaagtttactttttttcctatttaaaaaaaaaattacagactctcgctttaaattacgagtctgccattattaataataagttaacttattattaaaaaacaatttttttttgaaacgatattaaaaaacaatctatatactataaatattaaataataataataataacaaaccattaataataataatacgtaatttaatttgtacagaaaattaatgtacataacactaaaaaagaatgatgtacctatcatttaataaaaatgttcataatcttccttttaggaaaaattatagaattaattattacgtataaatttttaacacactttttccaaaaaaataaaaataaataaataaataaaaatcttacacaaattaatattttcttatacaattaatacccaaacaaattataaaaattgtttatatatacaattttcagttattataaaaggctttatataatgaaatcatgttgaaaatgtatattttactatattaaagtttaaattttattataataatgaattaataaaaaatgatgcttcttaattatgtaaaaaattatatcattataagtcgttttatttttattgtattatgatttatttgtgttttaattatagggagacattttttttatacatatatattatatataattcttcatattatttataaaaaatattagaagtgattattttttaattaaagaaaatatttttcaaaatttttactttgtttataatatacacatcaaaatattatattacaaattatattactcaattaaattattcaaaatatatcaaaagaatacaaaaattaggtggaacccttcccgcggcttagttatctagtttattataaaatagaataaaaaccaaaaaattgtttctataagatatattgatgcacccctatctgttctagcatccgaaataattttttagttaatttttttctcattgtcatgtacgttatagttatttaagaaatcatgcaaaaaactatgttcaaatagtatgttgcacgcgtgactatttta

SEQ ID NO: 54287 - DNA, 1512 bp, Cannabis sativa
ttatttttacggtgttttataaaaaataaaaaaactacacaaaagtaacaagaaaataatatatgttgattggagaatttgccaatggactcaaagtttaataaacactaattaatcaccattaaaaagttagaaataataagtaaaatagaaagaacaccatacgttatagaggttcgaccccttagatcttggtaacgacctacttcccttttagttgtattgatatcgagataatatcgtgtaaattactaagaaagacaaggtgaattctagctacaactctcaagatgcttaaagagaatattattcacaaaagttctcttagagtcgagataataattttttaagtccctcccccctattaattcattaactatttatagggagaagattgttacaattagctccttaaaggtagctgttgacggtgaaaactcgccagctaacttagtggctggaaaatctaagttagacccagaaataagatgatgataaagatgaaaagatatacaagtattaatggatgaatattctctctctctgaacatcaatcaatgcttggcctattgtcaagaatggtatcccaagaataattactacattgctgtcttcttccatgtccagaactataaaatctgttgggaagataaatttatccactttgactagaacatctttgatggccccccttagatgagccaacgaccgataccaattgcaaggttactgtagtaggctttgcttctcccaattgtaatcttctaaaaattgacagcaacatcaaattgatgctcgctcccaaatcacaaagtgcattcatcccctctattctcccgatggtacaaggtacggtgaaactcccaagatctctgagtttgggagggagtttcttctgcaatattgtactacactcctcgatcaatgccaatgttttatagtcctccatttttctcttcttggacatgatttcttttataatttacatagcttggcatttgttctaaggcttctgtaaagaggatgttaatgtataactttttgaatacctctagaaactttaaaaactgcttgtctaaattggtctttcagagcctctgctgataagggattttcacatggttgtcaatgctaactggtggagaagcttcttttgatgtcagacccttagtagtcttcctctcatctggtgtcggtgcctgtagatcttgacccacttctttccactggttgtctctcactaggtccctcatacttcttcctacttctcaaggtaatcgccttacaattttcttttgggttcacctttgttgtgctaggcaagttaccttaggggcgagtagctatttgagtcgccaatagccccatctgattctataaggctttaatggatgatctagtctctgtcataaactgtagcaacaaatctgcttgtagactggaccctccactagaaccttattgttgtggttgctgttgattctgttagggctgatttctttgctggtaaaa

SEQ ID NO: 54288 - DNA, 584 bp, Cannabis sativa
atatatatattattatatgattaagcggtggttcatgcacaatataagctcttcatggtgactttaatacaaaagagtgtgacaagagaaattatattttatgatcatttttactttatataatattataatttattaattaaaattaatgatactctatatattaggtttatcatatttaattgaaatcgatagataacatatactatagtctagactaaaaaaaatgtaaatacgaattgagtttttgaaatgagattatttcataaatacacaaaaacaaaacaaaaaaaaattaccaaaatacggttttacggaattttaaacatttttacaagtttttgattttatttacagaaaatacggtcattttatgttgtgctattgttaatttgttgttgattttttgttaggataaatggcagcaaaactccccaaaacttttattttggtttcacttaaccccaaaacccaaatttaggcagtaaaaaccctaatactcgtattctgttagcaatttaatattttcatccattttaagtgttaagtgtcatgttgggcaggacacagtgtacacgtgacac

SEQ ID NO: 54289 - DNA, 1775 bp, Cannabis sativa
aaacagaaggtgagaaacagctggggcaaccctcgctatagccaaacccttcaaatttcctaacatttcttcatgctttaaaagaactgagagcccttcagagcaaataagaaataaatatggtgataacggatctccctgatgaagaccacgctttggaacaaccaaacctcggatagagccattgagattaaaagaaagttgagcagaggtaacacacttcaaaaccaaagtcacccagttaatatggaaacccatcttgatcatgatttccttcagaaaagaccaattaactcggtcgaaagctttactcatatctagctttaaagctgcataacccattctacctccttttttgttcttaagacaatggaccaattcaaaagcaagaagtacattatctgtgatcaaccgatttggtagaaatgcgctttgattttgagatatcacatggggcaaaacatctttaaatctggaagcaataactttggacactaacttgtaaagtactgtgcataaacttatgggtctatattcactcacaagcttaaatgatcaacctttgggataagagtaattaaagccaaattgatggagtccatatcatcacctccattcagaattttcagcacattttgagtaacaagaggcccaactagatcccaatgatgttggaaaaacatagccgacatgccatctattccaggtgatttatcgggagccatagatttgagagcattgtccacatccatagcagtaaatggcataagtagctgctggtttaatttcagagtaatggctgtatgaacagtggagagtacatgattcaaagcctcattatcgaccccatttgaagagaataaaccagaaaaataatgaacaatttcagcactaatttcctcctctgtatgtacaaaacccccagtagaagattgaatccttttgattttattgacatcattccttgttttagcacgggagtgaaaaaaatttcgtattagaatcgccactttgaagccaatcaacatgtgcccgctggtgccaatacaactcttctttctcaagcaactcatcaagaattcggtcagcattttccatttgttgaatatgatcagaagcacttgatttcacattgtgtaactgagctgagttacgatgagcagctgctatatctcttcccatactgccatatttattatgatgccatttttgcaaggctgcagcacaatctgcaatattttgcagcaaagggttcaaagattgatcattagccgatgcattctagtgagcagcaataatgcttctacagtcaggatcctttaaccaaaattgttcaaaaaaaaatctagagtttcttttctaaggaggaaccggttgatttggatgagagacagtataggcaatggctcggtggtctgaatgatagaaatctaagtggtgaagatcttcctcagcaaaaatagatgactagtggttattagtaaaacctctatcaagtctttcccttaagatgttaccgtgatggttcttattagtccaagtgaaaaagtctccacagtaagggataggccaaagattacacagatcaatagtagtgcgaaaattgttcattaaagcatcatttcgtgggggacctccatctttgtcatcattagaaagcaactcattaaagtttcctaaaaccaaccaaggcagaggcggagtagtagaaataagactactcaaagtgttccaagtgttaatgcgtaagtgagtttcaggagcgccataaaaag

SEQ ID NO: 54290 - DNA, 2482 bp, Cannabis sativa
atttattttaaaatttattaattaaataaattagggaaaagataaagtgttgtctgaacaaagacatcgtccctgtcttcttaaggtattggtggcgtcatattcactgtattattacagagtgataggtgcctataaaatatggcgggtgaatttatttttaggttaattaattaattgaaaagataaatatttatttaaatttgaaaaatagttacgaatatttatggtggttgagatattctttcaaagtggttgaaagattctttcaagtggttaagagatttccttaattggttattaaatatttacttcaaacttaaatatctaattcaaaaaaatatctatagcagatcctgttataaatatttattcaaataattaaatatgatttaacttattattttgaattaaattatttatttaaatatattgtataaacctaaaaatatatacattattttttaggaagccttaaaaagattaatctgattaaaacctttttccatcatcacttctaagagttatttcttatgtattgagaataaacaagaatacaagatacactttatcctgataactcaaattatttcttgtctgtgtggtggaagatttagaagactatgatatgagttcttttcgaggatacaactcacgaaaagaaatagggatgccctgataggtttgaaaaagtaaattttcttttcatctatttatttcaaatttaatgtatatacataaggtgatcttgaggatgtggtacgatgataatcaaaaactattactctgttatgcacctaatttagtaccacaaaactaacaccggcagaccccattggagggagattaggagttgatattaaaacctgagtcgggtaggctttcgcatagtgtatcatctttcgggaacaaaggatagtcttcagggggttcccaaaggttaattatgacttgagcctctagatgggtgtgaacctctcagagcctcgagagtgtgcaattcattccctctcttcgccatattacaaaggcaaggtatagttgatgactcttttcatacacacggcaaatgggtctgtccttataaaggagatgtctttgggattttacatctccccatatgcacctattggcggcttactcttgcactatcccatcagccgcaaacacatctagtcttgtctcatcaaactcctacttcagactctactcgatatccattaccaaaaatcatttcctaagcataggggatggccacaatagaccctagctagtaaaaaaagatgtagtgaaatcattggatatttttccattttcacctataagtagagcaacaattggggagaagaagagatccccaacagaaaaactctttaaaaattctattgtaagaacaacattacaagcattaatacaattaacttgtatactaaggctaattaacattccaaccatgtaaaaacatgtttttctttataatataacttagcaagattaagtaattatcaaaagtctcgatcaacaagatctaaaattaaattacaccaagggacaaagccagctcaactagtcctctgggggcaactactagaaaataagtatctattagaatgatgagcgaatatatttatggtatgttacaaaaattataaatttatactaagtttttaacaacttagtttttcatataacaattaattaatttcaaaaatcactatatattgctaaataattataaaaattgaaagtgtgtgagactaaaaatatcattatattacatttttttttatgtttttaattttttttaataaatcatggaattttattaatggaactcaactaaaatattaatctgtaatttaattgggacatcttctcgttgaagatacaaccactattagaattagagaaatgagccaaataattagctgcctaattcgtaaattttttgacaaaaaaataaaataaaatcagattaaaaagattacagcatcacaaattaccttaagagtacctatattctgtttcattcaccgttcagatgatacaacaatagaaactgttgttgtaggttcattcaacatcgtagcttgagcattcagctattgtgtaaggtatgtaactgcactactaacaatcccttcagtcgcagagaactcgttattaccaatcagtaacaatagtttgatggcgaatcatcgaaaaacaaagaagaaccaactacaaaacaaagcaaacaaaatcatgttacacaaataagactaaaacactcaaaactatatcacagagataagactaaaatactcaaaaccatatcataaagacaacactaatcgcggtagcaaaaattaaattgcaatagaataacgcaatcctaactaagccacacctaaatccaaggaagaccagtaggcatgactagaggaaaaagacaacattcaatagctatatatttaagaacgagatatacttgagttttctc

SEQ ID NO: 54291 - DNA, 1078 bp, Cannabis sativa
  modified_base (29)..(37): a, c, t, g, unknown or other
  modified_base (64)..(72): a, c, t, g, unknown or other
  modified_base (98)..(106): a, c, t, g, unknown or other
  modified_base (135)..(143): a, c, t, g, unknown or other
  modified_base (171)..(179): a, c, t, g, unknown or other
tttcttatatattattaaatcggttgccnnnnnnnnnatatattattaaatcggttgccgaaannnnnnnnnatattattaaatcggttgccgaaaannnnnnnnntattattaaatcggttgccgaaaacctcnnnnnnnnnttaaatcggttgccgaaaacctcggtcnnnnnnnnngtgctttcattgagagctgaaggatgcatctacatatagacaacaaccttataagccaaaacaacaatggtggagaatcgcaacacacgtcagccccgtccccctctagacacacaagatcctgaagatgaggaagtggcctcaagaggtaacgttggctctgaggtaggaggaggaaccaacgatgatgaataagaagggaacttcgacgagtacgacgcttatgatgaaggtagttacacaaaactagtcctcttgagacaaaaggctgctgatcatgaagctgaaatcacagcccaaaaagagcaaaacaataagatgcaagaggttatgcttgcccagaaagccatgcaggcggcagggatccatgtatatcctaaagccatccatgcagaacttggagaaacaccagatgagtcctcaccaagcacccaaaagtataagttcggggagcgtagccctatatggtatccctttgaagggaaccaatagaaaaatcctacttccacccccgggaattagaagaaggtgcaggatccgcgaaaggtccgcccagatttcctgaaagggaaaggtccgtagaggggcaaactacaaaaagggagtcttggccctcaggatcgagaggatcgaaacagcatttctgtgcaccagaaacctgaatagagaggaaggaagaagccaaagataccattcctggttgatctaagacatcagattaacggaaaacatggtgacctacgggatcagctgtaccaaaagaagcataaaccggtggtctccacgggaacgctaaacgagggaatgatggctgagcttgccatactacgcaaagacattgctcgagtctcccggagacaaaaaggtgatgactaaaattctgactgtgaggaccggga

SEQ ID NO: 54292 - DNA, 893 bp, Cannabis sativa
atatatgtaatttatatgattaaatgaatataaattctattattggtataatggttttgtattactaaatatctgtatactgatgtttattcgtggtagatgtcagtagtaatttggatctcatcttatgaacaatgcgcgatggtttgattttgattgtgcataaatgacagaattcgaataataaactatatgattattattacttttcttgttgagtccttatgactcacgggtgccatgtggttcaggtaaaggcaaagaaaagctagaccaaccatgaagtgataatcttctccagcaatgtacaaattgatcttgttggcctgcgtgccgggttgccaggagttgttttgggctgtatctactgcgtattagactagtgcctaatgactcctcatctaataattatccacgtgtcgctccaataaaaacacgaataacatttacccctaagcttctgggacatgccatggtctgggagcttgcagtatcttttcttgagggatttttcacgcgcgtggaatttaagacgagtcctttaatatgtttcgtcattagctgccaaactgaagtgttattatatgggagggatgatttctcttttttttcttgttagagtgttaaatgctgagttttggatttctatgcgcgtccaacgtgctggacgcgtatccctgagaagctcaaaatggcagtgattggactcaagaatttttttcttgattgtttttaacgatacacacaatgatgggggccatccattgggatgtgaggtaccttttgagcctctcacgtccaatcatcaaacatctcttggggcgaaacgaagcatcgacttctcatgaaatgtgccccttctagttgtcccataaatacttgcaacgaccatt

SEQ ID NO: 54293 - DNA, 845 bp, Cannabis sativa
cataatttacaattagtcactaaattcttaaacaaaaaccactagaacttaaaataaaactaatatttacgtggcgagccacgtaactctcatctattatactaaaatatatctacttagttattatatattactaaaaattaaaatatttaaataaattaatattttaataaaataaataacactaattttttaattttgttttttaaaaaatatgttgatcgtaatttttagtttcataattatattaacaaaactatataaattttttttgaaaaaaaaaactatataaatttagtatttactatgatgtgttttttgtttacatgtaataaaataaagtatttttaaattatttttttcttttctagaaaaaacaatttaagttttaaaagaattttctattatagctgaataggataataatattacaagatacaatgagttgacatattaaatatctgtacagtgcaaccaataaatattataaaaatacctctttctttagttacctaccaacgtaaggatcgcactagagaaacaaatcaatcccacaggatacgagttcaacaataatgaaacaactttggggaccagaaaacaccataaattctggtgattcgcgacttgataaaaatagaaccccaaatagaaaagtaacctaaaccgattgattaattattttgaagaaaatcagatttgcataaactcaacccttaaaattaatttaaattctgaaaaacttattattgtaaattcaatttatatattcttgttatacccaaaattcagtgagcatatcagagaaagacacgtgtcgagctaggaagaactcaaacacgcaa

SEQ ID NO: 54294 - DNA, 892 bp, Cannabis sativa
  modified_base (843)..(846): a, c, t, g, unknown or other
ctttttacttaataaagagtgctaaggatactatttattacactttcttttccactttctatccaatttgatgataaatatttttgttttatatatgagtatttgtttttgttatttttatattgttttttagttgtttttaaatggctttcaaaatatattttttagttaattttttatgtatgtgtatttttttatagtgtatatttttaactttttttgataatttttttagttgtatatatatgttattttgtggtttagaattttagatacatacaaattatcattttaactatcaccaactcaaaaagaaaaaaagaaaaaaaaaattgaaagtataaagttgtaacaagaaatttcatgagaaaaataatgtagtagtacaaaaaaaaaaaaataaaaaaaaatcaaattgtcaaaattaagtaaaaaatcgtaatacaaaaacatattaaagagttgatattcttttgtatatttcaattatgtcattattttgttattttcttgttactttgtagttatctttttgttgttttataattattttcatattgtttgttaagttgttttagagttgttttgttaattaagagacttgtaaggtctaattaataaataagttaaatgataattttattttgcaattaattataattattaaatagatagatttgaaattgatatttataggattagaattaaaatatgacatttgtgaaaaaaaaaataagttgttaaaaataaaatgataaatttgaaacctatagggcccactaattagaattatgctcactacaacaaattaatttattaggggcgacaaaagtcgcccctaannnnactataaatcgcccctaatgtattttagaggcgacatgtcgcccct

SEQ ID NO: 54295 - DNA, 997 bp, Cannabis sativa
  modified_base (37)..(49): a, c, t, g, unknown or other
  modified_base (846)..(850): a, c, t, g, unknown or other
atctatattaataagtatatctgattatattgaaatnnnnnnnnnnnnnggcataaaacccaacagaaatgacttcgcttgatcttggtgcctacctgggctccccctaatgtcaactagggcaccgacatagttcccagactcaagttgaccaccctaattaatctcgagaggtaggggctagggttgcttttcttcttgcaatgtgtcaaaagtggtgtctacatcatgaggtcaaatttttgggtaaacacttacaaggaatgataaaagtttcctatacaaggtaaaattattcacctctcaaattattatttttgagataaagaatataaatgatatataaaattatatacatactatataattttaattaattagagagtagccacaacatctttgattaaataaaattatgcattattaatctcatttttcttttatctttaagagcaataaattcaactcaaacaaacgtttgaaaaattatctggaatgagaataaattaagaatattcatttgcttctatttttagacgcttaatgcatgcctaagattgtgcaaaagacctaaagttgcatttattttaggaatgtgaagaaatatcataatagtttaagttaagaccactttttaatttcagaaaaagtgataaattatctttaaactaatgattatactcatacatattttattgagatgaactaatattctagaaatttaggtggcgtttgataatacttttttaatcagttttctatttttaaaattggaaaagtgaaaatatttttcgaaaacatgttctataaaactgtttttcatttttcaattttttaattgagaannnnnattttaaaaacaaaaaaaaaagtcactttcaatatttttttaacattttttttttcttaatcaatattttggactctgaccagactcgaacaatctccccccacgaccctgacactgaactcgacctcttacttgaattcgaccgga

SEQ ID NO: 54296 - DNA, 7082 bp, Cannabis sativa
  modified_base (3884)..(3886): a, c, t, g, unknown or other
gcaagatcaggttgttttggaatttaaaatttgtttatgatggatattaagatatttaaatcatattgtctacaaaagtttcccacccatatcattgatctacaagtatttctaatgttatcgcagacaactagttgatctacatggtaaatcacatgcattttttggcaactcttacccatcaaatctgtcagaaacccaatctgcatatgaacaaataatcatttggtcatccctttaaccattagccctgcaaatcgtaagtccacatatgaattgaagtagaatcttaaaggaaaatctacatttaaacacaagttcagaggaaaaaaaatgattgatgagcagaacttactgaaattatgggcaagaatctcaaagacagtttccgagaaaggtctgccgatccataagtatttcaatgaagtgaagtactcaagtttgactaggaagttgtgcaaacgtttcttcatttgggtcgcagccaacaaccatcattttcttgtaaactgcataagcaaggtctggattccctgacctgctataagtttgaatgagagcattgtaggtggaaatatcaggttcaagatccttaagcttcagttcttcatacatactcactgcttgttgtaccattcccgctatcccaagattgagtattagtttgttgtacgtgtaaagatcaggaaaaagtcctctgctttgcatttcagtgtataaagataaagcttcttctaccctttgtgatctgccaagtgcattaatcaaaaggttataacaatgtgaatcaggactaatcctattctgctttagttcctcaaagtgatacagagcatcatcaattttatctagaaagcaaagagagttcaaaagaatactgtaagacttcaagtccggtcttattccttcttcaaccattcttttaaataacttgcaagcagtttccacacctcctgttttcctgaacccatttataagaatactgaaaatttcacagttaggcttgcatccgttaattgccatctcctcgaagaaaagcattacttcatcatgtcttcccaacttgaaaagtccgtcaatgagtaggccatatatataaagtgaaggggagaaattataacgtacatgatcatagtagaaatcgatagccttatccacgctattagatttcactaaaccggaaatgagtagattatatgtgatagtgttaggcttgacacccaaggattccatataactgaaaagtttgagagcctcatccagtctacttgctcttaatagtcccccaatcaagatgttgtaagtataaagatttggtgagactccattcatattcatgacacccagagtatcaaatgctttgtccacattgcctgctttgcataaagcactaataagaatgttgaaagtaactacatcaggagcataaccatcagccttcatttcatcccaaatttcttttaaagtctccaattctccacaatcacttaatctgtccaaaaatttaatgtaagttacccgattaggtttgagactgttgctagctttcatctttacaaacaaagcctttgcattatcaagtttacctgctttacatagagcatcaataaaaacagtataagtaacaacatcaggcttgcatccctcttcttccattttcttcaatagatcataagcctcatcaattctcccagtccttccaagaactgtaatgcatatgttaaatatataaatatctggcctcaaacccaaatgttctatctctcctaacaaacccattacagtttgagtatctcggcactttccaaatgctcccataagtacagcataagttttcaatgatggcttcatcccttccatgaccattctgttgtaaacctccaaagcctccctacaaaattctgactggacaagcaaatagatcaacccattgtatgaatatgcgttcaaaacaaacccagcctttctcatcttttcaagtgcagtcggagcttgtcgtattccacctcttatgtaaagacccttaaagatagatagataagtgttcaaatttcggtaaacaattttcttttgcatgaaattaaaaatggcagccatatcttccaccctcttatgagtcaccaaaacttcaagcacgtaattgcacgtttcagtggtgtgaacagcataaggtaatccagcaacagccataaaatatgaaaatacagaatttgggtccgatgtagacttaagaacccttaaaacctcttctgaagatttcacaactttctccttctccttagccaaatcaaccccttcctttggaattttcattacaaacccacttaaacccattcgtttgctcctcgctttcaacctatttcctaagtactcatacgtgaaaacctttaaattaccaaagttccttcctctaaatgactctctatgactggaagctattacaatctctgtaaaagcacaagtataacaaaaactactacaatacatacttgaagagcagcctgttaacaaaacaccaaaagaactggcaaccattaaaattaagagacataaataagggtccaagcataagaaacaaaaatttgtgtacatattaatgacaattcgattaaattaagttgattctggttagaacatagaaacgaaaacagtatctaatttttttacatatattaaaaacaaaatcaaaacaaaaagtgtcatctgacaaaggaccaaaaccattgtaatattgggaatttgggggcaaaaagagattttttttttttttggaaaatgcccaactcaaaagtcattgccattaagcaagctgaaaagctctaatgaaagataaagtttcaatccaaaaagattcacatcaaactgagcaaagatttttaatccaagttatccatgacaaacacacatgtatagcattcgtagtgaaataggatttacagactcagagagagagagatttacagactcagagagagagagagagatgcatcgaagtagaacaacttttttaaataaataaataaataaataaagaatttagaaagaaaattggcgcagaaaggcagaggacgtttaaatgagacggaaatcatactcatttcttatgtaagtgaatatatgtaagcaaattgattaaattacgatagagaagtgttgattaattaatcctttacccgaaaatagattcaaacttcagtctcaaaactcagtgataccttatggaagatggtaccaaacagcagtgagggagtgagctccgaacagagccactgccaagcacagagaatatggtattgagagttgagaagagtaaagatacagtttttggaaaaagtcaaggaacaaaacgacatcaatgaaagtagacttcatgcgttagagcatctccaaggagcacatctataaaaagccattcttcaaatacttgagcttcaattcggttcagttcagacctcttcttctacctcttctctggttcagttcgaacctcttcttcttctcttctctggttcggttctcttcaattttttacggctgatttagggatttgattttatcccttttgttctatcttttttttttcagaacacttttgttctatcgttcagtaaggaacaaaggtcttaaattttattttatgaaaatttaatttaggtgaggtgacattttaattacttttctgtctagacagaaaattgaaaaagtaaaattatttttcaacaacatgttttcatttttttaaatattttttttttttaattaatattttgtactcggactagacctggaactagctcccccacgactttagtgttgaacacaacttttaatccgaacctaaatccgaccctgaacctaaacctgacttaaataaaatcaaaaannnaaaataaaaataaactttacaaaacatacttttgttttttgtttttaaaattgaaaaataaaaaagattactgaacacatttttatttttcaaaaacaaaaatttttaaaaacaaaataatacttttattttataattaaaaaattaaaaaataaaagtattaccaaaccacaccttagtttatgtttctttgtttaattttaataaatttttagaatttattttttttaaattatttatttatgttttaattagtggaaataaaataaaattattttttaaaaaaatatgacatggcaccattatattacatggaccaactaagagctgacaaataattgagagtagtaacggctgccaataaatggtgaacttggatattttaacctctaaaaaaatgactgagatatttaagtgctacaaatgtgaaaatttaagtatttttatcgtaagttactctaatatacatataattttgatgttaagaatctcaagtagcctcagtaaatatgaattttttgctactcataagatcatcttcaatgattaaattttagatgatacttatatagatttcttatttggcaaaatataagaataatatattattggagttaaatatgtgctatcataaaaaattgtattgatgtcaccacatgacattgatactatctctttaaaataaataaataaaaaattaagtatataagtaacgtgacaatatttataattaaaacaaataatatattaaataataatgtacaagttttaaaactaagagtgtaaaaattaatatgaaagaaaaataaaataaaatattacatttttaaataatatgaaaatttttaacattttaaaaaaatattaacattagagatgctctaagaaactcagaacgctcttgcttgcatccttctgtgttctaataagaaaaacatatataattctaggattgattttttttcttctaaagaatgttcattacatcaattattattttccttttaattttacaatttgctctttaaaacaattgatatttaaaaacaaaaataaaaaaaaaaaaacaaactcttaagcgtatgtaccgtgtatagactttagcatttagtaacagtagatggttcatcacggcattaagtaaccataataaataacaaagaagcaagcatacatataattcagttacgtactagcaatatgttgtctttgtcaatactataatagaaaaccagtatattatatagtgtttattataaaattaaaaaataataagctaatcatgttcttctttcgtattaagtactctaagacgttttaataggtttttactctatataagatcttacatgagagactagtcactcaacctcacacttcaatctgcaagctacctacaagagtatcccaagtgttaaaatgtcactgcaagctgaagcctagagaaataggtccaaataagtatttgacaatttcaacataattgaaaaatatcaaacatagattaataaaatcaaagagtgaaaattaaatgataggcgctcttagcacgtaatacaggatagtaagactaacaggaatataaataaatattataccgttcttgcagcatgaggtttttctctccaataaatctggccttgtcccatcatttgttgccgaaagaagatcgactgaccctgtctcctcaataagaggggacttttacagattcgacaataatcccacaagaaagacagcagaatttcaatgaagatttccaccataacaattttgaacaacaataaggtcctaaaaaatctcatatatgaagcatatacaagctttattctttactttacaattactttagtcagaatcatgtcttctttccttttcctttctgtgcttcctcctgtcgtccgaggaatgacgcttttcatacttatcatatttttcatgttttccgtgcttttctctcttttcacgtttttcatgcttctcgtgtttcctttcatcgcgcctccttttctttctattgctttcatcgtctgattgctgttcttcagtgttttttgttggattaaacaccgggactgctggcatttcaggaatgttctcaacagacgatgggtgagagcttgattccacgtgaggacgattcgctctacagtgagattagaaaaatgttaaaaaagaaaccaaacagaaggcaacacatattttcaactgcacaaaataacatgtcacaagagtcttccgtaaaagtatattacccactagaatctcaaatgaatatatgcttactcacacaaaaatcttaactgctgtagttttagcttgaagtaacacataccttgagaaaccaaggccatgaacatgtgctgcctcagcatgcccttcaccaacatcctcagcagtagaacctcgtttcacaagctctgaaaactcatgcttatcaagccgattcccttgtgagcggtttgcacgcttaggagctaagccaagagcctccctcatggcctgttcttcctcttccttaatccttttgatctcttctttcgcagcttccatgtctgcactctgagcatttttatccctcacataccagtgcaggtccttccctgtaaattttaaattttaaaagaaataacagttaaacattcttttcaaaagcaaatctcaaatactcaaacttggctagtaggagaaaacgtgcaataaacatggtaatgttactactttgctagtactggtaccagtacacacaacagcagggcttcagtttaaatatatgattgctgtaatatagagagagggagggagagtactcaagccaagtctaagtacttcaatattcctatgcaatgagctctaattccaaaagctagaaaatgaatattgacaatatatttgatgacattagaaagggagtggtgtgggaatcctcaaacaacaatatctcaaaacactggaaagaacttaagtttaacataaaatttgattgcattgacaataaacacaccatcggcaccaaccagagtagaattcttcgtagttttggaaaatatggatcttggccagttttaggtgtttgtccacatattatcatacattttgggacactttctacttccagtacaaaagtaatcaaaccgggtctcaaaccttcagttttttctcaggattaatccatttcattattacagcgtaatgt

SEQ ID NO: 54297 - DNA, 2328 bp, Cannabis sativa
tcttacaataatagtttttattttatttgtttttcattttatttgtgtttatgtgtatgctctttaatatgaaattatgacatgctataataattaataaagattgtgtgttgttacactaatactattcttttctataattagatttatgtaattttaaaccgattatttgtaacgctctactaaattagacacgttatcgtatttttaaatattgtgcactcttttgttaattaaaagatttactgaaaaagtgaataattaataattttcataaataaacttaaatacataaatacaatacacattccaagatcccatttacaaagttacatcagttttcaaaatgcaaaagttacaaaaattatcacttagcgactttcaaaataaagtctatctgtctcgaagatctgaacacttcaggtctaacgactcgatatgtacaatcttcatctaacctgaactcactgcaattcagtttttaccttgcccttacctacacataaacaatatatgtgagtcaatagactcagtaagaaaagtataaacataacacaaacatagacaagattataacaggcgcccatactctcaatcataatcctattgtgcatccaacgcgtactaggtcaggaacgttcgtacaaccgtacaattgatcataatatcagcctatactcggtactctaatataaccaaggtggtagcatcaatttgtacttagccaaacatatattcgtcagtattcagtgcaactctatgtacactaataccgctcttgctgatatgttatctactaggcaatcataaaatatgtacactaaacatgtatgcaactatcatactaatataacctcacttctgaatttaagtgtgtcggtcaacatgagtggaaactgctgctcgatgattttaaggctctagtcataatataaatgaactggtaagtgatctagtaaattactttttggggatttagactcaaaattaaaagttttcctatcaataaatatagtggcaataccctaaatatcgagaaaatacaaaaaatgggacttcgggaaaaatacctcaaaaaacggtaggctaattctaaaaaaaaagcaaactgttttttttgggtctttactcgttaaaaacggtaccatttctagaaaaattgtctattgttttctactgcaaattttctaaaaatgtcattctcaaatcaaaactactttaaaacttttacaaagtctcaaaatacctaagctaaataacacattctaacagaaaattacatcatcacacctcaaaaacaaaaaccaccactaaagggtcaagtttgagcttgaaagctcaactcatgcttaaacataccaaaaccaacttaaaacagtataattatctaagaaataactttagaaaatatttccaaacatcactaatttgtacattaaatttaacttaacaattgcatgcaaaaacctagtctttaactaaagaaaacaaagggaaaagatattaccttggcttagctatgaaaatccttagcttcctactaaatttcccttgaacttctggtctgaaaatgaagaaaaaaggtctggtttatgggggtttgcttaagccgaaccaacgaaagagagaaagagggaaatggtttttcttgatttttttttccttttttggattaatgaattccttttaatttgcttaattaagtcaataagttttgaattgttccacaccattaaggtccccactaaagataacttaaggcaaaattactaattcccccatttcttcaccatgaagcaaaattaaacctagaggtaaaatgattcaaaaatataacccctactaatcccgacactctaaatgtctaactttcttgtcccactaattataaaatactcaaccatatttaagaaactctaattgccaaatcgttgcatttcactattatcgaacataaaaatatgaaaaataaaaaatttcatatataacatatataatacacctagaatttaaatttatctctataattgcaaaaataataatttaaagcctatttttgacaataagtcctaattattatctactaatatctataataaatctaagcggtcattacaattatcctcccgttaaaagggtttcgtcctcaaaatctaacctaaacaactctggatactgagccctcatgttgaactctaattcccgggtgacttcctccaccttactaattctccagagtaccttgaccaaaattatggtcttgttttgaagaactttatccttcttatcagggatctacactggttgttcctcataagataaatctgg

SEQ ID NO: 54298 - DNA, 604 bp, Cannabis sativa
ccagtaagggtagttagctccttccagcatgggtggtcgagaggtggaacctccttcacgaaacatctccatattttattttcctgcaaaaggaaaacagacacgaaaacacctgggtaatccctcaagaaattacttgaggactgttagttcgtcagaacagaaggaacaaacaaaatagctaaaagaacagaacaactcaagaaaacacactacacaccaagatctcgatctcagattgagaaagatctgctctgataccaaatgtaaagtctagagtgtcgatttcttgagtgatgaattaacagtattaatccaatttcaaagtgcaaacatagaataaagaacacacagaattacaagcttcgtctgaccctgaaaccacatttcaggcgactattgcttgggttcccttgaaccagggtaataacatccactatgaattcacggatacaatatccagtttctattacaattataccagaaagtaatcagaaattaattcatatggaatttaccccacagatttgaacacactcaaatctgagatgatctacgaactgtagacaactgaaattttcaagcttacaatgctagaaatttt

SEQ ID NO: 54299 - DNA, 829 bp, Cannabis sativa
acacgcttacttttttattttttatataaatatttagatttaaaataaaaaatttatttttatttattttaagtttatttttcaagaattaacgttacctgcttcacatctttccctctctttaatcattttctctttcttatttctctctcatatttaaaaagaatttttagccacattactcgtttaagcctaaaaaaatagtattgtgatttattctttaatgtgaacatttgaagatgtgaaaagcatatattatcccgctattttgagaatcaaagaaactattagggtactcataatactaatcacatactaattagttaccattctttattttttttaatcttaattaacatttattttagaatttagttaattgaattatgttatactatgataattaattagtttttacaataaattaagattatcaaaaatgtatcttaaataatattaagatattataatatcactttaaaataacagtgattaatttagatatctaaaatatttactaataaactatgtgatttattttatttattgtaacaaagtaacgtaaaagtatatatatttatattatgataataatgtgaaagtatcttaaacaacataatatatttaaaaaataaacatatagttttaaaagtaactaattggtatcttatcgatatcataattaaccaactatatgacaagtcattagtttcaaaaataaacttgaaagtaaatcaaatgtattttaaataacaagatactataatataacctaaaacaactaactcattattaagatgtacacaaataaattttggaggaaacaaaa

SEQ ID NO: 54300 - DNA, 866 bp, Cannabis sativa
tccataaggtatgttctcttttcccaaaaattctggcagcccgaggggttttttcaagtgcttcaccattgttagtgtgtgaagctagtatttttttcaattttctgaaactttccccctcttattttgggtgttgattgttttgtgtttcagaggaatggtgggtgcgattttttcgagtgggttgacagggagatgtttcgaaattgtggaggtggatgttgtatccatggagattggagtgggcatgaagtttcgatggggtactgttctgtgcatcaacaaagaacagccccttgcagccatggagtttgtacaaatggagatgttgctactcattgtagtagtcatcacagtcatgcacctttggaagattataatgaaagcacatctgcatttgaaaggggaaaagataattattggatttggtttttaggttgtgtagttatagttgtactctatgtaatgttgttctgaaatgaagaaggttaagaattgtactagaaacctttaatgtatgaatgaatgactcttttatgtatgaatgaattactcttttttattaagtgatattgcatgaattgtgtgggttttgatttataattagtattttacaaaggtaaataatcaaaagatacaaccattaggtttgcatcatcagatacaaagtgtggacaaaagacataaatttgtaccctacagaattgaaatccttatccaaatacacaaagtttcaaaaagacctaatacttgtgctttttaaacaaaatacataacatagtttaatggcatcaaaagggtggacacaaaatgacatcaagtccaccaaattgccacacatgaaattaggtagatacattaggtaa

SEQ ID NO: 54301 - DNA, 1803 bp, Cannabis sativa
gcttcagttcagtagcaggggtttgggagtcttatgacttcttcttgccaccctttgagcccttggcttgggtgacgacttcttctaacttgatatagccacctgctctatcgaggaagttattcatggtataaatggccttaagacaaaaatcagaccacataggactcatctccttatgttcgactgcaagtgcaattacccttgcatcctcgctaagacgtttggtcttagcggcggtctctaggaaacatttgatgtagtccttgagggatttgccttcctttctgaactacacacacatttgtacaagcacttgctgtttatatagagttattaaccaacgattattgttagaaaatagaatcactaactacaaacttcacactataaaccactagtacactaactccattagaataggacaattcttatagactacgacaactattactctactacatattcagactatgcacttcctcacctgaagacatgtgcaaaacatattaattcataaatttatactttctaacaggcgactctattatgtttttcaagggtacagatggcaacctctttcggttggagtcaggcgagtgaagagtgaaatgatccaacaaagagttagcaatgcatgtgctatggaagctttaatgttatatactaccttagtaacaccacaactaaattttttgttgatgcttctgctgtctataggggctgataatgccatcaaaaggggtatgatggagcctgaaacaaagttgaagatggttattgagattgacttcaagtctgtctattgcaagggatatgtttatcattctcatcatcatatttgggttttgtggattattttagttaaatggaatatgatgcagattatcttcataatcacgtcaatctatggatgatccaattgagttggagcaatgaatgagataatagagggattgataggcatgcaaatattacaccatttaacgttaatttacactttacagtgattgatataatatttttttgcttttgtttttgattacatatgatgtgatattttgctctcaatttaactcatatatgagaagtacttgtttattattatatagctacatattaatgtgataatccttctttgtaatcatttatattttttttttcaattttccattctattttagttcctttaaaaattaacacctgatgtgatatcaatttacatctcacccctggtgcgaagcgagaaatttgaaaactaagtaaattttaatagagccgagactctatgagatggaataacattttagaatctttcttagctaggtaaatttgtgacttaacaacatcttataccccttatatattattgtactgacaaatatataaatatataggtgtcgaatatggtgtatatgtatacatcgtgtatacatctagataactcataaaaaactattcatatgacgaaaatttactatcgctatagtaaaagcctattaacgatatcggtagctactgtgaattgcttcaaacccgtcactctaagctattcagtgaaaaatagtgaaacatatctttttgccacaataaccctattttattaatggctaatttggattttcacctcctaaactttgacatgtaccaaatcatgtcttctgaacttttctaaccgttaaaaattcctatcgaatttaagggctgatgtccaatttcattcaattttactaatttagtgattgtttatgtactaaatcatgctccccaaattttaatatctaccaaatcacgcccctcaaa

SEQ ID NO: 54302 - DNA, 1094 bp, Cannabis sativa
agattttgtgaagttgactcaagggaagatgatggtggccgagtataccctagaattcgatcagttttccaagtttgttggtgatctggtaccaatggaatttcacccggaaataaaaatacgcaaggggactgaatgacacaatcagtcgagacttgaagattaccaccgatcgtgacacattataaaagaaagtggtcgagttagccttaattgttgaagaggcagagcaacatgtaattaaagagcaagctggaaaggatggtgtcatggcatcgaaccctactgtgggtggtaataacagtaaggggaccgacagtggtaacccggatcacaaacggaaggttgaaacttccaaaataatgagaagtaatagaaagtttcaaggaaatagaggttgtcgtcaaggttgcgggtctacattcatatcatatccggagtgtcctaaatgcaagacgcaccatcagggtgagtgccgggctaagacttgtttacagtgtggcatggtaggccacttcatcagagactgtccctaggctaagaaagaagaaccaaagaagaagagcaaccaaaactctggccgtctgttcactatgactgaggctgacactgatgctagtctgtcagtggtgacaggtcaattatccataagcggttgttcttattctgtattatttgatttaggagctactcactcttatgtgtcgagtagagtaataaaaagttttcataaactgtgtgatgtgtatgctttggggtttggtaccttgttaccctcaggagacctaattgtatctattcgatggattaggtccttatctttctggatagaaaattatgaattaaccgccaacctaattgagttacaattgtctgattttgatataaatcctgggaatgcatttcttatctaagtacgaagcaacaattaactgcaagcaaaagatgctactatttgaacctgatagtgccaatccagcagtgtttgtggataaaatacaaggattgcacatatcgagaataacacttctgaaagctaaggatctaatgcacaaaggttatctagggttcctagtaactacagtggatactag

SEQ ID NO: 54303 - DNA, 972 bp, Cannabis sativa
aaaaaaatctcacatgcatgggattgtttatctcacccttgctggatgggataaataatatgaggttagctggattagtaacttctaatatgcccaaacactggattggacaaattaaccaatccagtcctgcttatcaaatggaccccaaaatgcaaccgaatgaaaatttgtttcttttccaagggtatttttgccaagtaaaataatccaaaggtaagagcctataagtacaataattaattcaatttaagaggtaaaaaagctttttgtccaccttttaaggttttaattactgaatgttagttttgactttgtcgtttaatcaatctattgagttggtgtaaaatagatattctaaacatagttgtagaaaattaactacatcctacactatagggagtttgacttgatgtgctttgaaaatggaacttaattattgtaatcaaatattaaatatagcttatagcttagaaattcacgggttaagatataactactaatgatatatatagcttgaaaatttaagtcaaataaataaataaacataatgtattattattattataaaaaataaaagggagaggaagtttgttatatatcttccacattacgagcgaggttacaatctgactaagtttgcttcgaaatcaattcatatatgtgtatatatatatatatccaatgtattcataaacttttgagatcacaagttttttttgatagctaaaaggaaatcagatagtgcacatcctatttccacttcttcagtttaatagaaatctcagagaccaccaaaaagttctcaagttctcaagaacgattaatggaccaaatacccaggaatgatgatgttgaggtaactcatttatatatatttatagtaagtagctcttcattttattttctcttattatgtaaatgtaaatgaaaaccattgttttatcagttgtgtaggaaaagacaaaaaat

SEQ ID NO: 54304 - DNA, 1211 bp, Cannabis sativa
tgaaatgagttaatgagtttcatttagggcataaaacccaacatgtacatgtacttctctatagccagcaaccactatatacttgccatgtaccttatttaatgcacccaaactcttcatttgatcttttaccatcaccaatttcctccaataccaactttcctgtgctgaagatttataggtcccccaatccccatccttgatgtatacattgtgaacccatttaacccataggttgtcttccttcttagcaatagcccatacatatttatacaacgcaaccttgttccaatccaaggtacatctaaatcccaatcctcctaaactttttgattgacaaatcgaagcctagggaaccccaggaacacctattaatgtgtattgtccattccataagaaactacgtacggcaaatagactatttcacttacaattttctttcccagaaacattacttggcaccagtaggactgtatggccatgagtactgaattaatgagcactacacgcccaggaaaagaaaagtttctcgtgctccaagttttgattcgagccatcattttccaccaatagcttgcaatctgctgaagagatcctctttgggcaaataggcactcccagatacttgaacagtaggtcctgcttttggaatcctgatacatctagaattcttcgcacatctgcatcagacatattactacaatatacaacctatttggaagggttacgggacaagcctgatgtgtgagagaaaagcttcaatccctgcaacctgtagtatatgctcttgaagtccgctttgcaaaacaatagaacatcgtcagcgaagcttaagtgatttttattattttttttttgtttcatttaataagaaaagtaaaaaaaaaaaatcaaaaatatattttataaatatgttttcactttctaattttttaattgatcaaaatcaacatttcataaattttgataacaaaaaattactttcaaaatatttttaaacagttttttttaattaatattttagactctaaccctaatttggaccttgagacccggactatagctctaatcccactcgcagaccacgactccatgctctaaacccaaacctcgactcaacttgaatatatataaaatcaaaacataaaaatgaaaataaaaataataaaacgtagttttgtgttttgtttgtaaaattaaaaaataaaagt

SEQ ID NO: 54305 - DNA, 1443 bp, Cannabis sativa
tagtgctaattgccttttctaattcatattactagagcggtcattacaactttcttatacaaatatttataacaactcaaaccaatctctatctttttgtttaatttttttaggccatatagacactaccctactcttaaaacaccactttacttgttggaaaacctcatctacaccagatttttttccttcccactgctgctcatttcgggtcttccatagcaggtacaccagggctgctggttaaccagcagctagcaccctcttcttaaacctggagcagctagcctttctcaccttcctcatgagactttgaagtgatctctcccttgtattccaaaaaaactagaccttgacctatgcaagacatgctgcaacaaaatcacagctaaaaaaaaggtgttctgctgtttcaacagccgaattgcagaggaggcaagtatctgtgtcaatcattccatgcttgcgcaatctatctttggttttgcgcctattcatcatagttaaccataatacaaaactatgttacagtgtattcaatctagaccacacttcattgctccattttaccttttcaaactcttgagcaaagcaagcttggccctccacgattttgtagtcatgtgctgagaactcactatgttgtacatggtttttgattttatctttaagctcaaccattttcctccaataccaacttccattcacagaaacttcgtactcccaccacgattgttgcttgatatacacgctatgaacccatttcaccaacaaattgtccttcttcttctctattgcccacacatgcttcaccatggctgctgcattccagtgaggaatatacatcaatcccaaaccccctactttctttgggcaacacaccttttcccaagctacagcccctgctccattcatcaagcttttccctgtccataagaagctcctacatattgcttcaagctccttaatgatttgcttaggaaggaacataatttggcaccaatagatatggatggagagaagaacccatttaatcaataccaatctccccgcaaaagacaagttcctcgagctccaaattgttattcttgctactattttctggactagactactacaattagaagccgagatcttcctagcacaaatgggcactccaaggtacttaaaaggctcattctgctttgtaaaaccagacatgtcaagcacccttctaacctcattctcactcatactactacagtacactgaagatttagcattattaggcaccaaacccgaagtgatagagaatagcttgagagcttgcatcattaagtaaatgcttttgaagtcccctctgcaaaatattaagacatcatccgcgaaacttaaatgattcaactccatatcagcacatctttcatggaaactaaattattttttcttcccaaccttcctcat

SEQ ID NO: 54306 - DNA, 796 bp, Cannabis sativa
ttaattaaataattaaactgagaatattaaaatacggaatttcattcaagaacgtggatgaatgtgcatgaaaattgcgactttcgttctgggcgttcaaggactgatccaatgcgttaaaacccctaattagaacctaggaaacccaataaaaatctccaaaaaccccagaatttttctagctctccaaaaactcaaatctctcttgtataattaagaaaaaaaaactcaccataagagacccgcccctagtggttgatatggacgatttcgaatccctaaattgtcgtgtactggtggtttaaacaaaaagaaataatataacaataaccgattagcttgaacgaatcactccctaaatatcggtttctcaaatacacacctattttttataaataataaaatgttaatgattaataacccataaatagatatttatccgcattatcagttatcacataatttaaactttaaatcataatttaaaataatgcttctatatattacataattaatcataaattattatttataatctttttaaataataggtatatattaaccataccataaaaaaatatgtcaaactatactatatataaagtaattttacaagtattattattattattatgcttacaataagaacaacactcagaaaataaatagttcttttgtcacaactaattacttttaagcattatgcacatgccaagtaattcatctctattaataaaaaaaatattcgtcactataaaacaaaatttatttaccattaaaaattcttagttcacaa

SEQ ID NO: 54307 - DNA, 1204 bp, Cannabis sativa
ttaattttttttacatctaatctgctaatttaattaaatattttatctatttttatttaaatataattgataaaaataagaaatatgattaattcattcattttaacggaagttctttagcacgttttctaccacctaatatatatatatatatatatgtatatttttcaaacatatcaaaggttattcacattgtttcaaattataatttttggtttttgtttcatttaaattcccttgtagatgtcatgttaggtagttatatcatctccaatgctgcaagatacaaattttgtgttaaatttagcaacaaaaaaaaaaaatgttatatttgacacaacctttacaatacataataacataacatatattagtctaaaaagtaaaatatcattaatgattacaataaactatatattttaaaaattattaatgataatattgtaattaaaatatatgtattaaagcatgttataaatgattagtagcaaaagcataattaaaaaagtaatatttatgtgtgttaaatttgatacaatgttatatcttatgctaaatttgacctaatttttagtgtgttaaatttgtcacaacttatagcacactattggagaaatcttttcttaaaaaatgctaaaaaaaataaaaaatacaccacctatatagcacctcatattatctccaatgtaaaatgtaaaatttgtgctaaatttgacacaaaaattaagtttgtgttataattagcccactatttataaatttataattgtgctccaatgtaaagatataaaaaaaatataattatattgatcatcattaatattgtattaaaaatatacaaacatcattattttttatttttttattgcttaaataatggtaatattgtaaataaaaaagataaagttatgtaaaagtcaataaatcataataattagtggcactatattaaataaaaaaggtagaatttgacaatattatatcttgtgtcaaatttagtacaattttcaacatgtgccaaatttaacatattttttaaaatactgttggagtagtattttctttaagtatgctaaaatatagagaaatttgcggtcaaacccctttatgtttatatttgtagacacttaacccccttatgttattttttggtggtaaaactatcttatgtttacttctgttgacaaatttaaagtataagtta

SEQ ID NO: 54308 - DNA, 500 bp, Cannabis sativa
tttaaaatacatcaccaaaattttaatttttttattttacattacatcatatatcaacttctttaaaatacatttctaaaattctattttttcaaattttaatattcgaacatataatactaatatttacacatatctctatataaaagtaaaaattaaaactccaaataattaattcaatggataatattttataaatgtagagcataaatagtgaatttaaataagctttaaaataaaaaagtgtttagagtatatgatgtaacgtgtttttagttaaattctttaaatatattaaaaattctctattttaaagcaacttatttgggtgctcttatgatagtatctaacaatactagtgtcttataagggcaactctaatagcaaaatttaattttggtgttgaatcaacaccgaaaggacactactttttttcaatttcaacctgaagactataaattacacaaaaaagtatattttttattatttttatattaaga

SEQ ID NO: 54309 - DNA, 1225 bp, Cannabis sativa
tggagctcgttctcctaccaagatattggaatggagagcagctgcacaaatactaccagtaaactgcttacagaattttactttgcagtagtaaccaactcttcattagagtaaaaaagaggtagtacccacagccttttagcgtgactgcccaacattcttcaaaggtggcctctacttcgcatgtcaagtaggggttgccatttgatatctacaaccatacttcttattatgtaggcttgtagattcaatttatgtaagttgcacggtaacaaaggcgaattaatgaataaaaagcaatgtttatgttcaaatatgttttgtctaaaccacttgctaataagattaacttcttaaagttattgttttttttagttcctcatacgtacaagaggtagcacccaatgaaaattcccaagcaaggtctatgaaactttggttaattacaattgactaagagactgtaaatctacatactcacttggggggcaccaacaacatacaatgcatcgaactagcatagagaacttatccagaaaaattttaatgcttagtataatttactaaacctgcctctaagttaggtgcatgcatactttagcttggcataaaataagtaaatctagatacttacatgtcaagccaataagaagatagctaggattaaagaccgccaggttggtcacatatccataataaaaagcttcagggctaaatagtagtaatatttaaaaacagagggcctataggccaaaagtatgaaaaggaaagccttaaggatgaaaataagtagtgttcataagtaaaaggctaataggccatgtagaatatgaaataaaatgtctatgctaatgaaatcataaattgaaatactaatattctaaaggtacatatgtggaggtggaggtaggtctgatacagaagatatagagtccggatcgctggagtgcaggtcagccatagcctctataggctggccggccacctggtcaaagtcctagctagccacctcctcagggggtagaccatctccttatcaaactaccccgaggacgatccttctggctagactgcaatctgctcagcttcaaacctgctctcaaatagttctttcccttgggccaatgtgcactcaaggaatgcagcattccccatataagaaagatcaactctggggttgtgcaacttgaactcgtacatgagcttctagacaagatgatgtact

SEQ ID NO: 54310 - DNA, 1839 bp, Cannabis sativa
  modified_base (1653)..(1688): a, c, t, g, unknown or other
aaaagaaataattgccgtgtggcagtattattgtaaaatttgaaaaaaaaacagtatttttgtaagtttcccttcataaaacccctttaatatccaagtaacttaacctatgtacaacctcatgaatatcattcccataggtttagatatttttattagccaacctataatgatgaccgttttggtcattctgtagctattgtcggtccctgaagttctaaatcagtattccctggagtttttctttattgtcagaacaagttttttaaaataaaaccttatttatcttacaattttaacttcatatgcaacctgtcttcctagtactctttatatagtttattagtgtttaaataatagagtttgatcctcaaagtttttatggtgatttacttaagaattcttgtattaatttatgtagctctcttttttgagatataatctagaatatgtttcttttatgatcattaattttttgcatcaaaaatttatatggaaggtgggtttgtggtgatgggatttgagacgaaacaaagtcatcttattcgttcctagaagcaaaattgtagaggtatttgccaatcaattaattgagataggtttaatgtgtcattttgatttatgagttgacagacacatcttcacataactacctaattttatatttaggattcgccagtaattttgtgaacaactaggtatattaggataatttgaatacatgtggtggtgattatgcatttaaagggtgctattgttatagtgtaggcccattttgagaggagacgttaaaaagtttgatgtctctatgaatatcaagggtggccacctatattttggctttcttttttagtaaaaatttgtttgcatcacaataggtgtcatatcggtagttattgatgtaatttaattcgagctttatatatttttataaacgccatatgtcagtatgatgttggacaccttaaggtacataagagaatcaccaatagtgacattcttttaagagtgtcaaaaacttttacatcacttaaaaatatattattttattttatctcttttctatattatttttgacactttttgtttgaaaataatctaatggtaagcatctctaaaaatgattaaaataatatatattataatttaatatatattaaataaataatttttcttataataaaataattaataataaaaaaataagaaaaagacataaatgatgttatggtatgacattcttttgtagcattttttttttttcattccaatggtaagcatcaattaaaaaatgttaaaaatgtatccatgtcatcaaacatccttcatagatgctctaagagcatctccaataatacactatttcactaaattggagtagaattttcacactatttcacttcaatagcacaccaaattatgcatcaaattggtatgcaccaatttaattctacagtactattaatatagttggattttaaatttacactaatttgatgtataattttattttattttatttatttatttttttttgcgttctaacccttattttattttaggctaattaggatttttatccccgaatttttacatgtaccaaatcatgccccctgaacttttttcgccgttaaaaattccccttgaactatnnnnnnnnnnnnnnnnnnnnnnnnnnnnnnnnnnnnattcaattttactgtttcagtgattgttaatgtactaactatgctccctaggggtgttcaataaaatttacaaaccgcccaacccgaataaaccgctcaaaccaaaccgaataaaccgataaaaaatacaacccgaaataatacaataaaa

SEQ ID NO: 54311 - DNA, 641 bp, Cannabis sativa
tagtgtatgatctttgtgattattattatcatgatgaactttaaatccctagtggccaagttatttaaaaacgaaacgtcttcttttttttttcttgataacaataacatataatagaataagttaagctactagaaaacaaaattataagaaagtgacaacaccattacaaaaacaaagaaacaaaaaaggtggggaattcttccaaaagataatagtcaataatcatcacgtgttctttgatgagtgatttattgtgtcttttggtacgtgtggtggatatggcttcacacaaagtgcaaaccaagttaatattggaatacttttagggttaggcaacttggcttacaacactcaagtttgacacgaaaatgatacaaaattttacataagttatgttggtatttggtttgtcttttattagttttttatgtcacaagtcgtatttgtatcagttatttaaaataaatataagaactttacatgtaaaaaaagctttttcgttggttttgaagtggcataaatttttttgcgtcaattaatgtaatcgatagaataattgtagatgcaaatactgttatttgttgctccacttatagtcgacgcaaaaatcagttttgcctaattaattaataactgac

SEQ ID NO: 54312 - DNA, 1020 bp, Cannabis sativa
tttaaaaataaaagtgatgaattcagtacaattgtgaggaacaacgctcaattggtggcacaaggctatacacatgtagaaggtattaactttgatgaaacctttgctccaatagcaagattataatatattcgtttaatattgtgtatttcttgtgttcttgatatcaaattgtatcaattggatctgaagtcatcctttttgaatgaaaagtgaggatgtttatgttgagcaaccaacaagatttgaagatccacattttccagaccatgtatataaatcagaaaaagctttgtatggtctaaaacaggctccccgtgcctggtatgaaaggttaactcaattttaaatttctcatgattatcaaagagatagtgtagaaagaactcttttcatcaaacacaaaaaattagattttatcattactcaaatttatgttgatgatatagtgtttcggtctacatctaatcatgaagtgcaggtgtttgttaacaaatgaaaaataagtttgaaatgagcatggttggtgaacttactttctttttggggcttcaagttagacagatggaaggaagaaaattcgtatctcaaagtaagtatgccaagaatcttgtaaaaaaatttggccttgaatcggctaagcaggtaagtactccaatgagtaccactttgaaattgacaaaagatgaacatggagttaatgtagacactactctttattgtattgtgattggtagtttattgtatttgagtactagtcgtcctgatattagttatagtgtgggagtatgtgctagatatcaaagtaatctaatggaatctcatgtttctacagtaaaaaagattattcgatatgtcaataagtactcttgactttagaatttggtattctaaagacactaattctggcttcgcatgtttaagtgatgcagattggacatgcaatgttgatgatcataagagtacgagtggaggttgtttctttcttgggaacaatttggtttcttggcatagtaagaa

SEQ ID NO: 54313 - DNA, 649 bp, Cannabis sativa
taaatatcacttatttacttaaaaaaattatatgcctttctttacttatatatatacattactatttttttttttaacaatgaactttcattgaaaacacattatactacatgtttattgaagtacatgcaactcatacccttcaatttggcattaattatagtacttatttcataaatacctaaacataacaaaaactatatttttttaatgggtagtaaaaaaattattaacaatttttagacttatgaatataatgataataattttgtccaaaaaaaaaattattaacaatatatataaatataaaatttattattcagttatgtgcattaaaagaaataaaatatttagttagctatacatttaaatttttattactacaaacttaaatcattttacgaaaaaaaattacaaaactgtgcttttaattgcctagtttgttataattacagtaatatttttgtaaattttgaaaaatttcgaatagtttacaatgtcaaaaatagagttcatgatattccagtttattacgggtgttcaaaaaactgtaaacatatttttggtacttcgaaattttttaaaaatttataagaataatattgtaagtataacgaatactaacataaaaaaaatattttaaagtata

SEQ ID NO: 54314 - DNA, 616 bp, Cannabis sativa
ccaccacccactctctttgttggtcgatttgcttgcaggtaacattaaagatgacaaaagaagcatatagaaaactttcttcaaatgaaatttagtttctactttctgttgtatgctttacaatagccaaatttagttgcattctgggatcaattttacgaaactcgatgggaattttgttgggtctcttatcttcgtcgtttttcttgattttgatgggttatttttttttatttataatttttctgggttttggttcggaaaatgggtttattctcttcagtatttggtagagaatatttgctttaattctttctttttgggtaattactgaatttattgattcactgatgtaaaaaggaaaaggaaaaacaaatgttaatgcagtgtttattgatgaactttagttgttactgcttactactagtagtttgatcagaacaatgaattgttatgttttaatacaattctttatgtttcttcaggagtgaaaagggaccccttttgttgttgtataatgtttcccaaaatacctttaggattttgagtagcagagactgtccaactgagttgctcagcagtgcaaattagtttccatgtttgagtgcaaaaaaaa

SEQ ID NO: 54315 - DNA, 1143 bp, Cannabis sativa
atattagagttagaaaagtagaagcagttttgattaaaaataaattaatttaatatgaaccataagctcaaggatctcaacataatgtatacagattaaatctagactaatgaaaagagagacaatacctcttgtagctattaggggatcctcctcgctatctttttattctttttatcgaacatccaatccaataacttgctaaagagttcacactaaaatcttccaagccagcctcaacactcaggaatagattaggcaattagattctattggatgagtataattttgaaatcatagtatattctcaactcatgagatactgtgaagagatagggatgaatacaaaactcacaccaaattgtagtgtgtgtggcgtgcgagtatgaaggagagagagagagatagagtgagagggaaaaattaatccatattttctctctgaaaagtatcgtatatttatctcactatatcacttgtttgttatactgatatagtatatataaggtcataaacaactctttatttaatcctttaaaataaaagatattatttaatttgattcaaatttaaatataaatatcatataacagattaacaaaaataagttaaattcttttattttatttatttttttaattaaataggttatttaataatatattaaattcaataattaaaagataatttattaatttcatttgaattattttaataataaaataatcaaacaaaattaacacgggtctttatatgtcaccctacacgtgtgagctatattttaagatccaaaattaatttctcaattttataacaaatcaaataattgattaattctcattaatctcttatttcacaagaattataaatattattttcactaaaagaatatatttctctctttaatattatttaagaacactattatatttaacttgttaatagttttatcaaataaaactaaatagttaaatactatataattacacaattcgtaattgttagaattattcaaaataataatttttataaattactattgtactcttaagaattatttctcatagaaattgattctcactcaaatttactcatcaaataaaacctttctctgtacagtgttgtatagaggtgacttaggga

SEQ ID NO: 54316 - DNA, 2544 bp, Cannabis sativa
atgttgagtcctcatatcagactctaattcccaagtggcttcctccactttgttattcctccagagcaccttaaccaaagctatggttttacttcgaagggccttttctttcctatctagaatttgcactggttgctcttcataagatacgtccggttgtaactccagttcttcaaagcttaggatatgcattggatcagacacatacttcctcaacatgaaaatatgaaatacattatgcacagatgacaacgatggaggtaaggccaactgataggcaacttgcccaaccttttctagtatttcaaaaggtccaataaatccaggacttaactttcctttctttccaaagtgcttgattcctttcattggggacactcgtagaaagacatggtctccaggttggaatgtaacatctcgtcgtttagggtccgcgtaaattttctgcctactttgagaagctagcattcgagctttaatcttgtctattgcttcatttgttttctggaccaatgcagggcctatgtattttcgttctcctatttcgtcccaatgaataggggaacgacatttcctgccatagagcagctcataaggagccattcctatggtactttgataactattattataggagaacttaatcagaggtaaatacttactccatgaccctccaaaatccatgacacaaactcgtaacaggtcttcaagtatctgaatagttcgctcagattgcccatctatttgaggatgaaaggctgtgctgaatttcaagttagttcccatggccttctacaaacttacccagaactttgaagtaaatttagggtctctatctgaaataatagactttggtaccccatggagacgaacaatttctttcacattcaagtcagcatactgatctactgtataggttaccttaacatgcaagaaatgtgctgactttgtaaaacgatccaccacgacccaaactgagtcatacattcctgtggttctgggcaaaccaaccacaaaatccatcgcaatgtcttcccatttccattctggaagtgttaatggctgaagtaatcctgcaggtcgttgatgttctgctttaatttgttgacaagttaagcacttagtaacataatccaccacatcccttttcatcccataccaccagaaatatggctttaattttgatacattttggtggttcctggatgcaatgagtaaggggtggtatgagcttcatccaaaatttctctctcaagctcagacttatcagggacacatactcgtgctttaaataataacattccattgtcagagattgaaaagtccttagttttgcctgctaagacatcttcttgaatcttaatcaattcaggatcttctaattgagccgcttttattctttccaacaaatctgactgaagtgtcagattatgtaattttcctatcacaaactcaatattagccctagacatatctgaggctaactgggaagaaatcatgatcatattgaatatctaatcaggtccttttcggcttaaggcatctgccacaacatttgcctttccaggatgatacaggatttcacaatcatagtccttgaccagctctaaccatctccgacgtctcatattgaaatccttctgagtgaaaaagtacttgagacttttatggtcagtatagatctcacacctttcgccatataagtagtgtcgccaaatttgtagggcaaacaccactgctgcaagttccaaatcgtgagttggataacggtgttcataatccttcaattgtcgagaagcataagctatgactttatccgcttgcattagcacacagcccaaccctgcattgatgcatcacaatacaccacaaacttctcttgatcagatgacagggctaaaacaggagctgtaatcagtcgttgcttcagctcttgaaaactcttctcacacttatctgaccatatgaaccgttggtttttcctagttaactcagataacgacattgcaatcttggaaaaaccctccacaaaacgctgataataactcgctaaaccgaggaaactttgaacttcagtgactgttttgggtctaggacaattcttcactgcttcaatcttctgtgggtctaccataatcccgtctttttcgacaatatgccccaaaaaagatacttgtaacaaccaaaactcacactttttgaactttgcatagagtttatgatctctgagtcgttgcagatccatgtgaagatgttgttcgtgttctgcttctgaccgagagtacacaagaatatcgtcgataaatacaattacaaaattatcgagaaaatccttgaataccctattcataagatccataaaggctgctggagcatttgtcaacccaaatgacatgactagaaactcgtaatgaccataccttgttcgaaaggctgtcttcagaatattctcttctcggattctcagttgatgatatccagatctcaagtcaatcttagagaatactgttttgccttgaagttgatcaaatagatcgtcaattc

SEQ ID NO: 54317 - DNA, 859 bp, Cannabis sativa
  modified_base (111)..(111): a, c, t, g, unknown or other
gttagtatcatcccttaacttcatggcgtgttgacttaggtgtcgtttggttgggagaaatgaaaatataagttgagaaaaaggaatgggaatggtctttccttccatttnaaaatggaatagtcattccatcaacggtgagaaggccattctattggaatgatattctaatactttaaaatacaaccaaacaaaagaatgatatgaaaattatttcctttccatttcgttccatttcattacctccaaccaaacgctaccaacacttctaagcaacacttttaccaccaacataaaaattggaaacaattatagaaagcatacagttaaagctgtagaaacattgtaaatagactgtaattgagttcatagtacgctgaaactgtagatgtaaaaaaagatcagaaaaactacccgaaatgctagttgaagagcccggagtgtatccctggtgcgctttctctttgatgctatttcgtcaggttctcgcagcatctcttcaaacatgttatctctgttcaagataaaaaacaaagagggtcccaatcaaaagtaaacaataaacaaattaatagaaaaagatataatataaagagtagtttgttcaaaagatctaagatttgatattttgcttgcttgtttttaaaacctaaaatggtacctgtaaagcttcctaatgaagacattgtggagctcacgctttgtatggtttacctagatatatagaaatcaataaagtcagtacattcatgagattcaagcaactttattgtgtacaaacattgttaagacagttgttgataatacagcccacacccgcgcggtagaataaagtgtaaaccacaaaagagcagtcatg

SEQ ID NO: 54318 - DNA, 2252 bp, Cannabis sativa
ttttttatcctatttacaatctcatatacagtataagagtagctgttaaaaaaacaagcattcctattaagccaaatatgatagatgatgacagagcagctagcggcaacaacttttacaaaataacctttgtccaagctttcaatccaaagcttccaaggttcataatcgagaggccaaaatcagcctaaccagtcttgaaacagcttcacaactttgagggagaactcacaccttaaaaataaatggcaatggttctcagccatctcctcacaaacagggcagtcgccttccacactaggaatcacaaatcccaagttatcccttctgagaagcttgccacagacagccagccaaacaatgaaacaatgctttggcacactaaaattgttccaaacaaagttataatttttgaccttctaaagctcaatttgattagagtaaaaccgaccaattttaaacttccaagcatgaccagcagtgtcaatgacctgctgagagaaatgctctcgaaatggcacaatttgcaccaataccaacttgaatcaagattaagttggtagctccagaaattttagccttttaaatagaccgaattgattcatttaacccacaacgtatcttgttgatgactaatagcccaaatgtactcaccaagcatagctttgttccaatttgttccatctccaaaacccaatccaccaaagatttttggtaagcaaactttggaccaagccgtgaggtgaaaattgcttctagatccattgtttccccataagaatcataagcaaagcttgtcaacctctttaataatgcttttaggaagcaagaagatgttcatccaatagtttcgaagctccaagagaaccaaatttatgagttgacatctcccggcataagaaagatgtctattagcccaagaatggagtctaagtttaatcttcttgattatggccccacaatcctccgctttccaattcgttggtctcatagggaccccgagatacttcaacggaagtaaaccttcttcaaactgtaaaatatggagcaaggcccttttttcttctttaggaacaccaccaaaatagacctgggatttgctaatattagcttttaaacctgtacagttatagaagatgtcaaaaatccctttaatataagcaacagaagctcggttagccttgcgaaagataatcaattcatcaacaaaacataaattgatgatcttgaggcttttgcacatgggatggaatctaaattcgttattctgagtcccaaactgaagcaagcgagtaagatattccatgattaggataaaaagcaaaggggagatagagtctccttgacacaaacacttcactccttttaaaagtcccttgcaaactaccattcatcataagcatatacgaagtgtctcgaagacataccataatccagttaatgaacctcgtaggaaaccgcaagttggtaagaaggcgctccaagaagtcccaatcgacagtgtcataagctttgcacaggtctatctttagagcacatctcggggaagtattctttctattgtaattcttgataagatcctgaaaaatgagaatattatgagccaaggatcgacctttcacaaaggcaccttgattttggcctatcaaagtagggagtacttcagtaagcctgctgcaaatcattttcgaaatacacttgtaaagagtattgtaacaagcaataggtctataatcaaccgcttaggaacttcaactttgaacaccaagacaataacaatttcatttagagaattaggaatcctaccagatttgaaaaaatcaagcataggttcaaatatttcatctcccaagtcaagctacattgctttgtaaaattcagaaccgtaaccatccgtcctagggcttttggagctagcaatgctaaagagagcttttttaacatcagacttatggaaatctctgattagattcagctgcatctcaatacttaaacaaagacccttctctatgcattgagaattgaactgagttgaagcagagctaggacttcccaaatagcttctaaaatgctctaagaagtgttttacaacctctttataatcatccatcaactaccctgatcattctggtaggagacaatccaattttcctccttcgttttttaatacaagcatggaaataagagttattgtcatcacctttttgcaaccaggtgatttttctgcattgcacaagaaagcttctgtacat

SEQ ID NO: 54319 - DNA, 1384 bp, Cannabis sativa
ggggacaaactctaacacggtataccccgtgtttgaaggattctgagttagcttgaggttcagaatccattggagtgactcttcgattactctcttccaaattacttccaggagggctttagatcggttttgagagactcttcgtttctggtctagatggcctttttcagatcaagatgattcgaccttggcaattttagcgaattgcaactcattactagactagagttttgatttgacttagttgttgggcgcatgtttaggcctcccttagctgatattgggctttgaaattattcgcgtcatttgtctagaaatttgaataacattcaccccaagacttcggggcttaagagtcgcggaggcttgtagccttcgtttcggatacgtatggagatgtggaattgggaagggaaaggtcctgccgaaattccaaagcaataagaggtggaagttggcggtcctttcatttgcctagtgcatacgtgttgtgaactccttggtttgtgcactccattcgccttgaaaaggcacgtgcaatcaggggaagcaaattgacggttggtctatgttagcggactctcaaggcgtgtgtcatcattttgaattacctcgatcctacataaggcattaaattttgacctttctgttatcttaaccattggatgtatctgtgttttttaggatgtgatatggaccgtcagatcagaagtacacagattgtcatcttactcataaatatagattgagtcgtccatccaccattttttctccacttaagttttttaacctagaatttttcaaagaagaaaaaatcatttaagagaaaggtaactcccaaagcttcccagtgaatgtttgcatattgcgacgaagtacttcgcctcattcttagaatttattcaagggaatacccatgtgcacctctcctaaatctcaacatagatccttcgaattttccagtcgtgagggacttccaactgaaatcgagggattaatcgaggaagttcatgcttttgggtcgaggcttcaatgcttggatcatattccaattgtggtatcatcgatttgcccaaaacatgacattcgaattcctatctcaaaaccttcatctctgacacgttagttcttctttacttcaaacagatgtataacttaatgctggaaattttagatagttgatcatgtatttttagggcgtgtgaaaaattctggtgcataatttttcgtgtagggtatttcttaagggtttcagtgtcttggtagagttttaatgttgattagtacgatttagcttaacaattttagtccgcattaatgatttaatgtcttttgtggattttgtattttttgtcgtccaatcctactatatatatgagtatat

SEQ ID NO: 54320 - DNA, 688 bp, Cannabis sativa
tgttgtcttagatcatatgatctcaatcccgagatgattaatctttaacctaattgttgtattagagttcttggacttgtttgttaccgacttacctattagaatagcccatacttacttcttgcgaacttggtagtacaattgaatgggagcgtaatcatagatatggacatctatagcttctatgtttgtctataagtaaaacgatagtttgcttagagcttggcaaaacgtgataaatagaaggaatatttttcaatgattatattagtttactaaaatatcattgataagaagctaagtgttttaaggataaaagatattgaaggtataaatagtaattatttccctactcgacgtaaaacgtgtatagatgattattgattattgagaaaatggataatttatagcgtatttgtatctgatatataaagaattctatgtaatcaagagtaagattctgaatctataatggagtcatgaagaattaacaaattagggaatttactcaaaaaatttcagatctacttattgggagcttgatttcatacgcccatggtccccatattatttaatttagtatcatcatgtagattaaactaattgatttatttaatcaaatgaaattcaaaaattgataatttcatatttaaaaattttcactaagtttgggttattttgagaagaa

SEQ ID NO: 54321 - DNA, 1404 bp, Cannabis sativa
gaaaactcacacaagggcgtgatgaaggtaataactcatctttcctcatttctaccttttttttatttttttttatcggaaagagactcattctcaatctcagttttcttctctattttttttattggaaatatctaagttgcgtcgccatccggagttccatgcacgaatcttttgttagtcgcaccaccaccaggagcagcaataatacaagccaccaccaacatgctctcgcaagacaagaaaggtattcgtttgtgattttttcctttttgctagaaatttcattatgagttgtggtattttatttctttgatttgatttttctagttcatagttttgtcactttatatttatttattttttctcagtcatgttttatataattttattttagttttttgtagttttagatttaaatctgattgtatcgttattctggtcttattttattgattttacttttctatgatttcagatctgagtgtattctctctgtcattttgtttgcttgagtttggtcttttaaatctacaataattttttgtattttttttcctgttaaatatgttgtatgtatattagtatgtgttatgcaagaatatatattagaaaattatataattctccaagattatttttttcaagaaaaattaaatctgagtattttaaaactttgaattgtgaaaagagaattaataatgttggaaagacatattatctcatatcttattgaaataagaatgtttaattgtttttacattttttagggaaatcatgtagtaacagtttttgtttgtaacttaataattaaaaatcaaaaatatataattattattttactttattaaatatttagaatttttttataatttaattactatattatttctaataatatgttgctttttaattgtagacaattaacctaacaaagaagccaaggctacaacaaaggagaactcaagagatgattattgggtggttctattattttagttttgtttttaagttttattcgctacaattttttttttggaatcggatgattgtataataattttaagtttatattttttttttgtattaacattttggatactcaactaagatgtagacttttttgcattaaattttaatcagatgattctttgatgaataaataatggtaataaaaaaaattaaacttaggacagaattttaaaagggttataacccaacccaaaccaacccaacccaacccgatgcatagtttgttgggttgggttgtacagaaaagaagttttgaatgggttagaaatttctaggccgacgtaattgggttggctcattaaaatactttcaacccggccaacccaacccgtgcacagccctattccttttatagtgtaaagaccgcttagt

SEQ ID NO: 54322 - DNA, 902 bp, Cannabis sativa
tacctactattaagaaaaataccagcattttttacaaacaaaaaaactgaaacaataacaatgtatcaatctatatgtataaataaaaaaaaaaattgaatgcataaaaaaactttcaaaaaattagactaatgagtatattataaactaaaaataaaaatactacttggtactatttttataattatagctattatacatgtcttctaattttatctttctttatttaaaaaatgagtttatatatatagctatatttaagttaaattttacttttttattaccatatgacaaaataaacaaaataaagaaaactaatttttttttttttcaaaaatacgaaacaaagagttttcttccccaaaagaacttctccttaatcttgcaaagcaaaacagtgagtttctcttcatcgtcgataacacttaaaaagagatggagatctgaaatcatcaaccaccaatgatttaaaagctttttgcgatctccatgaacgccggcgaagaactttaggctaatctccattgacgccagtaagaagttttgtttagatgttctgccatggcaacgagatcaccgtggggagatatccatgaagccaacaatgtagtttttgagataaaaaaaaataaatttgatgttgtttagtgtgttttcttcaattattttgttaattatttgttgttgtttggttgatttacatatgttttcagtattttttttttataatttttgaaaatattgaaggaaactactacattgaatttctgggaaatataataagaataatgagtatgtgttaaagtttcaatacaaaaatatgttgctttcatgttgtttttaagtttcatttacgttgttttttcacccttctaaaaataaaagtaaaatgtacaagcgac

SEQ ID NO: 54323 - DNA, 1011 bp, Cannabis sativa
agtcactagttttagttcaaggatttctagataacataatccaagtaatttctcaatttacattatcattattttctgtcttttcttattgatccttcagggcaattatgcttctttcttgtcttgtatatacattagacctcctaatattccatattttttgtttatttattcatctatggagagttgtttctactcatttatatattcctctaacttactggattttctttatctatatttatatgcaggctcgtattgcaaatcttcaggataaagtcgctctgtaaatgtcttgataatatttccaatgcaagtgtagtgacgggcacccatgatgtctctttaatattattattggtgtaatttaatattaagttctatttattttaatttaataaaaattataaaaaactgctaactaattataaaacgtcatttccccataagaatgtttcatttgataacaacaaaaatatgaaaccaattgttagtcacttcaaacttattatttatttatttcataattattattatcttgaaacttgaattcccacttaatcctataataattgggaccaaaatattatagcgattgttatgtggctaccgaagagggactaaaaccttagacgttgtgggtttaatcatttgaactaggggtattaatctaatttaatctacactattttactcatagtgtattcgatttgcactaagtgcaggttttatattttgattccaatctaattcaattagcaatagtgtagatcggattagttattttaaattgattactttttgaaaatttaaaataaaaattattttcacataaccaacaataaaataaaattgttattgttttatatctctaagaacaaattaaaataaacaaataaaaaattaacaaattctaagaataggaaaaaataattgtatatagaataaaaaatttattttagattatatttttgtgatatatgtatgaatatatacattcatatatttttt

SEQ ID NO: 54324 - DNA, 1830 bp, Cannabis sativa
actctgattttctgagatgatggaactcatgagatacttcattcagttagtgagaactttggaaattattttgtagagaacattgcataatgaaataggccgcaactcagatataatctcaggattctttttcttgggaattagaacaacattggtgtcattgagattaagaggaagagtacctgaagcaaagaaatccttgacagtagagacaatatcgacaccaacaatgtgccaaaatttttgataaaaagcagggctcatgccatcgggttccggggacttgtcgggatgcatttagaaaagagcagtctttacttcaagatcagaaatgggcttcaataattcagagttctgttgctcagtgattgaaggctcaatagaatcaaccatctcagaccaattggaagccgtagtggtgaacaggttagtgaaataaccttttataaaatcagcaaggccattatcccaatcaatggactgacctgagttattttttaggcagtggatatgatttgttcgacgcctagttgaaagcagccttgtgaaaaaactttgtattcttgtcacccgcactaagccacatttgtttggaacgctgcttccaatatatttctttctggttgagaatttgattgagtttgctctgctcctcagaataaagtcgtactccatcagcatctcgccgccttttaagattcttcaaggtagctttacaagcctttttacgcgagctaaagttcccagtaatttcagaaccccattgttgaagaagttgcccacaacgattcaacttggcttggagatcaagatgaggagaagaggtccaagtgtcacggatgatttgttcacacataggttcccctatccaggcattttcgaacctgaaacgatgagaatgccgcacctggctcttgaaagaaggctcgagaaatataggggtgcggtctgaagtggatatctcagtgtttgtcaaccttgcaagagagaaattgtttagccatgaatcattagctagtgcacgatcgattctaacttcaatccaattcgaagtccctcgtcctctttcccaagtgaattggtagccgaagagattcaaatcaaaatgagcacagtcggagatgaccttttaaaaaccttcaatgagccaattggggtaagggttacccccttttttatcagcttggctagtgacattattgaagtctccaataaggcaccaaggagaagagttcgaagcatggagagtgcgaaggagttgccaagtatttttgcgaagagccctgttgggttctccatagatgcccgtgagcctgtattttagaggcaatttttaagaacattgagcatcagttttgataacaatcgctactaatattgttccaagcggcgctggaggaaataaaaagctaacctgtaaggaaaaaaacaagcgacgatataggaaccctatagtgtcaattattataaaatatttgacgacctaaaaggagtaacagactcaaaatttttaaaattaggtaaaaatcttttttatcatttattgtaattattattattattattatcattaattattacttaattattacttaattaattttgaagatcatttattacaaaaaaaaattatttattagttaacaaaatttacaatgaacaatattaaaatgaacattaaaataaataaataaattattgcaaataagaatgaaaattctaaataaatggagtccattacaacttttagtttttaaagttgaataaccacttttattatcaatacagagaaattagaattaaactctgagactaaaaatgaccaatttt

SEQ ID NO: 54325 - DNA, 981 bp, Cannabis sativa
  modified_base (671)..(674): a, c, t, g, unknown or other
  modified_base (752)..(766): a, c, t, g, unknown or other
tttttttcttcacaaactttaatttatttataaaaataaaaaataaattaatagtcataaaactaattagaataaaataaatataattataatggaacattatgatattatttaaatttattttatatataagatttcttattaaaaaatcattaattattaattaatagctatggaaatttagattttaaattaattgaattgtaacgttcgtagtgaatattaatattcaaactaattaaatgaagattttttttcttttaaaaatatatgaaatatatattttaatgtatatcatccatattataaaaaaaaataatgtatattacccttaaaatataggccttaaattttgtaaactttaaacgattgcttaagttgtcttatggttaagtcgaccctgagtgtattctattctttatattttgtcagggtgccaattttgggtatttttttttgtaaatactattttaaatattttgttttgtaaaagttatagatgtagctctttattttgttaaaaaacaactttgatcatgtattttttaaaataatataaaatagtacattgagttcaatttttgtcaaaatataacataataatatcctaactttgaagtgttatagtcgacttagttacattttctttggaaaatttacatggtatactnnnntttgctattttttttacaaaaatactgttagacggtggtattttttacttttctactatgtttttttataagtttcannnnnnnnnnnnnnntgttaagttttcactggtgttctaatgttgttttgtagttgttccacatttgttctgttttgtgttctacacagcatttttgaaaatatttccgtgtgacagtatttttataaaacttatcccaaattctagtatttttgtaagtttctttttttgtgtgtgtctgttcgtgctacaatctaattttgggcttgtagcattataaaaaattgaca

SEQ ID NO: 54326 - DNA, 1147 bp, Cannabis sativa
tatttattgttttattattattttgaccttatttattttttcactattttatttattttattatttcgattaaattatgatttcaacatcttaaactatctatttcttttctttttgtatgcaaactctaaatatttaataattacattttacatttttcatgttaaaaaattattgtacaaaagttattaatagtaaaaataatgacaaaaccaattattgtaatgatactctttatttatttgatgatgaacatacattttaaattttaattattataacaacaacatttcaaatctggtcccccactaaggttgtgtacacattttcctccatttttaaaggatttctcaatacatatcttattgcaggtggaatcgtcataatggcagtcagccatgcagtttgatggtagatttattgcacttccaggttctgttattcatttatccattatgttagtataaacataattagtaattctagtatataaatgtgaaataaataaacaatatatatgagaaaaataatgatgtagtatgagaaaaaaaataagtgggtatcacttttactataccagtaaatgtgtttttgtatttctttggtacataaaaaaatattatgtataattttttttttcatatgaaatgatacataataattattgaagtatatataaattttgaataatttataggattaaattattgattaatcaaatagttgtgcttgtatatatttttattttctcataaattctaagaaaagataaatgtgcaactaactatttaaactttaatttggcattgttaattatttataatttttaaaacctgatgtgtgtctactataactacaatatatcattttaaaaactaataaagaaaaaaaaaactttacaaaagttctctacctataggagaaaaataaagctcctaccattgaagctcccatatttattagattaaaaaatattacatataatatgttatatatatatattaaatttaattaatcaacaaataaaaaatgattgaaagcttactcgaaactagcaacaatgcaatacacataaaacttatgatagtgatggtgttaaaagaactcatcttaatttactagacaatgatagataattatattgata

SEQ ID NO: 54327 - DNA, 901 bp, Cannabis sativa
cctaaatctaacaatattccaaatcaaaaaacttaccaataagaaaataacaaaacaaataaaatatataaaattctagaacttaaatctcaagtatagacactaaacaaaaaagagacaacatttctaaattaaagcaaaacagaattcaatttttaagcatttgatcgacatgcttcttccccctcttgacttctgaaattgaactttgatcagcttcattcctcttcgatttttacatcataggacaacgattgagatttgttacaggttcaacaaaatcttgatgagagtcatcatcttcaactataacccgtttctcgttcgttttgttggccaatgatttcacacccattgttgcaggtttagaccttttggaaatgagcttgttaacaatggattttttcacaaatggagatggatatggagaagaagaggagcggctcacaaccatttatacagaatttggtagaagaaaaaaagaaaaaagaaaaatcatgggctagaacttcaattgcaattggaaatcgtgggggagcattttttttagagagaaatctgattttgatcgtagagaactaattgaaaaggaaactgaatatgaaatgaaaaagaaaaaaatgcatggtttatgtgtgtgcaaaaattattttggtaaataaaataataaaagggatgtaaaagttatcttacccttgtaaaggtaaaagtgtaataaaagttgggttatatattttttatgtaaaaatttcaaaaaaaataaaaaatcaaactcccattataatatatttacagaataatgtctacaactaaaatgactttcaaatcaataatttatttctgaaaaaaaataaacttataaatggaataaaaatcaacatcaagcttattttgatcaact

SEQ ID NO: 54328 - DNA, 798 bp, Cannabis sativa
tcttctctcgtttttctttctttctctgttcttgcggttttaggctcggcccgagaagaaggagagattaagggaacccatcccagatctgactgaccccagtctagatctgaccggactcaacctagatctgagtacttccttcccagatccaacagccacctgcaagaagaagaagaaaaatatagtgagatgggcttggcgagaagaagaagaagaacaaaaaaagagatgagatgaatgcttgtggatggtacggtggttagtatgtagtggtggtttcggtggatgttggtggtggtggttgggttcctcgatctagcattagcgtggctcacgcacggagaaagggaaagacgaaagggagcaggccatagtgagagagagagagcttcgaggttctaggtttgtattgcacgaagaaaggggtgtgcagttgtttcgacagtggtggtgacggtgggcagttgtgagggttggtggtggtgatggtagtcaccagttgtggttgatggtgatggtggcttcgacggggatggcggctagggaattagggcaatgagagaaagagagaacgagaagaagagaaagaattagttagggaattagggtttttgttaatttttattttttttaaaattatttttttaatttaaaattttttaatttgttatatgttttcttagagaattagaattgttttatgtttttttttttaatttataatttgttttaaatttttatttgttatttttttatttttaaattaatttatttattttttaattttttaaatag

SEQ ID NO: 54329 - DNA, 900 bp, Cannabis sativa
ccactagaacatgctctggtcccataggtactttcttcatagtatccactatgctggctaggaaaccgatacatccttcacataataaatctcttactttaagcactgagattaagggaatctgagatccttgcactttacccataaatacaaatgggtcctcgccctctggttgaaaagttaccatctttcttttacaatcgattgttgcattgtattttgcaagccaatccatacctagtacaacatcaaaatcttccagatttgactcaatcagatcaattgacagttcttgtccttccacaaacaccagaagggacctaacccacctgctggaaataaccagttctccagtaggcaacaaggtaccaaaactgctcgaaaacacatcactaggtctattcaagttctcaattactctaattgaattataggaatgtgtcacaccaaaatcaatcaaaacggtcaataaggtaccgacaataggaagctgacctatcacagtggaagggccaacatcagcctctacctaagtctgggcaaatacccgagcaggagcaagggtttcatctttcttctgttctggtcacaacagttgtggatagtttcttttcaagtggcccactaccccagactggaagcaagccctagcttgacactcaccctgatggcgcctcttgcaccttggagactctggataagttcaccagtttttgtttccaccacaaatgaaacattggttactttggaatctattgtttagtcctgtagttgattaatcattggtccttttcttgtgatcaccagggtcactacccttaccagaactagcactagacctctgcttccatgaatcccttcttgcaatatttttctttcgtatctgatcttttgcaccct

SEQ ID NO: 54330 - DNA, 1227 bp, Cannabis sativa
gatggtggactataactcaatgggccaattatagtcatatgggtgctctcatgtgcctctaaataattaatagttgttaaccatcctattatgattgtataagaaatattaggcacataattaatgattgttattatggtattatattagtccacaaataaataattctaacaaagaggtcttgttattaatcaatttatctaccttgacttaaaaataggcctttgtatccaaagtctttactagtttgtatactttgcaagtgttacttataacaactgagttccattattacaggcaaaaagagaaattgtggaaaaagatgaatgcttctggctataaagataaggttccagccaaaattcaagaagacaacgaggccaagctgaagtcccttgaacaggagttttcagctctggcattagcaagcgagcatattaaagaaacgtaaaccttgtagacatggctaagaaactagctatttatttaaacacaacattatttatgattctaggtctgcaaattttgctgctacacctttttccttcccagtaggaaagtttttttttttgtcttttttttttgtattggttacattttggttccctcatataaaagttcttgatcatttttgatttcatataaaagaacatttattgatactgcgtatttgtgtctgagattatctgttattacttggaaatgtcaacgtgttaaacattagatttattaattgacataaatgcttatcttttgcatgaattgtacaataatgtgaagcgctagtattctatatatttacagactttagcccatacattatatttcaatgagcaagcatcattataggttgtataatatggccaaaaaagagttactttttatttgctttcacagctttattttaattctcaatattactgttaatagtccccgtacaagagaacaaaaatagaggttgtaatagcatccttttttttgctaaaattgtataatatcatccttctttagtgtaatatcacaactagtgaaatttaatatagggttttatttattttcttttaataataagattataaaaaccgttaagtaattatagagaggttataatattgagataaagatggattgccaagattttataaaatttgtgaacaaaaaagaagcttgtttagtgacttacaaaattaattttgtaagatatttatttagtttgtggtaagttta

SEQ ID NO: 54331 - DNA, 1734 bp, Cannabis sativa
gtatacgatcataagaaaagaattgaataaagtattttttaaaatacaaaaataaataagagttcatccatacacttatgttaaagaagtattgtagaatttttaaaaaatatatatgtttaaaaatttacgaatagtacacgtagatatagttaggcaggaggagcgcagtcgaataagaatggtatttgtagtcataaattaagttgggcttgattgagattcataattatctaataaaatggctctgatcgatattaaggtaatatgtatgtgactttctagggctgggttccaacaagacgcctctgactctagtactactcatcactcgtcgtgatcacccatcccaccatcatcactacttggccaatctacgtcgacatatcactttatgtatgataggtattatcaaaacaaacccaacatatctccctatccaaactaacaaactcaacatatcacaataaaataattaacatacttcaatcctaactttttgcttatcaattttttttatttattcttctgcattaattttcgattcattatctaagatttttactttgaaattataatttatgtattattgtgccccttaaatttttcagcgcattaaaaatagttcatgaactatttatagtaatgtaaattggtcattgtcacacgtgtcaaacaaaatgatgacatactacttagcgagttgttacgtcagtaccatgtcaaggctacttatgtaactaatttgaaagaaaaaaaaatttaaagtatggtaacactttttttaattaaaaaaataaaattattttccataaacatattctataaaactgttttcagtttttaattttttaattgacaatcaaacaaaaaaaatcaccacgaccccaacttgtaccttaggacccacactccggtctcggccccagtcctggacacggaccacgaccctaactgtagaccagaacctagatctcacttaaaaaaaatcaaaaaagaaaaataaagatgataattatagaacacacttttattttctatttttaaaattaaaaaacgaaagtgattataatacatttttgtttttaaaaacaaaaattttacgtaatttttttaattattaattgatttttagtttaattattttttaaaaatacataattttttatattttttaatgttaaattatacatgtggtgctgatatagtaattgactaaacaatcatgtcattattttatttgtcacgtgtgacaaaacttgacaaaatgactaatttatagcgtgaatagctcaaaaactatttgtaacaaattaaaaagttcaaaaggacataataaaacatatataatttaagggataaaaattctaaataacattttccatttcatagaaagaacatataatcttctttagtaatgcaaattccaagagctttaataacaaatcaaacaatttattctccccatagattctctactaatattttaactgaaatttacataaaatatttaaaattacttttttacagatatttttttaaaaaatttattttcttttcttttttttttgaaaaatatcgttatttttacattacaaaaatataatacagtattccaacaacgtgaaaacaatattttttatgaaacaaccaaaaaatagaggttcttatttttgtaaaaaaaaaaaaaagttattaaaaggtaaacacaaaataaatcctttaaaacgtgaa

SEQ ID NO: 54332 - DNA, 4720 bp, Cannabis sativa
  modified_base (4088)..(4088): a, c, t, g, unknown or other
agttagggtttagagccagaaaaattcggattcagtactgtttatccatgaatgaatgtttacacctacagcaatgtcctcaaatttaatccctttcccagcaaaattcaacttcaccctcttgccttcttcatctcccaacactcctacttcttctctcttacccagttcttctctcctttctttttcaactagactccattcacacgcctccaaacctcattaccaccaccaccttcccctgcttgccacatcacctaactcacctgcaccttctgttgacgaccaatctgaagaattcagacaagcccaggaagctcttttcgaatttgtccaagctttcggtgtctcccacgaggactcggccgccatttcttcgggctcgccgcggtacctgcaaatgttggttgatggggttcgggatttggacgagcatgagctgtggagctcgtggaagagcgatgaggaagagaagggattgaagttgaaggggtttaaggagaaggtgagttatatggcaatggagaaaggtgataatggcaaggttgcattcttggagagttttgtcgggttgagtctatcttcggctatgaacgttgccaggtatctctcggctgagacgctgccgggtctcattggcaaggtgagaactaagcgaatgctcctttttctttttttcttcctgtgaaatgaatttgctgataactttattggattttatgtctataaagtttcattctattaatgggttttggttaattaaccaaattatagatgaactttgagtttgtcttttgtatatagccagcaaaaatgacctgaaagtaagcaatgtgcaagatatgctaacgattaatggcctagagtttataaacttgacttgagtttttttcaattaatgcccatatctatttgacgcagttgatatttgtttagtcaattagttgttggtatgagaagctgttggcagattaaaagcttgtgaaattaattgtcttttattctcttatcacaccctcaagttcttatagcaaggagtagttggataattttaattccttctctgatgttttgttgaagtgcatcatttttttttttatagctattgttgaagtcccattgcttatcatccatttggattataggtaaagtatatgaaggaaatcttcttttctggcagtgatgatggaggaattattgggaaaaattcccgtcgtatgatgatgcacttatcaattcccgtagatgacgatttacaacaaacattagcattttttgaaaaggtttgatatctgtctttccaatgaagtgtgatgcatttgcttttgaagctgcaagtttcttttacatttcgaataattgtcaataatgaacttgtatgattaatctaatgtgttgaagtgtatccccgtcttgatgatttttttaatgtcatcaatggaattttaaacttattttgtagattgaagcaagacgtggcggtttggacatgctgggttccaaggatatctctttccgatatctagtggaatcatttcctcgccttctgctgttacctctggattcacaaatcagcaccttggtgggatttcttgaaaagattggaatctctggagaatacatgagaaacatacttcttttgttcccacctattatgtttttcaacatcaaagtcattaaaacgagaatgctggcattcaaggaggtattgcttcataacattttatcagtttcattgtacagaagattgtggatttaatacctccaaatgtgctacaatgaatcactataaatgtaccataattagtaagattatattgaattgcaagttagcagagttatttgacttgcatcatatttttcttcattttttttcttgtatattgatttttcttttgtatatcaacattaattggtcttctggccttaatagcatcctctgcctacaattgagcaattttctgccttgcagctcagcatggatgaaagagatattggaaaaatgttgaaaaaatatccatgggtgatagctacaagtattcaagaaaactacaaggatgttagcatttactttgacaaggagaaggtatactattgtacactgcatgctttgtcaagactcactatgaaatcttttcactcctctacccttgcacccttttcgtttcttgtagggtaacagagcatctctccttgctgtcttaaggaatattacttgggtagtttctgtagttctgcattgctactttacctctgaatagcttctggaacaaacttagaagagtccaacatttgttagtccttgctaagatattattaagaaaccacagttttgtagattttaattatatacttccccaaggagcttaatatccttaccaagtagaagttccttttcgtagcttattcgcttttaagtataagcagtgggcttggtaatatctcctttctcttatgtagccctaacatctggtaagagcctagcgagtaagatcattaccgggccaggcctacatgtttttcttgtgttgtccatttcagataagaacaagcttctatatttgattgtatttgaagaacaaatcggaaaaatatattttatggaaatgacaaaatgttgtttgagtaaccggatagcattttgagataaaaagttgcttttgtgacaggtgcctaaagaaagtgttaatcgtgctatcagaagctggcctcatttattgggttgttctaccagcaaaatacatttgatggtcgaagagattgcaagtttaggtgttacaaataagaaactaggtcaggtcatttgtaaaagccctcaaatattgctacggaaacctcaagagtttaacgaggtagtacttttttaaactatgggataatttctcactttagattgatggatcttgtttcatgaatttttaagtgtaatgtctgatatgagcaaaatgtgtttgtagtgaaagtgcattgtaagttgcatcattttttccatttcatatgaatgtttgtttttttttgggggggagtgtatttattgcttgtactacatacaggtggtttcacttttggaagaggtaggatttgacaaagaaacaattggaaaaatcctttgccgctgtccagaaatatttgctaccagcatcgaaagaactctaaagaggaagcttaaatttctttctgctattggtatttctgaagttcactatccacgggttatcaaaaaatatcctgagctcctggtatctgatattgacagaactctacttccgcggtaccactcttttcctctgaaattagctaatattgttactaataaacagatgtttttctaagtcattttctttgaagacatccaagggagttcattgtctccgcaatgatagttaatgaaattgcagaatcaatttttttttggcaatctcataagagaaggaataaaaatgtaataatctatggtcgtttttctctctgattctggctgaagttttgccatggggaataaaactaacctgggaaatttggtgcacaggatgaagtatttagtgaacatggggttgtctagaagagatgttgcattcatggttcgtagattctcacctctgctcgggtacagcattgaggaggtgatgagaccaaagcttgattttctcgtaaacaccatggagaagccattaagggaggtggtagactatccgaggttcttgagctattcgttggagaagaagataaaaccaaggttctgggctcttaagcaaaggaatatcgaatgtagtttgaaagatatgcttgggaagaatgatgaagaatttgcttctgaatttttacaagctgaaacgacagaagttccaccttccctttcccccttttgaaaggacacaagctttaagaaaagctcaaggtcttcttgtacagtgtttcccttgtgaatagtaaaccacaaatctaaatagtttcattacatttttgtcacaggttttgggtgtatattatatcatttttagagtgataaaaaccattcaaagctctactgaaattgcacttaaaataaaaaattgtgattgatcttcaatatatatataaatatatanatatatatatatatttgaaataataaaagaaaataattttttacattaaaattacaatttagtattttatttacaaaattatcttcctaagataaggtgtcgacaatatttttatttttaataagcttttatttattgaaatataacttacatatcatctcaaattgcatcagtttttcactctttttttcttttttctcatcatttttctttttatttttagtttccattttagtctttagtttctcttccatttcatttctagtttttcattgaaaaactccattcttcccccacgatcaaaacccacttcaaccatctctaacttcatccaactgccaccattttcattcaattttttttttatatatattgttgacggtacttagaactcgtcaaccaaataattagaatttaaaattatctttaaaagaaaaatttaatggaagaatatttgagatagaaatctcataagctttcctatccaaagaagttactgttttgttctccaaaaaaccctcctttacatgagctcaagggtcctatttatagtgagcccttgacactttataattttaccagatccccaatccataggatgtgaagttactttcacacctgataacgttgta

SEQ ID NO: 54333 - DNA, 753 bp, Cannabis sativa
  modified_base (149)..(150): a, c, t, g, unknown or other
ctattttagttcattcattggatgagcatttttgaacttttgtttaactcttagttattttttaatctttgtatattagctattatgagtgctctaaacatattttttttaattatttgtgtatgagaatatgtgtatatattaatatnntatatttgaaatgaataaaatataataaaatttaaaatataggattttggtgatgtatcttaaaaaaccattgtattgtgtaatgtaaaaatgtgttgtaaaataaagaaaataaaattttagtgatgttattttaaagatagagtaaaaaactattgggagtgctctcaccttcatatcttagtgaaatgtagcttgaagtgaactatttagctcacttattagagcaccgaaaatagaactttagctatatatttacttgggaatgatcttaatttttttagggggagtgctcttaatttgatatatatatatatatatatatgataattttatagtaaaacccctatagaatatttcaatataacttttatttgtctcgttatctaagagagcatgttaatataacatgtgtgataaattattgcgtaatttttttttttactgtaaactatataaaatttcatgtggttctaaaaatttacaacctaagactaataatgtcgttttgaatttcaaaacaaaatagagtataccaaaactattatttgtgttatagttttctttttaaagtgttgactaggttcatccatgttccctaaa

SEQ ID NO: 54334 - DNA, 794 bp, Cannabis sativa
taaaatcacataaaaggtataaatattgtctttaccttatggaggtatttttgtaaataaagtgtcaatttatattttctatgtaataatttcaaataataaattatgcaaggaaagtgatttatgcatttttttgatcgattgtgcctttcaagccatccttgtaatttttatcttagttaccctttttgagccttaactttatttctttgtttctacctattttgagcctaaacaagataaacccattaacatccaaaatttgaccctaattataccataagtgaatcttttattttggagaatttgtatgggaaatttgttatatgtgtgtgggaataagtgcaaaaattaagagaatgtgaaaaaaaattgattggcaacaacttgaaaaagaaaaaaaatctgacaataagtgtcaaatttgaagaaaaaaattgaaagaaaaaataaaaataaagtagttgcaatattgttgaaaaaaattctttcatgtaattagaaaaaaatggataccgggatcatttgtgaaagttatcgggtgaattgattggagaagcttatggtatagctgagcccaaatgaccattccatctacccatacctaagcctaacattacaagcctcgaaggaaattttgattcttagttgtacatctatttatattagtggagaatagtgagtattacaagcttatggaatatattgagttagtggattgatggatgtaatttgcatggataaagtgtttcaattgttagttaagtgttaattaaggtgaatcaagagtgtga

SEQ ID NO: 54335 - DNA, 1204 bp, Cannabis sativa
  modified_base (1106)..(1110): a, c, t, g, unknown or other
aggcatcttgtgtatgctgatgtgaaagccttatcacgaagctagttgttcataccgtttcctatatttatgggtaattaatgacatattaattacttgattgccaattatttagtttccgtttttagtgagagatcatcctctgttcgagattctaggaaagtaattcctaatcttgtgcgatttggcagaaacaaaaaataatattgggcttccgaatacacgccgaggacatcttccaaatacacggagatagaccttttggatgctgactaggcttgacggaacctcttttgggtgagttatgttgttgttctctcagaaagcaaaattgatccttggcccagtttatgttatttgagcccattaatgagccttaagcttttatttggaatccacgtgttccttgccaaaaacacgaataacaatacatatataatcatataagacaattatcatactaatttttaatcaattttatattctaagtatgcagtcattacagttgattaagagaatttgaaacatattattgttatttgtaatgagtttgttaatgttatttttagcttttgtttagaaagactaatgggatggttactgtaaagaacattttttttctaaaaaaaaaaaaggagaatcgttttgtcactacaaatttttttactttttgttacaataaaacttgtgactaaaagtaaaaaagttgtgtctaattataaatcattatttttatgttgtgactaaaaagtctgtaactaaatatattactcacaaaaattacaatttgttgtgattaaatatacttttagtcacaatattttgtgactaaaagtaagttaatgacagcttgtatctaaaaattatgttgtagttacaagtaattttttgttgtgactaaaaattacatttagtcataaaaaaaatttggtgtgattaaaagtttgccttaattattttttgtaatacgtcttttaacaattaacttattttctattcttctaattactgtaatggtccatacactatattctataattaaacttgtaaaaaaaaactttaaattttggactatatatgcaatattgaaagggaaatttgatttnnnnngcttacatttggttaaaaaaatttttctaaacaaataataactaatatttgtaagatatgacaacttttatgatatccctaaaatacccccatt

SEQ ID NO: 54336 - DNA, 1068 bp, Cannabis sativa
tctaaaaaaatatacattattatttacgaagttgagaaaatttggggtcaagacagagtgttaaacgtggctcactttcatccattagaaattgaacaaatcacattcattcatttctattatttgacaccatatgttgctatctctatttgtttcttttttctattattgtattcttataatattacaaaataatataggtgttttaagtgtaccatactagaaagagtttcacatgaaatgaataaatattaagatttgaatttggattgttaggtcttggaaacgatgtggttgataaattattgtgcacatttttagcaaggtcatgaaacacatcataaataaaacaacattattaacgactcaatcagatattttatttggtgatcttgttctaatttttattctaaaacaaaaagaaatggtctatggtatttcttcgatctcattgcaatacactaattggtaaaataaggcgataagtttacatatgtgtatttacaattattaggtgatttaagtatgaaaacttaaactcacaatccgaatcctcactctatgtaaaaggaggatgggaactaaaatttgaaagctcataaatcaataaaaataattaattgaatgtaaagttttactaatgatggaactattataaagacttaatatttattattactctccctttaaaaaaaataaaaaattattattactcaataattattttacatcccaaatacttgagtcctcttgctaataatcattatttgaattgagtgtataaaagtttaatcaaaaagtgagttaatatcaatagagtaatgaaaacattaaaccatatgacaaatttattactattataaaactactagtgaattgttgtcatatttttttacattcacttctttcataagtattataatatatatacaaacaaatatttactaaaatattatacttaatgacatggtagtaatcagggccggcccaaatattttaggggccttgtgcgaaatttttaaattgggccctttagaaaaaaaaaaccatgtacattaaaactacaat

SEQ ID NO: 54337 - DNA, 1597 bp, Cannabis sativa
caaataaaatcctatttgattcaatttccacttttacccctctaaaagaaactttcttttttatctctgttgttctcttttttgcgcctccctgttcacatatacaatagtcaagcccaaattaatatattttatataaataaatacaagacttgaaattaaacaaaaaaaatattgaacatatatcatctaaattatcacaagtcacctccttatttataaacatattagccccaaggctactatgtagcagctcttgtgttgtgaacgcaatatatgaaaaaaaaaatagaaggaaaaaaaaaaaccaaccttcagatataggcatgaaaaatatgacttaacagatataaaaagaaagaatagtataagtttttttaaaataaaaaaatattaacacatataatattaaaattaaataaaattaataatcaaaagaggggtaattctagtcatcctcaaaaattaggtccactaaagtcataagataccaagtgtgtaggatttataaataaagtgtatcaagtaatcatttttagaaacatatggcactaaacctgtattttgataaaacactagataccaaatatgtaattattgtttgtaaaatattaaatcaaaaatattacaacaataaaaaaagaaattaattaattaaaaaataaactaatataaatattaaaagaataaataaatcttaaagaataagatcaaaactttttttacttatatcatatgtaataaaatggaactaatctatggatatattctttctcgatcttaatgatctggtagtattgtgggtataaatctttgataatctttgttggcaggtagcaatttagattgaaagagcacttaaagaaaatgagaggaaaaaataatagtctacatatttatttttttgctgattttattttttgtgaaggtagataatcattaaaaaaattatggagatgatggatgataccaattgaataggtaaaaatagagggaattgacacctgaatgagtaaaattataaaagataaaaatatattgattctagctaaaattaataaagttataaattaaaagtaaaataaaatgtaaatgtgtcaccttataaaaaaaatgagagggtgcagtcaacttgagcattttccattagttttataattattttttttaaaaaaattattagatttaaaacttgtttgtataatttttaaataagttattaaataaaactaaatatttaggtgtaataattttaaattaaagttataggtaataattttaaattatatatgtgaaattatttcaaattataaggtaatgtgttataattttaaaatataatgaattttgctataaatattaaaataatttaagtgtaaaaaaataaattgctaaaaggaccttgtttagtaacaaattgaaaaaaaaaaaattaataattataattaatttatttttaaaacatgaatcttaattaaggctttataaggaaattaagtattagtttactatcatattaaaagttattttttatataatttttaaattaatcacaaccattcaataatggtcaaatgactaaaaataaatgtaacca

SEQ ID NO: 54338 - DNA, 1601 bp, Cannabis sativa
aggtgagtaacacgaggtgttgcaagatattgactcagtttattaactgagaaggagatgtccggcctagtgattgtcaaatattgcaattttcccacaattcttctaaaaagggtcgggtcagccaacttttccttttcatcttgtccaagtttgaggttaggttccataggtgtgttcatgggtttgcaacctaaatgccccaaatcttcaagtagttgtaaagcataatgtctttgagagacaaaaatgccttgttgtgatcgagctacctccaagccaagaaaatattttagattccccaaatctttgagctgaaatctttcattcagccttattttcaaggcttgaagttcctcaagattattgcttgcaagtataatatcatcaacatacaccaatagaaaaatgaaatttccattgaaatgcttgatgaatagggaatggtctgttgctgaatgatgaaaaccttcatcaatcaaggcactagagaatttggcaaaccattgcctagaagcttgctttaatccataaagcgatttttgcaacttgcaaactggattaggaggtaattccccttttggcttgtatccttgaggcaaagtcatgtaaacatcttctttcaagtctccatgtaagaaagcattgtttacatctaattggtgtagataccagcctttcatagcagccaaagcaagaactaatttcacagtaactagcttggtcactggtgcaaacgtgtcagtatagtctatcccctcctgttggttgtaccccttagcaaccaaccgagccttgaaacgttcaacactaccatcagcatgcaatttgatcttataaacccatcgtgaaccaataacatgctgatcttctggtaaggaaacaacaatccaagtgtggttgttctcaagagcctctatttcagtatccatggcatgatcccattccggaataccatgagcttggctgaaaaattcggttcaaaatgacttgaaatggccaatgcaattgctcgaaaagctggagacaacctgctgtaaccaatgacatgagataaagggtaaggaataagagatgagccatgagaagataaggcagtaggattagtggctaaaaaacaatggtaatcattaagatatgaaggttttttaatgtttctacctgatctactatgattaaaaggaggcacagaagatgaaataggagtagataaaatagaaacctgatttcgcataccagaaggagtattatttactggtgcagtaggcaaaaaaccagtattacctgactgctgttgtggctgagtcatatcagcagtggacaaaaattcagtatgttgctgctcagtatgcatattattgtgtgaaagggaactgggatgatgattctgatatgcaacatgagtatgacaatgagagaaaaaattctcataagcagcaggtatgccacctgttttaacataaggaaaaatctgctcataaaagaacacatctcttgacataaaaatctggtttgtgtttaaatcaagaagcttgtaagccttcataccagtaggatacccaagaaaaatacatggaacagatctaggagtgaacttagac

SEQ ID NO: 54339 - DNA, 1484 bp, Cannabis sativa
aaatcctatgtttatttgattaatgttagcctgaattaattaatccattatctcttatgtcactaaacaaaaaaaaaaattaaaaaacaaagttacaatccaaacctctttctctctctctcttgagcgaccatagaagcaactaagggaagctcaacattttccaccaatttaagatttgaaatgaattgagcttagaaaattcaagggtttgatagttaaagctaaggaaagtcttttccctttgttttctatagtacaaagtaaggtttcatgcatgaattttaggattttggtttctgtacgaactgattgtttagggtttgttttgctaggttgttttatggttaattaagttaattcatgctggttttgatggcttgggtggaggttaagcatgtgttgagcttttaagctcaaacttaggtcatttatagtgaaatttactacagttgctcgatgataaattttttggttggattaagctatgtatggcttgtttaggtgttttggagctttcaatgtgatttggggttgaattctaggataaatgagattttttgtgttttgcaataaaaaacagcagcccatttttccagaaacggtctactatttttagctgctagagacccaaaagaaaacaaccacccattttatggtattttccctgagaatatcatttattagtgttttctcaatctttagtgtattgtcgtgctatctattgatagggaaacttttagttttgagtcttagttcccaaaaagtgatttagcgtattatttatcagttttacatatgttgtcacttcagggcctataaaccgtcgagaagtagtttccactcaggttgatcggcacagctgaatttagaatcatggtaagattagtataataattacatttatgaatacatgtttagcgtgcatgtcagttgccatcataataacgtattaaggtattggtgaggtatacatagagttgcaatgagataccaatagatatatgttaggcataaaagtagccattaaattagtatatcaaggtatcggtgaggtgtacatagagttgccccaagatgctaatagatatatgctacgctttgtcatacgaacattctagactcagtacgcatggggcacagaataggattacaattgggtgtataggcacctaattataatatggtttatgttatgttatgttttttattttcttactgagtttttcgactcataaatttttttatatgtgtaggtaaaggtaaggttgaacaacagtgagtacgagcagatgaggattgtacatatcggagcagttagacctagagtgttcaatcttcaagataatatgcttcattttgatagtctctaggaatcaacttttgtaactaagcattttgtcaaacaaattataatattgaaaatgggatcccaaattatggaaagtatttatttattcaagtttaaagtttaattaaaaaaa

SEQ ID NO: 54340 - DNA, 1808 bp, Cannabis sativa
  modified_base (343)..(350): a, c, t, g, unknown or other
  modified_base (468)..(483): a, c, t, g, unknown or other
  modified_base (925)..(934): a, c, t, g, unknown or other
  modified_base (1241)..(1248): a, c, t, g, unknown or other
tgtgaagaaaaaagattctagggtttatttgttaattaagagactttgttgagtctaattaacaaatatgttaaatggcaaaattatctaataactaatttagttattaaataattagaattggtatttaagtggttaaattggaaaaatagcaattttgaggaaataagttaaaaaaatgagaaaaatggcaaaattacaaagtgggggcccactatccacggccgtccactagggaaggaattttctactttattttttcattattttaatgctaattaaatctaacctaactttaagttgttttctatatatagatagtgatggctaaagggaaaagatnnnnnnnntcattccttcagtaaaaatttttgagcatcctctcctatacaaaactgaaaccctatctctctcttcctctcgtcaaaaccgaagcctcatattgaaaagagtgagtgcccacacacnnnnnnnnnnnnnnnntcatagtgtgtaaggctgtgaataatccagttttaagagaaggatattcggactcagatcttggtgatactctactacagaaaggttacaagggttagagatctgagtggaaggatacattatattctgctgcaaccactgtaatgttcctgatactttatatgtgtttatttcatatcgtttttgaagttcatgtttaggatgttaaaaagatacttgttagtaaatctagattctggtaaaataattccagcaactagcctcagagccatgttaattgatttactatcaagaaatttggacataaaacgatatatgtgtgatttggatggtttcatgttgatctatgtgttatttgatgattgtttgatgtttgcaaattttgtacgaaaaataatttgaatttttttctgaaattatttttttttggatagtatggaannnnnnnnnnaattcacttttttacaaaactcaatttcaattttatttgaattagtcatgattctttgaaaatttgaaaaaaatcttaaatcgggtacaccccacgtgcgcgcgcggacacgggtgatcactcttgtgcacgcacattaggacagccatctgtctgaaggagcacgcacatgagcgtgtctgaaggcttgctgcgtgcacggaaatgctgctggcagcatccgtgtgcctgatatcagccccagtccgcgcctggatggtatgcaagccgaatgcattttttttttcaatttttttttttcattttnnnnnnnnttttcatggaattaattttgaattttttgtgtagttttgtattttgattttgatttttcaaatttcaaatctaattattagaatcaaattaattaatatttttttaaattaatttaagatattagtgaaatttgaatttgaaaataggtaaaaatctatctttttgcttagtttgttatcgtatttttaaaattggattattttatcttatttttaaatttaaggtttgatatttaatattttaaattatttattatttttttttaataaaatgaccttatttgaaatttaaaataagattattttaatcatgaaattttaaattcaaataagatattttgctaacttttaaattttgttattttatttagaaattaaattataaaattagaaagatgataattatttatcattttattttattgaatatttaattttaatttaataacatgagatttgaaaagtggttaacattttttttgaaaaagatatttaggttagctgaaacctaatttttcaaatttataagtttaattttaatttttttaattaatttattt

SEQ ID NO: 54341 - DNA, 877 bp, Cannabis sativa
ttgatcgagttgaccaggtcaaccgaaacccgccaacatagtcaacctgaccaaccaaaacccaccaacccgtgacccgccaacttgcccacccgtgacccgccaactcgccaacccgtgccctatcaaggttcgttcgggttcagttttattttattgaccttgaaacccgtgaacccgaaactcggtaaacccgctcgatgttcagctctaatgggatgctttggtgaatttcaagaaagaggatgcgaattgtgctccaacttgggttcaaattcacgaattagatttcaagtattggagtgagagagctctctaatcattaggaaagttgggaaaccgagatgaattcatgaaaaaaatagtgtcttaattttacttgagttatgattgaagtgggattgaatcaagattttcctgaggaagtctcattaataattgtagaaaatagtgattcgaattatatgttttgatttcatagaataatacatatttatatacaaagctaggagactaaatatatatctactaaatatctactaaatatctaattcttttacagctaatatatatctaatatctaacatatatgggatgaagaattgacggtcaagctacattatgaatggaaactaatactttgcaatcattgtgattggggcactctaaggatgattctaggaagaagaatatggggaacgatatgttcaaactatttgggtgccaaagaagaatttggggaaggaagttaaggtggattcaactaagaaagtggatcaagaagggtttcaaatggtacaaaaatgagggaaagttaagagcactgtagccataccaaccaaattaactcgggaataattttcaagttcttggagaa

SEQ ID NO: 54342 - DNA, 842 bp, Cannabis sativa
  modified_base (47)..(58): a, c, t, g, unknown or other
attacctccaaccaaacgcaaccttaatgaaacatacttgttagtannnnnnnnnnnnggtaaaatatatccaacagatatcatatccgataaaagcgatggttaacacaagaagaatcccagtcacagcatctgcatctttcggttcccctcaagacccagagattgcaaatcctaatgttcatgttccagccataactagaattcccatgaacacaacagatttggtcaattccaccataatagcaggcaccatgaatctagccacaactgttggccaggatggcataaacatcccagtggatctgagcaatcggcccctacctccaagggaggaccctccacaggcgcctccaactgaaggaagaatccttgggggtgccaccaaggaataacaaccgggtttcgtccccagtactatgcaagagagaaaagactaggaatttgtgagcctattattggcgtgccccacgtggacttgggagaagatcttgagttagccagacttagagaggctgtctggaaagctagcctaattgaagagccacgcgttactgattgtgatgtgtttgctcagtagagacgctaattccttgaagaaccacgcattgctgattgcgatgtattcgttttacagagatgtgaattcttgagatagatcgatgactaagagtacatccttcgatcttgccaggcagagttagattgctgcaaaagagagggcagtgatcttgttgaccgaggttttcggcaaccaatataataataatatttaagaaagctgtaaggagttaatgcacgagagttttacgtggttggggcattaatgaaccttagtccac

SEQ ID NO: 54343 - DNA, 861 bp, Cannabis sativa
tttaatgttgttacagaaaagtaacatttatttttacatttcattgttttttttgttgtttctaaataatgttgtttgacgttattgttacgaaaaataacatgaaaataatataaaaagagtttcgcttttaaaggttaaattttcaagtaaaatcaacaaagtaaactgtgaatatataacaatatatctataaacaaagaagaaaatcattgatctctggccaatttaataattttacatacaaaaatcaagggtctatgattaatctacaaaactttttgtggcttgtaatggttatagaaaccaatcatataataacttttacataatataattaattaacatgtgtttggataaagataacaacagatcctgaatcaaaataacgttccatattattactattactattactattatttattcttggtattgttgattcttgatcaacaatagcactattacttattgttgttaactcttgttgttgttgttgttgttgttgttgttgtacttctagtgacacttgaatcacttgcggtggaggagtagcactactactccgatcgggagccagttgaggtggtggtggtggtgacacagtggaggaggttgtcggggcgatcggattagggtttttgtgtttgggattgggaaaaattgaggatctacaaagtgggcaagttgtgtttgtgtgaagccataaatgtatgcaatctatgtgaaaaacatgcttgcatgatgggacttggagtaactcttctttcattatatattcacccaagcaaacacaacatctgtccatattaattattattagtaactatttatatatgaataatgggacaattatatatt

SEQ ID NO: 54344 - DNA, 2754 bp, Cannabis sativa
gagcatgccgcggcacctgggttccaaacccagaaaaccaacaagcatcccttcgaatttcagcaacaaaacacatccaatacatcccaaatttacatacaactcaaagtcattttccataaattatcaagctcaaagatagggcattaaaatacatataatcatgcatcaaaacccactatattcccaaaaaatttaaattatgcaacattcacaacaaagcttaaaacttgagcaaaactcaacaaattccacaatcaaaagctagaacctccaagctagctttaaactaaattttgcagcaaccaacacctcaaaaacacatggattcaagctagaaaaacactccaaaaatctcatctaaagttcaaccaaaacccaatcaaatcatataatcaaagatttatgtataaacatgctcaaatcataaagagaacaccaacatgcaacctaagctcatcttcaacctatttcatgatctttcaacaataaaattccagcaaattaaaaaaggtcaaagctatagatatctacctcaaattaatccaaaggcaagctcaaagatcctcagttacaaagctttaatccaagcaattctcaagaaatcttaaattttgaaaaataggtttagagaaagagaaagaggggttcgggtttgaggtgtaaaaaccagaaaattcataccttaattactcaaaattccactttttatcaaatatcatttataggtcaaaataaccaattttcccttagggctataaaacacactcacacacatttaagggtgaaaatgtcatttcacacataatatatattcaaataatttttagattatcctcacataaatataatgccaataattaatcccaggattgtatttcgaccccgaacccagtttgacccgaaatacccgattgtgactatacctccccaacttgtcagaacacacctgaaaaagacaacacatgcatactatataataatatagtcctataagcatgttaataaagtaatttcattgttttacccttttcgggtcaaaattactaaaatgccccgactcacctacgaggtcttaacatgtcatatttaatattaattcacatacattaaagtatataagaatataattcctcaataatgcataattatctagctagggttttgctaatctattctcataattctagggtattacagtagtgcttaaattcctctaatcaagtgctagataagaagagtctttgacctcgaaagtctttttcagagcaggatcctaaaatttcttcaagttactctcttgagccttgacattgttggcaacttcttgaagactagttacgctgttctccaggtcaccaatggcttcttctaaatcggtcacccaactctcagcagtagtggcacatttcacagtagctaagagtttctcagccagttgaataaccttcttgtgctcattttccatggtgtatgcatagccaacacaagcctaaaaataaaaaagataaaaagtcaagtgatgatgaatataagaaaactagctgaagagaagatatggagagagtgttaccccaaagatatctgtgaaacatctttgagcaatgacatgtggaggcttggtactgactagcttccccaaaggaatgctctcatcctttgattcaattaaggaatcttggaaagaagccacacaccctacacatgcaatttctcaccatatccaaactagagaacaaaataccattgttagcctcatctagagaaatcttgattagggatgtgggagatccctcatcaacatcaacaactttagacttctccttgctaaaatactagacaggaggagtgacctcagctattttgcttctcttttaagacttcttctttgcatgagtagcaaaagcagtagggataccctgtacaacctccctagctggagtttcagtctcctttggtacattaatttttttcttcaaacaagtttcatggaagctacgaaactcatgttgtcttaaaggaagaaaagacaagtggttagaacaacagaagaaacacaaaaagcaagatagcaggatacaactacaggacaaggagcatcaacaacgtattgattccccaactttctctggcacattatgaataaaagtaatttctccatccctctagcctaagaacacagatgttctccctaaatattgtggttcatttcgaacataactctcatatctgatgtagttctagagagaatgatagtttaactgtagccttcctcttcatcatgttcaagaggtattgtccaagagtcatcaatcaagtgagtgtctacataaactcattgataagacattatcaagaaaacttagcaaatatttttattggtgaacaaagtcgtcccatctctctctctcatgcatcaatttaaatgagcatggcatccgctctcctcttcatgtcaatcaatggagaaggtctcttgaatgggcttgatttttgaaaggtgatgtatcttgagggaaggacgagagtataaaaatattcttgatgataaaggccataatttctcttctttacattctcattgtatggaatgaattgatggaagttgtaaaatccttccacttttcgagtaggacttctttttaagtcataaatgaagttaatttcatagggagttaggataggccagtttcttaagcattaagagatgaaagagttggatgtagccatttgaatttatttagtaaggataaa

SEQ ID NO: 54345 - DNA, 971 bp, Cannabis sativa
tgagatccttaatcctatttataagcaatttggaaagagaattaatcatttcaaaattcaaatttttcaaacttccccccaaaagtatacgttacgcactcattgtagggagtgtaaccgtcaagcatgcgcaagtatcaaaccgtgatttgaggtacaaccgttaattaacattaaatggacagatattgaagagactcctagttagagtaacatcggttcatcatctgacatcgacgacacgagtcacccatccggataagaccctaggctgagtgaagtcccatgcaaccaggaaggtcccgcgcagacttgggggcaaatgttatcctattttttgcaccttaacatggcagtaaggatagatgacacatgtcccacaattctaatacataggcggaggaaaatatccctagcagcccataaatgactactcagcatctgtaacattcagacatccgagcaggatgcttgaagaaatgtccaaccaagatgcagatgtgcttatgccgagcaaagcatgaaagatgacaattcaaagatcaatcttgttgtttccagatgcgaagacaatccttgtaattatgggattgaatcaaataataacatcaacacattctagttttctatttcttgcattataattatagaattaatgtagttttctcttttacttattataagcaaaaggaaaatcatccctcatgtaagaattccctataaatagtggcctaacctcactatgagaggaatcgagaaaattgcttcagaagtacattcaagagagaaaagagtgatctaagagagaaagttactcaaagatcaaattgtaagagctttcgagaggaagaacactttttttcttctctcgtcaatacaaatacaaggggtagggctgtacaaaaaaattagtaaaccgcctaaatcgaataacccgcccaaaccgaaccgaaaaaaccgataaaaattac

SEQ ID NO: 54346 - DNA, 1439 bp, Cannabis sativa
cctagatacaaccctttcttgagggaacactcctttcgttatgtatttgacgatggaatccatccaacccggtccttgctcatttgcagctaccgtttctttgattcttatgtttggctctgcaaggtgttcgacaggtaccacccccggtttctctattttgctattcgaggctaacttgactaaataatccgcgtgagcgttcttttcccgtgggattctttccactctgtattttatgaactcatggagcagttctccgacaattgctacgtaagcggccattttttccccacgtgtctggtattcccctgatacttgattgaccactaactatgaatcgctgaagacttctacccttgtagcccctacgacttttaccaaccttagtcctgcaatgagagcttcgtactcgactttgttgttagaagctgggaatgcgaagcatagggcggcctggagtcgaagtctatctggcgatatcattactatcccaacaccggatccactttcattcgatgctccatcaacgaacaccttccatgcctgggatctgcggggttggtatacttgagctggcctccgcgtcattacatttcattatgaagtatgttagggcttgtccctttatggaaatgcatggaacgtagtgtatgtcgaactggctcaattccatggcccatttaaggagtcttcccgaggcttctggcttttgccagacttgccgaagcggctaatttgtaataaccttaatgggatgggccaggaagtagggtctcaatttcctcgaagccatcaagaggcaaaaaactattttttcgattaaaggataccatgtctcggctcctatcatgtgcttactgacatagtacaccaggtgttggaccttgtcctcttcccgaactagggccgcactgacagcgttcttgaaaacggccaagaataggaacaagtcctctccatgaactggtttttacagtaccagtgttttggccatgtgctcttttagttttttgaatgcctcctcgcattcatcagtccactcgaatttttgacatttcttcaaaatgttgaagaacgggatgcacttgttagttgaccgggaaatgaatcgactcaaggcaacaacctttccagtcaagctttgcacatccttgtgtttcttgggggaagacatgtttagcagaccctgaatttttttggggtttgcctctattcctcgttggctgacgataaatccctgaaactttcccgatttgatgccaaaagtacacttcttcggattaagcttcatcacatatctccggaccacttcgaagcattctgtgaggttgtctgcatggtccatgcatgtcttagatttgactaacatgtatactgttaggctatttttagcctacattttgggtcactttttatagttgttttccatctttgtt

SEQ ID NO: 54347 - DNA, 906 bp, Cannabis sativa
aggaaattatcccatttcccatatcccttgcatttagctcatttactccttttttttttaatttataattaatatttttgctctcctcctcgagagagaaagcattaaaatcaaacccccaacatgaattgacaactgcaatatttgatcaaagcaccacacacttgataaatgcatagttgaaagagaaagaaagagagagaattaactatatagtatagtaacaacagtaaattaataacacaaaaacaaacaaaagaaaacaaattaaagaaatacaattttatttttgagagccgaaagaatccaaaaaaccagcacattgaaactcgaaataatattgaattttctttgtcaagctaataattgcagccccagtggtgtgcatcagcttggtgatgatatgatagagaagaaacagtactcatatttgtatacatatatatatatatattgaatacgatcccctgttccctctcttctagtccacagtctatagctaataagcatataagcatgctctctctctctctctctatatatatatatacatatacatacatgtatacatggtctcctattagttatgatctgtccacactgccagggcaccctatactctctccacctgtgatccctaataccccttatttatccagctattcctacatacctataactctacacatcatatagctgcttcttagctgttctctctctctctctctctctctctctctctctctacacacatctttttcaatcttttttgttctatcaaatttaagcttcctgttagttttattatattattattattgttttattttcaaaaatctccttgtgcatatgtgttttgtctttgacccctccaaacccctaagccccctataaatataacacata

SEQ ID NO: 54348 - DNA, 908 bp, Cannabis sativa
ccatttattttatcattttttaataccaactaattcaaacctaaacctagttggattcctataaatagatagtgatggcctcaaattgaaagatgatgaacacaattgccacacttgccttcagtcaaaaatttgagtcatcttctctatgccattccaatccttcatctctctttctctcttcaatatttcgaaccctatagtgatagtgtaagtgcccacacacatcaagtggtactcaatcacagtgtgtaagactgtgaagaatccaagtcaagagaaggagaatcgggcttagatcttggtgatactctaatacaaaaaggatacaagggttagagatctgagcggaaggagtcatttaattatgctgcacccaatgtgtttaaattacattttattagaaatttatatttagaatgttaaacaacatacatggtagtaaatctagatcctagtaaaatatattccaacagagccaagagagaatgagttgcctccttaattttgatggtccatgggtcaaacaaagagagatctgagacaaagagaaaaacaccatgagatgaagaaaatataaaagaaagaagagaagagaatgggagaagacgatagacttatagagttgtttttgtctaatcaagttcgattttcattgaatggggttgggttgggaggagacgggagtgggacagaagacgaggaggacggaggacatagaaggaggctgggacgaggaggaggccttcagattgaggttgaagacaaattgaatagtgtgtgaatcaatttgggggttagggtaaatgaataaggttagcttcaggggataaaagaagctagatgttttagcatccgttttggagtgaagctagagagttagtgagccttttaaattgaagctaaaa

SEQ ID NO: 54349 - DNA, 1361 bp, Cannabis sativa
ttaagtttacggggtaatatttttggtttttaattttttaatcacaaaaataaaaataaaatttatgtttttaaaaaataaaaatatattccgtaaccacttttattttttaattttataagcagaaaataaaaatgtattctataactttaatttttattttttaattttatttaagtcgagttcaggtctgggtctgagttcgggactggagccgggctagagtatgggtcccaaggtctaggttggggtcggagttcaaaatattgattaaacaaaaaaaaatgtttaaataatttttaaagtactttttttttgttttcgaaatttttaaaattttaattctcaattaaaaaattgaaaattaaaaaacagttttataaaacacatttctaaaaaatatttttactttttaattaaaaaacagaaaattaattaaaaaaatattactaaatgcaccctaaatttttatatatttaataaaagacgtctatagtattgctttatgtttagtacaaacaaatatatttctaaatcgttacaattaagactgagcatgggttggaaatgggccgaccaaatcggccaacccaacccgaaatgggccgaaacatggtcatatttagtgggccgaaactcacatgggttgaaaagggcccaacccgcagcaaatgggttgatttcgggctgaaggattttcaacccaataaacccaaaccgggccggcctagcccaactaaaattaaaaaaaaattaatatacatatagatttttttatctttattctttacctcagagaaaatcctaaacctaatacataatccttcctctctctcctttgtccaagtccaaaccctacagccactcttttttgttttgaaaaaaaaaaaaaactctatcagtgctctcactcccagctcagttaggaggaggaatagaagatcaatcttcttagcctagtcgtgccccctcgccctgcccgtggttgtgcctcccatctagtagtcatctcccacctgcgtcgcgccagctagctgcactaggcaccactgctgagctcttagccgcgccagccagccaccaccgtccagctctccaaacacaccagccgcacctactaacttcaacttgtaagaattttttttattttttttctctttgctggatggaagtaaaagtttgtaggaattagaaaagattaatttcataaagttagtagaatttcttttttctctggatagatctcattatttttttctttttcttggaaatttcaggtcacctatggagttctcctgtcgtaatccatttggtggacatctctttgtgaattcgtagttttaatcttgtgatatttgtta

SEQ ID NO: 54350 - DNA, 1827 bp, Cannabis sativa
ttagggtataaaacccaacaaaacgttctcaaatgaagcagcccatggccttgctaaatttgtattaggggtggatgagacttgtatttggttggagattatccctccgcgtatttactgtgctattgtaaacgaatctctgtttgtttaataataacaagtattttcccttaaaaaaatacatttaaatttatatatttaagaaaaaataattaaaaatatataaaaatgtaaagattttatataacataaatttttatatatttataattataatgaactagattataatagaatcttaatatcatcattatcattataataaaatcttaatcactcacagtattttaaaatttataatttaccaaatattctgctcagtttatttttacagttctgctatagctgtttttccttacagcacaactataactatttttttcacaatacaattgtgccaaactgacacttaatttacgtgttttttcatttcattgcccatatttagcatatattttttctttatttttggtataaatataaaagatagaaaaatgaaaagtatttttgttttgcatttttttaatgaaaaaatcattttatttaaataataaaactggtatcaaaagaaatgaccacattttgtaaatcagtaagaaattttctataaccttcaatgaccaagccaaacaaagagatccaatagacatttaattcatataaatccactaaggattatttaatataatcttaaatggcaaatggcaatctcgcccttacttcactactaagtagccttcacaattaggggtaaaatggttaaaccaaaatactttacataacttcaatattctaactgtccataaatcttatcctgctaaatttaagatactaaattgtattaaagtgacattattggtcaaaccgtcaaatttttactattatcgagcatataacataataatatcaaatttcatatgtaagatgtatgacacacttaaaattcaataaaatgtatataattgagaatatattactaatgtacaatagaatttattttttatactaatgtacatttaatcataaatattaatttaattactaataatttactaattccctgttaatttttttttatgtaattatgcggtcattacatacatattttattacttcaatgaatagtatgtatctaagtaaaaaaatgactatcaattaacttaaaaatattttataatttttttttctatatatgttatttatactatagcatttcattttaataaaatacataaaatatattcaaataatatttaaatgatatcgagaaaaaaaaattatgtatgatataatataaaaatttaagataaaatataaaaaaaaattattacataaaaggtataaagtgacacattatgtataaaaaatacctccataaggtgtggacaacatttatacattttatgtgattttaattaccaaaatacctcttacactatcacttacacaatcagacgatagttgttgcgtgttgcacggttgttgcatcagacaaaggttgcatggtggttggtcgaaagttgcataagacaaaagtttctaggtggttgttgggtggttggccgaagggttgcatcagacgaaagtttcaatcaaacgaaataactgttggcaaaatatttgtgcaactgttatgaaacattaaaaatcggaatagtttttatacatacgaaactctatctacatgtctttttataatttaatatgaacaaattcaccattaaaagaaaacaacgaaaatacaccagtataaatattttactatag

SEQ ID NO: 54351 - DNA, 975 bp, Cannabis sativa
agcaaatgcatttacattttaattatagctgaacattataatttatttatcatggtgttctgacttggactttgaaggcacatgaacataaattttgtaacctttacagccattgattatattaaaatggagcataaacataaacgcataatatgattatgcaaggtaacttagcagtgcaaaggaacaaatttatacaatgagttgtgctcttttgctttaaaggggtctcttttcggttcttggccatagctaagacacatgtattcttattattagtccttttcttttgcagtgagtgttatccaatacataatccgacttaaacaggtcattctcatatgagttgtaggttgtcatatgtaatgtgcatgtacggcatggacttcttatgctggtcactgaaacctttgaagttctagggggactagttcaggttatggaagcagcacgacagcggcttgtagatgaagtaaataagccgccaagaggaataaggtacgttagaggtgataacgccttttaccttttgactaagccaataagctgagcattttgtattctcatgcagagccaggaacagagaacttcctcctttgaggactcgagcaactcttgctgcatggtcatcgagcaatgatcatgttcctgggaacaaccataacacaacatctgatttcagaacccccttacaggtgcatcaaggtaatcttcacccgtgcgcatagagcatgctcagctcactgtacttgctcccaatatttttcattgattgatttttgttttgatatctcgtcatccttttatttttgaaattttaccctgttgaatgtgtgatcaatgaaagagttacatacagaaatattgttttcgaattgtgagtgcaagtgttctctgcaatgaaattcatctcagagattatgtttatacgtctctaacaaattacatcagatggcaagaagtattttatgcaat

SEQ ID NO: 54352 - DNA, 1202 bp, Cannabis sativa
tttttttttttttcaagttgttgcaaataatatattcttgaaattctctcaatattactcttatttcccacataacatgcataaactttcaccattatactcccccaaatttaagatctacttatggtatagttagggtcaaagatatataataatagattcatttttttagctcaaaatatgtgtagaaataaaaaatcacaagtcaaagctcaaaaggataaactaggataaagactacaaggttggcttgaaaggcacaatccatccaaaaatttcctaatattatgcatcatttattatttaaccctcaaatagcaagcaagaaagttctagaatttttctcaactaactttccacatttcacatttaacatatataaaccgatttcaattgttagaaatttactacgtatgcttacatctttaaagtataaaattagaattaattaagaatgcagtctcaccaagcacatggatttttcaaagagataaataagatttcaaaccatgctacataccactttcacattggctcatatttagaagattgactcataacacaaacatgcaaatagacacgcaaaacaaaaaactaaaaaaaatttagttcaatccccaaaatttaaatggcacattgtccccaaagtgacactaaagaataacaaagggaacttatttaagcgccacatcagtatggcagtggtggagttggtggttggtacgggtaccatagtggtggagctaaaaagtaattcagagcatcgaagttcatcgtacacatagataaggtgaatttagttcttgtacttgtcgacaagcgaatttattttgttgctcgagataggagttataaaatttagcttgagcctgatttgtttggattatatattgatttcggtgaatgatatagtccaatcaatcaaaggtaccctatatccttgagtccaatggtggctcgagttgtaacaacaaagggatagtttcactaggtcccgcttcattgtcctcctatccttcatcaccatctcccttgggttgatgatcgcctttatggcatttttgtgactcttctagaggtgtaaaagaggtcgatggaaaagcataataatgtcttcgagaaatcatattcatggggggtagtctagtcccttaattatccgatggtgagagcatgaacacaagaaggagagattgtgcata

SEQ ID NO: 54353 - DNA, 3313 bp, Cannabis sativa
aatcccacttattacttgattaactcataatataaatataaaccctaattatttaccattagacttatcgggatattataaatattcttgccacaaatttattggcgatgggagtccctatgaccagagggtcatggtgagggaaatgcacctgtttggcatcttcttctgtgaaagtaatgggctggtccatgagtcggggcttttgtgctggaagctgagtgacttccctcacttcatcgtgttttatggctccagcgtagcgctttaactcttttttggtggttcccccatatggggcccaccggagatcatgaccactctcccattaggtcttgatggtaacctagggacctgttgagggattgctcctccggggggtacaacgggtcctggtgctccgggtataccccttggcgccccttgaggtaacgggcctcctactggaaccgagtggagatggggtagtcgattcttaatccattcatataaatgacccaatcagattaagttttcgatgtcgtccttcaagtttttgcattcattggtactatggccaatgtcgttgcggtattcgcatctcttgctaggatcccttcggaacctgtccctatacaggggaggaggcttccagtaatgtgtattttgccttgtggcaaaatatacctactcctgtgtgtccatgagctccatgtattgagtgtactaaggggtgtatcccctccgttgtcacttatcctccgtccggttgctaccctttgaggacctcttgctccgggagctttgaggaggtcctatcaggcttgcagtaggtgcggactgagacggagcttgaccactcatccccaaggggttgtgtatgggattcccaaagtgtgatgatgtgggagccaaggataggctctgattatatcctggtgtagcggagaattgtatgccgctcatttgaggagtgaccgagggcatggctcctgggagctgaactccgggtacatatcctgacactcctgtcggatagtatcccccataggccattatctgggcttcttctaaattgatgtacttttggaccctcttctagaagtcttggagattggttgccccctcctgttgtaattcgttctagaatggggttcccgtacggatcccagcttaaagaagtgcaagctattgtctgtcatccaccttcttggtctttgaagcttcctctttgaacctttttataaagttctttaaggtttccgcgggcaattgctttattttagtcagggcgctgacttcgagattaatctttctcactgcaacaaactatctctggaagctgacttgtagttagttccagcagtccactgatcctggttctaactttttgaaccattcctcagcggaaccacttaatgttagcggaaagcatagacacttggcatcattgctgaccctcatgattgtcatcacccgcttgaagcgggataaatgatcactagggtctgagtctccggtatatgctgccatctcaagaatcttaaaattcttggggagctctgcctctaatatgtgtcgggcgcatggctcccagtcctcgcaatcgaaatctgagtcgtccccttattgcctccgggacaccctagcaatgtctttgcgcagcgttgccaactcagccagaattccttcatttagttttcccgcagagaccgctggtgcgtgtttctttttgtttaggtgatctcgtagatcatcgtgctttttgttgattttttgtcttaggtcaattggagggtatctccgttctttctttcctctctctccaggctcctagtgcatagatacgctttttcggtcctctcgatcttgagggccaagactcgctttagggagcttgcccctctgcggacctttccttttcggaaaatctgagcggactttctgtggatcctgaacctttttctttctcccagggattgaagtgggatttttcccatggttttccttggaagggtactgtataggatttggtgccctggtcttgggtttttgagtgctcggtgaggattattccgatgtatctttgagtcctgctgggatggccttagggtgtacgtgaatccctgtcgtctccatggctttttgcatggcgaccatcacctcttgcatttttctattcttctctttttgggctacgatctcggcttcatgatcagcaaccttttgcctcaagaccagtaactccgtatagctaccttcgtcgtaagtgccgtactcgtcaaagttctctttgtactcctcgtcgttggcctcatctcgctcctcagagcccacgttcactcttgaggctacttcttcgtcctctaggttttgagcatcctgaggaggactgggctaacgtgtattgttgcgagtttccaccattgttgatctaacttttctaattgttgtctgtttgaagacactttcttcaactctcaatgaaagcaccaaaatgttgaccgaggttttcgacaaccaatcaaataatataatgagaagtgttgtagaaagtttaatgcaggagatttttacgtggttggggcattaatgagcctaagtccatagtcttttgttatttatgagagtgtttggatctctctcctcttttctctatttgattccttaattgaaattgatcgaccccttttcagtctgtttgtggggtatttatagtgtttttctagggagatccctaggaagggatcacttgtctttgtgtgttagcttcttaggggcacatattcctagcagatacaaaaaaggaaatacatgacctataccgtacgtatcttaggggttatgtggatataaacttttatcctctctggactgatgtgattcctcatgatgtagccgtcactagacttatcgattgttgtgtaatcgccgtaaaaagggcttacgccatctgtcatatcttttatggaggttccaatacgttttcccccatgcagcgttaaatgcgaagtgattgttcaagtaatctccttacctcccagaaatgccttagcatggctctagcctcccggagagtaaagatgtgtcttatgctctcctccgagaggcccactccatgtggtgttcttttttgtctaagacttagttgattttcgtgagtggatgttctttcagatccacgtgtcacccttatccgcgtccacgtattttggaaaaaaccaaaggcaacatatcttatttcacaatttgttacatggatattgtttgtttatttaaattgtttattcaaaactttattttaacaaaactgttatttatttgatctaaattg

SEQ ID NO: 54354 - DNA, 1121 bp, Cannabis sativa
gactactgtcacaaaaaaaaatgacatgttaattgggggaaattgtgaagagctgaccaagcatcttgaactaatgaggaatcaagaatgcaaagacatgtcatattctaccactattgttggtgaaagctttgataacaactctaatattctgtctgtcatagttggtgaaaattttttgactcttggattttggattttagttgttcgttctacatgtatccaaatatatagtgttttgatacttacaaggcatatgatggtagtattgttttgatgggaaataattgtagctctaaatttgttagaatatgtactattaaggtgaagatatttaatggttttgtgagtatattgatgtgagacacattacatcattaaggaggagcttaatctctctgggagctttgaatactcgttgttatgactattctacaaaaaattgtgaaataactatcaagaaagatgacttggtagttgtgaagggtcaaaaaaagtataatttgtataaattagtggggaagactataaggtggagagggtggagttaagtcacagaaggcatttagttagaatgaaggaatacaataaggtggagaggacttcaattttagttaaaggttgttcgaagaaagaagaaatgagtgagagattgaggaatatgtgaaaacaaattaatgctcaagtgaaattcagtgagcgtatgagcgtatgaacttgatatatatacttttattggtagttggagttgtgagtttagagaatttgagtcaaagtggagattgttagagtttgactcaaataaaatttgttttatattttatgaagttgtattttttcattttagtaattattaattgtgtaaaaaatgagtcttagtgaccaaatttaaagtgtcttggagcttaagcttattttttctttataaatatgcgtaagagagaggtatgtgtgtgtttgagaaagagagttagttgtgaaggagaaaagagtctctgaaggagaagtgagtatgagaaagtgatagaaaaaacaaaaagtttattcaaatttaagtggagagattgaaatagaaaatataagcaaattgaaattacaagtaaaatacagtataatttcct

SEQ ID NO: 54355 - DNA, 2739 bp, Cannabis sativa
tgccttcatcagtctgaatgaaaaaatcttgtagtgtccctaccgattgcactgccagttgcacctctgcccatggtgggagctatgattgtacggcaagcgatagtctgtccatcaactttagtttgggcgatggtatgcctagtggtggtgtttcctcgactaccaggatgtggcagtcgctcgccacagtttcaggaaggttctcaccaataggacttggtgggcattgtcaacaccctcctcagttcattctttagatgatcttttggtaaacaccattattttcggtaaaagcttcgagattttggcttaagctctcaatgaaagtactaaaataaaatgttgattagttttttagtcaatcgacacggggtcttaattaatgagaataaaacaaaaaacatgtaataaatgctaataaagaacacaagaatttaaaggttcagcctcaagtgttggcaatagcctactccccttgtatcttattaatctgggttgtaagtcaagaacaagctcctcagtgcaagaagtaaaaatgatagagtttttccttgtgaatgaattttcgatcccctctctaggtcaagtatgttgccttatatagggaaatggatcatgcacttcgcttaaggaggcatgtcctaaggttcggttgaatcccaactacatgagagaatatctcaactatccctgtgattctcagaatgtgttaagactcgattcttttggtgacatacaactttttttgtggatttgtaacaacttttgagctttcagtgggattggacatcgtgagtgtgtctccttatcaagtgctgggaaaaataatcaattgggcgattgtccgtatgggacttgaccaagtcagccttagggggacgctcagccttggtcaacccctaaagggacacttgaccttgtgtcgttaccctcaggacatacacctttgcttcttactttgatccaattttgggactctacggtctttgtcatgtgttactttgacacttgtagttatatggagattaaaccatacgaataaacagatgttgagtacacgggatgaaccatgggactttgaggaaataggccatcacccttgtccaagcagggatagggtttggtaccaaagttataggaggacgggtccaacaccaccttgatgacggaggactcgacttaagctgacccctaaggggtactcgtcttgagccgacccctaaggggtactcaacaaagactgacccttaatggggtgaatgtggaccttgagcaagtaaatcagcaaccatgtcgaagtggagatagggtatggtattacagttgtacgaggataagatgggagccaacaccccttgttgagggtggactcggccttggccgactctcagtgggggactcggcctaagttgttccctaagggggtactcgacctaggctgatccctaaaggggtgactatgtcctagtctatatttttcaaggacccttcatactaaaagttcacctatggtctataaggattgtaccctttgccctttaataattattccttatataaggtgattttacattttcctcaggaatttatctcttctaaccttatgtcatatatcattatttttactgcatcacccttaccaaaataagagaaaataatttattttagagtttatgctactacaaagtaataaacttttaattaaatatatcaaaaaattaaaatgatctgaaaaaaaaaaaaaaaactacatcatcatacccctacttagtggcagacccataaatgacaaagaaattaaaaaaaaaaataattatgtacaattataataggtgtggtcaatctaccgtattccgtactctctactccctagtggccatatgtataacatttagctcaaagtaaataaatttaatatttgggcccccctattcaattctttggtagtatcatatgttaaattaatacaattaacatgtagtatcatatcaggcctatctatgagtctatgaccacatcaatgttaataataaagtatttgaagtacatattctctctttctagatttttttttttttttttttgaaatcacatattctttctttctaaaagaaaaaaaaaagttattttatgtcaataaaaccctaaacaatgattttaatttcttttctaataaagagtcataacaatgtaatgtaggagcatggtgataaagaaggaattttgggtcaattagttgatcgaaacccaataagacgaaaagcagagcctagtgatatttcatcggttgtggcttttctttgtttctctgctgcttcatttgtgacaggccaagttatttacgttgatggtggatttactgttagtggtttcccaaacccatctccagatcatgatgaggactagaactagaagattatatatacatttcaataattttataaatatgccgtggatgcaactctctacctcaaataaattaattttgtgtgttttattggtcgatacttatataaatatgaagaataattaattatgaaactatgttacacttgcacgcacaatattatttgttttttattggttttgcaccctaaagcatctttaaggagctcattcaatttgatgttacactattaataaatttggtgtgaaaaactatatttattccaattaggacaccaaaagttgtattaaaaaaatatttcttattattatatttgttggattaaaatt

SEQ ID NO: 54356 - DNA, 1133 bp, Cannabis sativa
gcataaccctattcatatttatacgtaatccatacattacgttccttcggtggtttatcctagtgatacacaccaggtctaacccagttatgtcttatatgcataactcttaatatacatgcctgcattcaatatataccataacatataaaatcttagggtaataaccctaacttgcatacgaagtaaccactcatataatacattacaatatactcaaataacatctattaagggtattaaccctaattcatatcttctctggattagtaatattaccatatatcatcgttttcttacctcaaaatattctaggataataaccctagaccgcattaaaattaaactcaaggtactagtttaccgagtccagcttaattatgccttagacgcataattctttattttaacatttaacatcttttaactattagggtaataaccctagaccatataaccgctcattttagggtaataacccaaatcccggttcttgattactcataaccacaatataaaacatgagcgccaccgcgcttaactctacgtgcaatctactgtcttatctgatgtcctgcaaaagtggagattccaaatccctaggtgctcctgatcaagtgccggtaatcctagtcacaaattcaaggatttacacatatagggttaatccctaattctacatttatgaaatatatacttggctttcaaaacacagataatcaaatagagctcggaacgcgctttccaatggtatgtataactcccaaatcgatgtcctgatcacaaagttatggctatttgaagtttgaatttggatctgctcagaaacaaaagggcgggccgcgaccactaggttctaaacccagaaaatcctgctacaacttcgaatttcaaccccaaaattacatccaaatcataaccaaaacttaaaaccatcaaatagattttcaaccattatatagggagtttaaaacaccatttcaagcattaaaaatccaacaataattaccccaaaaattcagattacacaacaatcacatacacacaatttcatgctctattcttgaacatttacccaacaaaattcatgttcaatagctagaactctcaagctagttccaaactttattttc

SEQ ID NO: 54357 - DNA, 873 bp, Cannabis sativa
cacaataaacaacaaaattttctcaatttgatggaaaacctaaaactgaggttgtaattagtcactgcttcaactcttggaaaccagcttcacacttatctgcccacaaaaactgttgattcttcttggttaactttgttaaaggtgtggagatcttggaaaacccttctacaaaaatacaataacacccagcaaaactaggaaaaattttgacttctgtagcagtcttcagtcttgactaatctctaactgattctatttttcccaaagcaaccattattatatctcgacagacaatgtcacctagaaaatacacttgcaataactggaactcacacttcttgaattaagcataactcttatgctccccttagtctttgtaagaccattcataaatattgctcatgttttacttcttattgaaagtatacaagaatatcatcaataaacactataacacatttttcaaggaaatcattgaacactcgattcatgtgatccatgaaagctacaagagcattggttaacccgaagaacataaccaagaattcataatggccaaatctagtgcaaaaagaaatctttggaatgtcgtcctctcggatcctcaccatatgataacccaagcaaacatcaatcttagagaaaattgtcttcacctagagctaatcaaataaatcatcattttaggtgggtgacacttattcttgatagttgaattgttcaattctcgatagtcaatacacaatcaaagcattctatcattgttttttcttttagaaatagtactggaactgttgggttttatgccctaaataaaactctttacaatctggttagttatcaacacaagaaatttgaagtgattgatgt

SEQ ID NO: 54358 - DNA, 1382 bp, Cannabis sativa
cataataaaaacctaatagtcttcagccaataaaaaataatactgtaaaaaaataattaattttttgaatttttatttttttcttttattgttacgttaaggtcttgttttttttttttttgaaaaacattaaaatctcattgtttgttaattaatgttacaaacacagattctcttgcaaaaataatggtgatggcatcattaacttggagttaatccatgaagactcaccaaaataatctccattctattcttcttcacaaatccattgacacgtttatatatttttattttattttttaagattaatttttttaaacaagaaaaagaattattattattattattattattaaatttgatatatattatttgtaagagcttttatattttactaccaaacacttataaaagctcttcaaatggagaagaagttcttttaaaattaaaatccaaacactaaatgaaaagctcaaacttttacttcttttcttctactgtctaaaagtaaaagtataagttatgccaaacaagcccatacacatacatacatgaattacacccgagtctcatgcctgcttgtatgatttctttttctttaaatttatgacattttaacaattaattagttagcctttgttgagactaatttgtaatttctcataattgagattttttttttggcctaattattatgcaatgaaaaatgaaaattatcatttttctcgaataaaaatatatatttatatatataatattgtacaatttccctcttattaatctaagtcttcaaaagatagttcaactcattatgttaaaagactctaaaaatagtgctataactatttaatttgtaggtttaatttcaaaagaaaaataaaaactatataatttgtaggctaaataccattttccttctttattttacttaaataccacatacattgtgacattttttatatttagcaattatattagtgagaaattctatttgcactctacaaaattataagtataccctaatatttaaaaaagttaagtttaaaataatttttaaaaatcacttttaatattttttataagtttttctcatattattttgtgttaatttctgtacttatttttaattttattttcataatttttttttaaatcatgtatcatgtataatttttttttttttattttttatttttctaataaaatttcacataattttttgttataatatttgaaattgataatatttttttaagaatatgaattagaagaaaaaaattaaaaagaaaaacgaatatagttaaagatatatattttatataaaataaaaattattaaaatagagtgcatttataaaattaaatttttagagtgcaaataaa

SEQ ID NO: 54359 - DNA, 1511 bp, Cannabis sativa
aaggtctgattcagcgtacgaacaaactccctagtttgaaaaaattggatgacagtctcacaaacatcatttttaacaatatcccaatgtgctttatagaaccgaccaggcataccatccggacccggggctttaagagagcctaaagaccaaacaacctccttaatctacgccggctagggactcgcaccaattccaagttctcagaaggcgacacagacaagataaagttatcaaagtctccctggttcagcacgggatgactcgaagagaacacatccaggaatctgttacgaaaatactgcccaatgttctcgcggctcataatccagtcgaccccgttatcagagattgctcccacaaaattacgtctcagacggatgattgtggaggcatggaaaaatctagtacggtctctgtctttcagccacaatttctgagatttctgcttccaaatttcctgttctctattcgtaatctcttccaattcgagaagtatatcggccttaagttttagattatcttgagacggattgcgggtttggacttccaccaaaagtatatgtaattctaagtcttaaaatttagtatattgtaattgaatttttttaataattattacattgtagctcctttagaaaagtcaaaataaaatttgaaaaaaataaaatgtattttgtctacagtagcactaacaaaattatatacaattattactttcctttataaatagaataataagtgttatttttcttttaaagtatttatttatattctttaataatatttatttggtttatttgctagttagaccattaccacttcacaatatttttcaaaaaattagtttaaaagaaagtggaaaacttcttaattttactattttagtaatcatttctgatttatttatatcagtagttagtaaaaattaaaaaagcaaaaaaaattaaatttgtgtataaaatagtaactcttattctacacttccaatttctacagttactacaggttaatcttttcccgctatgaatatagtgaagatacacttcgcaacaaaataaaaaatatatttttaagtgattgtttgttagtgtctatagaaaaaaaaaattgctaaaaaaattagcataaattcacttatatatgactttcatgatatctaagagagacctattgtattttaattttaattataatattaataatatattttgaattatctgtcacttaatttataatataatttggttcttgtcgaatttcgactctggctccgccccttagggttagcctattaaaacacatttaacttagccaacccagcccatgtgacctctaattaccataatgacaatagttttaaaaatattttcttaaatttatcaattattgttataaatatatttttaattttaatttaatttatgtatatattttaaaaactaataatatatatttataataaataaattaatagaaagatatttattaagctcaaaacaattaaaaaa

SEQ ID NO: 54360 - DNA, 1039 bp, Cannabis sativa
  modified_base (866)..(868): a, c, t, g, unknown or other
aaaatatcatacaaaagaaaaggcactgtaaaactatcagaaatctaataagattaactcgtggactatgcagaattttaactgcaaaaccatgtaaaaaatccattgtgttcatactttttactttacaacttttatttttctgtgtgagattgtcactattaggctcaaagttagttagcaaaaatcggcgttaacagtttggtgttttcattgagagcctttgtgaaaaagctcagaaaaaaccctcctttcttttgaagaaaaaactatctccttcatggctaaaagcctagaaaatgtaaatactccacatgaggaaactcatcaccgttatgggaaagagcccatgggctccagaaggtcatctaacccacagcccagacggaccacccgctccaggaggactcaacctgaaggtggccccagcattcggaccacacgctcttggaggacccaacccgacattggtcccagtacacgaataacatgctcgaggaggactcagcgtgggaatgatcggaatcctggcataggggatgaggagcctaaccgtggaggtactcaacctatgggagaagacacttatgagaccgaaaaccgccgccttagacgctgcctggaggaggcacagcggcggaacgctgaactagagcgtgatgcagccgtagctagggcggggcaggggactagcactcaaaatcaacatgatttggagtgagaagaccacgaggcaggcctcgtggcttatgaaccaggagacgggagaatccccaggacgaacaacctagggaaaatgaggttccccctgaaaattagaatgatcgaccagaaccctctcacagaaatgagaatgggaggcaacnnnaaactgatgaacaagaaattcctcatgaaaatgaggaatgttttgtgactcaacctggaggacgtaggtcacctgtaagaaatcgccagcgttcttcccgaacccatagagggagggctcgtacagaccctaatgggggaaatgcgacaaaccacactcagggggaaagaa

SEQ ID NO: 54361 - DNA, 839 bp, Cannabis sativa
ttttttttttttaattttttgaagagacaaaccctaggggtgcaactactacacccatttcaaggcagtagttgcatgcctccttctttgtgccacgtggcactccgctttgtcctttgtcgtttaaggtcttctttgttgacttttgcatcttcaaggtgtattcttgttttgtggaccctctcgtgagatgataagtattattttatttttgcaaaaattagatataacaagaactttaacaagtcataaatagatcataaacgtgtttaatatgtcataaacatgttaaatagttattaatagatgtgtaaatactattttggactctgtgttttgcaatagttatcgattggaccctctattttgttaaatgataaagtggaccttgtatttttcaaaatggtacaaataggaccctaagttgatttttttttttttttttataaaaatagaacttaataataacttgatgtagagattttacgataagactgcacattttctacatctgttcatgctagaaatttttttcaagattattatattaaaaaaattgtcaaaaattgaactaagaatattattttgtaccattttagaaaatacatggtctaatttatcatttaacaaaatacaggatccgatcggtaattattataaaacatagggtctaaaatggtattaactcttaatagattaatggattgacgtgtttaaataaaattcatttataaatgagttacatggatcgtgtcgtgtcgtgtcaactagtttataaacggacatgtgtttttcatttttttacatgattattaaataagttatcttcgagtcgagca

SEQ ID NO: 54362 - DNA, 740 bp, Cannabis sativa
  modified_base (42)..(53): a, c, t, g, unknown or other
  modified_base (220)..(221): a, c, t, g, unknown or other
gtctcgggacatctgggaatattattttgtagtcgttgtgcnnnnnnnnnnnnattttggtattttgtgtatgaaagcttttaaacaggatttcgatacttgtaaatagttttgtaaattattaagtttaataattaatataaaagttttaattttacactttctttttcaagaaaattctttgattagcaaagagagcactgtaattgaaaaagcactnnagcgtgctttagcattagggcgttacatttatttttatattatatgataaataattatttatactgtataatatttttttttttcgaacaaactatttataaataacttacctcaattaatatatataaaaaaagtgtaatatatatatatatataaaaataactatcatagatatcacaaagtttacaatatttgagaaaaatatatacataacaaaatgatcaaatattgtattagaaaaaaaaaaaaaaaaagaataaatatagtcaaatattactacaatcacttaaccaaatttaacatattacattacaaaatttaacttattggaagaagcaaaaactaagataaaaattataccatacattttacaccaaacaaaccaaaagactacttattatattgacattcacttaacaaaatttaacatattccattacaaaatatagtcaaatattactacaatcacgacacacacacatgactattcaaaacctagacaaaaaaaaaaaaaaaaa

SEQ ID NO: 54363 - DNA, 1913 bp, Cannabis sativa
  modified_base (190)..(192): a, c, t, g, unknown or other
catgtattaaattcttctagaatttttagataatgcatatttcaaacttccaatatgttaagagctccaaataaataatttttcctgcaacatttatgtgatgcatataaatcctcataaaatatagggtaaatactattgtggaccctgtgttttgcaaaagttaccaattgaaccctctgttttgttnnntgacaaaatggaccctatattttctaaaatagtacaaataagaccctgaactaattttatatcaaaataaaatagtttaataataatctgatctaattgtgttttatgacaaaactgtttatattttctgtatctgttagtgttaggaattgtcttcaagttggttatattaaaaaaaagttgtcgaaaattaagctcagtgtcctatttttacaattttggaaaatgcagattccattttgtcatttaacaaaacaaagggtccaatttgtaacttttacaaaatacatggtccaaaatggtatttaccctaaaatatattctaggctataatcaaattatgattatattttcttaatatataactcttatttcagtcaatctcatgtctatgcaaattttgtataacaattcattttgtctacaaatacatatatatatatatatcaatatttatttgcacaccctacaggtcttacttcactttacgtgagtaaatttgcttggattgcatcataatatttattttgccaaaatcaaaatgtaattgataattctcgacaaagttaataccataatccttgttatctcatgttagtttattacatatgcaaacattcaatatttattgtcgacaaaaattttattataatataattttgttccatattacataacttttaaagatctctttaaattacatatatatatatattttaaatatgtgtatcatttataggtacctatataaaatcacttcacggattcaattatgatcaaatatgttatgtctaacttatttagggagtcttttatagagtaccgtttcaatcatgattattattttaaaattatgaatactttataatgttaacatatatctctagatttaatggctatgatatgccaatgttatggtaatgacattattattttatagtatgagtatgttatgagtatgatatttaagttataatctctgtatatgtgtacggtgtgagcatatagtatggacctataataaaggttttcatgtgtaacattatttggttatggttataaaataaggtgtatgatattgctaaaacttaattagtacattaatgatattagacagggaagtgctaatatgtatagtgaccagggtgagttctagtatgtatactgcgagcgattacggatgggcaaacgatctagaatgccgatggtactttagttttattttaagcagttgataattctaaacacagtgaaaatgtactctattgcattttgatttctaaaactcacttttgtatttcaagtatttttgaatcttttttaattatgtattaaaatggtatttttgtaaagtaagataaaatattagaatattacatgttatacaattgatttatgctatactcatcttataatattatttttatttggttattttttttttattttttttttacaaaataaattataactctactttattagtattagatatgatattttcttttcaatcattgtcatttttttatggtaccttaagaagtaattctgtaattactagagtagtaattatactttattttaaaatacaatatgtgtatttagatatcaaataataattatacataaataaagaaaaaaaaattaattaaaagaaagaaaaaaaaaaagaaatattaattaaaataaggataattacataaggtaccattttttgtaaa

SEQ ID NO: 54364 - DNA, 1163 bp, Cannabis sativa
tggaagtttcataatagaacatgatttaatcctagagcaagaggggcagaaggaaccaaaactgtagagagactttgaagaagccaaggaaggaatatgaacaaaattacatcgattacaccatcttggtggatactaaggagaatgtgtacaaagcaacctggaataaggttcaggttgcccgcaaggatgcatctgggggaaagtacaagagagatcaaaataaatagtttgactatcacatagatgtgggacactccaccaatgaatgtggccattgaaaatatgagatccaaatgttggctagagtcagacatctaggacaatgggtccggattcttattatctatccgggattggggctgttcacggaccattgattgttttaggataccaggatactgtaaatcctccgtatgtagtaatccaccctcaagctcccagaacacaatgtccagctctgcttgctccacttgctcaagctacagtgaaagtattagctccgggacaagggaacccatatcctttaaccctagatccacaaccaatagaaaaacatgtagccacgatcttaggaggaacttatattctaggaagtacgagaaattccaaaaattgatattttaaggaactcgaaggtgaaggagagatgtgtgccttagtgtagtcgccaacacaacattcgcaaaccatgaacttgccaattacattcacgaaggacgatgcttggcacgctcatttcccccacaatgacccttaggtcataaaattccagattgccaacaaaaggatttgtagagtctcggtagacaatggatagctcgatctactatataaaaagcattagcctatctcttgaactctaagtcattaagcctctaagctctcaattctaagtctgaaatcataattctctcctctctctctttctactacacgccccaagggctctctccctctttctctctcccacgcctccaaggctctatctctctcactctctctctcattagagacttgcctactgattcatacattctaatcttaagagagctacaatagattccacaacacttgtgatctgagtagtattatctttggtatcattacaatcaaaagaggagaaggtcattacccggtaactaaaggggccaaacctctat

SEQ ID NO: 54365 - DNA, 1547 bp, Cannabis sativa
acaaatagttttttacatatacacattcacatttaacttttttagttgcatgcgacctgaatagataaaacatgattgttgtaacatttatttgtattagatatgtggaattattagttgttttgtggttttatgttacttggcttgcaacagatataactgttgcattacaattttatcacatttgtcttaaaaatttacttcttctttcttttctggccatcgaagttgaaattttttttggcaaagacaccttcgacttcttttttactggacgatgacaacctttacccatgggggagcgaaatcggagtcaatattacaaaaagaaaaaaaaaatcagcctgccaaataaacgaatatacagctgaaataaaaaaaattaaacaaatacttcttacatacaccttcaacccacgatccccgcttcctgggattgaaaccttcgtctaatgcaaccttcggtcaaccacccagtaaccttcgtctgattgtgtgtgtaagtgatagtgtaagaggtattttggtaattaaaagcacataaaatatataaatattgtccacattttatagaggtatttttgtaaataaagtatcaatttgtattttctatgtaatagttcctttttatatttagatgttttcatctttacaatttgtataattttaatttaactttaattagttttttaatatatgtatatttattaatttcttttagttttgacgtttctttttaattagttttttgtttatacgtattttgttaaattatatatttgtttaaataaataaatgtgagtcttaaatatatttgtgaaagtaaaatatcttatttatttcaatatatatatgtaatcaaaaaattgattcaaacaatttttattaattttttttctattaattttaataatatttttttgctaatgatattgatattaaatgtagttgcaactataagtgagatgtggtacttaaaattttgactttaaatgtagtgatgactacaagtaaaatatggtgatgataacgaatttgaacatagtgacaactacaaatgagatacggtaattacaatgagtttgatagtgtggagactatgagtgagatgcggtagataataactttgaaagtagtgacgactacaagtgagatacggtaatgaaaataactttgaatatagtgacaactacgagatacggtactttaaactttatttttattttccaatttacatagctaaaatataatttttgtcttatattgtaacaattttaatcacgtgacataaattatatttgttattaattaattaaatattttttttataatttacacatagaaaataaaaaatgttagagttaactaaatttaatagattttaataaaaaatgtttatgatatataatttgaatttcataataaatatctttaaaaaatttatatacatttaatataaattaaatttaaattatcaatttattttattttatattatttgtagtataaataattttatacctaatcaatatctatatatttatata

SEQ ID NO: 54366 - DNA, 1280 bp, Cannabis sativa
tgtttaggatgttaaaaacatacttgttataaaatctagatcctggtaaaataattccaacaaagggtttgtgtcgacttcactaacataactaaagcatgcccacaggatagcttctcgctccctcggatagatatcatcttgtggatgccatggtagggcatgagcggttatgtttcatggatgcatactcagggtacaactagaagcctatgaactgagcagatgaataacacacatcctttatcacaaacatatggctttactgttagcgagtcatgttgtttgggcttagaaatgttagggctacatatcagagacttgttaaaaagatgtttgatcactagatagggcatactaaggaggtgtacgttgatgatatgctgataaagaccaagaagccaaaagatctaatcaaagatttagatgaaacattcactaccctgacgaaatacaagatgacgcttaaccccacaaaatgcgtctttggagtgtcattgggaatgttttttggtttcatggtccacgagaggtagatagaggcgaacctaaagaaaatacaagtcttgatagatatggactcattaaagaatcaaatagaagtacagtgtctaaagggcagggtggcagcctgcaataggtttatctcacgctcgacagacaaatgtcttccattctttgatgtgttgagaggaaacaaaaaaaaatttctggagtgaagactataaagagtctttcaaaaaactcaaggaacattaagggaggccccactgtttgtgaaaccagaaaaagggagaaactatttctctacttgggtgtgtcgagccatgcactcagtgtagccttagtaaaaaggaagaaaaagcagtaacaaccaatttattacgtatgtaaatattggtaaatgccaaaactcggtaccctcaaatggagaagttagcctatgcactcgtggtggcttctaggaaattaaagtcatacatcaatgcccactccatagtcgtgctgaccaatcacctcgtatgccaagtcttacacaagcctgagactttaggatgcctattgaagtagacaatcgagctctgtcaatttgacatttcttatgtcccacgaatcgcgattgatgggcaagttctcggcgatttcattgctgaatcttcttatcaacctgacggagaaggaagcccaataaaatttaagaggaaaacactcaagaccatgaggaaagatggaagttacatgtagatggtgttggatgttattttaccaggaacttagat

SEQ ID NO: 54367 - DNA, 2601 bp, Cannabis sativa
aaaatatctaatagtattgctcttaactttatagaatattttaaagtaactaaaggaatacttgttcaaaaaaacaataagtacgtaaagggactaatgtatatactctcaagtacgtagattagcatcaaattaaaaattttgtatcttttctaggcttctatataaatagataacatccaatattaagttcttcattaaaaatcaattattacacaaaacatatatagttcatacacatcttgtctttttaattcttgtcttacactaataattcttttaattaataacaatgacgacgccagtgaaactattccaaggctattcgagcaccgccaggaactgtctctccacggcggtgacaggagaaagcaaaaccgaaggcgtgcaaagcgaggttacttacacgctttgcaggggccagaaatcactgatgacaacgatccaagtcaagcaatcgctcgatgggaagatcaaaatcttaggatcgggtcaggagaagctcgatttcttgatgaagttgaataccacagagacgacgatgtcaatcgttgtccatgcccgaaaagtggaaggaaaagaggttcagacgagcgctgaattagcgtctgatgataccgttgtcccagtaagcgatactgctgatttctttttccattatggcgacgcatatgtttcgtccatcaccactggaggagaatacattggcgtcttaacatttcacaccgaaaccgaaagcgacaggatcaagttggagttggagctaagagctaatggaatattcaaattcgcgacagtccagttcgatttacaactgaaagtggatcgagtcgttgagagttctcaaacgaaggtttcattcaaccaaatggttttggggctcgaagaaaacttcgagctacccaaatttgaagagatggttgagtttgcgcgtaagtttccaagcatgaaacttactgcgcctaaaattcttgcatttgaaacgacaggatatgaacacgttgtggggattcccaacagtttcaatcctgtcgcttcaaacaggaataaattagtgggtatggggtttcgagatcttggcttggtaggaaaattcaataaggtatgtcatcttattgatcaaatcgaagaaatacaatccatctacgatttttacggcggatacaacgacgattctaagctaaatgacgtcgctattcaagcgaaacaggatttggcgacgctacaaaaaacatttttcggttttcataccaatccaactgtggatgtcgtcgtaccaactctcccatctcttttcaacggtacgccgtacatccaatacaagatccgttactcagaagagtacggatcttgtaacggggaatactcttccactgaacaaaaaagcaccacgttcgatttattcacggggtacgacgagtacatccggaataaaacgagaattaccggcattcgaatgcgatgcactgcttctcaagaccgcgtcacgagtatcgtagtcgatttcgagtcatcgtcgtcgagtgcggcgggaagacgcacggaagtttacggtagagacgaatcgggacggttgagtaagaagcttgtgtttggtgattatcatttcatcaagaaaatttgtgttagatgtggtgttgaagttgatcgattggggatctatcttgatgatgatagatcagttatggttggtgggagtggaggatcggaacaccgtttggatatctcatctccgggaagttttgttatgggatttaggggttcatattcaaatactctcgttgaacagattcaagttgtctatgcagaattccagccagccaaatggtcacagccagccaaatggtcactctgaacataatatatatatatatatatatttatatctataatgagtggatttggttttgtgtgagatatatatacgtacgtgtgagtcatgcatggtactacgtacgtagtattcttctgcatggatttaatataataatttacgtgagtatactataaagttgtattgctatatatagcctatatatataggctatagtttttatatatatatatacacactatatatatatgtggaggcttgttctataggatctctcagaaagactccatcggtcgggtctttaacagcctatgagaagttgacacctcatttaataaagttgtgttttgtttgaacaagaaacaccgaattatttagcttctttattaatattattttataatatattgctcaagaacattattatgaacacaataaacttcttattaacatcatctcaatatttcaacatccaaaattaaatcacacaaataaatgtaaagtattggattaaatcacacataatatcttttagatgaaagaaaaactaatctttgaaaaattaatagcataacaagaatttatactttgccgccattcagctcttagtcaccgtcgcccaaatccgttcacttatagtaaaataatttattttgagttttgaatttgtttggtttgttttttcaacacaattttgtttagttgatttgaatcgtgttttttgtttatttgatgcttaacaaaaaaataatcttttttgagagaaa

SEQ ID NO: 54368 - DNA, 1260 bp, Cannabis sativa
ccagtgaatgaatctagtaggaaacctgaaacttttcaacaaatcttccaagaaatcccaatcaaccgtgtcataagctttactcaaatcaattttcatcgcacatcttggagaagcatttttcctactataattctttattagatcctgaaaaataagaatgttatgagccagagatctacctttaacaaacgctccctggttttggccaatcaactgaggcaatacctcagataatctactgcagatcattttagatatacacttgtacagagtagtgcagcaggcaatcggtctataatccaccgctttactaggtaactcaacttttggaacaagggcaataacagcttcgtttaactcttcaggcatcctccctgtgtcaaagaaatcaagcacagcctccgctatctcatccccaattaacttccacatggctttgaaaaactcagaattatacccatctgtgcccggactttttgtgctagcaatactaaagattgctttccggacatcctccttagaaaacttctttattaagtttaattgaagctccatactaagccgagggcccatctccatacatctgtcatcaaactttatagaactagaactcttgctgcccatataatgtttaaaatgagagacaaaatggttaactacctgctcgtagtcttccacagtttctccatcttcattaatgaacgagacaatcctgttctcctgtctccttttcttgatgcaagcatgaaaaaaagcagtattatcatcacctttggacaaccaagttatcttacttctctggatcagaaaactctgatacatggcagcctgttgttgaaacatagcagccgcatttctctcttgtaattgagcacaatcatctgttggatcctcctgagcaatagttaaagcacactggtaatccgctttagcttgatgatacttctgttccacatctccaatttccaccctgttgaatcttttaaggacatgtttaagcctaagcaacttccgaagaatacgatgaagcccagaaccagccataggtttattccaattgctagacaccacctcctggaaattgctgtgagcagtccagagattaaagaacctaaatggcttgatccccaaaaccccctgttgctgggttttaatcacacaataacattgatcagaacatgtttcccattgaaaaacagccaaagaattaggcatagaatctatccaatcctcgttaatgaaggcatgatcaatctt

SEQ ID NO: 54369 - DNA, 1711 bp, Cannabis sativa
  modified_base (32)..(52): a, c, t, g, unknown or other
tactaaataagactcactgtcgttggctaaannnnnnnnnnnnnnnnnnnnnctttcattgagagcagaatcaagaatcgctctttattcaagatctaaccacaagtatgatggtgctacaaactcgtaggggcttggttgatccagcaaatccacaggctgtggatcttgcattgcagaaccctggaagcgcaagggttttgccagctattaatcctgaacagccagcgaacgtaggtcatggtgtgacgactcctgtagatgaaatcgcgcctggtgtgcaagagacgggaataacagttcagcacccaaccagggcattcataacacagacgtttcgcctgctaccaacactcaaatgactgttggagatgatactgagatccgaaacctctgtgctgctcttggactcatgcaaggtcataccagtaccctacatcatgatcaggaagaactccgtgctgcgataaatctcacgttcgaggaacaaagacgcatgtgccgagtggagagacaaagagatggaagcgtttagggctcatcatacagagattgaaaatcatagtcggcaagctactgtgctgatacaaaaagcctaccaaactgtcagacagcaacctctgaatgtcatccccctgggcgagacagacgaagatccagcaatgaatacttcccagactataaatggtcagctgccaaatcctcggtcacaagttctgtgggccaagtggtaggtgggcggaccttgtctagtaattcatcaggagaggtcatacttgatagttctaactaggttaatggtgccattccacctgtcaaccaagtaaataaatcgctgagacaaccaggggcttctgtattcgataggttggggacgactcatgacctaaggagcaatctgaacagaaggagaggagtagacaatcagattgtcacgacgatcgtacaacccagagcccgtgctcaaattctcactcagaaagatactgatgtgattctaatcgaccaaaatggcaagcatgttagtccagctgtgctgcacagctagacgagctgaaaaatatgttccaaggcattgtcggatagagaaacaatgatcttaagctaggccgagcacggggaactcccttctctcccgagatcaatcttttggcgttgccccacaagtttaaaaggccaacgtggaaaatgtacacaagaaaagaatatcctctttcccatctcaagtatttcgagatgcaaatggatttttaagggatacgaggggatgtgtgttgcagaatctttcctgctaccctttcggacggcgcccaacaatggtatttcaagttggcccctcgaaagttcaactcagggaaagccttcttttcggaattccatgcacaattctcctcctctcgccaacttttgttgcatctgggagatctagtcgaagtcaagcaaagaccaggcaaacctctccgagcatacatcagcagattcatgacgaaggcgaccaaagtttcatagggtaactgaagatggaaagttgtccgcgatactaagggcattgaagtcctcggtgaactttggaaggacatcaggaagaacggcccggtagacccaatgagtgattttcttgaccgtgctcaaggcttcatcaagctcgaaaaagctattcaacgagcgaaggtgagcaaaagcctggcaagtcaaaggctccttccactgg

SEQ ID NO: 54370 - DNA, 841 bp, Cannabis sativa
taataatcaaaacaaaatcaacggtggatattcaaaattgatcattaccaggatgaatcagagccttacgatcaccaacagaacaaaccactttaataataaaagaagcaatcggtggagtctctcttgtgaaattagatatttcaggatataatttaatcaataaaactctgtttttctccacagataaatgccttcaaaagaaaacataacaaaattttctcagtgaccaaacagaaaataaaaatagcatttttaatttttttttttttacttaccaattccattttccaatcttgaaaggatcagactttctgtaagtacaagaagacaaattatcgattctccattgagctaaacgcgacgtcgtttcgactctataagcagagtctgtcatatttcttctgtcagagaaaattgacaaagccaatgtaatttcatggatgcaatcgaaaataccatccaagaacaaatctccctgctttcccagattgaagattcaaacttttttcaatcttcttcataaaaaaaccaaaatccaaaacccccaaaacaaacttcactctctaactcactctcttctttctttctttatttaaagattggatttttattttactttgatgagtgattttggggttgctttacgccattgaaggtgaaagattgaagctttttatggatttggattgtttttggggtgaaatggaagagttggttggtttgaaggaaagaaggagtgggcttgaatttattggtattatttttttgtatttggcttctttggtttaaatagtgttatgggtagtttttgttgtgtgtgtttattgttcaaaagggt

SEQ ID NO: 54371 - DNA, 1130 bp, Cannabis sativa
gacactctttcaccatttactcacactctttctccaatgcatctccatctcagcattataacatacatatattttttatttatttatttatttgcatcatcttattcttttttttttcatgtcaaatttttctttttaggatcatcaaattatatccattcactcatattctctcttcatctctatttcattattataactatgctctatgtacatagagcaaatttattgagaatgatatagtaaatcagtgataactataaatgacatataataataacacagcgactttgaatataattacaactacaagtaagatacgatgatgataacaattttaaaatcataaaataagttttccatatatttatcaatttcttttctaatattttctttattataaggtttgaagatatctcttagagtaaatgattatatataagaaattaaaaaagttcaaaacatatcatttgaatttaaatctaattagatataactttatttgttttctcattattaatttgatgaactttttttggtatattttacaaattcgctcatttataaaagtgagtagttaacttattgtttgattagctttatgtatagagtaaacttatttcgaagaataatgatgatgatagagattagagacagtgatgcgactacaaatgaaattcagtgattacaaagattttgaaatcatatatatattttacataaattaatcatttgtaacatttttttaaattctaattcaatttattcaaaccatatagtattttaaaaacttttaaccttataataatatatatataataaactaattaattaagaattatcatatattaatttgaacaatactaatttatttttcttataagaataaaagtaaaaattagtagaataattactcattttattaatatatatttatatataatatcaacgagtcatcatggttttggcatctacactttggacatctcaattttggcgagcttaaactcttagagaagaaggagatggtgagaggccttccatgcatcaaccaaccaaatcaactttgtgatggatgtttgcttggaaagcattcctgaagaagttttccaaaggagtcactatcaaga

SEQ ID NO: 54372 - DNA, 1970 bp, Cannabis sativa
acaagctgaatagattaaggggcataatagtatagtgtcataagtacagggggtaaaaaagataattattcttaaataaaattgaacataaaataaagcagattcaataaaaatgtagtacatactttcttttgacttctagctttctttcgtgtattaatttcctttgcattatcaactttcttgcgaagctttagcttattacaatcgaatactcgttctatctgttaaataaaataaatagaaaattaaaaaaaaaatagcaaggataataacaagcacaataaatataatttaataactaaaatcggtttataagctcttacataactgccaaaatttaataaataaaactgatttataacaaacacaataaaaccattccttttctagaaaagacaaaataaaagagtatgaaaatggcaatcacaaaggaaaactagttatgtattattgtttccgttctttttaacagccacctcaactattatacatcaagattcataaattacaacagttttaattccttttaaccacacctcaatatatccttccataatatgttgtaatttattgaggatttgtttccattcctgaataaattacatcatatcattagtttgttttttttcattagtttgttttttttttttagtttgtttttttttttttaaaaaaaaaaaccagtttcaataagggcaagcataacttttaaccggtttaaaaattacaatagttttaattcatttagtttttgaactagtggtgtggttgtatacatcaagtacaccaaatagcttcctcctgcaagtccctttgacaattttctcaaggcaggtggctgttaaaaggatactactactataaatctcacactatgtcaaagtgcttaacagtgttgtaaatcactaggagattctctattttaagtttataattaactcagaaatcactaaagagggtttccattcccaaaaaaaaaagtacaccaaaacatgaatacatcaaaaaggctaattaacagcccctcacttattctcattctccactacattttcatatcaaaattttcaactcaaaatagtaatcgatgctctaacacccattccccaacactcgacacacacctacataagctcggcaaaaacagggcaaacaacacctactcaaaagcacacaacttggttcacgacatcattttgaggcttgaaaaattaagagaacaacatcaacttactaccttattaaaacaagaaaaataaaaacataaaaccacagacccaccaacaaaaataaactcaaatataaaactgaaaatttaaaataacccataagtaacaaatttaacccgaacccataaagcaacaaatataatataacactacatgattgaaacttgtaacaacaacaacactaagatacccactaatcaaaaatataaaaaaaaatcaaaatataatatgaacacaccttatagcaactccagtccacaccacaaaagaaaatgcaaaccgattaccgccgatgacctacgacgaggacgatgccgtcgaaataaggaggaaaaaaactattaagataaaggaagaagaagaagaagaacaaaacagagataatagaaggagaattaaaagagatgaatagcaatgaaaagaagaaaaaaaaagaaagaataagaaaccctaaaataggatgcacaaaccagttagaagaaagaactttgaaatgaaagaaaaatggtagatgaaataggggtactcattacatgcagaagatgaaaagacaaggctgatttttatttttatttttttttaaaaaaaaaaaaaaaatccatgaaaataaacagttggcaaaaaatattaggaaattacaaacataccttttaaaattgggctgaatacacaatatgggatttaaaatggaaaattatagcaaatggccccaaatcataagattatgttagtatatgt

SEQ ID NO: 54373 - DNA, 682 bp, Cannabis sativa
gctatatcctaaggagtaccctcaccgtgaccaacacattcaatactctcccaacattgttcaaattctgtataaagctcaaaggtggttacaaacctatgaaaataacaggatattcccgtaagagtcggacctcaaccatctccaaaaatcaaggggacggttgaaatatcttcacaacaaggatacgtctcttgaagagagactcaccttcaagagactcaccaacacttcccctatgtaaggggacatacatgacctcgaaggggatccaaaatcactatccaaagagcataaactcggccattttatttctttcatttaaaagcttgttcttgacctacaacaagactagtaaaatataagtgcagtaggctattaccaactcttggggccgacttccaaccctgattttataggagtttttttagattgggaataaaatcttgtacaggaaaacaatttacaattgtatcaaagccctacttatacttccacttaattatatgtcaatcaaaatggcttggtgatcataactttttttttttttttggtaaatggtgaaaatattctctttcattgttcatacttaagtttcttgattaaaatctttcttgacacactcctctctatatactacaccaaacttcaacttagtcaagatcttaattttgatttagtt

SEQ ID NO: 54374 - DNA, 956 bp, Cannabis sativa
gactttcattaattattataggttttgaattatattctttacgaatttggcttacgtaattaagagttattttgatatttaattgtgtaaataatggcaaatgttttaaaatttttatttatgttgcattaagagtgagagagtcagtagatagatcctaagatactagatgtgtgtcttattaagtgataaggttgattgacataaatttgaattataatagtaaatatttagctagcctcatacgtgaattatatgtcatggttagttagattaatccaatgattatagtgaagatgtaatttgtatacagctaggcacttttaaatgaatatgattaattaggagtcatagagagagagagaaaaaattttggtaacagaagaaccaaatcttatcgtagaggacctagagaaaattttgtagtgaagtgacaaaagatttattccttaaattttgggaagtagccatatatgtgtaacttgaagagaaaatatagtaaaaatagttgatagtttgaatagaagaaaagtcaaatcaatcaaagctgtactcttcttggctatttgaaacaaactctccacctttggaacaattctttaaccgaaatggcatctagtaagttctaggataccatgtgtcatctggtttatttcttcatatatttaattaatggttcaactctaataatagcatatttagtgggatgtgtatgtagttaacttgagccttatgaataccactacactcaacacaaatattgcacttaagctctatatcatcactctaattctctcgtccctttgtgcgttgctacacattactctacatcccatatcttattttttataagctctttatataagccatccatacaccatcaaatttctcttataaccatcacaatcatcctctcataaacatatatggatatatatatacatatctttcatcat

SEQ ID NO: 54375 - DNA, 801 bp, Cannabis sativa
  modified_base (147)..(150): a, c, t, g, unknown or other
attgtagagggagttatgtatagaagaggattctccatgccactactaaggtgtgtcacgcaagaagaagctgcacgacttttatcagaagtacatgaccaattttgtggaaaccaagtagccgggcagagtttatccaagaaaatnnnnaggcaaggttatttctggccaacaatgattgaagactccaaggcctacgttaagaaatgtgataatgccagagattttcaaagatacctcaggcaccgcccaacgaactatttaagatgcaaagtccttggcctttcgccattttgggaatcgacctgatcggacagatacccaaaggcaaaggcggtgtgcaatacgcggtggttgcagttgattattttacaaagtggacggaacctgagccactgacaaccatcatgtcgaaaaaagtgcaagacttcattgtaaagaacataatttttcagttcggattaagttacaagatagtctcaaacaatggtaaacaatttgacagtcagtccttcactgatttctgtgtgaaccatggaatcataacaagtttctcagcggtggcacatccccaagcaaatggtcaagttgaagcagtcaacaagacactcaaagacaccctaaagaataaacttgaagatgctaaaggaaactgcccggaagaacttcctgaagctctatggtcatactgcataaccaagaaaacagcaaccggacagactccatttgccatgacatatggatatgaagctatgctgcccgttgaactcgaactgccatcccatagaagattaacatata

SEQ ID NO: 54376 - DNA, 1490 bp, Cannabis sativa
atttatctccttctctcaatgcccatataaacttaaccccacttagctctaacccaattgcaatctccttaatctcttcatctgaaaatatagttgtggttccaaaagagatatacaacacactatttggctcttgtttgtccaaccaatccaataaccacttgtcttgatccctccttagctcattacgagtcattgtcgtttggtgtaaaggcccaactgcccaaaacttgttcttctccacaccaatgtcgtttacaagactttcaagaaaagctccttcaatagctctacaagtattgaagatctctccagcttgaaatttcacaacttcaatctctctctccagaaaacgatttaacgcagcaggaaaacatgattcccaaggcggaatatccattacggggaacatgtcgtttcgtcccaacagattaaacatgtttgcaaagaaaacgaaagagccgcaatggaatgagtaggcttctccgtttgggatacgaacgacatcttgaaccaccgaagccatcataggatcgtaaacaacgacaagtcgttttgtggtttgagagagtgactggagaagctcagcaacaggttcgcgaaggttcgttgagcattcgaataaagggaacgagattttgacgaactcggaactgaagaaggggtcttcatgatgggatataggtaatgaagatgatgatgaaaattgaagtgggtaatcatggaaatggattttggtaagttggtgaattgggtttgaggctcgagacttgactcgagagatgtgaagagttgagctaatgtagtgaactggaatgtcgtatgaggaaacgacattggccaattgaaggaactggtttaggtggctctggcctaggaatggaaccattaccaccacaactgacaatgttgatgaatctttcatggcagcactagtagcttccattaatgggctttaattttctttcactgttttcttggaaagagattacaagtgttttttgctttactcttgttttcaaggttccactataaatagagctattggtgactctcgtcggtgataagattctttgtaaattgtaagttgtaaccaataattgtaaataataagacagagaaatgttagaaggctggtcctactgctgtaaatatgggccgggctttttgacacgatacgaaatcggcatgagtctgagagggacgagcatgatctgacacgaaaaaatatgggcttgagcacgacacggcacaatgctacaaattagcacgacatggcacgaaaaaaatagcttaagcacgacacggcacgacaagcctaaaaactaaacaagcaagcacgaatataaaagctcaaaaaatacgacacacaaataaatatgattttttaattttgtacttcataattatatattttgatatttatatacatatttttattttaaaaaataattttcactcaagtttatttatatgtatacttttaaaaa

SEQ ID NO: 54377 - DNA, 1394 bp, Cannabis sativa
tatatatatatatatatgtgaaaccttaaattgaatctagaaacccaaaattataaaatggtataccttagctttaaagacaatctagctgtagctatgtaatttactcgagcttggccttgagtaattaaacatgaagatgtctagaagagaatggaaatataaatataatggttgttgtgatggcagtaaggaatttttgacgatatggaagaaggaaaacaacaataatgaaatcttgaagaataatggtgtagtgtagctaggggactaaggctttgttgttttaagaataatataacaatagagagtggataacatggttggttcgactatgaaactagagagaatcttcttaggcttttgtgagtgttgtgtgaaaaataatgagtaatagctcctatttatagccctgagatttaaccaaactcacccatatcgtggctcctattgtattatatttaacttatttaaatagtaataaaagataaaactctaactatttgagtaatactcggtcaaaacttcaacgttgaaaaagaacttcccaccttatccgacttaataccaaacttggtctttcttgttcattaatgtgagcctatctctctaaggcctccacgtaaacgttttttttttagtgttcaaattttgaatctctatttcacacttaatatgaactctaaatatattctacttaatttgatagtgaaactctctatacttgccacatgtgaagaccacttccaaagcttcagccaagcacacaataaccatatataaacttacatgtagtttaagtggaatcggtcaacttttctccatacatctcacaacaatatgcccaagtgtaaatagcttatttctaattcaataatgcactcacacgtatatgactagccatactaataataataacattactaattacaatgattacaataataataatgtataattatctatatatattatttaggtacttagatacaactgattattaattaaatcatcccttaattttataagcccaatatatatatatgtgtcttacaagaaaatactatattctatgaaaccattatttccacatcgagatatctagactaacataatagaagataataatcaaatattttggttattacagagggggagaacgccaaacatccgccgagcataatttggggcaagggagcaagtaagtttggtgatctgcaaaagaaaatcgaatagtgtcaatgcttttaaaaatgtcaacaggactattattatattaacctaaggagtataagaggacattatctataaaagtgggtcttaaagaatatgaaaataaaagtaaatattaaaacagataaaataaaggggaatggtaccatatactatttttt

SEQ ID NO: 54378 - DNA, 643 bp, Cannabis sativa
tctttttcttcttctttcttcttaggaaaatcccagccctctttctctctctcgtctcctcccttaaccatcgagcagaacaccatcaaaacccctctttaaggaagcgaaataacaccattaaatcactcacaaactcagcaggtattactcacagctctaaagaggaaatgacaataattatcacttcctattttcaagaactctttactgcttccacaatcgacacaagctctctcaaccacaccattgacaccattccaacaactattactgctgccatgaattttcagcttacaaagccatttacaccagatgagatatatcaagctttaaaagcaatgagttcggataaaagtccaagtagtgatggaatgtcagccgtgttttatcaacaatattgggagatagttgggccttctgttacggatgtgattctgggagttcttaacaatggacaagatatggatttaattaataagtccatcatcactttaattcctaaaatcaataatcttgctggtatgggtgactgtaggccaataagtctttgcaacgttatctacaaactcatctccaaaatgttggtactcaggttcaaagatgttcttccttccgttattttcgaaactcaaagtgcttt

SEQ ID NO: 54379 - DNA, 946 bp, Cannabis sativa
  modified_base (63)..(65): a, c, t, g, unknown or other
  modified_base (544)..(545): a, c, t, g, unknown or other
  modified_base (708)..(708): a, c, t, g, unknown or other
ttgggcctagatgcatataggaagtccatttatttttgaatatttaaatggactaggttgctnnnataaaataatcactttgatagttttatttaggcccaggtagtattgggcttattcaattaataacaaaaatatttagttaaaggttaaatttctctcttttgagccttgtgtaagagttacggaaccatagtaatggtacgatatagtgaacccaaccctccctcaaatgaaccaccccaactatgaatgtacattatcttatttaaataatcgtattagactaattatatgagtttaactaataaaaatttattagcaacataattaatttttttaaaaaaaataaattgatttttattagattattttaaaattaatttcgaaaaaaaaaattatagaaaacttctcatcccaatatgaacaccttagatctcattatatagtgcttaggatatcaccatttgaaatttaaactcataaccccccatgggatgttatggactcaaatgtaactcatgcacacaccataactcctatnncattaaaaatttcaaattaagatgtgtaacaccttttacacacttaatattggtgataaatatggaggttactcataataacaagtaactctcttatatgttacaaaatgataacaaataatatgcatcatatgttatatattattagtttattacacatatntaatctatatattatattattaaaaataatataacaatatatacttatattttaaaataatttttgtgtataaacttgtgtgtgtgttttttttttttttgaatgaactataaaatatatcatactataaaatattttggcatgactcaagatgaattacagcttcaacgaaaaattcaagacaacagagaaagttaattcaagtgtaaagtcattttttttttttggcaagttagat

SEQ ID NO: 54380 - DNA, 617 bp, Cannabis sativa
aaattagctcaacgcatcttgcaaatgcttcctaacatgcaacaactgttagaaacattataacatcataacattgcaaaataaataagcaaacatatgatgtgacaaaatcactattttaacaatataagtatagggggagtgatcaaatttcaaaggtaacaaatgggtagttgtacgtattgtatctaatgtggggtttattgctttgtattttttcttgagatttttacaccacatactgaaatttttaacttttttactttttcactgtgggacggaattttattcaaaaatactgtgtaagttttacaccacatacggccatggagtttgcatgctcttgagctcttttgggacagccctacatattttgacatagtttatcgagtcttcaatcattgttggccaaaagtaccattatctcaatactttcttttagagacttttttccagcgtgtttgtcacaaaggccttcatgtacttcaatcatgtgagccttggcttctttgtgtgcgacacaccttagaagagacattgagtggcttcttctgtacatcactccatccatggtgataaagtgagcagctttcctcatcaactttttggctttgttc

SEQ ID NO: 54381 - DNA, 1022 bp, Cannabis sativa
gatagcttcagcaagaacaagatcaactacccccatccggtttattgtccaagccataataagctaaccagaagagttctgcgccacctaaccatacctatacttattctgattgctaaagatagttgcatggacattgattttgatcgtattactaatcggtgtaatacagtgctcatgcctttcatcgtcttgtaaagaaaacaaagagaaaccaaaatttttaccttgagcacaactccattgatcaaaactacccttagctaatgaaaccgcctctttaacagtcttattcttacctttccacaccttgtcattgcgcacagaccacaacgcccagcaaagcataacaactctatgttttataccagaatcccaacaatgaaatttatcatgaaaccatccccaaataaattgtcatcaatctctatcaccgaaatacttgccatctgctagcaagtaaaaacaaacgaacatctgataagacaataagaaatagactctctagttcgcaaacaccttgaacacaataaggagagaagaacatatttcacgcctaattattatttaattattattgaaaagataaaattatgtttactaaatattgtgatatatatttgactagataaatagatttatgcttcacattgtttttataataaataaaaataactatagataataaaattgaactatgtatgataaccaaggtttatattaatttaattatagggaaaaaaataggaaattttcaaaaagggtaaaatattacaatattactatgggtcggcccaatcaacatttatacaacccacattgaaaatattataaaaatactacgtggcctataccttcagccgcacgtcacgaacggagacgatgaagaaacctccatcaattcagtctgctacgaaaccataatgaaaccagatcgagcgtagaacaaccataaattccggcgaaatttgattggaaaagaagaactccaaggatctaaacagaaaattacaaaaataaac

SEQ ID NO: 54382 - DNA, 585 bp, Cannabis sativa
  modified_base (50)..(51): a, c, t, g, unknown or other
cctaaatcttgagttatcatgaacacatgttcatgttattagtttctttnnttcactcgttaaagtttctcaaaaaagatgattcttacaaaatctattttgggaatctaataatatggatggttgggaacatgatgtacaactatggaatcctgactttcctaacggatcgagtattggaaccctttaagtgttaattctggaactagaatgttgtgcacaaattcagatgagatcttgaattataatttcactggtgaattaatggaactaaaggataaataagtaattaaaagggtaaaataatattttgaccaaaactaattacgaaccaatacatggagagctaatcactggaaatgattatatcaatagagactgcagttaaactcagtaaataaaattttatgattacgaagagtgcaattctatatttatagtagagtaatcatagaattaataaataagagattatttgattgatgagacaataaataatctagtttattgtagcttagaattataggtccatggtccccaaattgccaccttgaaactgtaaggctttgtgccctaaataaaact

SEQ ID NO: 54383 - DNA, 680 bp, Cannabis sativa
aatctggattttccagatgttatcaacaattaatttatcgatagaatatcgatgctatgtcgatattctgctaagaaaggtcagggacacccattatcgacatgttgtcgatattatgttgatattctacttagaaaggtcagggacacccattatcgacatgttgtcgaaagtttgtcgatatcatgtcgattaaaaaacaaattaacatacataagttatttcagaatttgttgacattttgtcgatagtatgtcgacattaagttgaccaacagtatcaacaatatatcgatgaaatgtcgatatattgtcgactttatgataaaaattgaaaaaaaaaagcgtttgacataagatacattaaaaattttgaaacaaacataacattaaaaacatcaatatatatataaagggaagcaccccaaatagtttaggtggtatcctttacattttttattctattttttctaatttttaagagcttaacatactttctcaataaaaatcaaataaaagcatatgaatgcattaaatatgtaatagtaaaaaattatttatttatatgcacattaatttatagcatttgaaaactattagcattccttataaaaaataaatatatttaatttttatttattaaacacaaaaaatatcatatattcataacaaaatagtgat

SEQ ID NO: 54384 - DNA, 1010 bp, Cannabis sativa
tttatggtcctaagcaagcttcatgaacttgaaatgacaagctcaaagccactttatatagcaagggcttcaaattgtccaaatttgacaactcattgttcattagtggctcttgacagaatctaattgtgttgttagtgtatgtggaggatatactaatagcatgacctaatcaagcttccatttctgcaatcgttgcataaatgaacaatgaatttgatgtcaaagatttccttccccttcactactttctaggagttgaagtaaaccaaacacactctggtatgcatctttctcaatcaaaatacattgcagatttgctcaccgacctcaaattgaatggtgttaaactatgtcttagtccaacaagctcatctcattttctttctcttacaaatggaaaaccttttactgaccacacactacatagaagcaccttaggggccctctagtatctcacattgactcggccagatgtggcatttatagtgaataaactcggtcaatttattcatgctccaacaaatgttcactgggatgcttgcaaacgtatgttcagatatcttaaagctaccattcatgagggatcatattcattagacctgcccccaaattgtgtttacaagcatactctgatgttgattggaaaagttgtccaaatgatatagaagatcgacaggggattatgcagtgtttttaggagggaatctaatctcatggtcagcgaagaagcaacaagttgttgctcgttcaagcacagaaagtgaattttctactttagcaaacatgacagccgaagtcaagtggctttcctctattttaaaagagcttcagaccagtcttccagctcctccaattattcaggttgacaaccaagggccaacctctctagcagcaaatctatttttccgcgcttgatcgaagcatataaaaattgatcttcactttgtgtaagatcagatttctagcgaaagaagtggaagtttgatatgttccttccttcaatcaaa

SEQ ID NO: 54385 - DNA, 1964 bp, Cannabis sativa
atatttaggttgttaattcaacatacttgtgagtagatataagttcctggtaaaataatttccaacaacaagtggtctccaaatcaatagaacaaataggacaaaggttatcaacttgaagaccatgcttttgaagattagtcatagtaggaatccaatcaaaagaaagtctctaagcaaaactcttaacctttggaggaagatttaggttctaaagaattagccaccaattataaggattacttgaagaagaggcataaggaaaggtgcttgtcggaattgctaactagtaactacttttaacagagtaaaagccatgattctcaagaccccaaaccaatttatcaggagtgtcgtttaacgaccaagggatagacaaaataacttttgcttctttgggattaaacatgtcatgaacaagcagaacattgcagccacccccatcaattctaaaagcagaaacagtggcatcttcctcaagaaatctaggggaggaggatatatagccagtagttaaaggaatccagctatcaccataaattgaaatacatctaccattgccaacacgccaaacaaccccttgatcatagagatctttacaccaaagaatatttttccacacataagaacccttcctttttgaaaaaacatgtccaaactctctataacaatgataaaagcctttgaggacacgagctgctagagagttggggaagttataaaggcgactcgcttgtttggcaagcaaagcttgattaaaaaggtgaagattacgaaaacccatacctccttcattcttgtgtttacaaagatgatcccaagtacaacaatgcatcttccttttaacatcagaaccaccccaccaaaatctagcgcacatcctatgaatgtcattaatgagattcataggaagtttgaagaggttcatagtatatgtgggaatggattgaataatagctttgattaaaacttctctacgagccatggaaaaaagcttagacttccagttattgagtcttttccaaattctctcatgaatagaattgaacagaccacccttattatgacgagcaaagctagggaggctaagtaattctcatgacacacaacttcaaccacaccaagagcattaaccatggaagaacgagcatgcacctccacattaggactaaaacacactacaaatttagcaaaatttactaactaacaagaagcttttccataccagttaagcaaggttttaaatctcgcttgcattgaacactagaagcacaaagaaagaaaagactgtcgtcagcaaacagaagatgagagatggacggtccagaatgaccataaggaaaactagtaagtaaatcattagagtagtcaagtttgacaagtgaagagagaccttcagcacaaagaagatacaattaggaagaaaatggatctccctgtctaagggctctctcaggagtaatgcacccattgacttcaccatttagaagaatggaatattcaatagtggatatgcacacttaagagccttatgaaaccagtcgggatggaaacccaatttgatcataattcgagacaaaaaagctcattcaactctgtcgtaggcctttcactactacaaaaaagactttttgctttagtttttaagtgacataaagaatttgcttcggttggtgtactcgacgttataaccatagacgcaaatagtgatcgtttttgcttcagttatgaaccgacgctaattaattatttctttcggttatgaaccaaagcaaaaaaatgttttagcttcggttcataactgaagcaaaaaattagtgcactgaagctaattattttttgaccgaagcaaaatttttttttgaaaaaaataaaaaaatttggcaattataaccagatcgatgccacacgatttttttagttttttacacattttttagttttgcataaataaatccaacatc

SEQ ID NO: 54386 - DNA, 785 bp, Cannabis sativa
agttcttttggattaaatttgaaatgtgaatgctaattaaactagataaattatcgcaagccacatgggacaaaatcatgagctacagagttcttttggattaaatttgaaaggtgaatgctaattaaactggatcaattagggaatctaattttaaaatttaaattagaataattacttttaataaaagtgaattatggtcaaactccttaaaattttccaacatttgcaactaacctccaaaataaacattttaacgtaaaacttctcaaactaatgttttgttaagtgtcatcttagattgtccacacaattctattagtccatgtaaataactactacaaaatttaaaataaattattttaaaaataaattgtaaaattgattactttatattatatttaacctaaataattagttatactaacctaaataattatttatacttacttttaatgtttttttaggtgttaattaatattaaaattatgtttcaaaaaaaaattaatattaaaattcactttataccatagttgtaaatacatacgtgtcaggctggctcggcccatattttaaaaagcccgcaataatatgggttgtcatgccggttcataaaaaaatataagtcgtgtcatgtcgtgtcgtaacgtactaatattttaaagaataagtccaacacgacccgtaagcccatatttttcgagtcgtgctcggacttgtatcatactttattgaggcttgaccgtttttttataaatggccagcctattttcttatacggattc

SEQ ID NO: 54387 - DNA, 725 bp, Cannabis sativa
taagctctcttaatgtcatgttgtggtgaattaatcaaggagactcacaattaaagaatgcacaacattaaggtatgtttattattattcaatgccctaaataaaatgattgagcttggatgtttatgattattaattgtgattattattattgataatagaatgctcattgtgtagtaatttaacaattggtatcatgagcttggacatttgattttagggcttattaattaaaaaaaaaaatctggattttttaagttattcgtagagaaaattagattggaagatgattattaagttaatcaatttaaatcatattttctgtttccttttttttgttgaaaatgctgagaacccaagctttttcaaaaaagttagttaatggccgaatatgggtatgtgatttacgggtttagagtgtttttcagttgaaatgagtttggaaaaaagagagaatataaaaaatggtgaatttcccctcaaacggcgtcgaaaacggaacaccggaggtgggatttccagtcggtcgggaaaccgggttcgctgtcggatcgcacgaactggatttgacttctgtgcccagctgaaggtcaaggatgacctcaaaacaatgtgtcgtttttgagctctccttcagacaaacgacatgtcgtttggggttaagggttgcgcatcacttcaagcaaacgacatgtcgtacggacagaccagatttttcaaaaaaa

SEQ ID NO: 54388 - DNA, 845 bp, Cannabis sativa
agccaaacaaaagaacttttttttttttttaataaattttcaaatttataataaattttcaaatttattaaattagctaaaataatatattccaatctaatcatcacacaatctccattaaaaacataattggatttaaaattagaaaaacgagttaaataatcaaatgcttattttacaggttgtgtaacaaaaaaaaatttaaaaaaattaaatgaaaaaaattgcagcatcacaattaaccttaagaacacttatattttgttgcatctaccgctcaaaaggcacaacactaaaaattgttgcagcagactcattcaacctcgtagtttgagcattcaactattgtgtaaggtacataactacattactaacaacccctttaatcgcaaagaatttgttattcccaactactaacaatgatttgatggcgagtcattgaagaacaaacaacgaaacaaaacaaaacaaaacaaaattatatgctagacttaagtagaaaatagaggtatatttggcaacccactcaaaaaaaaataggtatattttaattaaaaaataatatgagggtatttttttattaatagatacaaaaaagatgtatttttcaacttatcccttgtttaattggtttcaaattctcagtttaagtttgttatttaattcaaagaaaaaacaatggaaaaaaaataaatgttaaaaaaataaaataaaattatattaattttttttataatttttgaacatttaaataattatttatataataaataaaattattgacatggaccaatgaacaagggacatgtagatactaaccagacacttaacggtcaggtacttac

SEQ ID NO: 54389 - DNA, 1435 bp, Cannabis sativa
gcccagagtggtacttcaagctgcctccaaggaggtttaatttgtggaatgctttctccttagaattccacgcacagttttccttctcccgtcaacttccctcacatctagaagacctagtcgaggtaaaacagataccaagggaacccctcagagcttatataagcagatttatgacaaagctaaccaaaagttaagggggttgaccgaagaaggaaggctagccgctacgctgaggggcattaagccacttggagaactgtggaaagatatcaagaggctgaccgtggggtcgatggctgaatttttagatcgcccagatggatttattaagctcgaagaagctgtttggtgtgtggatactgtaggacaaaagaagagccagcaacgtaccaccttggcgggaacatccactcagagtccacagtaccctggcagctcaaatatgaatgggaagatgtctaataatggtaacagacaaggcaatggaaaggaaggcaagttcactgacaatgccgaacatcaccccagggaaaatgctccaaagtttattacattttctatcctaatagatgacctagagacaatatacacgacaacttagtctatggtcccatacaaaaaaccatctcccatgaagaaggatgtgagtaaaagagatacattcaagttcagtcgctttcacgcagactacaaccatgacacaaacgaatgcaataatctgaagcgggaaattgaatttttgatcaaaaagaataacccacacttattgaagtatgtgaaggccgaccagaattagagagctgcctaagcagacaataaccagaattagttaatgcctccgcctatggacaggcatttacagattattattggggatccacatcctggtggagattcgggcaaagctcgagaaaagtgtgcccgagccttgcaatacgaacaaaaagaaatagtcttggccgtggaggagagaaagccaaaaataccacgggtaggggaaccaacaataaccttcactgaagtagatgctaatcatgtccacttcccacacaacgatccactggttgtggaagtacaaattgcaaataagaaagtggcacggaccatgatagacaatagagcctcctcaaacatcctgtttaagacaacctatgagaagatgagaatcctactaaaagatctaatcccctacacccaactcgtatatggtttctccgaccagagcgttgcacctctgagacaaatccgtctgcccctcactgttggacaagctttgaggagcataactgtgatggcacaattcttgataattgatgttctatattagctttcgatgtcatgttaggccgatcgaccttatatgacttaaaagttatcacgttagatgcatcaagttcccaacgaagaatggggtggggtgtatcagagggaa

SEQ ID NO: 54390 - DNA, 1250 bp, Cannabis sativa
atcaaaattaattctttagttctatttatgaataataattgttggataaaagtaaataaatcaatgttattatcaaaatttagaaaaataataataataaagataagattattatgatcctcaactatcctttattttacctcataatgtaattacccaatttctctttttattattcaattgataagttgagttaagaagtttataatctggttaaggcttataagcccaatttatatgaaaacttcttatattcttatgataagtttaatcacaaaaatagcattaagcatagcaactagtaaaaaaaattatacatataatttagatactctcgttctaaattgatttgcatccataacaatcatagcatattgaaatcttatttttttcagaattttgatttaaattcataaataacaagtaaggctgatcagttaataattgtaaaattaaaacaaattgcatgaaattaaataaagagaagaagaagaaattaaacaatcacattaatccataaaataaactcaagtggttcacataataatccttaagagaaattagctactaaaagacattctaaaacaaaaaaaaaaattaactaaagacataaaagatagagctgaagagatagaatactgttggagtcctctactagtgccttatactccttgctctccttctacactcaaaatttctctcatttttcgaatggtgtcaaaagctagccatcatctcccattttacagcacaaattttgagttgcccaaaaaaactacaaggtcgcatccttacaagctagtttcccaaaatttgtttcttcgataattctttgttccagtttccattttttttcagcgaacacaggtaaggtcgcggccttgtaggccaagtttctttttttctttgattttctaccttaattttggaaattgacctctattgccctttgaccacgaaattaagagctaaaagtatcatttttgacccattttaagaaataggaaattactccaagttaaaagaagtttcttttcttcattatattttctcactttttctcaaaaaagacttgcagaacacctaaattacaaaaattgaagatcttcaaacatttttcctaaaaacacataaaaataaaaactaagcctaattctacacaataaaataataaaaatactaaaacacacactaaaattgactataaaagtgcataaaaataaacttaacactagccacttgcattaagc

SEQ ID NO: 54391 - DNA, 1941 bp, Cannabis sativa
  modified_base (1855)..(1874): a, c, t, g, unknown or other
aaggaggctctaagttagattaaagctcgtggttgggtggatgttattgccgaatcaaattgccttatttatggctatataatttcaaattgtaaggctattgttactagtattggtactatttcttttcgttttattaagcaatctgctaataagtttgcacatactttggtgcaatcttgtctatatgaggctgattttatttacacgagggatactcttttgattgtgttttcatctatagttttggatcacttaaagttaatgaagttgatgattattattaaaaaaaatctgttggaacttggaactagaatagatattatctattagtaaattagcattttaaatttgcttatttagcaataaaagttgtaattttttaaattttatttcaaacttttatattataatatatattttgataaaattacacaaacaaaatataattcttattctaatataatcttcataaattactcagacacatgactaatataggataaaatattaaaaaaaaaattctttttcttttgatgtaacacacattacatcatatatttctttttctaaaaaatatttaaataatttaaaatattttatttttgaaaatatgaagaaaaaaaaaaaaaagagggaacttgcttctcaatttcaattttgagaaatagaaaaaaaaatgaaatttacattcattttcaattttgaattaattatacctttattaattttcaatttaattatacattttttttaaatatatttttcgcctttatttcttatgtaaaaattattaatatttatctgctatcaaattaattataacattttgctcttcctctttgtcgaataacccgttatttcttagaaaagtatagggaaattagtttttaactttttttatttatttttacggtttgggttgtttcgataattattatgtgagttgttatgtagatttaaattgcaatttaaattgctccgttattgttatatagatttctataaaaatacaaaaaaaaaaaaaatatttgaattgtaaaattgaaaaaatcctaaaaatatatcatttattttacatcacatattaatacaaagataatttattccataattattattaaagaaactatatagtatatagaatttgaaagatatgactaacaaacaaatggtaataataaatgacaagtcacctcacttaaagtaaaattaaaatgtaactaatccaaaatgtaaatccaaaatgtaaagatactacaattttaatttatattctaaactccttaaaaaaatattaactataaacttaggtatctcagcatctcactttctcttaattcttcaatttctttttaaatattttcttttgaagatgcttggaataaatttaagtaaattctttcatctttcattgtcacttcacaatttctcttttacttgttagtgtaagttgtgccagtgccttatctttctttcgggtctttttcaggattttctttggaatcttcctctgggtcttcttcgggatcttcttcagaatcattttcttttgggtcttcttcttcagaatcttcttcttctaggtcttcttctttagaatcctcttcttctgggtccccttcttcggaatcttcttcttttattttcatagcaaatggatgatccaacaacatctgagcagaaggtctttgattggggtctctggtaaagcactcaagtaaaaaatctttagcgatgggagcaaggtaagatggtataaaaggcgcttcagtggaaatcttgttgtacaactcttcttcccccaaattctcatcccacggcaaatttccagtcaacatctcaagaacaacannnnnnnnnnnnnnnnnnnnagaggcctggtcttgagtttcttcacacacaatttcaggagacagatacaaccaactacctgtcact

SEQ ID NO: 54392 - DNA, 1292 bp, Cannabis sativa
gtattttttaatgatgtggcaagatattattgtaattgagatttgttaagttatttttgtaattattttatattttatgtatatttttgaaaaaatcccaacaatatatatacctcttgcttgaaattaatcaacactaaataaatgaacccttacaaattgacctcataaaaaaatactataaaattaaaaatttgattatttaaataaagaaaaacactgtaaatattatatggataattaaacttataaaagatggataaaatgttgcaggtatgcttagttatttttttttagaaaatatattataataattttaaaaaaaaattaaatattacagtgatttgagacaaacaaaaaaatcaatgtttatagtattatgaagagaaaatataatagtaatttggaaaattaaaagaaaataatgtgtaaattgtataagaagaaatataatattattttttaaaagaaaatcttaaaagtattgaatatttatgatttaagataactaatttggagacttttaatcttgagagtttccaaattctgtataaagaattgcattaacaactgcaaaataaacatccttttgggaatttggaatgtggacatctcttgatccaagtcaagactttgtccacttcaaaacaattcaccacaaatattcctgcccaacgtaaaattatgctacaaatctctttagtactgtaccagcagccaataaaaatatggcaataagtttcagggcaggtatcacataaaagacaggtttcattatcagtgataccaaacttggttagtcggtcttgggttttgcaatctcttcttacaagccaaccaagtgatgaactcgtgttttggaatactaaaatgattccaaataaaagtatacccaagtttcttcaagctctctttcggcttaaagcttgggacaaagttgagaaatattgaattttattagattaactttgtctttaatctcatcctttaccactacaattttcctccaataccaactctttcttgtggagctttatagctccaccaatcttggtttttaatgtacaccgagttaatccatttcatacacaaattatccttttttttagcaatgtctcgcacatacctttccgaagctacaatgttcatgtttaatatttctaaaacccaattccaatgcgcctttgttgaacgtcgaactcaatcccacatgctaggaatggctccactgaacaatctgagaacgctcataactcatagaacataagcactcacacttgaggccaaatcta

SEQ ID NO: 54393 - DNA, 853 bp, Cannabis sativa
  modified_base (373)..(373): a, c, t, g, unknown or other
  modified_base (652)..(658): a, c, t, g, unknown or other
tacttgcatcttggataaatgctatgtccctcttgctcaattcccttttgataggaaaggactttctgtatgggattgttccttgagttgccttgaaaatggccctaagtttctctgtcaggaaaggtgaagcatgtatacttctcctccttgatcttctaattttgtggcgtggaagaagtattaaactttccctttttgccactgtttctcccagggttgtgttattgtgcttactcctagtgctcttgccactagaggtttgggcagagttgctggtacttgcctgagtgttgggttttgtgtcttaaataaaacttatttaaatataattagatttactaattaataaaagatcagaaatcattttatnttgcatggttcacatgattaattttataatttacaatacacatttttaaaagtgatgtacgaatctacacctatttttttcggcactggacaaacttttttagtctattttttatatagtagtgtatattatagttatttaagatattttacaaaattttgaaaagtttaatacgctgaaaataatgcacttctttaaaagtggcacattgatatacttttacctgtttcggcatttgagagacttgtttagtcttttttttatggtcgtgtacattannnnnnnttaagacatcctgcaaaatttaaaaaaattaaacacgctaaaaataaagttcaaactttctatcgcgtgactcttttaaatataataattgtgctaatttttattaattaatagggatattggcggctaaaccacctgaactttacggtttgtaacacttaaccaccaaaactgaatttttggcggctaaactac

SEQ ID NO: 54394 - DNA, 1824 bp, Cannabis sativa
catcatatatacatatattttaatatttattgtagagtatattatttatggtggaccaagtgaaattgtgtaagaaatatagaattattctcaaacaatttttaactttttgagaggattaacatgaactgtatccctcaaaacaagatttactttcataatctctattttaagaatttaaaaattaagagcattcttcgacaaaagaatctcacaggaagttagtggtgattgcttgggcgaagagttcaaaggatatgtacgttttcaaaatcatgggtttcaaaatcatgggtggttgcaacaagcaagcactacaagaaaaaatgtttacgataacaataaaaaagtgtaattaaatgtattttataatattttaaaaaatattctctattttatttgatgttaattatgtgtggctgtatagaattagaatggtgagaatggctaagatgatggttggggaagaaggaggagctaggaatgagaataagaaaaaaaaaaaagaggattttttttttattattaaagttttaattttttttataatttattatatttaatttttgtttgccatggatattattatatttgtcatgtaggataatatagtgattaggattagccacatagacatttaagagagtaaaatgaaagaaatagtggatttgcaacttgaagtgaacttaaggtagttttactactaaaaaagggaattaagtgtataaataagggtttaagtttagtataaaaggcaacaaaataattatttattaaaaaatagactaatataacatttaaattatataagtataaatttactgagacaattctaatataaacttaatattataagaatataatatatgatatcaagttatgataattttttaattgggtaataaaagatattaaagtaatgatatgattagatgttaaatatatatgtaattggataataaattaggccttcaaaactttaacactccattacattatttatttagacatattaaaaagtcaagagagaattagaattgaatgtaatcgaagtaattacatagttttgcgcatttatataacgtaaatacattgtaactgtacaattgaaagtatactctctaattcttataccccatgtatattgggtataattaaactgtgtaattactcaaaacttccaattttaaatattaaatgctaaaaattctaatttttaggtgtaatttttaacaattttgtcaaacaagacaataggaattcataagtaattatcacctaatatccaaatatgatatgtattttaaagtacagtttaattactatactgtgtaattactatcttagtaattattattattctagtaattacactatctagtaattacacaattactttcaaaagcatcctaaggaaagaacaaaaatagaaaatataaaatttatatatagtctatttatattttttttttaaattaattagtgtaatatttataaacatatatttttgtgaaatttatataaataatctattttttattttttttttcatttcattattaattgattatgtaattataaaaaattgtttttgttgggtaatgggttgtgtataatatatacattttcgatacaaatatggtagtagaatttgtctattataagtttaatttgaattaaaatatcatattttacagtaaaagtcaaaatctcatgtatatttatatagatttgtaattttaagggaaatttacatgtgcagccgttttttatatcttattatcagtaatattgtacaatatttaattaataattttaccgttt

SEQ ID NO: 54395 - DNA, 624 bp, Cannabis sativa
tgggttcacttaattatgggttgtgtcacttcggctaagtacaatatcgttcatggtggtcgcgaaatgggtccgattatcccttcaagaggtataagacaaggttgtcctctatcgccttacttattcattttgtgcgctgaaggattatctgctttgatcaggaaatatgagaaccacggttggatccatggctgtaaagttgcgaacggcgccccgagaatcacacatatgctcttcgcggacgatagttacctttattgcaaagcaacgactcaggaagcagtaagagtacgcgaacttctagccaaatttgaaagtgcttctggtcaaaaagtgaatctcaataaatcctctatcttttatagctcaaacactgtggaagctactcgagtacagctgaatatggttcttcagatgagacaggccacggagaacaacacctatttgggccttcctagtaccatggggaggaataaaacggcggtcctgggttatttgaaagaccgggtgcgcaaaaggcttcaaggttgggaaggaaaatttctctcacgagcgggaaaggaagtcttgatcaaaactgtggctcaaaccctcccaagttacgctatgagcgttttccta

SEQ ID NO: 54396 - DNA, 810 bp, Cannabis sativa
cgatctgccaaacctcaaagtctggttgttggattccttgtgcgtgtggctcaagcgccgcctctttcttctacgaacatctcacgcgctggcgtgtggagatgcatgtgatggtgtcttcaacggcaaatcttcttcagttcgttttcagctcctcttaaacctactcgcgtttgtctcaggttgtagtttgttttttttatccctactttgtagttgggtgttctttatttgttctttgttgttcaactctgtcttgtctcttccgataattgtttttgaagttatggcagagacaaaattagatcaaaaaccactagttgtttctaatgtggttctcgtggtgtctaaaattacagaccataaattggttggttcgaattatttggaatggagtaagacgattcaagaaaaatatggctctgtgaggattctcacttgtgccttcaaattcgaaattctatcgataatgaggtaattagtttgatttaatcattgtaaattggttaaagaactaatggattacttggagtttttgttctaacagacaacatatctcgcatatatgatgtttgcaaagccttttatcatacggagaaacaagatcagtctcttatgagttactttatggcatttaaagaaacatatgaaaaacttaatgtgttattgtcatttagttctgatgtgaaagtttaatagcgccaacgagaacagatggctattatgagttttcttggaggattctttgactctgcaaagtcacaagttctctctggttctgatgtctcctctttatgagatgtgtttact

SEQ ID NO: 54397 - DNA, 1274 bp, Cannabis sativa
ggtcaaagtcattatatttttattatttaaaaaaattagttcaaatataccaataaaaaaatgacacgtggatataatggtttaacatataacatttaggtacttaaagttctaaaaatataatttaattattattactgtcaaaaattaaacttaagtatttatttacaactaagaattaagcttaggtattatactgcaaattactcaatctttatattatagtttttaaatttatttgtaaatactaaatacaacacctgtccactaagtcttcacttgtccacattaaaaaaatgatttgtagatataaaaaatgagccattttatagtaatgtccccaaaaagtttgtcaactctagtcagcctaagaaaaataaaaaataaaaactctagtaaagcctaataaaattaaaataaaataataatatattggtgagtgacatttttaattatttactaaataaattagataaatacattgagaataaaaaataaataatgtagagagacaaagggagcttatctgaaattcggtattgaaaaaattagttcaatatttatttattatcatatatatgttgtaacagatcaaaaaattctgaataatttatgtaccgataaataaattaaaacaaaatagtatgagaaaatatagtcctgtatgtaataaaatatataaattttatttttgacattctaagctacttaaattatttaaaaaattttattattaccgttaaaaattaaatttaaatatttattgttaaataaatatttataatataaattattcttgtctatattgaacaacatttcacattaaattagtctttaaaattaaatcatataatcttagagcattttcaataggaaaactcaaatttagtattaaatcaataccaaaaaactattattcaatactattttttttttcaattctaaccacaaacaatactaaaaattacactaaattttattttctttatttattattttattaatataataagaatattttaatattaaatatatgtaattatttagttttttttttctttaaagtattatttaattattatttaaaaaaaaaaatagtgtagtctacagtgtcttattaaatttggtggaatagtatagacaaactatttataagtatagcgttagtgttccattagaataaatatagtgtgaaactacactatatttagtgttttagggttcattggagatgatcttaggaaatgtgaagagtatttgtaaaagctgaaaat

SEQ ID NO: 54398 - DNA, 3910 bp, Cannabis sativa
atgtctgcagaaccccaaaacacaagaaacaacaaccctgcacaatccactccagccactgcaacatccactgtaatgggtgctggctcaagtttttctcagcttcaaaacctagcctcaaaccacttcagcaccctcaatcagcctttttctctcaagcttaatagacacaactacattctatggaaaactatggtctcaactattgttagaggccattgacttgatgtttttcttaatggtactaacacttgtcgacctgagtttattgatgcatgaacagtcatggaaagcttggatactgctgattctcaagttgtaaatccagcctatgagaactagatcatcaacgatcaactcttgatgggctggttgtatagctcaatgactgagactatagcaaccgaagttatgggagtagctactactgcagggttatggaaggctcttgaacaaatctacggagctcattcgaagtccaaaatggatgaaactagaaccttgattcaggttactagaaagggaaacactcccatgacagagtatcttaggcaaaagaagaactgggcagatcttcttgccctacctggagagccttatcccgagtgtcagcttatcaccaatgtcttatctggcctagatgtgaactatctcaccatagttcttcaaatcgaagctagacctaagacatcttggcaagaactccaagagttgctgctgagtttcgacagcaaaatagagagattaaagccatgtcttcgaatggcaaaagcattaactcattgatggatccccaagctaattttgctcaaaagccacatgttggaggacaaggaagaagtactaccaactatcctcaaagtcatggaggcagaaactcaggcagaggtggtggaaatcgtgcaagaggaagaagaaggttcagtggtagatctagaggtccaaaacctacttgccaagtctttggcaagtatggtcattcggctgctgtgtgttacaacagatttgatgagcagtacatgggtttagatccaaacaacacaacacacaacaagaacagcaacaacaacaatccttcagcctatgttgcaacaccagaaactgtggagagtgatgcttggtttgctgatagtggagcaagcaatcacatcacatcacacctgccactgcaggaaggtcaatgtccataacaaaaggtgaattgctctctaatactacagtctatagaagtgtaattgctgggctgcaatatttatctcacaccacactagatatttcctatgcggttaataaacttagccaatttctgaaggcaccaacaacagttcactggaatagagctaaaagagttctaagatatttaaagggaaccatgcacaagggccttcatatcagctgtgatgaaccgctgaatataactggatattcagatgctgattgagcttgttgccccgatgacagacggtctatagcaggttattgtgtcttctttggaaatacccttgtgtcatggtcttccaagaagcaaacggttgttgcaagatcaagtacggagtctgagtattgtgccttagctcacgtaccagcagaaatttcatggattgaatcactactcaaagaacacagttttaaaacaccaactgccattacatggtgtgacaatatgggagctaatgctttggcctccaaccctgtttttcatgcaaggacaaagcacatcgaagttgatgttcacttcgttcgggacaaagttttaaggaaagagttggacatcagatatgttccatcatctgatcaagttgcagattgcttgacaaaggggctgtctagctcaaggttcaatttcttaattgacaaatttggagtgatgaattcacccctgcatttgaaaggggatgtgaagaaatgaacctatttctcccttgctgcatttttcctctctgctggttgttgtggtccaagtttaggacaggtgtctatctctttatttattggagatccctaggtagatatagccgttattcttgtaatgatgaggcaatgattgtttttgtacgattgattctctgtttgttacaattgcctacagctgtaattgagccattggctttcctctgtaatggtctctttcgaccctacccataaatataattcactcagtctcttgcaaaattgagctgagatttcataaaccttttctgcattaattttcacttgctgcctgtggaaaagactatcatgaccaccccagaaaaggctactcgaaagtgagagagaaagttttcaatgtaagaagtttcctaccttaattttgtctgatagccaattcaaatgtggccttgtttacccttgattgtttctttttattttatatataacacttaacacaggctcttgttggtctcaatgtgtatgacatacttgatacatgtttccataactcaaatgggaagaaaattcaaatggaaacaagagactgccaagtagttttaaacaactaaagaaaatagacaagcctcttcctgtgtgaaaaagaatgttttgtcgcacttggccttttcaagcactagtaagagatggaattcctccaacatggctcgagttgatcaccagtgctgaagttgaatgtactgtaactcttgcaaagaactaaaaaaaaactgttatggtcaagtgacttagttcaaattttatggttagttaagatacttgttttcatttaaatcagaacgatagagctgcatcagcatggctaaatgatgaaaatgtcagacaagcaatccatgctgcaatggtacacagtacccttcgatttgaacttattaataagcaaatgcccttcttctgatattattttctttactatgtaataatgtcaatcatttgagctcaggaaagcgagataggtgagtgggagttgtgttgtgatagattatattatgaccatgatgctggaagtatgatcccttatcaaaagaacctaacaacccttggtcttagagtactcatattcaggttcatcttaatttttatcttttttcacatgactgtatagtttttgagattaattattttctagtaattttattctacttgactgcattggataccatgatatgtgtgtaccatacacagggagttaagcatggataaaatcacttgggtataagactgtagataaatagaggccttggatatcatcaattaaccaagttgcagggtatctataatattagtttcagtgacattatttaaattaaaaaatatgaaaaatggatatccttcaactttttttttttgaatagatattcttcaacatggttatagttttgttgttaattttgtactgtcattttcagttatgtacagggataggacaacaacctcacttttctcaccataaaggtaatataattagtcaaaagagttttttttttttttttgatgcaagtgtgcctcaaaaaggaggccaaagagttacacttgttttctgttagaaaaatagataaaaattgataagaaaattgagtttggagttcacatgattaatttaatgatgaattaaaaagaaaaaatagtatttttaaaaattattgtaaagttttaaaattaaaaaaaatatacacttttttttttaacaaaaagtaaaaaaaaaataataactaaaaagaaataagaaattaactatataataactataaataaactataaaataaccgaaaataaacagaaaaataatatcatgacaactataaatagactataaaacaactaaaaaatagtttctatttttactaaagatgtatttctgtaaataaaaaaaattgaagcataaaaataaaaaaaaaattgtggtgacaattttgtaattttttctaaatttttgatctgttagaatttgggataagg

SEQ ID NO: 54399 - DNA, 905 bp, Cannabis sativa
ttttttaattctaatcctgtatttttaacgagatgtcctaattatttgagttcacctaataaaattctataaattattaaaaaaaaaaaacaacaagcacccccttaattccttccttttgttgtagagaaattctgttttttggtgcttaaataaaaaacacaatgtaaaacacactattctcatcgattatttcaacaatctagaattaaaaagtttcaaagaaaaaaattcttataaaattaaaagtcacagagacctaaagagaatagataatttaaggatgaaagagagaataaactaaatggcttctcttgaaacatttacatgggactaaatatacaatggcaaaggcaatacaaagttaaaaactcattagaaaaagagaatggaaaacaaaaaatgagtcgagttgagtcgatcaagctgagggttgtgttcgcaacttgttggcgacatagagaagatgactgatatttgttggtggatagttctgtaacagtttgagattcgaggtgaaatcacccgctaatagtcgcctccgaatgagaatcaacatggcgcagcatactcgcagaagggtttcctacatatatcacacacaataagaatttgtatacataacaacattattcttacatataaacgaaatggagtaatcgcaagttaaagactttggataataaaagtataactacaagagcattgcgattaggcaccagtagtaaaatgttaggtacaacactactatcatgtggcgatttacgagtaataagcggttagtggttttttataattgaattgcacaattagcaatataacactttttaagtagtgttagacactgatagttctagcaattcactaaataagtcctacctgaggaccttcaggatcacttagaa

SEQ ID NO: 54400 - DNA, 1152 bp, Cannabis sativa
  modified_base (836)..(851): a, c, t, g, unknown or other
tttgggttcgggatggagactgggtgtggatctaggtcccgacccttgttctgtgtccctagtcagtttccatgttttggtctaagttcagtttcggtttcgggtccccgatccaggtttgggttgtgatccgggtatggctcccaatttgggtctagatcttatttggagtccgggtcctggtccggttacggttctgtatctaggtccgatttcagttatgattccaagtcaaagtcctagttccagtcccaatcaactttcagttttggttccaattttggatcccaggttacgggttcggttccacttttttgtttgggactgggttcaggtccgggtgtgggttctggtgcttgttagggttcgagtccagggctgggtcccaaatccagacaccgactatggtttttgtccaagcccttggtcccgattcggatcccaatctcgggtcccagtctggttcaatttcttgtaccgggtaacgagctgggtcctaagttcaagtttgggtatgggtcaggtactaggtcccggtcctagttctttttcctaggtccgtatcctgattcttggtccaggtctcagttattgtgtgggtttgggtcctggtttaggttttggttcgtatccttgtctcgattcgggtccttgtctcggttcgggtttaggtctctatttgggtttttatttgggttcgggtttgggtttaggtccttggcctggtcctcgttctagttcagttcttgttccatttcctagtgtgagttcgagtttgggtttcagttcgggtcggagttcgagtgctggtataagtttgggttcgggtccggatnnnnnnnnnnnnnnnnatcaggctccgggtgtgggttcgcctcctgggtcttggtataggttttgtccgagtcccaagttccaataccgatctatgtctggattcagttctgggtcttagtcctttgttctgatttttgtcttttttcgagattgggtccgtgtccgggtctagctttggctctgattctaggtgtgggtttgagttcgggtctgactctgtgtcctggtttttgtcctggtctggaccccgatctgtgtctaggttctggtctaggtccaagttcgggtcccgcgtgcgggtccaagtttgggtct

SEQ ID NO: 54401 - DNA, 724 bp, Cannabis sativa
ttggcgggtattttggcgccaaatgccaatatgacgcctatcttttgctagcgagtttaggcaccggcaaaaataaattaagaaaataaaaaaaaatttacaaaaaaatgtttttccggcgagcaatgcgctggcaaatttttttattaaagaaatataaaattaaaaattattcttatgccgccgacatatgcgctggcaaaagaacttaaaaatattaaaaatttaaaatataatacttttaacggcgcatgttacgcgccggcaaaagtttcttttttttaaaaaaattaaatatataaattaattttaaaattaaatttaaatttaaaatcgaaatagtattaaatataatatcaaatatattataaaactgaaatttatactgttattacaaaactatattaaacttcataaactaagtaaaaatattctgagttcataaacagtaatattatctacagtgtaaactaaaaaaaactacaaatcaacagcatcatcatcgtcatcaccgggaggggcagtctgtgaggaggaaccagttgcatggctagaagactgaaatggtggaatcgaaagcaaatccggcatgttaaatcctggaagagcgctggccaattggattatcctatttttaaacaaaattggaattagaaaaatattattaaaaatttccaatttaataaaattttagtcatgttgaaaatatcataccccgttcaca

SEQ ID NO: 54402 - DNA, 1484 bp, Cannabis sativa
cgatgaattaatgtcgatagcccacttttcactagcaactatgcatgtcggtgaaaattacaatgtcagcgaagactattattttgctcacaaaatgtacttcctcgatcagaaaacaccgacaatctttatcggtagaattacttgctggtaaaagtttaccgtcacatttagttgacttttttcggtgcaaaatgtgatcgacaaaagttcctttttatagtgattgaaaaatatcataattcatcactcccagcggaggatccatgtccttcttacatgattaaatagcattatcatgagacaacaccttgataaccaaaacgatgagccacctttaaataagcatggcccttaatcatagcttacttgttgttgctgttctcattttattttcttttcatatttataaccttgaatattattattactttttttttagaaggtttataatttattttttaattccagatagataatgctgagaatatattattaattcaaaatagtaccatttacactacttaaaaattatattttttttgagaaaaagatataattcatcaaaataaatccgctgttatagaagaactcaaaaattgtggacaagcatccttccaaatataatctccaaactagtaatagaggttgtcagtgtgtgggcaacaccattcaccaaacgcgaaatagcgctacaagaaccaccaccaacagtagctaataaagaatagacatttaataaaatagattgaacactaaattcatgtgaagattattaatccaactaattgctattgtagaatcactattaataatagagatacagaagccatgttgatgcccaagagacaaacccaattgaatggcaagcaactccgccatattaacagagaaatcacttaacacgctagatgaccacgccacccaaaccacacccccccaaactgacaaaacccctctctggtaccatcaaaacatcagtcactagagcaaagactcgggcgacgatggaatccatcgattaggttggcttaaagctaagtttgcaaggcccaaccccaactgaaggtttggcctatcgtattccttaaactccactaggtgattattggccaattctggagtaacatctaatttagattgcttgtgaccaaataacactgagttttgatcataccaaagcaaccagagagttgtcatcagtagtgcgaaatcctcacgagatagcttgtaaaaaaaatgagaatatcaagcattgatccatgtacacctcgacaaagcaccgaccacacccccacctactgccacactgaaatcaacccagagcaagaaaaaagagcatgctcaggagttacaggttcctctctgcatcgtgaacagcgaataggtacctgaactttctgggagataagttgtattgctactggtaacgtcgaatggaacatacgccaaacaaaaactttcacctttggtggcatagcaag

SEQ ID NO: 54403 - DNA, 2891 bp, Cannabis sativa
  modified_base (143)..(154): a, c, t, g, unknown or other
gccttctcgctgacaaagaatacacttgcgattacaagattcccaagtatacttcttggcagcaaataattgttccatgcgaagaccaagcctgggatcacttggccgaagcacaataccttcaaagcactgcccctcgggannnnnnnnnnnnagcatcccgaggtaatcaatgtggctggtcaccaactgtacttagggctgagcgtaatacattagttaccttccaagactcccgtcttaattttcatacttggaagtggaccgcaatgctcataagtttaacaattgctatcctagattccatgtccagatcaactgtcgcgagtccttttatggtatagccgagcaatatggtaccatggatgatagggcaggtcacatagatgcgagttgggatttagaaccaatcgagccttttgatatattcaaaattacaggctgtagcgattttagcaaatattatggtccttctaccccatcatctagtgatagctcgccttctagtgattttggtaaatcccttaggtggaaatttacactcctcccctttttaatcatcttttataattattgtaacgccttatctcgttttgcagacatgggttacgaaaacatcctggatcgtaaggggaagaaatggttcaatccaactctggagtccccattgccaccgaggtggttcctcccaagaagcaaaggaaagccaccgcccaaaagaagaagttatcggccaagcctcttgatctcgaggtttcaaacaacgagatttaagagcaagttcctcctccagttgtccctcaggccaatgcccctcatcccgaggtgactctcgctaccgcttctcttagtcaggccatcgagaccctttcagttgcagctggtgaaactggctctgagttttcccaggcatacggagtcgcttgttggcacaaacttcaaactctccttccccctaattgggattttctcaatcttaagaattcagagaagatgatttcctgggccttggattgccacttcatggtatctcagctttgtcaatataattcttttttatacctcttttatactcatctgtctgcaattctcaatgcttcctttgcttcttttgcttccaatcgactactctccgagcagcttgagtttttgaagagcgagactcagaaattaatatcccaatgcaaggatgtgtgtgagcaacgagacaatgcacaacaggagattactcgcctcaagcaagaagccgagaaagcgaaggaggaagcagagacaagaaagaaggaagacgagaaggaaaaagaggaggccgagaaggccctcatagtccaagctgattagtttgaggagaagcttgctgagaaacttaccgagaaagaaattgagaccttagaacggtgcgataaagttagtttttgcgctgtataccgggtctggctttggaacctaatatggataccagcttcttggaggagaaggaagaggagacttagcgctctgcgagaagaccaagatggaagaagatgacgacgaagttgtggaagaagaagaaattttgtccaagtctcccagcatgtagacttggtttatttatctcattttttttttagaaaatggccctttggccgagacaatggttttgcccctagtggcactttttttgtaaagacatatttgcaaggttggacggccaactttgctttttcaatgcctcgcacttttaagtttgaactttattatgcggatgtttacttgcattttattcaaaatataaaacatgcataaagtttattaggggtttccattgattgtcctttctttcgacgttaagtagttaatttcctactttacgtgcgagcagatcttctcattcctcaatctgcgaactgccatcaattccatctcgcgatcatcagaaatgatcccattttaagcacattcaaatatatttttaatgaacttgtcattttatatatatttttattgcttacatgagtagttaaaatttctacccacgtgttgggtttacgtattttttgaagacatttgaatgtctcgtttaatacttccccctagcgtgaatcgttagtattcagttttatgcgctagtcgtaacttttgattttcctttctctccagataggttataaatcaaaaattacaattgtttgatccctttctcatcagaaaggtttgatcaaggtgttataacgattcgaccccttttccgtcaaaaaggtttgctcagggagttataaacagtttgacccatgttctgtcaaaaaggtttggtcgaggcccttttataaggttttcaaaatttgaaactatgtgtttgcattgtaatatgtatttccagatcaattctgattaatcatacatatatgcccctcaagtaattttaaagattttacgctttgtaattacttgtttgaaagaaatgattattttattcacaactggaattcaaaatataccatcagtaatgtgatttataatcattaatctcaaaataacttccccaattcaattgtatattttatcaatcttccaggaacatccggttttgataaaacaagttttgatgtccagggtcaatcgccaacattcacccacaatcgtttcaatattcagggtcgatccctcacatataccggagttccaggtggagtaatcctggttttagttctatcttcggctgccactagttgacgtccttttatgtcaatcatagcgagccagtatatactcaagtcgcaattcttttacaagtttgcctttatcggagtaactgcctttgtactcttgcgaccctctccctctcgagataaccaatgtgtcccttcttctcgtgaaagagggtatagtcttcagttgctcgagttattggg

SEQ ID NO: 54404 - DNA, 1059 bp, Cannabis sativa
aatctaacatgtaataaatccataattatataattataccacttctcacttttgaatgactcatgatttactcataacataacctttaattacaatggatagtctggctgcatccttaatcataaccatagcctaataattccttacttttcctcacaaagaaagctcacaaatttaaatatctcatacccaaataaaatatatgtaatttatatatattctcttattattattattattaaaaggtctatttattcttttcaaacaacataaaatcagccatgtcaataattttaatttttttttttaaaaaaagtaaattaattaattgagcattaatttataataactaaaaagttaaaactatagctcaaatataaaaacaaaaatgacactaaatagatgagcatattaatgccagagtaagcattttccgtctttcttgcgttgtacttcaggagcttaggcgccacgtatcaaggccatccttccactcgaaatatgcattaaaaaataaaaactagcagcaacaaaacatttagttcagaagtctaataactaacagtggcaccagtaacatttctcacagaagagtgattatatatgcactaacaattcttaaataattagttaacttgagtttagctcaaaagtataaaacatgatgtctaaatatgttaactttcatctcaggttgaatactcctcttaattagctcaaaaatgcatgtatctcttggatgaagacagttattcattgcaaattcagcccatccagtagaaaatttatattctgatccattaacaattaacttcacatcatgcctgtattcatcctcaccaacccaaagactaatagtttctgtcttttcctcaaaataatggcttgcaaaatccaatggaataggctgcaccaaaaatgtcatcataatttaattatagtatgcataatttgagattatcattgtaggaaatttaagataggaatttaccatcttggccctacaccaacaaaacaaaccaatcaatatttaaggtcaattttgacctttccctgttc

SEQ ID NO: 54405 - DNA, 1132 bp, Cannabis sativa
agagttaatgaacatacacaaaaatatctattcaaaccgtttaaataagagagaacataccacaaattacatatgataataatataatgttacgtacaataataagtaaagcaattcactcaccacaacacattatcaagaaaatcatcatagaaactaaaggcaaaaaaaaaattaaaaacagaaaaaccttctgtcaaaattacaaaattgaaaaaggaataaatgacttaaaatagagaaaatagaaagaaatcaccttaaaaatgaatgacacctattgattcaattttgagggacatagaggacaatggaaattcttctctataacttcaacttttcaagggacagaataatactatttctccatatagttcttcaatttttggttgcatattcccttattgatatatttatctatataaaattgagagagatagttgtagaaaataatgaaaaatgggggtcttattgatgacattcttatgattgaataaataccatgttgttatgagagggaaagaccgacatgcggaaagatgaaaaaaaaaatatgttaggagtttcatttttaaataataaattaacaattattcaaaaaaataataataaattagcaataaatgatgataaatatatatacataaaaaataatattttttcattaaaaaaaagagagaaattagaatgcttaaaaatagtgaagatgttcatagagactgccacattaccgtgtttgtgctttcctttgtttatatatatagatatttccacttaattaaagtctgtatgtgtctcttctcctctcccatttaatttttcttttattaaaaaaactttatttaatttaaatctaactgcacatatgcatatcttcccttaatattctatcattttctcatttttcctcttcattttcttaagttttccatttataatatctaacacatatctaaaccttaaacccaactcttatttatttatttttgctctcaccttctctccacgtaattatcttttctcttttcatcatcttcaattttcatctctaatccatgtctaaacctaatcccgaaatctgttaggttttatgccctaaataaaactccatttcaatctaatctattttatt

SEQ ID NO: 54406 - DNA, 1684 bp, Cannabis sativa
  modified_base (275)..(277): a, c, t, g, unknown or other
  modified_base (1209)..(1209): a, c, t, g, unknown or other
ttgcccaaggatacactcaggttgagggtattgactttgatgaaacatttgctccagtagcaagactggaatctatcaggttacttctttccataacttgaatacttggttttaaattgtatcaaatgggtgtcaaatctgcatttttgaatggttttttgaaggaagaagtgtatgttgaacaatttaaagggtttgaggattctcattttcatgatcatgtttatagattagacaaagctttgtgtggcttgaaacaagcaccacgtgcttgnnntgagcgtctaactgaatttttgctttctcatgattacaaaaggggaaatgttgataaaacacttttcatcaaaaacattaatattgatgttaatgttgcttagatatatgttgatgatattgtgtttggttctacttctaactctgaagtgcaggtttttgtttctcaaatgcaagaggagtttgaaatgagcatggtacatgaactcacttattttctcggtctccaagtgaagcaatcagttgagggtatgtttgtctctcaaagaaagtatgcaaagaacttggtgaaaaagtttggtcttgagaatgccaaacataccaatactcccatgagcacaacattgaaattaactaaagatgaacgagcaaaggtagatcaaactttgtatcgaagtatgataggcagtttgctttatctcactgctagtcgtctgcacgatatcagggaaatcccatgaatctcatatttctgctgtgaaaagaatcattcgatatgtaaatagcattgttgatcttgggatttggttttctaaaaacactaactctaatcttgtttgttttagtgatgttgattgggcaggtaatgcagatgatagaaaaagcactagtggtggatgtttttatcttggaaacaatcttgtttcatggcacaacaagaagcaaaactcaatatctctgtccactgtagaggctgggtatattgttgcgggtagttgttgtacccaattgttatggatgaaacaaatgatggcagattatgggtttgatttgaaaactttaactattttctgtgataatactagtgctataaacatttcaaaaaatcatgttcaacactctcacacaaagcacatagacatccatcatcactttattagagagcttgtggaaaataaaactcttgtcttagaatatgttgaaactaccaancaaatagcagatatttttactaaagctcttgactcggtccgttttatctctctaaggaaatcctttgtactgtttaatgtttgtgttcttcatgatccttgatttttgagttgacttagggttcataatgtcttgtatttgtctttgttctagaagaaaatctcaaccttataagaattgcagtcattattttattgctaatgtgtttggtgttatggtttggtacaggttttgttcaggaaaattattcactcctctcaggaatattcaggttcttcaaactgtttatgtaagctaccattttcaaaaagtaaaataaaaaaaagtttaaaaacagtgtgttcaagttccattggatgaatagagctaaatatctcaatgtgtgaaagtcgtctctgagtaagttagaactatgtaactaggggttatgtagaagatacgctaccattgaggtagtgtgacagcgtctcctatg

SEQ ID NO: 54407 - DNA, 2856 bp, Cannabis sativa
tttttgtgataaaattgagctttgaaatcttattattattttttttataaataaaaatattatttggctgacattttaattatttattctaaaatttgaaagtaataatttatcttttattagatactattttgaattgcaatttaagtaggtcaattaaaatttaagataatatcaaagatatttattttataattccaactcatattcttatttgaattatatacataggatacaacatataatataagaccatttaactttacacactaatatagtgtatatatataacatatattatatattgatcgttgagagtcatatgtatatttaacaattaatcccaatcggggtgctctcttttttgtgaataggtaaggcttccttttaaattttactcactgacaagaagattaatttgacttttccttacagtatatgcatatgagtgagaccctctaggaatttgattcacaattttaaagtgtaagccacctattttctcacatcttcaccactcatgtgagcaaagtgtctatacatcacacacaaattaatgtcattcttgaacatattgtatatatatatatatatttgacaattgaatatatatatataatacatgctcattcctcaaacaaaggcacacgattgcacacgcatgaatccaacttcttgacttcgtttctttcatcaaattaattcattcattttttttaatcatgagcatacatatatatgaataattttacatctgattttagtagagaggttcatgcagatggatagatcaatcaattgagatagttttagatagatcttttcggctcacagtttttttgaaatttttattagaatccccatattgtaaaaaatttggcagcataacaccatgaagatttatattattctcttcgattatataacacgtattgacttattttctgtagtctagtgaatcgaagaaaaatataaaaaatcaatgataaaattgacaacataagaatattagtcttttttcctttcctctttgattatatatcacatcgatttattttctgaagtctagtgaatcaaagaggatgagaatgactcttaatcacaagattgaaaataaaagaatcaaaagaagaagaatagattcctattatgaatttttccttacccttataaagcttgaaggtagactttgaatatgcagttttttttctgattctttttccctctgttttactcttacgattaatttcttgccaaagatttcaaaaaaaaaaaaattaaactgttcagccctctatctctttacagccccctttttttattattattttattttttttgataaaattcacttaacgtaaaagtagtggaggtggagaaaatatctccttaatttgctctccttttctactgagccattcctatttttttgttttttattattattattatcattattaatttttttgttcaacagatgccctctcaaacaagtgagtgtcatttatgtaagcgtatcttgcttgagaatttttttttaatattttttttaacatactaattttttttgcagcatgtctacgtttggggctctagcctctcaaagagctccagatgaattttggaaagaagtcaacattggattgcgttatcatcgctctatgtcattgccagagattcaggtgtctaataaccaccaagatcttatttttcttttttaagatcgaggatgtcagttcaggagacttaagataccattcttctgatgatgatgatgttgttcaccatgtcagaggttatggtgccatttttcgagcaaatgtcttaggagatgttgataataaagaggatggagatttgacttaccaagtgaacaaggatttctttctgtgtctttaccgttacttaaaagacaagaaagtgcataacgattttgtctttcgggggcgagccggatttatgaggtgtctcattgaatggatcgatcaagtgttacttcaacaccaaggtgtcttaagtaaggctggtatttatggtgctatttctgtatcccgatacctttttttatgggtttttcatgtttggcgagctttttcaaaactttgggtcctctgtccaacaccttccatcatagtagtggtgaaatgggtatttctttgtatgacttgaaggttatcggtggtttgcccattttaggagttccttatgaagagtttatccctcttaaagagaaactggtgagcagtgatccatgttactatactactgtagagctttaaaggatccatgctcacatttgtgattacttaaagagcaggggtgtatatagccgttctaagggtatggatgtcttctggaagcaatggattgagttcttttacatgggtctaattgtctttgaaggagtaaagatgaactcgaatgctaagactcaaaaaaaaagttagccagcagaatactaacgaaggttatgatctacgttttattcccttgaatgtaacaaaggagggtagtcttgcagcattcttgtccttatagctaagccgtttcatctttcctgccccaggtcagaacaataggcctgaatctttttatatggctttggtaatggcacatggggtcagagtttcacttgcaccttctgttttgggctataaatatcgtgttttatataattctgcattacattttcaagagcgaggtgaatgtttcctacctatgcattatgtgttggggtggttaactgagcattttcgtgatctttattgcgattgggatctcattctcgatttacctcatttgagtaagtatgcggggattccagctaggcaccaaactttgaatagggctcgacat

SEQ ID NO: 54408 - DNA, 1082 bp, Cannabis sativa
  modified_base (266)..(272): a, c, t, g, unknown or other
  modified_base (970)..(978): a, c, t, g, unknown or other
aatgaataaatcaagtctccaacaataatattttaaatagctatcattcattcccattcataaacaattagtaacatcttttactaatttaagaatgaaaaagagatgacagttacatattcaagtgatcatcaatttaaaagatttgcaactactattttgtgatcattttacacattttgtaactccataatgtatgttacaatttgacaaaattaatattttgtcaccattaattatgtataacttaattatttaatctaaannnnnnnttatataaaataatataacagagagatgggcaatccaaaattcaatctaattaaaccgaactaatataatcaaattacaaaaaaattgaatatataattacaattgaattgaattagatgttaaaagttagattcttattagattgaatcgattattggatgttaatcacaaaatacaattacaaactgatcaaatataattacatttactatatattaaaaggattatttcttgttatctatatatattacaatatatatatatatataattataagatttttcaaaagtagaaatttttgaaaatgccctatctatgaggatttattataaaatgggtctcacaatatttttgtcactacaaaaaaaaataccctatctcggcgggcccggcccgtcaagattgatcaatctcggcaggcttagcctgtcgtgaatctgtgtgccgagattgactatgggtttatctcgacgggccaagcctgtcgagattgatcaacaataaaggggggcttaggccgccgagattggtgaaaatagcctgtcgtgattggtcttcttagtggtgatttttagcatttttaattaccaatctcgacagacttagcccgccgagataggatcaaataaaataaaaaaaatacaaattatcattaattttattttcccctgccattatatatgtaaagcccgcttannnnnnnnnggaaattagcagttaattatgaaattatagctatttaaataatttattatactgttatttattgaattcagaaatgcattgctatgtcattctgtagttttcat

SEQ ID NO: 54409 - DNA, 2623 bp, Cannabis sativa
taggaagaggcttgaaaatggtgggaaaatctgagttttggccctggttcagaagccacaaagtagagggagaaggagaaggtgatttggtgtttttttgacttttcttttgctcttgacttttctttttcttttttgttccttttaattttgcttttctttttttgtttgcttcctaagcagctggtcatcctcaaaaggatgagccacagccacctatcccttccaaaatagtgactaagctctaagggcgaaaagactaaaatgcccttatttccccgcaaagttatctcgtagccctaggggtaaaatggtctaattctgttatttcattaaaccttgatattctaagatatccaataatagtgccccataaaatacttgatacaaatttgtgtccatgtgactaaaattgccattcgacccatttccagtgttaccgggcataaaaatgtaaaaatatgaaaattcagagatagcatgtatatcacacatataattcaataaaatctccagattgtgaaataataatcataacacatatttttatgaaaatagggtctataaagaataaaacatataaataatcacatagtcatattaattagtgctaagtgtcccactaatcccatgtctaaaaataatggtcattacaactctccccccgttaaaaggatttcttccccgaaatctaacctgaataactcttgatattgagtcctcatttcagagtctaactcccaggtttcctcttccaccctgctattcttccagagtaccttgactaagaagatagtcttgttccgtagaactttgtccttcctatcgaggatttgaactggttgttcctcataggatagatctggtgccaactctagtgtaccattactcaagacatgagttggatcagatacatactttctcagcattgatacgtgaaaaacattatgcactgctgacaatgctggaggtaaagctagtcgatacgctacttgtccaaccttttcgagtatttcaaatggccctatgaatctaggacttaactcgcccctctttccaaagagttttaacacttttcattggtgaaatccgtaggaaaatatgttctcctacctgaaactctatgtctcagcgcttaggatcagcataactcttttgcctactttggcaagtaagcatccgtgccttgatcttttcgatggcatcactggtcttttgaactaactcaggacccaaatactttctttctccagtttcatcccagtgaataggtgatcgacacttcctaccatacaataactcatagggagccatccctattgtactctgatagctgttgttataagaaaaattctattaaaggtaggtacttactccacgaaccttcaaaatctaacacacaggctcgtaacatgtcctctagaatttgaatcatcctttcagacggaccatctgtctgggggtgaaagctgtactaaacttcagcttcgtacccatggacttctgaagactttgccaaaatttggaagtaaattttgggtctctatctgaaactatggatttcagagctccatggagacgcactatctccttaacatacaactcagcatactgatccactgtaaaggtggttttcactagcaaaaagtttgctgactttgtgaaacgatccacaattacccaaactgaatcatacattccagtagttctaggtaatccaaccacaaaatccatggtgacatcttcccatttccactcagggagtgtcaaaggctgtagtaaccctgccgatttctgatgttcagccttgatctgttgacaagtcaaaaaccttgacacataatcgaccacatctctcttcataccgcaccaccaataatagggtttcaaatcttgatacatcttagtggtacccgaatctaacgaatatggagtggtgtgagcttcatctagaatctctttcttaagcccacaaccgtttggaacacaaactcaagccttataaagtagcataccagtatcagaacttgtgaagtccttaacatgtccagctaagacttcctctcgagttttgactaactcaagatcttccagttgggcacacttgatcctttttattaggtcagaatgaagtgtcaagttactaagttttcccaccacaaactcaatacctgaattgaccatgtcagtggctaattggggagaaattatcttggtactaaaaacttgtccagggcccttcctacttagggcatcagccactatattggcttttccaggatgataaagaatctcgcaatcgtagtccttgactaactctaactaccatctttgtctcatatttagatctttctgagtaaagaaatacttgagactcttatggtcagtataaatttcacacttttccccacaaaggtactgtcgccaaattttcaatgcgaacaccactgctacaagtttcaaatcatgtgttgggtaacgttgctcatattccttcaactgacgcgaagcataagcaacgaccttatcggcctgcatcaggacacaccccaaaccctgtgtggatgcatcacaacataccacaaacttttctttatctgatggtaaggctaacaccggtgct

SEQ ID NO: 54410 - DNA, 2005 bp, Cannabis sativa
  modified_base (1326)..(1327): a, c, t, g, unknown or other
aaggtgcccaaaaacaaatccgtgagggcttggcccaaagcggacaatatcattccaagagaaatagatggtgtccgacggtccttacaggatgttgcccatcctctaagccaacccatatacactaatgtcgttttgttgtgttaatgtactttagactatctccggccaataaaaatataaaaattgtgttatgtattttacacaaaaaatatatttgtttgtagcaatttttagcattgtctctaatgtataattgcaaaacttgacataaaatttaatatctaattaatatttttagaaaattgcagtaaaagttttcaaaaagtttatgttgatgcaaataattatccaacatcaaaaaatggcaataatagtctctcaaactcaaaatttttgtaagtatgttagtcctcattttaacaaatctgttagttgtttaaaatatcacatgttgatattaaattgcagcataagtttctaaaaaatttactttgatgcagaataaagttctccaaatcttggaaaaattatggtaatagacacaagcttaagattttcgttaatttgtagaaacacaatgtaactgctccgtttgttactctcaaaaatgacacatgttgatattttattggtctaaatcataattttaatttaaaaaaatttaaaatgaataaataattaaataaataattttcaaaattaattaatttactttattttttttatcttttctatcttttttttcttctcgttcactcctaggccaacctgtctagtcccgatttgttctactaaaactctccaatttccattagcaatatgggtcgctctaaaacaaaaaaaaatgtctaagtaaactttgaaccaaaaaagtcggtcaaaaatcgaccacaaaacccaccacccaccactacctacccatatctctctttttccactgcatactccatccatatctctcggtttccaagaaactttaagaaagaaaaaaacaaaaagcttcatcatttccaagatatatctcgatcccaatcctgatcctgatcatatatcttttttttttttttttacttaattagtttcctgcgatagtgggatgagatgaggaagaaggtggagatgaagggatagtactggtcaccagtaagcgtacaccactgagaagggtaggtaacaaatcaaagaagtttgtaaaatcttttatttttttatatatacatttttttaatctttaataaatgaaattgaaaaaaaaaagccattaaagtttttaatattttttgggtacataccattttagatcctgtgttttgcaaaagttannaattggactctcagttttgttaaatgagaaaatggatcctgtatttttcaaaatagtaaaaataggaccgtgagcttaatttttaacaacttttttttaatataattaacttgaagacaatttctaacacgaacagatacataaaatttaaacagttttgtcataacacctttaaatgtgattattattaagttttgttttgataaaaaaatcagttcaagacacttattggaaagtatctaccccaaaaaatggaagcaaaagctctactctcaagattaatttgggcttctcaacataatatattcatgtggatttcattgaaacccattctttaattttggcaaactctattaatagtccatcatcaaccctttctctatcaagacttggtgtttgacattaagaatcttttatcttatctcccttttgtttgtgtgtctcatgttaggcgagatgctaattaagctgctcacggcttggctaagcaagctttagtattagataatgattgtatgtagtttgaggaaattccctctatcattttatctattgttgtaaatgacgctttttaatttataataagagtaatttttaaaatggagtgtctttatgaagtgtaaataaaattttcctattattaatttatttatggtttcttagaaaaaaaaaaaaaaa

SEQ ID NO: 54411 - DNA, 1907 bp, Cannabis sativa
atgtcccaacaaaaacaatatagaacaaataaatgtgtacacctaacacattatattcaaccctatataaatatcaaactgccatctgaacaaatttttttcatacagtgaatgagaaatgaaaaaaaaaatacacagtaaaacttaaaacaattttttcagtaaaaacataaagaaaaaatatactataaactatttttattcactcaaattacataataaactatgaataatcaaggaactgagaaatcggattgtatcttcaccatcatcgtcctccattatacgactggtttttggggacctctactgctctatcttcaacatttagggatttagcttaggaatgaggatcaaatggggtccatattcacaaaatcgactggaatttaatgcatacacagttttcgtcttcgattttgagggatttaggttcgatttcgtgattagggttttaggtgtggataatggttcaatttcgtgttttggtttctgaaaaaattatgaaactttattttgtttcttttttattccttttgttttaataaaattagtttaattaatttgttttaaatttgttttattttttttaggttttattaatttgttttacttgttagttttatatttcagggaaaattaaaaacaaaaggcgattaaatctggtgcgtccacgtgtcacgctagttgtactaatggactgggtatgaacggacaaacaattttgtcgaccttgggtattttcattgccaatttttaagattgaggactaatcgacatcaacctcaagtttttggggacttttaccgcaattatcccattaatttattattttattcttaatagtaaaacaattttgtttcatttaaacaattaattaattttacattatttctactaaaattttggcagcataacaacttaaaaattgtaaacccaaaattttcaaaacctataaataacacaagcaaatatttcacgacaatatatgaacaaaaaaatgacccacccatccaacaccagtcaattttatcatagaacctacttcactaacatgcatagacatattaactaaaaataaaaactactagctagtaagagaaagcaaacaaacatacctgaatcgaatgcaaaattaacaactgcaggtagctatcggtaatccggagcggtcgaacagggacttaattccataaaaaaataaaactaaattaaaaatttaatacctaaatacatatgtacacatacacacatatatacgtaaatacacacacatacatatacacatatccattcacctacactcacttacacatatacacacacatacacatacacatacactcatatacacacatatatacatgcatatttacatacatacatacatacatacatacatatatacatacctacatacacacatatatacatacatatctacatatacatatatacatatatacatacatacatacatacatactcacctacacatatacacatatctacatacatacatacatacatcatacatacatacatacatacatacatacatacatacctacactcacatacacatatacacatatacaaatatatacacacatacacatacacatatacatacactcacataccatacgcatatatatacatatgtacatacataatcatacacatatatacacatataaataaatctaaatatttaaaaatatcttcaggtggtgcgttgggcggtggtgcaatcgtcgatgttgtggtggtgcggtcggaggttttttatttgggaaaaaaagagagaaacaaagagggattgagagggataaagagagattgagagaaattaagagagattgaaagagataaagagagactgagagggaatcagagagagaacg

SEQ ID NO: 54412 - DNA, 801 bp, Cannabis sativa
aaataaaaatttaagttttatgttttatttaacaacttaaatattattttcgaaaaaaaattacttaattaaataaatataaaaaagtattttttttaaaatatcaataatttttcatgaccgtgaatttttttttattaaataaaaaaaattttaagtataaaaactttaattttcgtaaataatacctattaaaaatgtaattgttaataaataaaatgtctgtcatgcatattttgaatcatacgtaagacgaagggcctaggactccaatatcattttattggttcaaatagtgtaacaagtagaattcggtaattgctggcgtacagctattaatattgcaataatttttgtcttgctcttttctgaaagggcattgctattaagtactattagtgtttaacactttttgatatattgaattgcgattggttatcaatactcattgaaagctattatattaaactatatgagacccaatatttaattggaaagataataatattgacacttaagagggtgctaaatactattagttctttttaacaattctctgaaaccgcgcttatcaattctttttttgtcaatgatgatagagaacttttgtgtaaataacgtggtgcacattacaacatcatctcatttaaaaataaaaaataccagggacagtcggaaagttgatgtttccatagaattggtaaaaaattaaatatttattttatattttatattcctcaatatcgcataaatttatttatttctctcaataattttttggataagttcataagtagatgt

SEQ ID NO: 54413 - DNA, 988 bp, Cannabis sativa
tggcttgtgttgttaagttattaagtctcatatagctaccaagtaccaaggtgtctcgtgcttactctttttcttaaaatacatatatatagttatatttttgtattttacatatctatatatataaaagagaagtatgaggcggtgatatatatgacactctaaaatctctttaatgagtattatttgtttttctttaattctctcttttctttaattttttattagtttcataaatattaattaatataaaatgtgacatggcctctaaaatttctctaatgagtatattttaatatagatattaactaaaaaaatcactccaaatatatctatttattattcctttatttttttttcatttttttattttctaataaaacattaattaaaaaaaactacaattaacgcagatcatttattttaaaaaaaaattaaaataaaacattaattaaaaaaactacactcaacgtatgtatcaaaaaatatctactctctatttttttttttattttaattaattggtatatattttctaaaatataataatttatttttttaccttttctttgtaaaactcaattgatttactctattaattagtatatatattttttaaaatatgataacatgtttgtttacgtttttttataaaactcaaatattatataatttaaaaatattaactataaaagcactttttttaaactacaccatttttttattagtttttttctttcaaatatgacgtaattttgaaaatgataactcacctatttttttttgttacttactaaactcactgtatatgtatcttaaattatttctctatatgataactcacctatttttttaccgccacgtcatcgcctcatatttatcttttatataaatatatagattctctcaattttgtaatattttataaaagcataaatttacaaattaatattttactagcataaatttacaaattaatattttacta

SEQ ID NO: 54414 - DNA, 1863 bp, Cannabis sativa
ggctttttctctctagaatgttcaagtattctgtgtgtgtttccctctctggtacccgaaatgggtttttggtccacccaccggagttgtgtggtggtttatggtgccccgatctcctaatcaaatgctatcatgattatcttcagagcattaaatgtgtctttaatgctcttgatcctctaaatcttttttttgttttttctttcccttctcaccacattaattactcctctaatcacttagatcctcttcagcctccattttatccctctttgctcttacagatcttcttaatctttggctatcaaatcattccatttctgaacgagcccttttacttcatatttatggcagcaaggaagaacgatggtcttcgtgaagctcaaagatctctccccatgatgagatctactcctagtgaagtggaggctatgacctgcaatcgtagaggtgctgatctgtggacttcctggttctttctatttaaggtgcatcctaggctacaactccaggtatcttcttctttattctcttttcttacctatttttttctgcaccttcttctagctatggctctgattcccacctcagctcctattcccttgtctcttactcctgatgaaagtgatgtcttcactcttcctgatattcctgatgattctcacccctccattaatcttctcctgcgtctgtttaccattcgtccctttaatcgtccctccctcatgaaaacactttcgcaaatgtggacctctcagtgtcaatttcccgttgttgtctctgaacactcagagggattgtttcttgttacgtttggttgcgagggtgataagaagagaatccttgatgggcagccttggcactttgctcaaagcctgactgtatttgcatctccagatcattcctttcctattactactgaccttctgcattatatccctttctgggtgcaagtgtatggcatcccatttcgctgtaagtcctatgatcttgccaagcttatagcttcgggtttgggagatcttatccaaattgatgaggataccattaaggaaggcactcggccttatctaaggggtagatttcttttggatgttaataaaccacttaggaggggtattaacattcgtttccttaagatgggtagggaatttaccaattggttggactttaaatatgaaagacttcctgatttctgcttttactgtggtaagcttgatcataccagaaggttttgtcaagcttatttgcaaaaatgtgatgaaaatcctgttccaccacctagcccttataccatccttcttagggggaaagaaaaatttatggataagtctggtccttttgactatcctcaccctcctgccttatccatctctgaattaccaccgcaatctattcctcctaatcaggggttgctaaacccgttcttggcccaatcatatactttcactggtttgttgaattctaccatagggcctagttcgtttttagggtcacctgttagttctagtgttcttatgattcctactcctattaatccgaaccttaccactcatggtacttctaattttactgagtatgttactcccctgcaatatggttctgttcctgaccatatgactattgcaccaacggattctactattgtttctgatcattctgaattccagcatcctgaggttctgatggctgctagatctcttgctgatgctattccttctcttgacttgggaaccaatatggagaggcaaactgccgctcctgatcctaatgtcaaagggaaaggtcttgcttgtgcttcaggagtcaagagacctacttttcactcgcaccaagtctaaattggtggctctctgcgttcgc

SEQ ID NO: 54415 - DNA, 2674 bp, Cannabis sativa
aaagaaataattcatttattcaaaataataaaacgtagttacccaaggcgacctcgggttacatataacgagacatccacctcgctattcataagaaacttgacaaggcagatcatttgttaacacttagcatattttctacattataatagctaaggataacaacttggaaatatgcaagatatgattgcctaaatcagcattaagcattgacaagttaagcgagaaactattgtccaaattagcattgaccatctttaaggataagaatgatatgcagttataatttgaatttaaatgtaaataactgccgacctatattcctataaataggggcaaatcccacagaaaaagggacgaagaattttagagagaaaaatagaaatatgatcaattgtatattgtactcaaaaaatatcttgaataagatagactcgtggagtatgcacatttaactgcaaaaccacattaaaatatctagtgttgttaatatactatttataatttattaatttcttattatttctatgttaaatttattacgaaaaaggtttattattggctaacgaaaatctacattaacagtttagtactttcattgagagcctacgtgataaaactaagaaaaatcccttcttacaaacaaaaaactatccatgactgataataatcaaaacaatggaagtcgtcctgatgagactacacatcgccttgggaaagaaccaatgggttcccaaagactccatacatctggaacaacacgtcgaagaagaaactatggtagaaataatcaaaacccaaaaggaaggaacgaagaaactagtactaatgtaggatatgtacccagaagtgaggacgttgatgatccaactaggtatgtaccattaatggaattggaaaatcaataactcaggaaacacttagccgaatctaactaatgaaacgctaagttggaaagagaggttgcaacaacaagggctgctcaaggaaataatacatagaatcaacctgatcttggagtaagaaggccacgaggcagacctcgaggttcaagaactaggaggcaggaagcaaatcaaggaaatccccaaaacacccaggaggagcaacctcggggaactagggatgttctagtggatgaacaatagaataacaaagaacatcttcgataagtacctcaaagatcccaaggatttacgaatcaggagaatgagcgtactgatgtgtcagaggcttctcgtaggtataagaacataaggcaacccagaactagggaataggaaatccctcgtaataacaagagaaatccttggactcaacctagggcaagtgggttaccaccgagacacccccaatgtccttctcgatctgagagggagggtgtaaacacatacttaaataaagggcaggtatctatctttttttgaaggagaaggcctctgcaagacgaggcaagttctagctcgggacactcgaggtctcgagggaaaagtcgattaagaaggcaaacacaagaaggaagcagaccaagtcttgggagaataccaagcaaaaggcttaaagatggaaaaatatttagaaaaagttcagaagaacttgaaaaagtttgattattgtaaaattaaacaaattcccagagaactaaactctaatgcagatgcactagcaaagctagcatcccaatttgatctcgataagttaaaatttggtactggtggaagtcttagacgacccaagcatatgtgaagaggaagaaatcaagatggtagacacttcaccaacatggatgaatccaattgtcaagtatctagtaagtggagaacttcctacagacaaaaccaaggcacgcaaattcttatactcaataactcgctatataatggtcgaggggaagttatacaggaggggctattccatgcctctcttatgatgtgtgttaccagtagaagcaaatgaaataatcaaagaaatccatgaaggcttatgtggagatcatgcaggttggcagagcctctccaagaagacatctgtcgatgatattactggccaacgatcaataaagacacacatgagttccttaagagatgtgataaatgtcaaaggttttcacaaatgcctcccataccaccaactgagttgagaatgaataccttgccatacccatttgcaatatgggggattgatctgattgggccattacctacagggtgaagaggagcaaaatatgcagtagtggaagtcgacttcttcacaaactggacaaaggctgaacctctagtttacataaattttaaaaaagttctcgatttttttatcaagaacatcatttgcaataaaaaaaagtttaacattccaattaaaatagtatctgacaatggaactcagtttgatggtgaattattcactgaattctatgaaatgaagaaaattattaagagcttctcatcagtatcaaggcatcaataaaatgaacaggtagaagtcgttaacaaaactttaaaagatactattaaaaagaagttagatgctgctaaaggaagatgggttgactagctaccacaagtgctttagacccatagacctacagagaaaatagcgacgggacacactctgttctcattggcatttggctcggaagcaatgttactcgtagaggttaacattgcgacccata

SEQ ID NO: 54416 - DNA, 606 bp, Cannabis sativa
ctcataaaccaaaaattctgttatgtatgcacactttatatagaatagatatttaaaaaaaattataaataaaattaatattttaatataaaaattgtgctttaaaaatataatacacatgatataaatatatttcaaaacttaataaaatcaaatagatatttcattcttatttataaacaaaattaaactttctttatacatatattttttttattccttttaatttattacctattaattttttcttttaatttattgttggagacataaaataataataatttatgatacaattaaatttgaattaatatgagaattcaattagatccaacatacaaaatctacaattaatacaaatcggatgcactataaataaaaaaatactggattacactgattaaatacctaaaatagaaaaagactccactccatgcaagtttttaacatgttaaatctatcataaaatgtaacatcatcttattttatattttcataatttaattatactttataataagggtatcatttattagaaataattttgattttgagggatatacccatcaatttggaccatctctcctaatatatatatatatatat

SEQ ID NO: 54417 - DNA, 1701 bp, Cannabis sativa
gatgtctactactaatggatgaagataaaagtgaatattggcgaggaaaccaaagatctttaaataccaaaatagaatatccagttcctattctttttcggatgccttttttaaaagagagagtgaccccaaataatactatgctagatatagctaggagattttacaactgtaaaaatatccaatgttaccacaactcaaataaagtagtagtaatgaaccaagtaaaactatacaataataaaaaaaattgaccaagaataatattattagtcaacaactttattaaacaatttaaaccttaaattggaaaaaagaaaatagaaggataaaatagcaatcaaataatagttaaactttggtcatagatgttacctatcttaataacacataaagagaacgtacgaaaagctataaaaaaataaaaaacattgatccaaaatactcctaattcagttggttaaaaggaactgtaatcctattcaaataggacaatatgaggaaataaattaacctcagatttagtttgtgctaagaattatacattatagattaaaacacaaatgtgaagcttccaaaacggtagtatggtgataatatttactttataaatttgagctggtaaagtgtttggacaagtaagaatcctccaagctcgagctgctaacatgtggcttgattataaaaaaataaatgaacgaaaacttaagccatcttgtttctttggaaaacataatttataccatgccaactaatgaactttttgttcattcgcagaagaagtcaaccaatatcttgtcattaaccctttcaactcctcacaagctttcaaaggtaactgaaaataagacatcacgtaggtgaggatagattgaataataatttttagaagtatctctttatcaccataagagaaaagcttactattctaggaatttagtcgagatcaaactttctttttaacatcattaaacaatctttgtttattttgtccgcttaacatcgacaaccccaaatacttctcaataactttaatgatttgcatatgaaacgttaatgtatataaggattgcatatcatcaggtatatttggtgagaataacatagtagatttattaaaatttattagctacaaaaaaaaaaaaagataaaaatttcacaaaacaaataatataataatattaacaaaataaacgtaaattaatgtaaggacatttcatcttttagctacaccacaatataagtctctaaagctcatattattataagtgtatatcctcttgtgacataaatgatttattacattatttagatgcaaagattcaaagttaataccaaaagaattctaaagtcaatataaaataaatgtgtcacctcccagaattaaaaaaaaaaactattttttcaggggcgacattcaattgtcgcccctaatacccttactattagaggcgactttttgtcgcctcaaatgttgtcgcccctaaaaattatgtcactgtttattgcgataaatttggtgtgtatgataaattttgtaatgcctaataatgataatcaactattgcttattttgttgtgcgcttttcatcataaaataaatgcaaccatttaaagaacaatatttaaaaataaataaattattataaatattaataattatgtggatgcccaaatcttttatttattaccatgaattgt

SEQ ID NO: 54418 - DNA, 1656 bp, Cannabis sativa
atgtatatactaaaatgataaaaatattacacaaatacattgggtagaccctatacacatttatatagtccagtaacaaaaatttacaaaaataattcttactctattcatcagcctcactaaccaccctcttcaagaacgacaacttccagcaaccaacccagcaacccaacacaatcgaaacgaaactcaaccagaaagagaaccatcattaattttggcgacttcacagatgaccagaatcaatcacaaaaggggctatttcgaattcatgaaaaaaaagtacagaaaaactactacaaaactaaaattcaaccagaaattcagtttaatttgcataaaactaatgtcatgacttcaattttcagatccacgaaatgcaaatctcaaaaagttgaactggagttcacaaacaatccaactcaagtataatccaaaaaaaattatatcaatattatagttaaatgtttatctcaatgcattttcgttgttttccagattttcaatggtgaatttgttcatattaaatcatgaatataatagtaaattcacatgtagatagagttacgtacgtagaaacaatattttagttttttatgtttcataacagttgcataaatattttgctaactctctgaaacttgacatattaattattacaaattgataacgatataatgaatttttatcatatatatacaagtgtttcatattgtcatacaatacaaagctctttaaagaaacttttataacatgtttagttttattaatgtactaaattagttgatataaatttggtttacagaggtctaacagttgtttcttcacatattactattaaggtacaatcaattattgatcagtgacaaaaaaaatactgacaaatggtttctgtagatacaaatttacattaatatttttagttgcaattaagttgtacgttagttgaataataattttactactacaatatcatagtattataaaaacatggctcgaaattgtcaaatatgcgacctaaacagacaaaacacgattgttgtaatttttgtttttattaaatatgtggaattattagttgttttgtagttttatgttagttggttcacaacagatataactgttgcactacagtttctttacagttttctaataatagactgaccataaataaattttcaaaatatcaggaaagggacgtaattctatttctcatattttataatggacagtttgatcaagaaatgaactatgtaaattacaaaattagtggcgaattcatcttaatggattaaaaatatgaagaacttgtacacaagttgaaacaagtactggaatgcaacaacagaaaaaaaaaaacactcaagtgcaactgaaatattaagtgaaagaaagataccaaccaagataaagcacaatccaagcctattcttctacatccaagcaataatatattaaaataaaatttatttgacttttttaatttttttcagaactcatacaaggggaaatgttttctttaatacattgcacgtattgatttttaaatagttgcataatagttaatttaaaattgtatgccatatcaatcctataagaatatttttatttaaggaaatatatttctatttaaagaaataaatttctatttaagga

SEQ ID NO: 54419 - DNA, 1882 bp, Cannabis sativa
tacacctaattacaatctgctaacaaggttagcaacgttcttaacaaagtatgacaaactgcaaatccagcctatactcagtactctagtcatactgatgtggtagcagtaattcatactaagtatgactaactgcgaatccagcctatactaagtactctagtcgtactgatgtggtagcagtaattcatactatctagaggcctagcatatagtatctctgtacagttttatgtacacttcacttataccttgatatactaatctgatggcaactaacatgcacactaaacatgtatatatatatgcaaatcattatgctaatcttacatcgttttttaattcatgtgccccgacgaacctaagtggaacagctactagacgaattacagacccctaaataacattaattataaaacgcataagtgacatgctaaacaactttttggagacttaaacttgaaaccaaaagtttccctatcgatggataacatggcaataccctaattatttcaaaacgggaaaaactagggttcccaaaaatgccccaaccagtagaccggttccccaaccacaattccaattttgtggggtttcctggggaccaactggtcgcccggttcctataggtctccctgaacaagaactccgacgaactcaccccacaacctcaaatcaaacccaaacagaaccataacttccacatcttctatttataccataatagacatatttcatgcaataaaaccaaggaataccgagaaatacaaaaatcaccattaaagacaaaagtttgagctctaaagcttaaacattgtccaaacatcaaaagatgtcatcagttaactcaatttcagctcacacaacaccaattccactttaaacactcaaccaaaacaaaacaacagcaaccttaaatcccaaaaactatacataaaacattaacatagaacttaagaaatcataaaatgagaggtctaagggttttaccttggattggatcactaaaaccttgtctaattcactgttttgcagcaaggaaaatccccaaaagctgctgttccttgaggattcgaacaaagggagagagaaagacaagagtcctcttaatttttcctatttcctctaatttctttagttttctaaaaactataataatcttaggataattaaacaaatagtgaccagctgccactctaaaaatcagtcaccacatcctatggtaaaatgacaaaaatacccctccccacaagcttaactaataaaattttctaggggtaaaatggtcattttaaatcctcgggtaaaacctgacatgtctaatgtctaacaaagttgccccattactactaaaatactaaactgtgattttaatggccaaacgccacgttctaatgctatcgggcacaaaacatgcgaaaacgcaaaattccatatatggcataaataatacaccctgaattcaaataaatctccgtaaaatgataaatcatagttaatattctaattcataattaaccctaattatttgccaatttccatgtaaaaactaagcggtccctacaattaccccccgttaaaaggattttttcctcgaaatctaaccttaatacaactctggatattgagccctcatgtcagactccaattccccggtggcttcgtccaccttactgtttctccaaagaaccttgaccgaagctatggtcttattccgaagaagtttatctttcctgtctaagatttgaacttcttgttcttcgtatgataggtttggttgcagctaaagatattcataacatagcacatgagcaggatctgaaacgtactttcgtaacatggaaacatgaaaaacgttgtgaactgctgaaagtgctggagg

SEQ ID NO: 54420 - DNA, 1134 bp, Cannabis sativa
cattcaggtactacttcttcttcttctctttcatttattcttttgaatactgcctcgatttagtttttcttttactcctttttttcgattcttccaattctggagttttgatttttcttcttcctcgtttggagattcaatgtaatgtagcttgtggttcacgattataggtatagttttaatggttgtgtgtgtgtgtgtgttttttggctgtgatttgctacaaactagacttgaatccctatcacttcgttttcttaagtgcttattctgagcgaactactttatctgtaagcctgcatgtgaatctaggtttttttttcttccctcttttaaattaatgatcagtctctttagtcatgctttaatcctggatcatttatttagttatataattttgactattatgggaacccaacattggaaaagcaaaatcttttagtgggttctcagctaattgattcaacttgttgggttcagtaaatgtaaagatttttttttttttttgatgagtagtcattattatgtgtatgttataatttgggtgttaagttttgtttttcttaatatgttttctaataaataaacagttgaaagttaaaaacatttcctaaatctatcatgcgattatgtatgtatatcaaatcatcaatcagtcttgtggggagtttttagttgacctaacctatgtgaccattcgtttcaggcaatttgctttgtactcatccggcctttgttcaagaatacataccgacggatcaatagagtggtagcagagctgttgtggctggagcttgtatggcttattgattggtgggcaggtgttaaggtgtttatcagctcctttacatggtcttttatttattaatctctttaatgaaatgtatttctgtttatgttctttatttggattgatactgtgatgatttctatgaaatttgtgtttcttattatgcataatttcttttgaaaagggttgtgaatgttgtcactggtggaattgaaatctattttgctatgaaagtggttcttgggaacattttcatgagattgttaagttgctttatcggtggataagcatttgcaggctgcaccaaataattaacatccttctagtgacactgattacaccta

SEQ ID NO: 54421 - DNA, 1939 bp, Cannabis sativa
aaagccatatttatcaaacttttttatagaatcgcatatatagtgtaattttcacttaataataaagcattgttatagagtaccaaatgtgcccaacactatttataggtgacgcctataattagtgatattttttaaaaattattttttatatttaatccattatttagttatactaataaatactaaaaaaagatattaagcaatgataatatttttttataacaattctcttaataataatttaatctaattaagaatctctttaactcccacaattacaataacaaattatattcttaaaaataattttttatttacaaaattttaatttttgtttccaaatcatttagaaaataattcttcaatgaaacacacaattttttaatcataacccaataatactgaattacaaaaatggccccttaaaataaatatacatttaagtcatgtgaagcaagctctcgtgttccctggctagggtatgagtatgacacaagtacaccaaaatttcaaaagaccaaatttcatctccaaaatttgaccaaactttcgtaccatatttggcttattctcttcagtcggttttcaattatcatttatcattttcacttttattttttatattgtcatgatccatactccatactatatgtcgtggccatctctgcaaaattctgagaagaaaaaaaatgttaaacagagatagagagagagagaaagaaaacggcacaaaacccaacattttaaagagaaaaaaaaatacaaaaacagaataaaagacgagagggcactttgtaattttgttataattattattttttatttttgtttaggattttttcacaaaataaaaataaatacacaaggcagagcagcagatgagacccactctctcatgggtccacagtaaaatgaggcttgcatgacgagtaaatactactagtactacactccccttttactctgaactataaataaaaatattgaaaaggaaaaaacaaaaaaacaaagagaaatataagtaaaagaaagcacctccatatatatccccaccaccattaccagcttcgaaatttgagctctccaaacaccaaaaaaaagaaaaaagagaaaaaattcggagagagaaagagaaagacaaagacaaagaacgaaagagaaagatttgatcataataacaacagaataagcaacagcaacatgagtaattggttaggtttttctttgactcctcacctgagaatccatgaggattttcaaaatggaagagaagaagaccaaaacgtccatggagatcatcatggcttttctcattctcatcattctactatgtctgccatgcctttgcgctctgatggctctctttgtgttcctgctcaaggtatatataatatatgtagtggtgtatatatacatttaaagaccttgcatgttcaaaacttaatatatatttttaatggggtttatcaagattagattttgaagtgcatgtgtttatttgttttaagattggcgatatgaaaatccaaacgaggaagatgagggtccgaagctagaagatttcttggggtgttgttactcatcaagctcttctcaccaagaagaatcagcaaaaatctattgccaaaataacaaccaagatcatcatcatcatcatcatgaccaaaataacccagaatccatgtccgaaatcacagttaatctagcttcgagtttcaaccctaataatagtagtaacggtgtggagatggaactagcaatagatcaaaataatcccacaacaaacacttcaaacttaatccaatcttacactcatcactacaacgataataatgccatgtacaaatcctggcttacccaaacgctgccttacactaacgccgcctctgaaaaatcagcgtctgaggcagacggcggcggcggcggcggaggcaat

SEQ ID NO: 54422 - DNA, 1681 bp, Cannabis sativa
cgccattgaacggtcggtttttttcttttgtaataaaccgaccgaaaaaatcgaaactgatcggcatatatatatatatattaatttattaagtattttttgcatgtattattttttttattaatattaaagttaaaagaataagataattagtttttgaataattaaattatatgtttgtagttgtaaaatgtagaataatgtatttatagaataaattggaataggttctggattggtcggtcggttttcggattgcaccaatccaaatcgaaaacaaaattttggatttttatatagaaaaaaattgaccaaactgaccgatgctcagccctaattgatagaattttcatacaataatagttatcaaagtatagggatggtatgaggttttgtatgacaaaaaatgtcaatctctaattcgctgggatgagatatgagaaagaaaataaatagatctataatcagttcagcggaccaatgaggctatagagaaattcaaggccagagttcttgcttctcagagtaggtagaaaagttatgcagattcgaaatgtagaaatatggaattttaggtaggagatcttgtcctcctacgggtatccctagtgaatggggttaaatgttttgtgaaaaaagggcaagttgtgccctagattcactaagcctttcaaagttatcgagaagtttagattggtagcttaccctctagccttgcctctaacattgttagtagtacacaacatatttcatgtttcaatgttaagaaaatacattatagggccaactcatttcttgagttatgaagccctagagctctaaccaaacttatttgataaggagaaaccaatgtaaatccttgataagaaagataatgttctttggaacaagaccaaagcattgattaaggtactcttgagaaacagtaaggtggagaggaagctacctgggaattggagtctgatatgaggtctcagtattcgaagttgttcaagttagatttcaaggataaaatccttttaacaggggaattattataatgattgcttgattttattatggaaattagaagatgattaaggatttatttatcattatatgcccctttagataattaaggtttattgtcaagaataggcttcgaattattatattttcaattacagaggtatatttttgaatgctaggtgtatgttatacatgaaatttcatatttttttttatattttatactcggtaaaaatagaatgtgacgatttagtaaatttgagtcacatagatacaattgagtataatgggataaaatattgttagacatttggaatgccgagattattcagggttaagattttgaatcattttacccataagttcttagataacttcaagtttaagtaaagggcaaagttctcaattgccatttttgtttgttagtggagttaaatggatttctaggttaatccacggttttttattataaaccaagctaaattaaagaaaaacaaattgagtcattatccaacaaaaacaagattaatcaagaaaaacattttcctttccctttctctttcctccatttttggcctaaagaaataccaaatcaaaccaaaaattctcaccattttaagaccaagaaactaaggtttctcaactgggatttcatagtagatagtgaggagaa

SEQ ID NO: 54423 - DNA, 746 bp, Cannabis sativa
aaaaaacaaagtaaaaaagtaaaaaataccgtctagcagtatttttgtaaaaaaaatagcaaaagttaatatatcatgtcaattttcaaaaaaaaacaataaacctagttacccagccgctgaagccattgtgaatggcgacaaaaaaaaaaaacaaaattaattcaaatatatatatacaacagtacacgtaattgaagccaattacaagtaattaattatatatgtatagccaatcgaagaataggcactgaagccattatatcatatacaaccgcaagaggaagaattgaattcttacggcatattaaacaaaattatatatatatatttatatgaatctaccattacctatataatcggaaaaaaaaaatgatggtaatgatcgcacaatcatacagtaatatgcttaatatatatacgctttaattttaagaactctaaatttcatcaaaatcatcaaattttcaattaattcaacaaatatggctctgatacacttgttaggatttataaaacactcaatatatatatatcacagatctaaacatattcctaaaagtactttaatatagaaaaccctaaatcacaaatctatagaacctaaaagatgagcggaagcactaacctgaagccattgttgaagattgtagaaaaagttttgatattctaagaatacactattttctaaaatattttctctgatggggaaggagagaatacaaaaaccctagtgtttcttgggg

SEQ ID NO: 54424 - DNA, 1553 bp, Cannabis sativa
  modified_base (1509)..(1510): a, c, t, g, unknown or other
taatgacttaaggttttagacataagctaatgctctttatatagtagagcttacatgcctaatatccatagaaaaatcggtaaacaaagccattgtttacataattaattaacaaagtaaaaatgactaaattgcccctcgaaaataaatattttccctctacttttgttggctattaaggcccaatctgttgcttgaaatgctatccatgaatgagagatacacatcaaaatcccacctacacgatgcaagatgttcctgctagggtctggcaggtcatgttcctactagctttgtcaagagttttttaggtcttcacttgtgtttgccagccttagtaggtgatgtccaaccttggttatggccagccttggtgatggccagcctttgtaggtggaggccatcgtttgtacgccttctccttataaaggtcaagcttctttaatcaaatggacctttccttggcgtgagattcacctttggtctgacatcgttttctcaaaccctacccatccatataagctcatcctagcctatagactccccttggccgtctatacttggtggtgcaactccttgacggctcgcttaactccttttgcttgctgcttgattgttttgccataccttgtaaggagactttatcttgctatttgtaagactatattccacatgtactctatcttggctgacgtggatctgccatgtcagatgaacaaaatttgggataacactacagtattattgatcgaactattttagattattcccatatttgttcttattgtttgtttatgcaatttctattaattatcatcttgttaatgcttgatcaccgttaattagcataaatatttcagattttacacttaagagaggtaatctaaaattagacttataattgtatgacataggaaaggtgtaagattgagagattctactaattctatgagtttcatttaaagagaatcatattgctttattattgcttaatttaatagcattggatagagatatctatttagttaattaagttaattctatcattaacttgagagaggttagtagatttaaattaagattcttgaaactacaaatgatataataaattgagataatcgataaattgagattcatagtttgaaataggtgttgacctcaaatttggccaaccgacaacagagtcgaatttaatgtttatgattgtgttacacaataagaacaataatgtaaatgaagacaagattttatggagattcgaccaacttagttagtgggtaatgacctactccccttttcgttgtattaatattgagagataatactacttagatcactatagtaatgggatctagatttactggcatgtatgttgattaacaccctaaatatgaatcttctaaaacaatagaatttaaacacatataaagttacagaaactttacattgattgcagtagaattatatgtctccttccactcagatctataacccttgttcctttttgtnncagcgtattatcaagatctgagcccgattctccttcaggtgtt

SEQ ID NO: 54425 - DNA, 675 bp, Cannabis sativa
cttaggatcggatcattctccaatccttcttacgaattctgaagttcagtcaaagcttaactatccttttcgattcctggaagtgtggacttcaagcccggaatgcgagaaggttgtgaatggggcttggaagattgaggcgagaggaaggaatgatgaagttttgaaacgtgagctgaagagatggaatcaattgtcttttggcttctgtgataaaaatttaaagaaacttaaatcggagctgggtgatattcaaaatcaatggccttcaaaggaaaatttggaaaaggaggcttcggttcaattgagtatcttggagatggaagcaaatttggagaggatttggaagcaaaaatcaagggaaaattggattcataatggtgatggtaacaccaaattttttcacgcgtctacggtgattcggagaagaagaaatactatagatcgagtggaaaagaatggggagtggattattaatcgcgaggagattgggaattactttaaggagaattttatgcaagtgtatgaatcccaaaatccgatcattggcagtgacttcgatactctgttcttggagagtgttacggatggggaaaacgcagacattagtagatgtccgactgtggaagaaataaaagctgttgtctttcagatgcatcctctcaaatctccggg

SEQ ID NO: 54426 - DNA, 2121 bp, Cannabis sativa
aaataatttgctagctttaggttaaaacatttttttttattttttagttagtaagaaaagtttcattgatatcaaaactatacaaagcaaaggaaatacatcccacttattctttttcttcacccaaattttaacgacgatgacgtgtcaaaagtagaaacacgtggcacaaaaatattgagactaaattaatgaagaatatgtaaattaagtcatgactgttgggatgactgtcgaccatgaaaggtgtcatgaccgctagagtggaagtcagacggccacccttacccctaggttgagtaaggagggcttctccaagaaggaaaaatgatggactaataccttcgtaagcggaatgaacgatcaccacacacctacaggagtcaagcgagtctagggaatatatactactacccctacctcaactgcaatgatctatatggggtttagtctaggggtacaccccttaacccctaaaggattagtctaggggtatacccctacccctacacacgcatggtacaagtcatgcattttaccatagacataatgatattctcaaaggtatacggggacatcacaccatatataactactatcaacggacaaggggtcttgggagatcaccccaagatgacgattatcacccccctcaagttgggtctcggagggtcaccaaacgatgacgacggtcaccccctcgagttgggtctcaggaggtcacccaacgatgacgacggtcaccccctcaagttgggtctcgaggggtcacccaacgatgacgacggtcacccccctcaagttaggtctcaaggggtcacccaacgatgacgattgtcacccccctcaagttaggtctcgggagtattgcccccaagtatgggcttcatccctaaaggtggttgacgaccatgtcacacccataagagaccctcgtcatcagtaactctttcaaatgttcaaatcccatgaaaggctcaaagacagttgtcaacccacaaaaatagtgggatattatcacataaaaatcagacttcaactgcctccaaaaatcaaggggatcacaattgaggtggctgcgcgtttgtcgcgtctcttgaagcgagaagcaccgaccccctcccctatataaagggtcatccataacttgggaggaggatccgcaattttaaagacttagaaaaataaacacttatcattctttccaatcaagagcctgttcttgacttttgcaactcagatcaataaaatacaaggagagtaggctattaccgaaatccgggtcgaacctctttaaattttggtgtcttttatttcatttattgcaagttacggcttcattaactgcacttattactgtgattttattttaagtctcatttattacgactccgcgtcagttggctaaaaatccagtcaacattttggtactttcattgagagctttaactaaaatcttgaagtttttcacgagaaaaaatagtgttaacccgaagatctcaagaacgacctaatgaggagatggataatgtccattaagttctgtcaacaagcaatcttgccggaaataatggagagccaccccgttgataatggcagggcaaccaccattcacgccaatgcccagactactgttggccatggaacaactggccaaattgttgccactgggcataccactaacgccaccgccgccgaaggcggcgctaccaacggtgccactggaaggggtagtgctggaaactttatcccacctaataacggcataggccaaactcaaactagttggggccctagcgtctttagaccacagaatgaaccccatgtggagatcgaggggatttaccccgagatggatcagttacgagatgcaataagcttaatgcaaggccagttccagactgtgcaccaagagcgaactgaagctcgggcggccttgaccgagagccttgctaaccaaaggagagaattctaatcttggttggaagatcatgctcatgagatgaggagacaccaagacgaccaagatcgttgcacccaagaggctgccgacttaatacgaagctactttaaccaatatactcaagggttgagtactaacacccacaatcaacatatacc

SEQ ID NO: 54427 - DNA, 1128 bp, Cannabis sativa
ttgagagagtaatattattgtgactcaggtcaaaaggataagaggtacacatattaatgcctgaaatattaattgttctatttattgatataaacttatataccctgtcttatctttgttagtcctttaaaaaaaacaaaataaataaataaataaataaatcaagataatacaaaaatttcacaaggggatagaacttggtttaatgctctttaaattttgtatttagatgtttcctcttcaagattgtggacatggattaggttgaaaatagcatataaataataaaaattcaacaataaattaacaagagtacaatataaaaacacattaaaaaactatatttttttataaataaaatcataaaaatcgtaaatatatttaaaatttcgtacaaccgtatttttataattttttaattttttggtgtttatgtattttttttttattaaattatcccttattaatatcaaggcttactctcaaaattagaactgttgagatttttttttttgatgggagaattgtgagatttgaaaggactataatcctatctttactttaaattttctttatcttcatttttcacttaaatatatcataactctaaatttactttaaccaatattattcatcaatattatttaataataaatattcattattgttgaataatatataacaatattgatgaattcatctttttttgccggttagatattgtggtggcattcgagggactaatccaccacaatattattatgttgtcttattttcaattttaagtgatatatatttttatcacaagaataaaattttagatataataattttcaaagaatattgataactaattatatagcgttattcaggcactataaaaataatcagaataaaatttataattaaaagtaaaaaaaattgtaactacttataaattatcatttctatgttttgagtaaaaggtctgtagctaaaaatattaatagtcacaaaaattacaatttgttgtgactaaatttatttttagtcacaatacttgttatgtctaaactaaattagtgacaatatgtgtctaaatattatgttttaatcacaagtaaatttttgttgtgattaaaagtcaca

SEQ ID NO: 54428 - DNA, 1454 bp, Cannabis sativa
  modified_base (82)..(83): a, c, t, g, unknown or other
aaattgttcaccaaacttttactttttagaaacataggtgacgtttaataacatttttgtttttaaattttttaatcacaannataaaagtaaaattttgtttttgaaaaacaaaaatatgttctataaccacttttgtttttcaattttaagaacaaaaaataaaagtgtgttttgtaaatttcatttttattttgatttgttgattttatttaattcaggtttgaggccgggttcgatgtcaggactgggagcgggtccaagtctagagccgggtctggtttctaaggtctaagttagggtcacagtctaaaatattaattaaaaaagactatttaaaaaaaatttgaaagtaattttttttatttttaaaatttagattcttaattaaaaaattaaaaaagtaaaaacagttttatagaacatgattttggaaaatatttttacttttttaattttgaaaactaaaaactgattaaaaaagtgttaccaaatgcacccataaaatcttcactcttaaatgatggtattttatttatttatttatttttgtatcaattttaaatagtattatattgatatattattaaataaataaatatatattttttatttatatgtatttttctcaaatgtatcaacataagaagaagaaaagaacaattgaaaagatttaaataataatattactttctttataagctaacgaagtgaattatattttaaaaattatttttaacttatactttgcggtaaatccatgaaattttaccatggttgatgcaatattttaaattattattacatatatatacaatgaaaaaattattcaaattataatactacatattcataaattaacaataaaatatattataaatgctaaaatataaaaatgggagaggactaaaattctctctatctattatatgagtatgctagtgtttatactcttttttcttattaataatatatatgaataaagtattttttaaatattttcataaaaaataaatattataattatacagtatatatatatatattatatgagtacttaaaaagtaaaaataaaaaatattcatcataatttttagggggtttttcatttttacaattcaaaatagtttttttattattattatttttatggaattttacataaaaatctctattgcaactaacggagcaacctaaatctcaactaaaaatcgtatagcaacccacatagaaactaccggagaaaccactttagaaacccaaaccgtaaatttgaaataaaaaattacaaaatagtatatggggtaatttctcttatttttatcaaagtattaaaatttaaaaaaatgaatttttttgaatttaacacaaaaaaataattaaagtatttaaaataaataaaaatatcagtatctaatagtgatttataagggtgtttgtaacaccctaactaa

SEQ ID NO: 54429 - DNA, 807 bp, Cannabis sativa
atcaacctccacttcttccaattcttctataggccaaagttgtctgcaagatccctaaagcgaggatctaagtctgcgtccccactttgggctggactttattcccctttgttgggattttcatcagagctcttgccgggcatcttctctttcttggctttggccaaggccaagttgtaacaatgatggatagactcttggtctcccctcaaacatcctatcctatgccttgttgggattttcaagcaaaggtggtagatgattgtcaccgcctttaggttgtatagggctggttgacctatcatggtgttgaaagctaagggtatgtcaattacaatgagcagcgccatcagagttctagttgttggattctctccaatagtcaggggcagttggatgtaccccatgggtgcaatgccaatgccttggccaaagaagacatgcacatgcattacttatgtatagggtgccaattcggttagctagagccccatcttttcatatgttgatctgaaaaaatgttggaggaggctccattgtccaccatgcatcttgcaattgtcatattcctgatttgtgcaataatgactaaggggtcattgtgtgggaaattgacttgagcgacatctccttctctgaaagagatagtgggttctccaagctttggtttcttggagcccctttctttgacggccaggatattgtttttaggctcatgacaaagtgtctaagcatatcgctccctagccttgctggtctcgcttgtaatgtggggtccaccaataatgacccctaagtgacccgcca

SEQ ID NO: 54430 - DNA, 2028 bp, Cannabis sativa
aagattcccaccttgatattaccctaagctaagtatgcttaactctaagataagcacatggtgggttatcagaaagtagatgcttctttgtcgttcctacttatatttcttatttttttgtccttccgttatttaaatctaatttccatcactcccttcattatcctcttacagtttctcatcgattttattcagttatgcttgaggaattttcatcttattgtaaacttgaatcttatctatctccactcattttaacttggatccatttcctgagttcttagctaataataattgatcaaagatcattccttgatctcaaagcttcgtatctgtgttaggtagaaatcttgaaattctccttttaacacacctagaaatacctcaagtatattttttgttttatttacaatcccttggtatgaactaccactccaacttgtagtgagtctctcatcgatggtgttgattcatcaacatctaagactcttatattcttttttctgttattaccacaaaggttttactccatgattcgtacattactattgcttccttgcaatcatcactgtctttatacttggttaatcactctaaaactcattttatccttaaatatgtagtccattgtttaatagacaacctattttgtgacccaacattcaccaatcactcgaatacatgtctgttaaattgcatctcaatttataagcctttcccccaatctaggtgagtatgtctttcaatcattgcttaataaggtaatcatttcctagaatctcaatagtctccttatataccagattgaccatctggtcaaatataaaagtattttccatcattaccatatcaccatatgtaatctaggtaatttttcttgccttagtgataccactactcccctgacattcttttatacgttacgctagtaatttctccgcttcaagcctacattaggccccttacacccacagaataatgactcttatataagagtgcatcactttagctacttccctagactgacgactggccctacagaccgatccaagtgttttcaacgtgctttattctaattcgcacgcttcatggggaaacttcctaaatgtaatcaccccaagtcaaggacacttaactttggagttccttcatggtgagctaccaaaacagtatacttcttgttaatataagcagtcccaaacaattcattcaagtcctcaacactatgtagtcccatgcctacataatctcaaaatcactacgtatacgacctttcgtcaggcgatgtgggattgtacatctactagtattttccttgcagatcacggggttctaatcgtcacaacttgactcatgccttttggcagtgaatagatccgcccacataatcatcgcctttaattcacttagggttccagacaatactcataaattatcccacttatactaatagtagatcactttatatcaaaatattttattctccaaatcaattacatgaatactcccattaactactcatatcctatatttccacttgggaatatcagcaaatttaactcatattgccatttttttaatctgtctaccctgtcagatgagctgtcactatataacatacacgcactgcccattcatatattttgatatcccctcattgagtgtacaatgtttgatatcgatattaatggaaacatcaactataatcttacccataaaattctaactttagccagtcaaaggaccgatacccaagtccccttgaatcataattagcacttgggcatgacttgtacacttttcttctttaacatcagtctttcttaactgtggataggttcttttcaaatgacccattatcccacaataacaagatttggttctacattagcccaaatggcgcctttttacatcttgaacaccctagataaggtcatcatttcttattctcactttgaccgctatcctggtcaccctagaagctttcgttctatcccataatttgtggttcatttagtttctacctac

SEQ ID NO: 54431 - DNA, 1445 bp, Cannabis sativa
ttaagcttaaataattaaatggtttaagggtaaaatggtctaatactataatcccgcctaactcgttattccaatatcacatatcattgccccgctatacttgtgtgtttggatgtcaagtaacaattgtttatgaattctcattttcatgtttgataaatgagttagtaattacataatttaataacatcagttatttacaaatggtaatatattataactgcactgtgactacacccaattctcatgagggcatgagaattggagagtataattcagacccttcaattacctctaagtgcatggttgtagtgtaattatctagtcaaacaaacaagtcaaacttcataattattttcaattacacagtaactttccaaatgagcctttaattatggtcgtgtatagaagttataagtttgttatggatatttatgaaattatttttatcttgatatatatagaattattattttaattactaatatatgttataacttgagattaagcttcatccaaaggtttaaaattagaacaaaaattaattcaaaaattgtgtccatagaacccattctaatatattttttttttcatttaactgtaaatacgggttaggttttttgacacgacacgaaactagtacgagcccggaaggcacgagcacgactaggcacgaaaaaatataggcttgggcacgacatgacacgatattacaaattggcacgacacgatacgaaaaatatgtctttaagcacgacacgacacgagaaacacgaaaagcatgatatgtaagcacaaatagactagcccgaaaagcacaacacacgacaagcccaaaaaatacggcacaacatattaaaagatattataatttattaataataataagatatggatttatcaattataaataagttaaaataataataaagcttaaatataaataagttaaaataataataaagcttaaatataatactgaatattataattaaaactattagaatatgaaaaaataagattatatattaatttatttatagggtgtgacataaaaatttgagtatttatataaataagtaaatatttatattctaatgatgttaataatttatttatataattttattcaaaaattatataaatataactaaagttttgaaatatatatatatgtataatttagtaattgtaaaaaaaatttgagaaaagtaaagcacgaatttaagtccaaatatgaaaaggacctggcctgtttaagaaatatgagtcgatatgagcaaaacacaatacgaaaatacttggtctacaggccgtgtcaggcctaccctttaaaaatattagtacaacatggcacgccccatatttttttgtggcacggcacgacatgaccattttatgaatagtacggataaatacgagtcaaaccaacacataatgcacga

SEQ ID NO: 54432 - DNA, 2505 bp, Cannabis sativa
  modified_base (1436)..(1436): a, c, t, g, unknown or other
taaaaataaaatttttcgtagtgttaactaacttcttctactaattaacctcctcacttaacaaactaataacatttaatacttccgcttaatatatatgtagcatatatatatgttcactactataagatgcatttttagtatcggttttaaactgatatttattacctatagtgtcagttcatagagtcgacacatattttacaatgacaaaaagtatattaattttttgatttacataggatctaaatatcgagcttttagagtattaatggtgtcagttttaaacagacactcacaggtgtgcaattcatttttgtactatatatgtctcggtttagaaccgacaccacaaaaaaaaaaatcatgttctgatcaaaaattactccgagccaaatctaatatccaaacaataaaatctacattatcaaaactagaaataacaatttctcaaaaaaaaaaaatccacaaaataacaatatatagattttaaaaatctaaataacaaactatatattatcaaaatagaaaataaaatcgatacaatgttttacaatagctgagattaatgaatattttttaaaaaaaaaacactaaaataataagaacaaaacagatccaactttgaccccaaagcaccatcgtcctccacaaactccaaaccaccgcctctgcccacctgcacaagacaacaagaatatgaccataccctaaacctaaggtgagaatacaaaggcccaactggattttttttcattttttttcttaaaaaaataacaataaaataaaaactattatagtatagcttatcacgtatcaaaaatgtgaagtggatgatcggaagaggatggaaaaagtgaacagagaaatttaagtgagaaaactataaagaaaaacaaaaaatggcagcttgtcgaggttaagctgagagagaagagagaacaaaagagggagagtccgagagtgagaatatggctcgttgaggttcacctaggctagtggcgacgatggctagagtggctcgtcgaggttaagccgagagaggaagagaacaggagagtcatgatcccatatgtctggctttgtttggtgccgcaagataagggatgagattagggttttcttaggttaaatattttatttatactatttttttattctaaatcatttttatttttattttattttttaaaaaaaagtgtttataagtgtcggtttataactgaaaccaaatgatcttttagtgtcagttatgaatcgacactatcatactcaatatgtatgtatattttttaaaaaaacactttttcagtttcggttatagttttagtgtcggtttactaatttacacttaaagtcattacaagtgtcagttatcatgaaccgacaagttagagtagtttttagagtcaatttcttttttttttaaaaaaaanaaataaataaataaataaatccttcgaaccaacactaataaaagtctattttgtaataatgatttaacactatcgtgctcttaagctgttgaaaattgagtaggaaaaagagtcatagtgaaatgtcagctaatttatgatgagtaacaatgacaaggttcaatgcaaataagggtaacttgaagcttttcacgagccaaatgatacttagggctctgatagctcaagaatgaacaatcaactcaactaactaacacacgtttatccaactgtcattaagtaacctcttctttccccgcaaactaataacatataatcatgtgataaaacaaaataaaatgtttagcaggtgttcaaattttttattatacaaattaacttaatatgtgctataattaattataatttatattatcattcattctttaacaaaatttgattataataattttttcacgtttgtaacaaaagtatgatgccattgatatggattctcatataaatatacaaaagaatatttcaatttttcatttttgattttgaaaactgatttatatgactaaattagtcaaataaaattttgttctctaaattattaatacgaaaaagataattaataaagtgtaattggtaaatatatacctaataatttaatattaacattgaattttgtgcagcataataatatataagatcattgttatagtattattggtgcacacgatacgttaagatcggttagtgatattttttaaaagttactttttttaaattatatgagacccacttcttagacaccgataattgtatgacatcaaaaaaaaatattataaaggcaccaatatatatactaccttttagtaattctctaatattaatttagaagaaagtgtatcaccgactatatatagctatagctcgtagactcaaagtttgaattctcttaataaaattatcagataaatagaagttaaaaatgataatgaattaaattatcatgtattaatatttccaattttataggctatctatatctttcggtgatatatattataaatctaagaagtca

SEQ ID NO: 54433 - DNA, 929 bp, Cannabis sativa
gcatgtcagacggctctagtggtgtggcagttgtgtcgagtgtagttggtactccaaatgagacaaatagtatctctattacttgtacttgtcttacaattcactacctcttcaaaggtatgcatgctttagcaactttatccattgttgtacgttcccttggcattcatctcgtaacactcatgatgtgagtataacacttgggaaaaatagttaagtgatggatctatgagaggtgagtcttgtagtttaattttggtagcaaatccctcccccatctcgtttggtggtcaatccattgtaacatatatactttgaatgtgattgctctcttgtgtggagcaagtggtgttaggtgatgattaggagagtaagagaacaagggagagtgagtgagggagcgaggagagagtgagtgagggagcaaggagagagtaagtgaggaagcggggaaagagagctagggagtatgaagagtgagtgtcgtggggagagaggaagtagcagggagagaggggaagtaacatggagagagagagagagagacagacagagagagagagtagcggagagctcctcacacggggagctcaacccgtgccttggtctttcctaatgttggctctccccctcgggtggtgtcccatcttggtagttggcatcttgttttcatctaaatacttatttaaagtgtatttttggaattttttctctcgttaatctatagatctccaaaaattacacttaacaatttttggggatcatgttcttcttaaaataaactgatacttatggcactaagctcgaagacactcaacgtgttcctaatgatgctaagctcgttagggggtttaagaatatgtttggtgttgttaacattgagagactaaatttacttaagccgactcttattcgtcacctcaggaatg

SEQ ID NO: 54434 - DNA, 715 bp, Cannabis sativa
caattggattagattggatacaaaataatcaaattccgtataactaaattagatcggttattggatgacacttccaaaatctgattaaaaattgatctaatccaattacatatagtatatatttaaaaaaaatatatagtatatttatttatatataataaaataattagaaaaatttacgatgcactagcttctttcaaagggatgcgcagatgcacccctatctattatgatatctgaaataatattttagtcaaattttttctcatggtcatgtacgttgttatttaagacatctacaaaattttaagaaattcaaaaaaagttaacatgccgaaaacattattcaaacagtgggttgcacacgcgcaggatcctattttattgtatacgtgtgtgaaatagtttgtttgaacattgctttctatgttgtaaattattctaaatttttaaaaattttgtaggataacttaaataactataacgtacaggaatataaaaattggactaaaaaattattctagatgacgaaacaggtaaatggtgcatcaatgcatagtcttttcctatggactttattacacctaattaaagaaatctctaaaaaaaacctttaagaacttgcgcatagtttagttttaattgtagttttttagttaatattaaaaatcaagtgttgaattaaaatttaattaaaatactgaagattgaattg

SEQ ID NO: 54435 - DNA, 1013 bp, Cannabis sativa
ttaatcacataatcttgattactttccactgtactgatgacacaataaatttttgtgctatacatatttctgtacctacttccttgaaattcttgttgattaattgaccattgataggtttgagtttgtgttgtttgtttacaacagtggtatcagagcaccaggaagaattcacgaacttctaaaactcaagtcttgtgataacaaaccaaaaaagctgctgcaatgggttcatcatcagcaaggttcgatttggaaagattcgatggtactggtgatttcagtttgtggaaagagaagatgctagccatattaatctactagaagttagattcagcattagatgaagatcttggttctgatgatgtcaagaagaaggttatggatgaatccaagaagaaggagtcagacactgttatgaagcaagctagatctgccattgtcatgaaccttgcagataatgtactgaggcaagtgattggtgagaagacagctcttggaatttggagtaaacacaatcaattgtacatggctcgatctactgcaaccaagattttcttaaaagaaaagttttatgggtttaaaatgaatgctactgttactttggatcaaaatcttgatgaacttaacaagattgtgttggctcttactaatatgggtgaaactataaaagaagaagatcaagcagtgatcttgctcaatgctttgcctgatcagtttaaggaaatgagaacagttatcgtgtacagcagggatacattaacattagatgatgttatgagtacactcagatcaagggatgctgagttgaattggcaaagagctgctaagcaagaatcaagaattgatgatgcactaatggttcgaggcagagtacctagaagaggcaactctaaattcagaggaaactcaaggtctaattcaagatcgaaatcaagacctagggaaacaaggaagtgtcatcattgtggcaaagttggacacttgattagaaactgttgggacttaagaga

SEQ ID NO: 54436 - DNA, 1385 bp, Cannabis sativa
caaggttgtgtaggctggtttgggtgagatggatgtatccatttgaaagaaatatgaaggtacgtacttaaaagttatgtgcgtaaccactatcgaccagaagcatctgtggaattgagtgctacatatctgaagagggtgtagaattttatgcagagtacatggctggagttgaggtaataagaattagcaaaccaagaactgacccagataagacaacaggacttatctaaagagcttacatgcataatttgccttttcattaaaaaagaaaaaagaaaacaaaaaaaaaaggtaatggaatgcaagtaatgggtatatcttttacatttatgtcagataggtataataatgaaagaaaaacaaaagatacaaatgtattacttacaccataaaagagccaatggcctatatagccattgcattcataaaacacaataaaaataacataccacaaatgccttctcaacgcactcaaaagtcacatatatacacacccatatatacgtacatacatagataaattatgtatggcattgacactttttgattatctgaaaaacaatgagtcagtaataagctaagaaaagtagtagtaaagttatttgaaggccacctgaaagtcctgttcatttctaggatcctaattatggaatgatatagtattttgtttgtgggacactgacaagaaacttttgtactaaatcaataatacatacatgcacatacatgcatttcataatatataacgaagcatattttgtctcactgtaatagcataagcacaacttgtaatatttttctttcttggaatattgtgaaaaacatcatgaggaggacaattctcgattcctcaccacaaatgatatccttccatatcatcatattcaatcacaacaaccggttccaccacttattactaattttttttttttccaagcttgtatttgcattcacttgttctatgtctttacaccacaaccacaattctcactactatataatacatattagctataattctacaaaacccttctctttttggcttcgttttctcaattcatatggcaactaataacaactacaattctctcataggagccatggatcgtctatggtttcaacaaatcattcttgtttcacaaccaatttcattacctcagtccacctctaaatccttatctccaagtcatcacttcatgtcatcatctcttgaagatgaaaaagatcatgaagacttatcatctgatttttcgcatagttcgaactcatcaaactcttcagaatcatcatcagagtcgctcataccaaaacttccaaaggtaagactatagtaaacaatgtactctcaaaattatttgtattattctttcacttggaatcta

SEQ ID NO: 54437 - DNA, 878 bp, Cannabis sativa
atagttagggtgttacagaagggacgccctcgtggaggcaaagctccgggaggaggccaagcaaagggaagcccttgcggaggcgaagcttcgtgaggaggccaagcagagagaggccgaggtggaggcgaggcactaggaggcgctgaaggtggagggtgaggccactgcccgggccaggcgcgagcttcgggaggctagggaagccatggatgaaatggctggcaaggtgaagtccctagaggacttgcaccaagcagaattgcagtctaaggccaacctgaccgtggagttgaaggagctgagggacttcagagaccagtccttgaaaaaggccaaaagagaagagctcctgactcctgtctcctgcaagcattgcgccaagcgcttcgacaacggtgtctatatggcctggcagtcaaacggccatagtattaagcttgacttctatcccaagcctgaagaggctcttgctaaattctgggagaagaagaaaaggcttgatgcattgcttgaagcgtgtcggggccctcgtcttcctcctcgcatcgactaggccgcggagtccagcccatttcagcattacaatcatatctccttttttttttctttttatttatagtcttttttcgtcccttccagacaattttattttaactattatcttctaaggggagacatttattgcggctcgtccccatgccttcagtatattgtatatatttctttttggacctgccctttgggtcaggatattttaaatatgtatattcactttgctacatattttgtttgactttgtttcaacttttggcctattttacatctgtccgtgtggtatgctttagtacccccctgagtggcatgaaaactttgtt

SEQ ID NO: 54438 - DNA, 5066 bp, Cannabis sativa
aacaacacaacttcctaaaacaattttttgaactggccaatatgcatattttaaaaagtaatgaactggccaatattccaacaatatatggtatatacatgtatatatatattttttaaaaagtacatattcgaacttagtgaaaggaaaaaaaaggggggagggtggtacttggttatttgcattattaactccactctccacaaagtatagagttatgaatataggacatttatagtggactcaatgaaatattaacattatattattggtttatctaaaccttctgatcttatgaatggtttgatttctttggcaaaaaattatcaaatttgaaaatgaaaaataggtataaacaaacaaatcatcaccttatttttcttctcttatgtcgttaaaaactgttggtgattttgatacaacgcacttaagttcacatcaaatagattttattggattcttcttttttccatcaatgtctgtcaaaaaccaaacaccaatacaaattatatatatttatataatatatttctcaaatattaaagctaatgatgcaatacccgcatgcccaactttgatcgatgcataaaagtaaacaacacccactttcgagtttttgacccttatcttctttatagaaaaaaaaaaggaaaatagtttttgacccttattattttcttctatttttgtaatagataccattggataccataccagaatcttacaaagcaattaacaatatgctgattggaagcaaagctaacaaataaataaataatgactaatatatataaaatcttcttactaaaatcctatctaaaagacttatcaattaatcataaacaattaaccaacaaaaaaattacaagttactggccaaagctgtccaagctttgccacttttttcttttttttctcctcttgttgaccaacaaggaataatggttcaaagatataaaaacaatcttttgaaccttgaattcttaccaatataaacaaagggtatatgacctcggatgctttatgcttccaagacatatgataataataatataaaatgataataataattatctagtaataatcagtatgcaaggtagaatccaaagccaatattcagcttctaccttatgccaatgcataaaattgtaaaatgaatatgattcttatccttctaatgctaaaaactacttaaggatgatgataacaaaaaaaaaaagaaagactttcctactgttctaaaaaagcaaacatgtgttagtagctgagaaaagcttttgtaagtaatccccaaatgcatgttccatgaatgaaagtatccaattatgagagacttggcattcctttctcttgttatatatgctagctgatcaccaagaatccttttccagtaatcagtatatatattttcttttctttttcttttttctttctgtttgctgatctttcatgagccttttgactctatccatgttagccttgtaagaagacaataatgtttttcttttccttttttctcttcagccaaagtttttaagttgatgagttctgttcggaagctgttgcagaggcttgtgaaacaactgttcctgttactgtcactcctgttgttcctgcacattgtttttattcattttattttctttattccaacttgatctcaccaaacaaacaagaccttaattaatcacattttgctgaatacataaactttatgtatatgcataagaaaagaaactgagttcacctggtgtagttgtggttgaagtcactggtggtggcactgaggaaggaagtgaaagaatccctggggagccataatgctgaggcaaataagggtattgtaccatttgggggtattggacattgaaaccatggtgatgagcttggtcactctgtgcatattgagcatataaagggtagaaattatggtacatggcagcagctgccccggaacccccagaggttgctacataaggtggatattgttgacctccatacacaccataatagttctgcaaattcaattttttttcttttaaagttgtaataatggaatccaatgaaaagaaaagaatgtatgatagaagcatgaattagtatttaccatgggatacatggagtcttgtgaataaccggtgtaactgtaaattagaccccataaaagaaataaatgaatcaatgtttgatgtaaaactgaaatgcagggggaatttagaaaagaaaaaaactgatagtaataatttgaggatttaatgttaataattatgagcgttttagcttacccataagctgaataaggaaatgaatattgagcagtgggttggtgaaagtatgttgatgttgagccttgataggttggtggagccactaatccagggcttggtctaaatcttcctgctcctcctgcaggaacaaacaaaataaataaataaatatatagaatcagtctataatctatatgacattatcctttgaagcattctccaatgtttagatccacatttttagttcagcaagagagattgaagtacctccatcactagtatatgacattgaaaaatgcttggttgggattaaaaatagatgcttgagagaaacggcttgaaaagaagaaaaaaaaaaccgtactttttacagagaaaaagaaaaaagaagcaataagatataaagtttaaatgcattgtgcatgcataagttgatgttttgtgatccgatgtgaggaaacattcaagttttgataactttgaaattagaatataatgtgggcaatgaaagtgaagtaattaaaaatgaaaatgtgatcattttaatgatctaaataaataattaagagaaagataagagattccagaccatgttgaggagttggtggacgagttttctgtgcaccaagagaggcaagattacaattggctcttcttccatcaatcacaggagatgggttttgacatgctcttatggctgcctctggatccttaaatgtaacctatgaaaatacaaggccaaataaaaaaatgaaaaaaaaaaaaagaagaaaaagacccacctttcttaatcacaaatacaaaaacattatgagaatgatgaaaaatgaaatgggcttacaaagccatagcccttggatcttccagtatttttatctgtaataacaacagcttctaagatctctccaaactgttcaaaatatcttctcatggtctccctttgagtctcccaagccaaccccccaacaaagattttggtaaaagttgtgtcactgtattgtcccggattgttattaccaaccatctgaaattgccttggttgagacatagaacagtttcaaaaataaaataaaataaaagatcaattctatctataaatatataaaaataaataataaaaaaatttgtccccaaaccccaaacccggaatacaaatcagttaaaaagaagaaaagaaaaaaatcccagaacccaaatgaagaaaagaaaaaggaattttagtatataaagccagaagaaagagggtgatatatattttttctcctttcgcttctttcaaaaatcacatcaatgaaaggccaaaaaaaaaaatgacacactcgtgtgcttgagatggttctgttgataataataataataatagtaataatattcttgttcttctggctttctcgtcctctataacttgttctcgttgttgttgttgttgttgctgttttttaaggctacaactgccactttttcacagccagagcaacaaccaaaactcctcctcagattcctcaacaacgatacccgtaacgagaaaatcattactgtttaaagggtggaaagagaataaaaagagaaagggagagagaaagaaaccatcacccttataataataataataatatcatatacacaactaatatcaataataataaaccaaaaaccagataatattattatgagaaaaggaaaataaaaaaaaagaggagaagacaaaaaagctgctagtgggcacccacgacgacaatagtaggctcaatcttgtccaataaaaactcaaagactaagagagaagagaccaacctttctttttattattattatttttaatttttttttcttccctttgctgtaatcagcactactttctttctggctctgctatatacacacacataatttttacaattatatacatttgtgggaggtgggtctgatgcataaacatctgcttcgctgtattcaaccttacattttatataaaaaataaataactaaaaaaatctctctaatgccctcgtcttaatattcctgagctccgtttatggcatttggtgggggctctgaaatcatataacctttggcttggaactctctctctctaaactctgttcaaaattaaaaaataaaaaactgcagctgtattcttaaccggaaaaggaataagtaaaaatacagaattggtggttatgtttggtgggccagaactttctggcacaaccttctaaattcccttttaattttttttttggcgtagtcctaataaataattaatttggataaccattatgggttcttcttaattaaggtaggttgaaaaaacccaaagtacccttcattgcatggctaattttctttcatatattatatattccttgcattagaaaaagcggttgggggcaattatatagtcagtagtactccgtagtattattaggcatcatgttagtagttgaaatctcaagctggctggttattaatatggtagaaaatacgtacagccttgaaagagctttaatatactcttaaaaaatgtcgtataaaccatctccatcatgaggatcacatttcattaaaagttgatcaggactcctatatatattaacttcatttatcagatcattttacaatgctttaaacatatatatatatgatgagacagtagtaatttgtacatacatatatagtactcaagcattgttgttttcttcaatctaaaacaatcataacatatatgacctacttaaacttaaatgatcgctatgcactcaccagtagttggtgtaggtggtaaaatttgaaactata

SEQ ID NO: 54439 - DNA, 3065 bp, Cannabis sativa
  modified_base (1110)..(1114): a, c, t, g, unknown or other
atttatagaacatagaaaccctagggacaaccacaaagtcgcatctacagctgtacaaaactttcctaaataaaaccctgatttgcaacatcaaaaacagattttctcggagcaaatcagaccaaaaaatgaaacttgccaaaaacatgtccaatcgtgtattgggtcttgatacctgtcaaaaatagtgtgtttgatctgatcttatcaagacacaatcgaactcaataaggaaaataataatagtcaaaatttcctttataaacaaactttccataagagaatttcttctcttataagaagtttccatacaagaaaaaaatccagctgaaaaatcattctttcttaagaaaagagcaataaaaccaaataataaaggtgataaattggattgatagcacaaagaaatctcaccataaataaaatatattttggcctctaaattgccaaaaaaggactttacaatctccccattttgacactttagataatcaaaatattttttaacagaaaagaacctacaaatcaaagttagccatactaaacaaacctccccctgagaaacacaatgtaaaactgaaataactaaaataacaagctaacttttaatccaaagttaatcacaagtaccaaacacaactctccctggaaaaagagtccaaagttgagaaaataagaaattaaaaacaaactattactccctctttttgtttatctaagggccaaagataaaaagtaatgaaaatatgtccaacaaaaaaacatgaaaaagaaagaaagacttatgccccataaagcttgatcaatgtggacagctgcttggatatatcttgctgaacctcctccatgacagcaagatgattgttctcctgaagaacttcctacttcacctccaggacatttgcaggagcagaactggaacttgcaccaccagcagcaccagcaccagctttaggacgcttgggaaaagctccatcaaagtactccgagggttgaaagatggtgccaatgaggggaggctcaaaagtctcatgagaataggccacatctttctgagaggaaagaattttatagattaagttaggaaaaacaagcttatgagtacgcttnnnnnctctccgaaatgaaacaatctggttcaagattgaagaagccggatcaatggatgcccccgaggtgatacgaaagagaaaggatgccaaatcttgagacaccactattttgttggagttgggaagccaattgctaagagcaaacctcatgagtgatgcatgggcatatgtgagatgagtaatgcgaagactttgcccaaatttccattcaactcgtgcaccagtgagttcagtgagcattagatgacgatccatggacatgacagcattggacacaccttcgggtaattacaaagctaaagaaatatccttgaaagtaaatgaaaatcaatgcccccaaacatagactttaccaaaaaattcagagttctcatcaagcaaatcattagacaaattggcataaaattctttgacaataccttctatatacccttcaaaaccagtaagggtattttcccattgatgatattgaacaaacttaacaataccatacacctgatgagcatgcaaatcatagtttctttcactttcaaacttttgagtagcataaatattttaatgacactaattttcatggtaataaaatctggaattgataacttgagagggagaaatattaccaggagtggaactctgcataggctgcttgcctttggcagcaacaatggctttagctgcacaagaagcacaaggaggtgctggagtagatttggtcaatcgaggttcgggttcgagttcagtttcctcactgtcagaggagacaccaaaatcttctggaagctctttttcagaaggaatagacacagatttgatcttggagtcatcagaggagacctctataggttcttcttcttcagaacttgaagaagccgatgggggatttaactttagcttcttggcagtaggattcagtctgtcatggcttcgtttggtgcgaagttaattctcgagtgaagcatgctgggcacgggtgcgagaggatggtcctgttagagttgatgcagcaacacccttaccagttacagcaggaggcgatgcagtagcacgaggaggagaacccttcgaagataaagacgatgaagtgcagaatttcatgggtctcacggttttcctagccacttgtttgggaattcatttaggcttgaccttcacattctgagattcacgacgaggaagcaatgaatctccttggagagaagcagttgcaggagcagggagcaagattagagcagcaggaggagaatttgagggggcaggttcggattccaccaccttttttggttgccctaaattatttgtcttagccatggatgtttgaaagagagaatgaaaaacaaagaagcagagaacaaggaagatgaatcgggtatatggtgaaattaaatgataataaaagttggtttaaataaacatgtgagagtggaaaagaaaaaaaggaaaccaacttaaaatttaaaagaaaaaaacttaccagcccatgaacccaagaaaaccgccccattctttttccaaaattattttttataaaaaataaaaggaaacaagaataaacaagatattttccaaaaataggcaatttaagaaaatccttcaagatcaataataaaatacaatgaatatgaaatcaaactttaaaaagtaacttatcaaaataaatcaatttagattaaatgttgatacttaccaaactaagtacaaaatttcttagcccacaagtcaagtcacaaatgcctcgctccttgaatttttatttttatttatgaaaatctgaaaaaaatataaaatatgtgcaataaatataaggtgttctagagcaagcaactaatcaaatttcataataagtgacaaatatacatgttatgttttcaaaagagaataactaattagtatctcaaaaaccaaccacacttaacagatgttgaaaaaaaatagacatgttacaaataatgtgaa

SEQ ID NO: 54440 - DNA, 1423 bp, Cannabis sativa
aggagattcgataagtaataatccttcgatatgttgaatggaaaaagtaaattgtgcatatacttattataaagagtaattttttttgatatatttgaatcaaattttaatgttgtgctttaattaagaatcaaggtagaaattatttgtacaaaaaggcaaaaagacaattccacttaggcaaaaatacaattttgttctttaattataacttaagtaaatcttaagcttagaggtaaaatgatcaaatactataatctcgcataatcttgatatttgaaataccacatatgaaagacccactagataaaaagttttaaactaacccgtgactccaacggtcatcttgtatttttcattgttgccgaacaaaaattataaaaaatattatttacacttagagtttaataaaattttcagaattgaataattataactctaaagcctatttcttaaaaatagagtccacaacatatataatcatgtataattataaaaatataaataattaatgctaattaccctactaatctatattctaagtgtgtggtcgttatagtactgcccgtcgaagaataaaaaaagaagactgcgagtaggaaccctaattttctataaagttaggcctaatattcataatcccactcacgatgtatttgggaacatttgggagggtgcctactaaatagttgaggtaataagcttagttacatacttgcttatccaaccttaattactcggtctacaacatggtttggaacgttgagcatttaaagttttattatcagtagtacttggattcttgtcacctaagggatttgggatttgatgggagtgattacacttggtgtaatgggagaaaacaaaacctcatctttgagagactcgatcgtatgtgcggtaacccggattggttcgatatgtttccttatgctaaggtgtgtcatttagaccgcattaattcggatcattgtcctctcctcctcacggttaatgacacaccacaaagcactcccaatacagtgaaatggcgatcccggtttcactatgaaagtgcttgggctgatgaagaggaatgcaccaacattgtccaatcggtttggcatgggaaggagccgattcaacatactcaagacttaaaaaaccgtctgggagattgtgggtttgctctgcaaaagtggaaccgaaggaaaaagcgagaaatgatgaaacagttgaatgaatatgctgagaagataggccaactcacccgaagcaccaatacaaatgattggcagcagttacaaaggctggaacaaaaacagaacctattgctagacaaggaagagaatttttggcggcaaagaagtagagcactttggctaaaggagggagacaagaacactaagtttttccaccataaggcgagtaataggaaggcaaa

SEQ ID NO: 54441 - DNA, 2179 bp, Cannabis sativa
ctccaaccaaacgccaccttagagacaagctactggaatgggttttagtgcatcaaaatcggacacctccttgttcacttatggctcgggtaacaacatcattatcctccttgtctatgttaatgattttttagtaactggtcctaatattacctctcatttcaaagcttgattgctgatctcaacaagtccttctctttaaaggacctagggccggttcattatttccttggtgtagaatttatcgtgatcatcaggcatgtatttgtcacaaacaaagtatattgtagatttacttgttcgtctcaacatggaaggagccaaaccttgttctaacccaacaagttcttccattaaactctctcttacagaaggagaatcctttggtgatcatactctttatagaagcacattgggtgctttccaataccttactctcacaagaccgaatgtagcattcattatcaataaactaagttagtttattcatgctcccacaagtctacactgggaagcttgcaagaggcttgtgcgatatctcaaaggcaccatacatcatggtcttcatatcacactagctccttccttaactttggaagggtattctgatgcagattgggcatcgtgtgttgatgatagacgaagtacagggattatgtgatgttttggggggtaatcttgtgtcatggtctgctaagaaacaacaagtggttgctcggtcaagtagtgagaatgagttcagggctttagcaaatgctgctgctgaaataaaatggttagtctcacttctttctgagttacatattacttctactcaatgtccaatactatgggttgacaaccaaagtgcagctgctattgctgcaaatccagtgttccatgcacggtcaaaggacattgagatagatttacattttgttagagatctcatactctctaaacaaatatccattcggtatgttccagctatagaccaagttgcaaatgccttaacaaagtccctgtcaacagatcgatatctctatcttcggtccaaactcaagatgggtgacactccttttcgtttgaggggagatgttaaccaattaatcattacctaacagttttttgttaattattgttaaggttgttttagttgttaagttcgttattactgtgtaacaactctattttactgcttgtgtactgtattacattggtctataaataaagagttggcaaccctattttgggtaagcctttgcatttcactttgtgcctttgttcttacgttttctgctcttagcctcttttcctctgttctgatttttaccttcttcattatttttcaaaatattttattcattaaatcaactcaacaaatataaaagaaaattaataaatatattttcctaagaaaatatataactaatatttaaaactgtcgcacaaagggcggctatgttgtctagttaaaattataagctaaataaaaatttgacttatttttttcaatttggattactactatatatataaaaaaaaattagtgaaaagttgttttcaatgtttttgaactgtttagatatagttaaaaaaaaattgttagtaaattagtaagcatgtaaattattctacttttaaaaataacttctccaaaaaattttagagaagcaacccaaaagattcttaaaataaaaaatagtctctttttttttcattgaaacacagctagaaagattcttttaactctagaagttaaaacaaatcttgtataagctaagtgaaacggttgccataatatataatatataaatatattcttttttttttcataatcgacataattcgtaatgtttaaaaaattaatatatatgagatagaagttagtataatttatatatatatatgcactaagtattagtaacatgtaatatatgtttgcttagagttgtattttttttttttgaatgcaagtatcaacttttattaaatgcaaacttcagctaccaagcaaggtagcaaatcagtaggaacagacaccgtattgaagagacgatcaggatataatatagcagctttagcgaaataatgagccaccacattgtcagatcgtttaacaaaagaaaccaacacatttcttaaacttgcaagcaagtttttacagtcatttataacttccccaaacaaagaaaccatg

SEQ ID NO: 54442 - DNA, 1084 bp, Cannabis sativa
  modified_base (1018)..(1045): a, c, t, g, unknown or other
tgatcagccatgagttcgagggcttggcggtagattgtacaggttcgggccatactagaccacgcgggttgggtctaccagttgatgtattccgtgttctcagtttttttggttaggacgacaagttaaaatcacttgtaatattttgtgaaaatttttatgggatctcgaaacatgtataatatttttggaatgatttgtaaggtttaaaattgttacaggttatattttcattctgtgaataatttaaagtttaatttatgctgtttttgctagtaatcccgatttagcgggattaggttatgtttatcagaaaatcgtagcttgcctaattgttaggacgttacatcatgcatccatgatttatccataacaaaaattctaaaaaaaatattagtatttagtaacaattataaatagttactacatacataatgtaactaactaggtttctcacaattattttatattaatttatatatttctataattcttgttttactttagttcatgttattaaattgtataagttgtaattaactaactagtgtagtacttagttgattggaatggatccaagaatggaatgacttttgatcctaaagtgaatccattcatttttttagtttggcatttataattagaaaccttcactacaagaaataagacttttaccagcgcatttttgtgctgccaaaagttaggtattgtactggtaaaacaacatttacttttgccagcgcatttttgtgccggtaaaggggatggcaaatctatgttggtattggaacttttgtcagtgcaaaataaaaagtgctcccaaaaatgacttttcccaacacattaatgcgctggcaaaagtctaacttttgccagcccaaatgtgcgctgggaaaagtctaacttttgccaatataaatttgtgctgggaaaagtaacttttactagcacaatagcaaattgtgctggcaaaagtaacattgtttatagtgcttattgttggatatattttaccagnnnnnnnnnnnnnnnnnnnnnnnnnnnnattaacatcctaatatgaattttaaaacaatgaaataaa

SEQ ID NO: 54443 - DNA, 763 bp, Cannabis sativa
atctaaattattaaatacatattattatagagtatagattaaattgagtaagactgatttaatcaattactccagaaggagaataaatacaatttttggacaaattaaaatggcaaaagaaaagctcaagataaaagtgctcttttatcaatatcgtttgataatagtgatgacggggctgagctttggacacgacctgcaacaaacaacatcaagattaatgtagatgcgacactctttcaacaagacaactcatacgtctacagattagtggcgagggatcactttggcaagttcatagaggccaaaacatgtcactgcaatggttcctatcctactgaagtagtggaagctttgggcatcaagggagctctcagttggataaagaataaggaatggcataatgttgagcttgagtctgacagtcttctatctgcgcaagcaattagaagcaaccaaaagatgtcttctactttttgtattattatagaggattgtcatttgttattttctcatttaaaggatgttaatttttgttaagatcagcaaatcgtgctgcccatgctattgctgctaggcattcttctcgtcgattttttattcctcctggtggttgcattttagagcaagttatctggcctgatttgagggatatcttgtattttgaatgctattgaaaggataatgagatcccttaagagagccatgaaccttggattacattatcaaaaatttctaactgtacttgaaggatacaatgatg

SEQ ID NO: 54444 - DNA, 965 bp, Cannabis sativa
tttatttggtggtaactgacttcttccattcttcagcaacaaacatacaaatcactcagaagcatttatacctgcaaaaacagactaattaatagattgaaaagaaacagaatgagcaattgtattttaaatatttcaataaaaacagaaaaattgatggtgtcaaataggctagaaagaatgttataaattgattttattttttttatgcatgagctgagctcttggggaaaataatggtgttagttgctcacaaccatcaatttgaagctctgtcaatgatggaaaataatctcctgacaatgtcactttgagtctcttgcattgatggaaataaagattcttaagatgaggaaaaactccaccttcgataactgaccactcttcgagattagacaaatcatgtgtttatttggtggtaactactgtgttgttgcattcttcaactcaatccaattagtcctcagcaacaaacatgcaaatcatttatggttggaccctgcaaaaacaaacatagtaatttcactgaaaaccaaaagcatgcacaaatagtagaaaattaaagcttctttgaatgccaccaactaatggtattatcattaaacgggttgagattaactttttttcttctttcaaatagatttgtaccttataatttcatatgattatttaaattccaagcaagcaccctctttagctaaggtttttgaaacatattaatcatctcacaatctttattgttattttaaaatatgttgatataaatctacaacaccagaacatcagaaaatataaaataaaattaacaaaaaaaatagaaaagaagagtaatataccctatattttcttgtgattgagaaagatatttgggatgtgagcaataattggccagtcctccccggtctccctctggagtagtggtgttagccatgaacaattataaatgtgtagttcagaaagagaag

SEQ ID NO: 54445 - DNA, 768 bp, Cannabis sativa
cttcaacaatgaattactcagtagaaaatcataaactattacagggaaattaataatattaattaattaattcaatcaaacaagattgtataaagcattaatcccttgaatatcatcaccatgcaaacctttggtgattccagcaccaatctcaggatacataatggccccttccaccgagctatgctgaagcccaagaatatgcccaatttcatgcaaagcaacagtctcaacgtcataagcctcagcaacaggcccaatagcccaactctcctccgcatcgaaatggactctcccatcgggtggtgagaaagcgtgtgcaagggtcccaccagccccatcaaatgggtccccatcaccatggttccttctctcaaaactcaccgtaatatccgccttttcattgttttgggcctcaaagaatgtgaattgagtgttggaggcccaagtattaaaagcccggcccactgcggacacggcttcggttggagtcccggagaggaacgtgtaggtgaggttgaactttgtggctggccactttggctctccttggaagaatgagtagtgagacactatgtgatgatgacgtggcgtacttttattggctgagcgcattcttgttttatttttggcaaaaatatctgggactccacaacgaggcttcatcattttgaataaggtttttgggtctaagattcctgtgggtttgaggttgtaattgatttggtatgttttaatagctttttctaaggcatagtcgaaatcatc

SEQ ID NO: 54446 - DNA, 902 bp, Cannabis sativa
ggtggaaagagcattccattgaaaagccattccaatactttaaaatgcaaccaaataaaggaatggaatgaaaattgtttcctttccattccattccatttcattacctccgaccaaatgccacctaagttcattcttattctcagtgagatgtcattattgttatatgttaatttcactgttgagtcttgctgcttgagatttcattgttattgcagggacttgattcctcttgctaatttgctctttctagaggtactgtcagttcatagcaatagtggaattagtagctcatctagaaacaaacacatgaatttgtgtgcttattccttgtgttcttgcatttacaagaactaattggttttaattaaaatgcaagagggtgttgggaaaaaaggaatgattcttttctcttacttactactgactatagtgttgcattttatccctcataaggtgatttgtacattagtcactgttatcatgtactaaaactaatgagcagatatcctcatagtgatatcatgtttattcttattcattttttaataaactagtgaatttgcttctttttcattttagttttatgcttctttttatctacaaacagccttggcgaatgtgcacctataatctgtcaacattgcaagcaattacttaatcaaccaactgcactaaaacaagcagaacacagctctttgagtaaactttttgttcctcaaaccaagcactctaactttgacactcagtttagtcatacactccatattcacaacagaaatacagcaattttctgcagcagatcatactaagtcctacttaaccaagctcgccattccgcacaaagggcaggccacatagctgctccaagccaagcacgcacaaactgcagaaatttcttt

SEQ ID NO: 54447 - DNA, 1343 bp, Cannabis sativa
tcctaatgatagttttcactctataaagaaagcaaatgaataatgttgagataaaatttgaagtaaatgacccttaaaatgattgagatctttaataatatatatgattacaataattaagaagaaacaacataacaatattgattagataataagtccagtatgagtagcttcactctcaagaactaaagttttatcctttgaagaaatttccatggctaaatccttcttcaaatcagtaacatcaacattataaacaaacgacttagctacataaagaaagaaaaagaagttaagaaagctcaacacagccaagaaagcatagtaataatccaaatgagaaacattaagattatccaaaatccaacctttacgtccacctcgtttagtataatccgaaaccgttgtcaaaacaaaactactcaaaaaatttccaatacccaaactacttgtaaaatacgaggtacccaagctcttcatactcaaaggagcttggtcataaaaaaactcaagctttgcagtttcaacaaaggaatcagcaacacccattaaagcaaattgaggaagaagaataaagatggtaagtggaacgatttggtgtttgtcattgatctcattttctcttgcaacactaagtcttttcctttcagccaaacaagctgttaccataatgattgtatgaaggattaaaccaataccaagtctttgtaagagagtgattcctctcgggttttgagtgtagcggcgaacaatagggacgaagcaacgatcgtagaggacaatggatatgagcatgaagattgtgatgaaggctgcaaggcaagctggtgggatttcgaaatttggtcccatggatctgttgagagttgtgccttgtttgatgaaaagtgtatggccttgagctatcattatgcttggtatgaatgttgccactaagattggaatcattttgagtatttgttttgtttcttcaacttgggttactggtgttaatctccatggtgagcttaatgaattggtggaggtttttactgctgctttgtctaaaaatctgaaaatcaatgtccaaacctttgatattagacaaatctactttaaagttttcatttttatggccttttttaagagattacatattgacacgaccatgttactaaccttagtttatcactagagttaattcgtacacaaaatttatagtttttaggaaaatataataatttactgaaattagaattctaaatgtttgtttttcacatgtataaaaagatgggttaatttcacaaatgtacaaaaacaacaaaaaagtaacaaaaatgcggtttcacggaattttaaacatt

SEQ ID NO: 54448 - DNA, 639 bp, Cannabis sativa
gcaaaatattcaaacaccactgcccacgaaaagtatcatcctattcctaattatatatatagtttgtgtgtgtaatcaaaatcattaggttagtttcgttagcaggttttcaattttacgaactggattgatagatatgattatctttatactctgaaatgtgattttcaactttaagcgcatagtagtttatatatatatattcatggtattattttagactttgtagatgctttttcgattgaccaaaggattattttgggatttaatttaggaatgttaagaattagtaaatgataagatacagaaaacaaaattaacatgccaaacttcactatgaaaatgaataagctttaggtttaataatcttattatgtacaatttgtaaccctttttctttcaagtcgcagaatgtaaatttcttgtcctgtaatttaaaatcaatttatttaaactgatcagtatgactttatttgcataaagatggaagattttaaactggcaaggtcttaatatctttcatatgaaaatataaattagtttatgttcagatcatttcaagttggaagagagaagtttttgattctatggcttcttgtgataaaccgtaagacctcagatattccaatgattcatgtg

SEQ ID NO: 54449 - DNA, 1268 bp, Cannabis sativa
ataataaaatggttaacttataaaagtgagataaaaataataaaggtaaaattcatataaaattattaaattggaaaataatttttaaacaaaataacataaaaggaacttaatgagaaaattaacacatataatagggtaatttaatactaacatatattacccgaaatcatgggtctataataactcgaaattaaaagagcaaattttaccttaatgttgacataattttccttaactcattataattagtggactttttcctatcatcacgaaaaacaatttctttctccaaaaaaaaaaaaatcgaacgaaagtcgatacagtaagtcaaaaaacatattcataacaataaaaattcaaacaacatcagagaagtctccaacaaaataaaaaaccataatcctatatacacactaataacaattgatataagaattgaagttcaagtcttatagatatttagatttataatgacaaaatcaagcaatcgcaaaaacttgaaaaagtacaattacatacaaaccaagcaaaattatatagaggcatcaagatttaaatttaaaatgaaaaacaggaatttgcaccaagcaaaactccaacaaaaacctaatctaaaaaatatgattaaaaaagagtaaatgtatattattatgattccaaggcttggcctttgacatttttctctctattcttcttgatacaagccacgattaggataataatttaataataacaaaaataataattaaaacaaaatacttacggtaactcttgagactccctggtccatatattttcttgttgttgtgataacctccattgccattagaagccataacagttgtttggatcatggaaacggcgatgaaagccaatctcatttggttacaaataatagggcaaaaaaagccaataaaaagcgtagcttttctttactcttgacatagagaatcgagatctataacaaaatctggatgaaaagaaaagatttgactatgtggtgttgaagttaactgttgcaaagcactcaaatgctcataataataaaactatttcaaaacaaaacgaaatcctgcaataatgaagatgaaagaaaaggagcatgatatttggttaacaagaaagttcaccgttgacggcttattgaatccttagttgagcttgattttcttatgggtaaatggcggcaaaacccccaatactttcgttttagtttcattaaacccttacaacccaaatttctgcgggtaaacccccaatactcg

SEQ ID NO: 54450 - DNA, 1135 bp, Cannabis sativa
  modified_base (38)..(43): a, c, t, g, unknown or other
aggttgttaatccaacatacatgatagtaaatagatcnnnnnnaaataatttccaacaattatttatgtggacaaaaacagtaccatgtggcaatacaactcaccaaaaaaaaggccaagtcagtaccttagcaaacggggacctcgacactcaaacgaaatatcaagtgatagactagcttccctaaagaagctggctggacacccctggctggccctatggctggccagtctctagaaaaaaccaagaccaaccagcctactacctatagatgtctctgtggccagggaaaggcctggcaggaatttttgtataattctacacgttgactgggagttaggctgggaattgggccataatagcccaataaaacaattgaaaaatatccacgttaaagggtattttagtcttttgtatataactaatttaatatagaaatatttaagggtttcaattgtaaattagaatttaaggtttcatatataaaggccttaagattaatctagaaatcctaagtctctaagtctcattctagcctccaagtgataaagttttaagcctatgtctaataactatctttcttgctctctcttaaatgcccatacaatcattcttaacacatgagatttgtcaaccttgatttatactttgtatccttaagaaatctcacctataggaatctgaatagtattatccctaagtatcaatacaactaaaaggagagtaggtcattatacgctatcataggaggccaaacctctataacaattctgtgtgttctttactttctcattctaattgtgtaacacgtggcaaacatcaaattcctacaactccattgtcggttgaccacttttcaaggtcaacaatcactattataaattattttttccctaaaacattattgttgttttttaaaaaaatcactattataatttcttatattttatgttaagtattagtttttttttgttaaataatattattatctaagtaaattatatataatattagttaaaatcacaaaatattaagtataaaaaattaagcgtttatactaagtatctgtacattgcacatagatttaatattatatttatatcttaaaacgtataattatttcttattctctct

SEQ ID NO: 54451 - DNA, 1364 bp, Cannabis sativa
tcaaagttttaaaaatacgtacttcaaggtctgtacagagtacgccacttctacatttgtataatgtgtcaactgtttaggccatgtttgggtattacgagaacatatgagaaaatattttcaatttaaaattcatttttgggtatgtttctatttatgctgttgtgttaatatttaatgtagtatttttttaggttatgcaagtagatagtacaacctactaatttgacattatatggattaatgggaaaatattattaaaatgtttatttttatgaaaaactaaacaggcactggtcatttatttaaaatcgtactttagggtttttttaaaaaaccacaaacactatcagctgcattgtttaaaaactttattggaaacataaggtcttttgaagtgtttttcatttccaagggtatagatagcaaaagttgacaaaaggttatgtcctgtcagtgttctattaggtatgtttttctaactctaaacttaaatttgatttggaataatactttcaatgttcaatctcctacaggcagatcattaatgacagaatcaatttccaaaaaattgttctgaacgtatttcagcgtacgtcacaagctgaatcttccatatttcaataagttaaagtttgaaaataacgtacatcaatagttgtacagagtacgtcacatcataaatacagtatggtatcacctgttaattgaatatttggatattatgagattctattttaaatgtaaactttaagttcagacatatttattccaagaatactttaataaaataaaattgttatttgtttttgacaacttgtactaattttttactactacccactagtgattgccccggttcttaagaatatgagaccctattatataaaaattgtcgaaataatgtaatatgtcatttttcttattaaaaattgtaaaaattaatttggttatgaacgtatattaaccaaaaaaattaacgaaactatgttaaccaaatatgtggtattgagttttactatttcgaataagttaccaacaatgaattggaattttaaattttattaaataattcactaatgaaataagtggatgtcatatcataatttaaattttaccattttaaccctgtacttattatttcaatgcgatactgcaagatttttgtccagccgtgtcaaatcaattgattttattcattatctcttccatgtttacttatactttaaaggatttttttattttaaatgtagaaattattattttattataaacacgtacttagatttgttttaaatatatatgtcacatcatatgtagtttaggcttttttttaaaaaaaaaataaaaaataaacaatggta

SEQ ID NO: 54452 - DNA, 1046 bp, Cannabis sativa
ttttttttttttttgcagaatatgtccccgaaacagagctcacagaggagttaagacaaagaattgccttttacgagaatttttctaagggagaattgtaagtcgaaggcctagttaccacccagttattgtgccaatatggtctcatttccaccttttagtgcatttacatagtcaacggtaggggataacctcagactcccagtgacctcaaagaacaaatggctttagagctttcagtagaaataactaaggcagccaaggatgaggcacttcttgatgttgcctgggacatccatcatcctgagcccctcacaaaagatgaagaaatctaggccatgtttaggtttgcgtacctggaggcaagtacttccggagccagtacttcaggaagaggtaattagccctttcaagtgattcgtacccccaacctttctcaaatgtcattggttgaccaagggggttttgttcactctttcttagatttagaccgtcatatatatcccatgaaggattacatcgatagggtagaccaactagttaggcactccaacaattgagaattttctccaaacactgttaaagtgggctctttcctcactatgttcttcccgagcttcaaggaacatgatagcttcatcagtcgagaggaagtaaacttgtttgcaagaggggaaccatatagctacacatttcaaagttgcattcacatgatgcctttttacctctgaaactatgtgatttaggctattactttctgccttttaactgatttgcttatttgtggcgttttaattcttccagatacacttgagtccaagatgctcaacgacctcatgaacaccatcaagaaagtaaatgctgcgaccgacagcaagggaaaacaaaagaaatcctaagcctagaaatctaaacaggtgtcagattctctaccagccccactcaaaattagagatccctcagcacccaaacggcccacaaaaaggggaggggggcaatggagtggtgaaaaaacaaaatgttgatcctgttgggttttatgccct

SEQ ID NO: 54453 - DNA, 908 bp, Cannabis sativa
actactcttctcacaataattttagtttaaaagcataaaaaataactctataccatagagttatcaggcctcacggataaggatctatcgccctgcggctcccagctcacaggatttaacgggacaactcttatcccaatggggaaagtgaggcttcctatcaccctgtgcccaaatgccccacatagtactttcaaatactgaacctttgtagtagtggattgccccacaacgtacaatgccattcttggccggcctgccttggtcgatttcgaagcaatcacctccatctgacacttatgcctcaaattccctactcaggaagtcggggtggggacagtgaggggaaaccagtgagaggcaaggcattgctacaacgtcgcaacgaacttgtcagtgctggtggtgtgcaggggtaatgaagcaagattgatggaagaagatgagttggatccccgcgtgggatcaaaaacaattgtagaacctatggaggacactgaggaagtaaatgtgtgcgacctcaactccaccaaggtcctccatctatggaaaaacctagagccggaggaaagaagtaagattatcaaagcattaaaggcagccacagatgtttttgcgtggtgccagggggatatgactggcatgagcccccacgtgattacccatgtctttaatgttaacccagacatgctgcctgtatagcaaaagcgacgtcctcttgatccggtaaaagcggacgccttaaagtaagaggtagataagctgttaaccaatggcctgatccgggaggtgtactacccgaaatggttggctaatctagcatttgtaacgccctaagatttaggcacgctacccaatatgattaagaaaccctaatcctctaaacgggattggttttaaaaataagc

SEQ ID NO: 54454 - DNA, 2699 bp, Cannabis sativa
ttttataaaagaaaaaaaatgggagaggacagtataaatattatttctgccgtgtcgcagtaaaattgaaaagtattacttcaaatctagtatttttgtaaaatgcccttgaattttagcaacccaacccgcccaaaaagaccgccaaatccataaacttgttgggcaggtaagggtttcgtgcagcccaataggctaggaaggaaggaggagtttcctataagagttgtctgtgatggagttcatcagccctgaaggtctccgattagatggacgccgtccgaccgaagtacctctctctctttctcaaaaataacatttactaaacaggtactatttatactaaacattttgctctaatacaaattcagtttctggattaacaataataacaagaaagaatgatgttgttgtgtttgttgtgaattccatgctatgaatggaatatagcccatgttattatatatggctcaattttttacaatttattccacgtgacaatgtctacaatagtgtttatttttgtatcagttctgcagttttcgaaatggggaacacgaaagtcgtggctgctgtttatggcccccgagaggtactacactatcccccaaaatgcttgattttttctccacttttatttcttcattttccaaatcaatgaagcgtatttgagtttagtatgatttttttttaacaggtccaaaatagaagccaactactaaatgaccaagcactggtaatacccttttgcctcttacacttatttgtttgtgttatttatgtatgctggtagtgaaatgctaagaaaggtgctcatcttaattgatttttttgtgaactactgttagcatttgatgaatatatgtttaatgaggtaatttgatttttttttctttcaatttacaggtgcgatgtgagtatagtatggccaattttagtactggagatcgcatgagaaaaccaaagggagacaggtttggaacttttttctcatctttctctttggtttgggagattgatgttcaatgttgtttaatttaggcgatcaacagagatttctttagtgattcgtcaagccatggaagcttgtataatgacacatttaatgcctcgttctcaggttttatcccaactaataattttgacgaccccttttttctatttcttaatctaattgattgcaaagtttgttaattgttaaaagattttttgtttttgcgctatttgcagatagatatcttcgtccaagttctgcaagcagatggaggtaattgtcattcataaagttctaagtctgttcactcatgagctctctctatgtgtctccctttcacttagatgccgtttagtgttggcaaacatttccgggaatgaatatggtttgctcttaaatttgaatgtgatttcaattctgcaggaactagagctgcatgcgttaatgctgctagtctggcccttgcagatgctggaattccaatgcgtgaaattgttacttcgtgtagtgctggctaccttaatagtactcctttgcttggtaatctctatgtgtttcttgttttaattttatatttttgcaatttttctttcattgacacaaaattttctctctcttgctctatcttgatacttattaaataagcatagtaatttaagagcttatagttatttactgttccaacagatttgaattatgtagaagatagtgctggaggacctgtgtcacagttgggattcttccaaagttggacaaagtgactcttcttcaggttacataatttgtttgttggttttctattcgcaatattaagtatattagttgtgtaattataccttatatttttatgtttgtaattcaatacttgttggattggatatgaatctggctgcataatgttgagcttttctctgtatcaaaagctgaaatccttcgcaggttctgatctgaagtgttacataataaactcttttaacaactccatatatatcgagatgtttttagataagcataatttcctctgaaggagtcatctgccaaagtttctttgttaacaactttatgttgacttccgctcatgaagatggattctaagctgccattggatattttcgaaactgtaatgcaattagcaaccgaagggtgcaaggcaatagcaaaagaactaagagaagtaactagtaagtataacacataaaaaccaggctagtatagtagtactgcaatccaagcataaaaacaatgtttttatcacttcttttcttttggtatagttttgtgatggggttttatgacagatactgctggataatacaaagcaattagaatttcgacgtggaggataaatcgtaatgaacggtaaggagacaggttagtttgtactcttcaaaaggcagcattgccagtcgaggtctaactctcagccctcaggtgatgtatttttgacagggttaaaggcgaactctatcataggaccttccaactctaaatattctcattttaaagaattttaagaatatttctgatgtaatcaacaaaccgtacctgaatgccatattttagcataggcactaggcactagtaaagtcggaggcaattgagatttgaggatagttgtgttgtgtgtttgaacaaaaaattcttttgtaaaattcgaatttattttattgaaccagattggaaattttttgtttatttatttttt

SEQ ID NO: 54455 - DNA, 1437 bp, Cannabis sativa
  modified_base (780)..(796): a, c, t, g, unknown or other
ttagtcatgttcattgttattctttactttgatatttcaaaacaattttcttaacattctttttaggtattcaaaactcactataaaattgcataaataataattatttttaatgattctttagttgtattcacataaatacaacatttttgacaaatagaaaatatttactaggaaatatttgtcaaaatctatatcgatcttaaattactttttattgtcttcgaagaatacaagaacatatattcatcttttactatgtttcaattaattatacattggtaaatattatgtttgcataatcttcaggatatatgcaaaaatttatgaataatttttatatatgtaaatatgtattcagtttttttttttcattatatttcaattaattatataatgatgaatatcatgtttgcatcatcttcaggatatatgcaagattttattgagaacgcataatttttgggataatatgcaatattttatcgaggatacataatcttctgaatatatgtataatttatataaatttttactatcatattatagataaacaataagagatacaatatgtatatgaatatgaattcaataataaagatataaaatatatacatgcatatataatatatagataaaaaagaaaaagaaaaaaatagttcttgaaattgcttcagtcagataagtatatatataaatatatatttagtgtatcgtaatcttgaaacaactcaagaacttcaacgaaatatttaacttgaagcttgggcagagactcgnnnnnnnnnnnnnnnnnaaaataatataaaatatataagaataatagaagaagaaaatgaagaaagaaagagaaaatgaataataatttcgcagttgtttattccaatggggtgaacccctatttatacaaaaatatgactaaaagaatggaaaactaaattaatgtaataaaagaaaaatacaatcaagcattaatggtgataattaatttagtaatttagacgtacaaattggtcaaacttataagtgtcataagtaaacaatttttaaaattccacattaaatgtaaattttttctaaaaaaaaaactgttttatatttaatgttttaaaatatatagaattcaggtaacaaagatattatgttaaaataaaaaagaagatatttacttattaataattcagtaccatttcttataattaattctaatactcaaaaactttcctctaataagttttcatatattattcataatccactctacttattaattaacaccctagctataacatcttagcttgctagtttttcttcaattttagtattgaataatatcatcatcaatataagatctcaacaacatcatatacattctgaataagtactcctaacactaccaagacatagaagagagtaaaagtaaacatacaaaaagta

SEQ ID NO: 54456 - DNA, 987 bp, Cannabis sativa
  modified_base (675)..(684): a, c, t, g, unknown or other
ccatatccaagtttaactcagacgtagctcgcttctttttgggtgtgaagcagtgtcaaaccaaaatacccaacaagcattagctctccctgaaaaggaggtgatctagtcgtgccttccagtacggtagactatcttgttcggtcgtcgatggttgcctgctgagccttcaacgtttccgtctccctatccctccattcaatgaactgacgcctctgctcttcgaacgcaatgttcagtgtagcacagagctcttcctgatcatgatgcaaggtattagtgtgaccttgcctcaggctaagagcattacggagattttgaatctcagtatcatctcctatggtagtctggacattggttgcggatgggattctagtactgggagtattctgatcggctgttgagctggtgtttccagtctcttgcacatcaggcgtgatccagtcaaaggggatgtcacaccttggcccatagtaggtggctatgtgtttggttgttcaggattagtacctggtgggacccttgtattcccaggagtctgcaatgtaggatctactaactgtgggtcactctgatcaaccacgcctctgcgaatttgcaccaccattttatgtgtctgataaaacttaaggcaaagagcaaacttggctttcttctctcaatgaaagcaccaannnnnnnnnntcgcttttagccaacgacaataagtcaattaatatgtgataagaaatgtaattaagatagagcaaaaactagtaagcaacaaagaacacaagattttaaagaggtttgacccttttagttcagtaattgcctactcccctcaaattgtaataactcgagaacaaagaatacattgtttcctctctgaaagatctcacaatgaaatctctaagtattttctcttagatctctctgaagtaattctttcaaccccttttacagtgaggatggatcactatttattgggctaaatgcatgagggaa

SEQ ID NO: 54457 - DNA, 2133 bp, Cannabis sativa
tcctctagctcgaaacattaccaattttaagtttaaactccccaggatttaaatatttccaagtctcaaatgaacaacaaacatggtttgtagatccagaatcaataatccaaatagatttttcgttctctaaaacacatgattcaaaaacaaaagcattacctttgttcttagggtcgagaagtctatgacattttgatttaaaattcttatttttttccacagtgagaaaattgaataatgtgcttgctcaactgttctttaattgttcttattactggttcaatctattgttcaagagtaactggggaagtagaagaattttcctcaatctttttaattgagcctgaagttgtagtattgttggacgaatctttctaaatattcgcagttctttctttgccatgacttgcattactggagaagggtctccttattgcattcgacagtgtcttttcataagcacgtagtttagcttctagcttgtctataacagatgagttccaattattgatcatgaaggttacaacaaattggttatacttaggagataaaatgttgaaaacaaattgaactcttcgttttttataagaaaactcctagcatggttgcttttcaaaattttaagttcatcataagtaagtgagaagtgatactctatttaggagtcatctttatacttttgaatttatttgcaaatgtgttaagtaagagaatcctgggctgaggatcgttaaacatcattttgacagctacaaatatatataaacaaaaattattaactggttcaataaaaattcatacacatttttagaaaataacaagtattgaagatatatttacaaaaataaaacatatttatattattttctaaggtttccaactagatgatatacagtgtcccagtaggtgagagttaaagataacatcaattgaatagaggagtcagctcatctaaaatagacactatcttagcaaccttttattcgaccaaaatgagaatctaatgttgtccctttaggcgagagtcaatgttattcttattttatgagcttgtactattctttcatatttataaattaaattctaagttagtcactgtagggatgagtgtaactgaaaagaaaatttacaaagtacttacctttcaagatcttacggtgttaaagattcaatggataaccatccataaggcgaaaaagtctagcatctcgaggtcctattgaaacaataactatgtaagaccaataatggagattgaatgtcttatattaaagctcattattaaaaaaaaatatatatatttttcattaattattcattttaatctatttattttaattaataaagaaaattacttgatttaagttgatctaaaattaattaaaattaacttttaactttaatttaaatttcaataaaattaatttcaaaaaatatattataaaataaattatatatattcgaaactataattaagatataataaaataaatatgctaaaaatatctaatttaagtgattctaaaataattaaatttttaacttaaatataattttcttatttaattaaaataaaattaattaattaagtatctttaataaatgaacttaattatttattaaaaaaatattctaatttaagttggttataattaatttttttaacttaaatatatttttgtaagaaaatctaaataattaagtataatgaaaaaatctatttatttatttacttaaatataaaaaaatatctagtttatcttgaatttattttactaaattaagtgtatttttcttaaattaattttaaaataatgtaatgaaaaattaatttcatatattttaaaaatcaattatgttgctaatcaattttaattaggttaaactagtataattagcctaatacaattattcaaataaggtaaatgggccttcacagtcggggttgttcatgtgagggagggctaggttaagtatgtcgtactcacaactatttgccccctaactctcacacaaggtccaaaagagaagaatttaaccttaaaaaaaacagttattatttattgaataaacccagggtcggccctaagcataggcgggctaggcccgcgcctagggccactcatttta

SEQ ID NO: 54458 - DNA, 2491 bp, Cannabis sativa
acccccaatccaatcaaagctagtaaatctatcaacacattatagacagaggggatgtcgacaacaaaaactcttgcatttgggtcgcagacaatggtggttcccccatagttcagggaagttcaattatgcctaggctcgcaacactgtcgcctatgaacccattaaaatttaccatgtaaggtcttagttttgcctcttctaaccccatctttttcaatatttccttatcaaggatgttgacagagcttctattatccataagaaccctctttattcttttattggcgagctgaattgttatcacgagaggattcacatgtggatatcgtacacgcttcgaatcttcttcagaaaagatgatgggtggttcatttgactttgctctatttgaaggttctagagcgaaggctggtaattcatttttcacttcattaatgtacctcttttgtgcactattattgtttcctgcgaggtgtggccctccagaatgactaagatatcctcaccctctacgggcagaggttgcaatcttgggttattcaggttattgggctaattaggctcattttcatgtgtcctcacatatttcctaaaatatcctcgtgaatttagactttccatttcatcttttaatagatggcattccccggtggtatgcccaatatctttgtgaaaatgacaatacttggttgagtctcgcttgtttcttgcatgtctcattagttttagtctgcgaaatgtgacccgattgtcattggcaagataaatgttctcgcaagtctcattcaattcagtataaactgaataaataggtacatatttcacatgctccttttgtttcttcttatcgttggatgagtctgttgactcgtccttccacttggtatttgaaccatttatattttctaccttcatagtcacggtgctcactgttgtcgtgctagtgttgtatttatctctcgagtctaactttaacaacttcatttcattctgtccttcttcttttcgcacaaagattcgtgctctttcattaaagtcattgatatttcttacatgaagaccttgcaaaccatcccataattctccccctgtagtgcataaatcaatcataattccagcttgaagagatgttaattgaatactatcatccaaatttctaactttagttgcagctgtactgaagtgactcaagtatgctttaagggaatctcttggttgttgcttgatgttagtcaatgaggatgcctctggtcaatgatctcttgcagcctgaaactgctttttgaaatcctttaactattgctcacaagaagttatggaatggttggtgaatttttcagaccaactacttgcggctcttgttaaggatgtgggaaacaatatgcaatccaagttgtttgatacattgcttggttgcattatggtgataaagttgtttaagtggtcaactggtttagtggtttcgtcatactgcgagacatgcagatttttaactccttgaggaaattgtgagtttaggatattagggtggaatagctcagtttcttcatctaaatcatatccttgcagtttgccatactctccatcttgatatttcctgaatttgtcttctaattatattacttgcaattgaataggatccacatgttgttgatttgcattttgattaagttggttacgcaaattaggtgcatttcgattcaagtgctcgagaaggtctagttgccttcaatttaattgctcgcagagatcgggttcatgatgcctttgctcataattactcatggacctagtcctaaaataacttttagactggtaactacgcgagttactcatactttcttgggcattaaaataatgttgagatctactcctgtctcacatttgtgtattagttccattagacctgctattcctgtaggatcatgattctcctatactcgaacttgcttcacatgtctgatctcgcattggtcttcttctctgaaagagattagacacgcgtcacctactcaggtaaatgtgtgtattctctatgtccgtgcaaaaaggcctttatggatgccttggggatcaaccgaacacaggttggtttctaggatatcttcgatcattacaagggatttttcggtttcttagtcgcggttgtctcacctctgcattcatgtgagatcacttaggtacatcattttattcattcgctttgttagcaaacccatgagaagttcctggagcatcacgtcgatgctcttgatttcttgtattacctatgttgggtggattttctctatccattgggacatccctcgctgttatacctgaatttcggctaccattttagtagaggacacgtgtcaagataagtggaatataatcgatgcatggaacgatactcacttctaatggaataactcattaaaatgcagaagtaacagagtatacttgcaactcgctaactatagggtcttattgttgggttttatgccct

SEQ ID NO: 54459 - DNA, 1191 bp, Cannabis sativa
tggccaccatcgaaaggatgccattacggcgtgctcccttcaaattcatggccaaaagagtattggaaggcattttataataatgttaacaaaaatcaaactataaccctaatagatttggagaaatcataaacatggttacaaaggagaatggaaaagaaatttagtgtttgtgaaagtactagattctgaatgaaagagagaaagaaaaaattaattaataaaagaggttagaaataattaattaattattatttgatgtaagaatattattaaaaaaaataattttttgaataatatatattattaactatttatatgcaatcattaatttatgattattattattattattacaattagattaagaacaaaactgaagtgttgtccagtcctatgtttcatatataaaaaaaaaaaattaacattacgtttacattaaaagaaaataataatttaaatatgaaaaaaaaaaaaattaacgggaactacgtgcctaattttttatatatacaaacacatactaggtactgggagtgattatcttaaaagacaaaagtgggactcccagttggcggctttatatcaggtggaagatcaggcggaggcacaatatcaggcccaggcggcctcactggaggaatatctggcggcggcggccatctcggtggatcaatctcaggccctggtggatgtctcggtgggaaaatatccggacccggaggtggtggaaaactcgggtgtggtaagtctatctccggctccgggtcgggttcgtacggcggtggaatctcgatcacctcagaagggaagtcgccaccggggcctacctctggtgacgtagtaataagcggtggaacttcaagcgggactgaaggttgctcccggtctggcaccacagtgggaatctccggtgggtgaggatgagctgaaaacgaagatggtgcggataatatcaacctttgcgatcgagtgtaagaagtaattaatgtagctttcgaagcactagtcttatttgtgattgggaagatatcgtacggtcgaagttgaagccttcttctcaggacggcgttggagattgcggagatggaacacatttctgggcagtttgggttctaatgaattcaagccattaattttcttttcgattgttttcattcataatgattatatacatttgtttatgcacaa

SEQ ID NO: 54460 - DNA, 1300 bp, Cannabis sativa
atactttaaaatttctacaatatttagacttaaacatgttttgcaaagtaaaatatctaggtcgaatatgatcttttattccacaaaaataacaagaaagaataaatctattctttttttttctttagaattgtcaaacatacctaactgcttttttcttttagaaacaaaacatccggcaaaagaaccaggaccctacaaaggagagtcagaacatctcgaaagcaatttttcaaatttgacaaatttaacaatttgcatttgactgagtatcaacataatctaatccagcatgactcatttcaccaacgttctgaacatcctaaaaaatgttagaaccatgatttaacgttgtaacatttcttttcaaattgtgaagatcttttgtcaaaaatatatttttataattttttgaactcaacccaaattcacagcatttaattttttttcttcaagatcttagatgttgtgagacaattatttattcaacttaaccaaggaaaaaattttagtacaaatctgtaaccacttaccatacattacgttatataattctgcaaatgcttcctcatcaagttctaacttgtttgaatctgagtcagtttccctttcactgtcatcggtcaaggtattgttcaaacacaggatctttcttttttcctgtaaaccacttgataaaacacttgttacaacaatattttcatcatcaagtttgctactttcagaatcatcattactctaagtaacattaatatccttttttttcattgtattgacgcattcagattgaatatgaccataactttcgtattccttgcactgaataccctttttattgttagaaatcaacgatttagatgaagtgtcctcttttggaatttttgaaaaattactttgatttcaaacctttgtatgtatttttgaaaatttctttttaacaaagccatttcatgatcttcctcgtcatcagaaacatatttttaagaaatcttaaaaggcaataccattgagttgaagaatttagcttacctttttgcttgatttgggtgtttagttcaaatgttctttatgaactcacgagcacttcaaccttccttttaccaaagtcattcggctcttccattgccaacaatttgtgtcgaacatgttaggaagcacgtgaacattaattttctaaacaactacagattcatctaatttttctcccaaagcaaagaactcattagtaatatcagataacctttcatgagatttaaataaagtttcattttcttatattcttaattcatcaaatctagtt

SEQ ID NO: 54461 - DNA, 2572 bp, Cannabis sativa
  modified_base (349)..(351): a, c, t, g, unknown or other
cactatattacatcccttgtcattgccgtagttcacttgtggtcgtcactattttattttccaaatctatatcttaatattagatttcatctcgaattttaaatatttttttaatatttttaagacattagagaaaattcattagtttgttttgttatacattaatatgtttttaaaaattgattattattttttaaatatcttcattaaaaaaaatatatataaaaaatgtgatattttagttatgagaaatgctaaaagaaaaatataaatatagatttatatatatattgattgatattttatgtatgtatgtatataaacaaaatttacgattaattatatttgnnntaagttttaatatttttttttaaatttattttttactttctaacttttttttttaaaatattatatagaaaaattattaaaataacagtaaaatataaattcctaaatttattctttttatatagaaaaattattaaaataatagtaaaatattaatttatagatttatgctttaataaaatattaaaattgaaagaattaaggagagaagaaaaaatagttttggagtgattttagaatgttatgtcaccgtctcatacttctcttatagatatatatatatattataaaacaactaaaaaatagtttattatttttactgaagagatatttttataaataaaaaaatttaaagagtaaaaatgaaattttttccgtatttacaaatttttgtaattttttttttcaaatttttagtttattatataaatttttataaataaatatttcagtgtgttatattattatttaaatatgttttttatttcttaattaaaaaagtgaacatattttcaaaaaaaaaaatttgttttataaatattttttatttttttaaaaaaacataagaattaaaatttcaaatattttgaagaaaaaaattatttagtctattttttttttttatcaatatttactttactgtttttattatttttttctcaacactttctctcgcctcatttcacatgatcacttttgtctctcctcactttaaagaaaaaagtaacaaatgtatttttatttttaaaattaaaattaaaaagaaaaaatagccatatcaaacacatttttatatttcaaaaaaataaaagaatatttttaacctacctttaaatatttttaacatgttgtacactctttttttttaccgtaaatataatattttcaaaatgttgaatatttatattagttttatttttaataaagatacttaatattttcaaatttgtgtatttttacacttaatattctaaaatgtttgacattcataataatgataaaatataagttatacatatatttttttagaaaagactggatatatatatatatatatataaatataaagatgtcacgttttaaaaatattaatatgttcacttaatcaaaaaaaaaaaaaaaagagtataagaatgcttgattttaaaacatttggtatattcatcagaagtaaaatgagtatacaaaaatacaatatttaaaaatattagatatttgaggtgctacattaggatttatagactcgtttgatatatcgtataaggatcgtattgtattaaataataaataacactatgttcagataaattaatatattgtattaattgttacgactaaaagttttaatgcaatgtaggttgtattatttaatacataacaaatagtctgtattattagcttgtattataatatttacaaaggatttgaggtcaaccccaatctctgacccagactcagacctggtcccagacctaaacctgggatccggacccagacctcggaccaaaacccgaacccagacccggacctggacccaagatctgggacctaggaccggacctagacccggacctgtagtcggtgtttgggcatgaatttattgaaaatatattataactttacataatctattaatacaagtcaataccaaattagtattgtattaaataatactaatacaatacaatataatcgaacaaaatacaatacaatacgacgtaccaaacgagccctatgtatgttggccccaataatattttcaatgggaattgctagttctatcaagtgctgtaaattcgtgcgtgtcgtgttagttcgatctattttataacgtgctttttaaaatatagactgtgatgccatgcgccgtatcgtgtcttactaatattttgaagggtaggcccaatattttcatatcatgctaatttactcgtggtggcccgtttttatattcaaactctaatttgtgctttactttttcatatttatttttataattaatgaactaattattaaaatatatatttctcgctttaattatatttatataatttttcaacaatattttatataaataatcatattaaaaaattattaaaattattataatttaaatatttacttataaatatttaaatttttatgtgagacttataaatatattaatatatacttttaattttatattttctaataattttaactataaaattataataat

SEQ ID NO: 54462 - DNA, 1894 bp, Cannabis sativa
  modified_base (784)..(790): a, c, t, g, unknown or other
  modified_base (918)..(923): a, c, t, g, unknown or other
ctccaaaactctcaacatcatcttaaaaaaataactaaaaaaagaagagttgtgtttttggtttttagaattgtgttatgaaaagtcataatggaaaatagttttctattattttaaaattttaatagtgtttaactcatgtattttttaaaatatttttagattttttctttttgttataaaaaaagtcaatattttatatcataccacgatatgaacacatcccacctcggatcgggccctgaacctaacctagcgtctggggccaggtcaaggtccggtctaagttcggggtcgtgttcgaggtctagggtcgaagtgttgggtctatgccttgaaaaatatgtaaagatattactgtataacatttttatatatacttgaatgttaaattattgatatttgatattgaatatatataaatatcagaaaattctgtattcatatatgaggttgtgacttgtattatacggagaattgagatcacttaaccatgaataaaatagtcaacaacatattaagttatggaatctttaatcaacgattgctagtgcggttcactgatacccattattcgatgcaagcaatctcgattcatattgttgatgtagtatgatatctaagtgaatgagttgtatatgatagagattatatatgacatggatcgatgtgtaattaaattgtctttatcaaacatattgtttactataaagacctaattcatatcataaagatgatcaatagtagatcggtctaaatcctgagtaatcatgaactcttgttnnnnnnnttagtttctttgattcactcgtcaaagtttatcagagaagatgattcttacaacttctgttttgagaatataataatatgaatggttggaaccattatatacaattatggaatcctaactttcctaannnnnnaatgtaggttccatttaagtgttaattctgaaactgaaaagttgtgcacaaatttaaattggatctaaattatactttcacttgtgaattaacaatattaaaggaaaaagaagtaattcgaagggtaaaacggtaatttgaccaaaactaattacgaactgacacaaggatggctaatcactaaaactaattacatcaatagacactgcagtaaaactcagtaaatataattatataattactaagagctcaattccatgtttatagtggagtaattatgaaattaataaacaagattatttggttaatgagatttaataaacaatctagtttattggagcttagtattataggtctatggtctctggatcgccacctttaaatgctggcaaggatagggatagaagttgtatattgatgttcgaaaatatctatcttgatttgccaaaatagttttatttattttgtaataaataatttatttttaaaatttatcaattaaataaattaggaaaaagacaaaaaaaattctagacaaaagaaactactattgtatttttaagacaagaatgacgctacctataatgtgttgagacacaattaggcgccctctaatgtagggatgttctcattagattctttttttttttttgttaactaattaattcaagagataaatatttatttgaatttgaaaaataattacagatatttaagttggttgagatatttctttaaagtagttaagagattctcttcaagtggttaaaatattctctcaagtggttgagagattacctcaatcagttattgaatatttaattcaaacataaatatctaatttaaataaatatttataatagattcgattataaatatttatttaaataattaattatgttttaatttattattttaaatttaaatatcttttaaataaaatttctattgcctttaatttttatatatcg

SEQ ID NO: 54463 - DNA, 2984 bp, Cannabis sativa
gtaaaattgtaaactttgatccaaaatccagtatttttgtaaaattgctaaaaggccataaaatgttgatctgaactgttgagtgatgagtgtccaaggcccatgaattggattgggctgtaacccaaataaattgtttttctttacagctggtgcatacagtgagattgcgttgtctgtctcttccctccgcctctcttctcaattctcatcactaattcattaacacaattctcaaaattgtttttcggtttgatttaggaacaacaccaaacactaaagttaattgatctcaaaattattgttcattcaaactcagaaattcgattccatccccattttttcattcttccggaaataaaatattcttcaatttttcttttttgttttggttgagttattctaacatggagttttcaaaatcagatcccatacccatatcaatgccaataccaatcccgattgatctatttgtgtccaagaaacatgaaaaaacccataaaaatgaagactcctacttccttaattccgatgataaaatcgtttacaaggtcaatcgtcgctcctctactgactcatcatcatcatcgaccaagcgagttttgcgtgacgccgaaggaactcctctcatttctatccacagtcaccatgtgagtctccaacttcttttttttttttcaattcctttgtttccctggaaatcctagaagtaaaattctggtccaagcatcattcttagtaacatgttacttgtgcatttctatttcttagttaaataaataagtcaatcatagaaaatttctcatatcaattcacttaattttggcaatactaacattgtgacaacttttgaacaaaatttataagccacatttgtttgaattgttaaattagaatcacccaagtggggatatttttcctgtttcatttctttttggttagtgttgtattttgaatattacagcattggattctgcattagattaccgattaaacttttgtgattatagaagggatgttggcaatgctataagggtgatggtgagtctaaagatttcttgttcagggtactgaggaccaaaaatactctcactagaactgagttggaggtatttcttgtggctgaagatctcccagattcacctcctgatctcaaggtcaaaggtttcccttttcaaaaatcctgcaccatttataaaggcaatgacattgtagctcaggtatgctcatgactctaactttaagattaacaccaaagattagaattattcatggttgaattcagctaattgagttttgggacaagaaaaataaagctgctttgagcatttaacatatttacaataatagagtgctaaatttatgatgcagtactttattttaatatttttataaaaaatcttcaccaatagtgtgctaaaagttttgccgcagagttaaatttagaacaagattatcaaacttgatatgacaattgtaggtgtcatgttttctatggcaaattatgttagttattggtttgtctgcagtctttagatgcatcttttctggatttattagttgtgcatctaagactgtattagatgcatctgttaaatctgtttttatttatcttttgccagggtaggttctagttcgtttttatttattgttcagctttttcacagcgtggctgagctggtttatttgttggttaagtcagttattctgaagtgttgggtacaaaaagttaatctagctttttctaatttattgattactattaataatagttatcttcgatttgttattgtactttggaatataattgcaaaaagtgtactaattataagatttactcattttttatgtgcctaatttagcataattttacggtcttatcctatgtgtgtgaattgttcaaacatcaacattgaattattatttcttcattctggcttggggactgttctgaaacagaatggttttttaaatgcagactagcctcatgtacaaactcaaccagatttttgttaagaggggtaaatttcgattgactatatttcctggatctgttgaccatgctttcgttgtagctttgattgtaatattccttcatggatagatagggaaaataatagaattaagattcatattagcaattctgttgtgtaggtaggtcaatcaagggaaatttgagtttttatgctcaatggcaccataaaataataaaaaaattaaaaaaattcatctattgtacactatcaaaattatgccaatttttctttttctaatactgaaattctcctctcatttcttcaatagttttactttttctctttttcttcctctctctttcatgtttctctctccctttcatttccactattctatgttttcacttgaatcatggatgaaaaaacgccaaagactgaaggtatatttttttctctatttcacatataatacctactattctatgttttcacttgaaacatgaggaaataacacgaattttttggatctttgggttcttggaggagaaaactaataggcaggaactgaccttaattttaacgaagtcgatcatagacgaacatctaatctttttttctagtagaggtagttctcaccccttttgatgagtgctcactccatccatgctccatagtttttacatcgttggggcttgagttttcacccattgttgttctgcagttctcttataaagggtgaaaaatgtgctccaaacagttctcttatgaagaatgagaactatactacaaagaggagtatcagttgtacgatccacttgaactattccagtaatttggggaatgtctttttgtaggatgttataaattataatctatatggatgattcctactataatatatagcatataatagaaagcataatacatgtatccatagtcaaagattcgtaaaaataagatagagatttaatttagggtgtgtttggaagtaattgtgtaattactagg

SEQ ID NO: 54464 - DNA, 2045 bp, Cannabis sativa
  modified_base (270)..(271): a, c, t, g, unknown or other
  modified_base (2015)..(2018): a, c, t, g, unknown or other
tttagaaagagaaatagagattgggccatcttatcaacgttccatttcattgactaaagttaaagcatccaatgatcatcaagaccctgcttttttatgtaaggttgaaaatgtaattttgggtgacttacaatatcattcttcacttgatgataatgcaacacacccgaggcttttgtcccaatttccaggctaaaattcttggggatattgacaataaaagggatgctgatatggtaaaccaagtaactgtggacttttatccaagcnntcatcgtgttttagcagagaaaaaggccaaaaataattttttcttttatggacatgctgtatttgtgacatatcttatcgaatggacaaaccttattttgcgtacaaatcgggatattttaaattagactgggatttatggagctatttacatatcaagatatccattcaattatgaaggatctgtatggcgggctttttctaaactctggggtcctctgtctaactcatttcaccatagcagcggtgagatgggaatatctttgtatgacttgaaggttattggagggttacctattttaggaattccttatgaagagttcatacctcctaacaaaaaattggttgatggcactccatatcattctactactacagaacttttaatggtccatgctcaaatttataactatttgaagagtgtcaacgtttttgataaatcaaataatataaatgtatcttgggagaagtggatagaatttttctatagagggaagaagatgtttaaaggtgtgaaagaaagctcaactcttgagaacgtaggaggagacaaccaaaggaaaggtaaaccaaaagttaatgttcactctattccattgaacatttcaaaagagggtagtcttgcagcctttctgtctttatggctaagtcgttttatttttcctactgagggctccaatattagacccaaaactttttatatggcttccatgatggctcacgaacacaaagtttcacttgcaccctctgttttgggatacatttatcgagctttgtatgattcagccatacatggccaggggcgaggtcaagtcttcttacctatgcattatgtgataggttggttagatgagcattttcgtcatctctatagtagttgggatcttatggatcttcctcatttaagtaagtatgctgggatctttactgaacgtcgaaagcatgaatggggctagatatattttaaggggagaagattatgttatgcatcggccattttcattttccatggaaaaagatctagactttctggataatgaagatttatctgatgagaattttgagttattgatttctatgcgttcttctttgttattcgtaagagtgggcaacgatgcatatttggaaccttattatcctaatagatttgcttgccagtttggttttgatcaaggtgtgccctcagataaattttgtttgagtatccctaggaggaggccgtgtgcaataagcgaaatcgctaaagcttgggttttaatattaaggagaaatattggtatctactttcacattcctaggactacccgtatgggtcaatgcacatggtggtactgtcgttggtgggtgagaagttaccttccatatttagggaggtttgtgaaggccattcattcaacattgtccaagcaaccattcaaagaaaatgagtcgaagtatgtaatcaaagatattcgtttactttactccaaccttgcagaagcttttgtgagatgtcctcctcaacataatgaatttactggcaccaactatgctgatattgagtcggacattggattagaaaatgtccattccttaaacccacatttcaaacaaaggaaacgtgcaaaacatgatgagtctagtcatattgaagatgtctccttcccacttattcagagttgagagatgccaccatcttatacttgctttggagcttctagccctagggatgaaaaacttatcgactttgatgggtctgatgattnnnntaacaaaggatttgacagtgaggcatt

SEQ ID NO: 54465 - DNA, 1377 bp, Cannabis sativa
agacaattagaaaactaacttaatagaaaagtagtacaactaaattcccttaacactcccctgcaaactcagcatattggaggtatcaacaattgtgagtttggtttgaaaatgacagaagctttgacttgagattggcttggtgaggctattcgttagttgatcagttgctggaatatgtttgacaacaatttggtgattttgagccacattagcttcaagattcagatcttgataaaaaaaacataatcagtgtctgtttttgcaagatttgcattgatctcatgtttttgatcagttttctcgattcttgattcagatgcaagcaataggtcttcaatttcaacaactgtgtagccttctatccttgtgttcgaggagattatgaacgtgtcatactcgctggaaagacctttgaagatagctgagatatgatcacgatcatctagagtttttccagcacttgctagaaggtcaacagtttgtttcactttcagtcgatactcattcaaggacatggaacctttttgaagattttagagtttagtgcaaaactctagaatcttgatgacattgtagagtgaaatacttttccaaggaattctagatgtgcttggctgtgttgcatcccaccattcttgttaacagactctctgtcatagatgagagaagccatgaaacaagaagctggtcttgaacatcccattcaacaaaggttggattgaagacaccattagtttgatctggatcattaaggaattatggacggggagctacattttggatgaattttagccagtcgatttcctcgaatagcaaccagaacctattgtttctaaagaagaaaattgtgatttttaagcttgatttaaatcgagtgattaaagtacacaagtaaattctcatcttgatctctatttcgattttgattttgagtgttgagctggttgccaacagtgacagtgtcggctgctgttccaccatttgcagttgttccacgactggagatcgccatgtttgccactaatggaggccattgctctggtaccatgttaggagagttaaatgtccttgaaattactgtttgaggatgaatgaagaacaaagaacaagaaaaagtaacagaaaacagaggaaggaaagaaagagatgaagaggaaagatttcatgaaagagatgaagtgttatttcattatgaactcagtttgaacattttatacatgaacaataacaactaatcaagattagttacaactaaaaagccaactatacactactacaacacaagcccttagaggcagtttttttcttcagcaaattaataaaattttaataaaaatacttagagagtagtcggttattttgtatccgtaggtg

SEQ ID NO: 54466 - DNA, 848 bp, Cannabis sativa
  modified_base (297)..(298): a, c, t, g, unknown or other
  modified_base (514)..(519): a, c, t, g, unknown or other
aaattttactatttgtcattggataacactataatgatttaatatttttaaaattaatatttataattaaatttaattagtaactattcatgacttacatattaagaagtgtttcttatataatattttgtcagaaaaatgctattatattaaatcaagagtactaatacaagagagaactatattaacattcttaggttggtattcttgacaccaattttgttatataaaaagacttagagcatatttggtattgttttctgttttttgttttcaaaaaattatttttagaaatgnngacaaaaaatagtttttgaagtttgtataaacaagtcagtttggttagtgttttttaaaaacaatattgactaaaagtaaattggtttttaaaacagaaaacaacattatttttaaaattcttattttttgttattttcttttctgaaaactatttttaaaaaacaaggccaaacaagttaaattgtttttaaaaaataattttctgtttttaaannnnnnaaacagttttttagttatgatgtcaagcatgcaattattctcgcatatgattttgactaatataatatcagaagcaatatctaaaaacaaattccaaaaatttctaaattgattcttcttcaatcttcaagggtgacaactcgagctaccaatttgaagcctcttaggtgtcctctatattagggcttctccatcgaaagatgctagtgtgagtgatgtgaggaaaatgggtccacgtattcttaaattattgacttttccaagctcaatattagtatcgttgctcacaaggagcacaactcctccacattatttttattactttttcc

SEQ ID NO: 54467 - DNA, 3039 bp, Cannabis sativa
ggagcaacagaacaatgaggcaccctttctaaggcctgggtcaggtaagccgatttacacgagaattgcccattgttttccaaggtccaaatccacttatcttccccgtgccccgagggcttaccaccttttaaaattgcagaaacagtctcttgatcaaaaagactgtttagcttttggccatcccaatccccacttgtcagcaggagatcagcgacacaccgattatcaggtaagacattaccttttggttttgggatgaaacctttacaatgaggtatccaaggatccctccatatactagtttctctaccatttgccactaatttacaagccccttttctcaaaattgcattggctttcacaacatttttccaaaaccaggagtcagaatctttgtacttgcaaccgagaaaatccttcccttttaaatactttgcttccaagatcttggagcataacgattgacacccatttagaattttccacccccactttgccagaaaagcgaggttcatttcctttgttttccgaaatcctaaaccaccgagagacttaggaaggcaaagtttatcccatgctttaagatgaagaccatgatttcctttctcgaatccccaccaaaaatcccgaaccagaccatcaattctattaacaaggcgattagagagtttagtggtttgcatagcatataaaggtagagacaaacccaccgattttataagggtagctcgacccgccttggacaaggtctttgccttccagccttgcaatttagaagtgagatggtcaaggatgaaattaaagtccgcatccttttgtctagatctaaagaggggcagacctagatattttataacaccatcaggagtatcaatacccaacatatccttaatgccatttctcattccattaggggtatttttgctgaagaaaatagaagttttgagtttgttcacttgttgtccagactaggcacaaaacctctcaaggaaattccagtaattacgcacttcgttcaaattggcacgacccacaaggatgaggtcatcagcaaagaagatatgggacaggaccggactttccctactcaatcgaacaccatgaatgctcccttgactaagggcctcttccaaaagtcttgataacacttccgcagcgcaaatgaagaggtatggagataggggatcaccctgacgaaggccgcaagatggagaaattttgcccattgggcctccgttaaggcaaatgttgagcgtggtggtggagacacactgagtaacccaacttcggaacttctgggggaacccaaaactatcaagaacacaatcaatgaatttccaactcagtttgtcataggctttaacaagatctattttaattgcaaagtatccctctttccctttcttccggttgaaagagtggattatttcctgcactatgacattgttgtcctgaatatttcttcccggaacaaacgcagcttgtgttgggaaaataattgaagggagtataggtttaattctatttgcaactattttagaaatcaccttataaatcacattgcacagggagataagcctaaagtgattaggacgtttcgggttatggttcttagggatgagcaccacattcgtcgaatttatacccttatgcatgtaccctttttcaaagaaatccgaaacaacatcacaaaagtcatctccaacagactcccaataatgcttaaaaaagagtactgacattccgtccggcccaggagctttatggttgctcatggaaaacagagtgttttttatttcatcctgggcaggacagagaatggccccctcctggtgctccatggaggtcctctcatggaacaggtgtctacactcgatagcccgacctatatcggagtaacccaaatgttatctttactcaaaacgctttcaatggcatttcttcttccccttatagcagccgagaggaataaaaatttagagcatttatcgccatccttaagccaagagattcttgcccgttgcttccaataactcgcctttctagccatagtttcattcagagaacgatgaacttcacattccttgctccaatctcgggcgccagcgggtaacctttgtaatctaccaagcctttgctctagatcttttatagtccagtcaagcttcccatactgggttcgatgccactgaattagagccactctggtcgcaccaatctttttaaagacgcgagctggggcccaagtatgattaatcgactcccaagcgttggcaaccaccaatttgcttctctcatccctagtccaaccctctacaaacttgaaaaatctcttgaatttggcttcatggcccccagtgataagacataacggcctatgatcagagttacaagtctgggaagagcagagaaaagctctagggaacaagtgaatccaatgtccattaactaaagctttatcaagagcagacttaacatgaccctgtccagaacgatgattatcccaagtcatcttgtcaccttggatgtgcatattaataaggcctctagagtcaacaaggttagatatgaaaggtataaaagggtccctccctgatgatccttctcgctcagtattactaagaacaaagtttgtatcaccaaaaatcaaccaaggaccaccaaacctatcccctaatgccatgagttcgtcccaaaatttcctcttagcatgcaagtaaggaggtccatacacacacgagagaagccacggatgggtaggtgggtccgaataaaccagtccagtgatatggtttcgggagcattcaatacactcaaagctaaaaccaactttccaggccaaaataatacccccagcagttccaataggcggcacattaacattaaaataaatgtggagagattttaaatatgtaccagtggtgaggcatccacttttagttcagtcagaaaaacaaaatccggagaacgcactctgatcagggactttagctcccgaactgtagaggtctgccctaaccctctaaagttccaggc

SEQ ID NO: 54468 - DNA, 3038 bp, Cannabis sativa
atatacgtgtgtgaaggctagcgttattgctaaactatttccaaacaaagacaatggtttggaatgtcactgctgccatgatgcgaatggagactccttgcactggccaagacactctttcatgcatggaagcgtaaagttgtcgcttaagatttttctatttgatggtatccatcatctcatacttcatgtactaattctacattcacgtttttatgaaaaataaataataataactagcttcccacccaattctacaatacttggggaccagaaagctataacagttgttatttaggaactcagtggaggagcaaaaccacatatctaactattcgacgtaccccttttggatattccatattcaccgttaaatctcactttatccaactttttagcagccctgaacaatgaaacaaaaccattctagaaaacccaattccatttcctgtcctatagatagaatatctcaaacactatcttataaccaaacaataaatagtaacatcacttaaattgttctcaagagaattgacagatttaaatcctgatgatcaagaagaatagaagaacttaccagaaagatattacagcaagtaaaatcatcgtgtagacaagctgtaatagttgcagtacatttttgtacttccgattgaacctctgaaagatgagaatattagtgcacaagcactccagataccccggagacaagaggtttggaatctgtccatctattgaatggtttccttggactacagttgatggacatctggttgagtattctcagctccagcttcagtgcttcatggctgaaatgaaactttgtagtagtaacacagataatcataacgatcacatcgtaaccgtctggtatttctggcttgttgtatggtataatgaaatattagaagttgtactttaacatcaatgcaaaagaatagaaggatttatttaatttcactttgtgctgattctcttgcttgctagtacagaagctacatctatgcaagcctcccaaacctgccagccaataaacattttcgaaagttgccgtgtttttaacaaaaacaataacagcatacataatatcagctagccaatataactctgttctaaatcgtagccagtgaaaccaatgaactatgcactcgtagacaaggaacagggtatcaaaagaacatatttttattatgagggattcaagctaatacagatgttatattaggtttgatctaagaacccgtgaacatgaagtaggccaagaaagcattacttgaaaacaaatttgcaacattatcatgtttgaaaaactcatctatttcaataatttagacagataattcattaggagcaaccaaaattccatcagtgtctgcatacagccattccccatcgcggatcctcgtcccagcaatggttatcggaacatgtttctctccagtccttttcttgttagctttcattggatgagaggctagtgctctgaccccaatatcacatccgttgatttcatcaacgtctcttatacagccatttactacaatccctgcccatccattgttctgagcttgaactacaggattgccacccaatattgcacaccgcaagcttccaccaccatcaacaacaaggactctgccattgcctttttcctcaagcaactcacgaatataaacattgtcttcgaacaccttaatggtcacaatttgtccagaaaagacctgtcgccggccataaatctgaaaaattggctgcagcgcacggaggtcgccactcgcaattagttgcgagtttgcatcacaaacttcagcagttgtaaccaaggccatctatctattttcatgataaaatcataggacaaacgttagatgtattaattacactacaagccaattttaaatcacctatcacagtaattgttatgtaacatattgattagagatatttaatgatcgaaaagaaaattcacacaactaattatgtcttcatctggtgaaaaaggctgtgtcatgtttcaatcaaaaggatcaccatgttttctatctataacaaaatcatgtagggattagacagatctcacacctaaagatcacaatttacacacatgctagtacaggaatctgggcccataaatgaaaaatagaattccacaaaatcagcataactccaaaaagagaaaatacatttgccttgtgttatcttcctacctaaaagatgaaatttgaaaaataaaaaaggaaagaaaaatatatctcctatatatcatggcagctataaagaaaaaaccactttcacaactttggtagtatgagtgtatagatccgaagacttttcactaacacttagcagagattaggcatatcataactaaaacagtttttcctagggaaaaaaaaactaaaacagtaaaagaattaaagggtattcctataattgtacaaattagtggggaaaaaaatctaaaactttttcaaaactaacaagaagatatctaagccaaagaaaaagaaaggtaattgggttcgtttgatgcctcgaaacttttaagaaaagtagaaatagatgaacttcacagaatgaaaaacaaagagtgagatattttcactttcagttttctcgggaaacaaacataaacatgcagttaatgaaaatcaagaaagaaaaacaaaaaactaaagcgtgagaagtgatgatccgacagcttaaagtatttcacctgcgatcaacctcggccaccgttgagctccacgattcaagaatatgcacagccttaggacgaaatctcgttgagctgtttgtgaaacctgcgataattaaatactcgatcgagaatgagaggatctgtgagtgtttgcgttactagctagctgtaaagcgcgtgtaataccatttccatcaccctctaagattctaatttcttttactttttcttttaatgaaaaaaataaaaaccatgattttcttttttcttttaattatgcttttcacatggttaacaacttttctttttaattatgcattataataagaaaaggaaa

SEQ ID NO: 54469 - DNA, 1080 bp, Cannabis sativa
caccataggacatgaatgtaaagtttcgaaaaggccacatgccacatggaacgcaaaagtgagtaatgttatgcagaaagtaattaggttcagtgttgaggagttttctttcgtgactggtctggattgtcattttgagtcaaatattttgaggtttaggcaggagagaaatattcttgtagaacagtgtttgaagggcaacgataaaattacaaaaaattatattcaagttgcattcaaaggtaggtactttgggaacaatgatgagcttgctgtcaagttagttgtattgtacagtgctatttgatgggtggtcctcttaggaaagttttttttattgaggagcttgatattatccacaatggtcaatataatgagtatggtgtgagtaaagagtgttatgaaatgactattgagtctataaaggataagactcatgcatgaattaagaaaagtaaggagcataataagaacgaaggttattagaggttgttgggttcctatatgctctccaaatatagtttttcgggtaagttgttttcaagcttactttgtattcaaacattgggatttttaaaattctcaattggagtaaaatgtcaaagctgaaggttaaacagttgaagttgcatcatatgaataatatgatatttaatcgtccactgaagcatgtatgtgtctattattttatagttgttttactgttgttgtcattatttgttgttgctctgtttgtttgttttgttattattcttttttattattgttacagctgcaataaaagaatatcactcaaatttctgagaagaaagacatgtcgaatttctctgattattttttggatgaaaccatttgttctttcagcaaagggaaaggcaaaggggaagggaaagacaattctgagcctattccaaatgtttctacaaatcttaaagttggtgttgtgattttatgccctaaataaaattcacctcaatctcaatataatcttattagcttatcaataaaaataatatagaagtcaattttatatagtactccaaaataaataattactatacttcttctaaaaaaagttcg

SEQ ID NO: 54470 - DNA, 2137 bp, Cannabis sativa
  modified_base (2083)..(2091): a, c, t, g, unknown or other
atgttattttcatgatacttttacataatttttttgttattttaatagaaaactgtaaaaatataaaataaaaaatctttaaacgtaaaaatctaatttttttacaaaaattgtgtcttatgtaatatctctttattaaaaatggataagttgagaaatactttttttgttgtatttattatattatatttcattaaaaagtacccactattgtgagtaatttgcctaatataccctcaccttttatttaaatttagcacataatttacatcaacctaaagagtataataggacatcatctataaaagtgggtatatcttaaagaatatggaaatcaaagtaaaaattaaaacaaataaagtaaagtgggtatacaatataatttcctctattaaaagaattatttacaccacatactgaaattcttatttttcttacttttttattgtggggatgaatttttttcaaaaatactatgttttttttttaaaaaattgtgtaagttttatattgtgtattgtgttaagtttttacggttgttctacggttgtttatcagttgttccattgttgtttttagttgttctattttgtgtcccactgttgttttataaaaacacagtattattgagaaaaaaattccgtgtgacagtatttttgtaaaagttaacccaaattctagtatttttgtaagtttctctattaaaatggcaaaaatatcacataaatatatcgggtaggccctataaatatttatacagcccaacaacataaatttacaaaactacatcttgctctaaccattcagcctcacgaactgccttctttaacaatgacagcttccaacaaccaaaccagcaggccaactgaaaagaaaccaagctagacagagaatcaccataaatttcagcgacttcacctgaaaaaaagaccgtaagaaatctaaacacatacaatttcacatttatgcaaaatcgggtagaaaatttagttcgaaactaaaattcaaccctgagttatgattaaaatcacaaaaaactaatcttcctaatatcaattttcatattcataaaatgtagatctgtctgaaatagatttggagatcctgatcaatccaaaacgggtataaatcgaaaaaaaaaatgtatcaatatactagctaatatttctcccgttgcattaacgttgttttccagatttttcaatggtggatttagtatatcaaatcacaaataacaaagaaaatttgaattcatacagagccacatacatagaaatattgttctagttcttaagtttctgcgtagttacattgatgttgcattaacattttactaacgctctgaaactagacatatcaataattacaaactgtcaatgatacaatagtttttatgatatttgcaggtgttttatatccacaatccaacacaaagctctttaaaaaaaaaatatttagcatggttagttttattaatatattcacttagttgatataaagttagtgtatggaattctaacagttgtttcttcacataataatattaaaataatattaaggtacaattgattgttgatcagtgattaaaaaaatactgacaaattttttcatgataatggtcattcaaattttcaatttatagttgcatttaagttgtatattggttgaataatagttgtgctactacaatattattatttaaaaaaaatagcgcttagaattggcaatacacgactcgtacagagaaaactcgattgtgataagttttgtttgtattacataggtgcattattagttgttttaaggtttaatatctgttgcctcacaacaaatatatttattgcactacagtttcatgacagttatcccatagttgacttacaatgcttaaattttcaaactgtcagaaaaaagacgtaatttcatctctcatattttgcaatggatagtttgatcaaggaataaattatgtaaattacaaagctactggccaatacattttaatagattgcaaatatgaagaactagtacacaagttgaaacaggtattggaatgcaacctgttgcccctaattttgcccannnnnnnnngaccaaccggacagggacacgtgggtcaagcaattcacattgtttg

SEQ ID NO: 54471 - DNA, 1601 bp, Cannabis sativa
tgaagtgtcactaaagagtaatacacataagtttctaattttttttttatttttaaaaatgctgacttatagagtcatgccagggacgtttgggaaagtatatcccgacttacctagcgcgtcactaaatcataattatttatttaattattttatataaacttaaaaatatggtatagtgacgcgccaaacacgttgggaaatatatacccaatcgcattatgcgcgtcactatatgttaatgaaaaaaaaaagaaaatatcatgataaaaaataaaactatgcgtgaaccaataagtaaagacattaataaataaataataaatacacctacctttacaaaaatcagcaaaacaaaaaattaaaaataaaaaaaattatcaataaccacacaataccacacacacggtacaactaacagctgtaatttttttgaaaggtaaacagctgtaaaatataatgtatttaataaataaaaaaataaaaaaattaaaagttggatagtaattagggtttacacattattagacaagacaaaacacatttctctttcttctccctcttgactgcctcttcttcttctccagcgaatggcgtcttcgagagcaggctcctccagcgaatggcatcctccagagcaggtctcctccggcgaatgtcatcggctccgcctcttctctccagtgcaaggatcttggtaattggtcgccgcctctactcgatttgttgtcgtctctctcgctcgtcatctcctcatttctcgtcgacgaccgaagatcccaagaaacccaaggtaatcggtcgaatctctgctttttttttgtttctctctctctctctctctctctctctctcttctgtgcagagatctcggtttccactgttttccgagatgtcgacggtgtttggagttggatcgtggttgcatttcaagcgcattcatgctttcggttctagctcacccttcgttcgtggttttagttcgtgattgacagagtgaatttaaatattttttagtctttttttttcttatgttttgttcataatctagtattgtttgtgttattttttttttttgttaaaatttctgctcaaactcagatctaatattctatttaaaattttgtatagttgttattgaatcattgatctgatttgggctattaatatttgtatttgagatttatttgtaaattcctaattgttgtgtgtgtttaagtttgatcttttttacataatttcgggttcgtaacataggatatggtttcttttcaatgtttctgatacttatgcttaatcatgcattagaattttattttattttggtttgactgtagaaaatcaaataattcaaggcaccagctttatcattttcaattgaagaagaaattaaagaaattcaagtgtgtgtggccactgttttgtgtatatctagtatagttaagactatgcatagtatagtagtacgtataatgctaattaatataccaaacacaagcatttgattttttttattaaaaaatgaaattagatattccttctaaattaaatataaatatattttatatttagttaatttattattattatatttaattgta

SEQ ID NO: 54472 - DNA, 1399 bp, Cannabis sativa
  modified_base (28)..(47): a, c, t, g, unknown or other
ggaccaaaacttttgattcatatgatcnnnnnnnnnnnnnnnnnnnntgacgatactgtaattgtgattaacactcatagcgtaacagtaagaaaacgctcatagcgtagcttggtagtgattgagcaactgtcttgattaacacctctttacccgctctagaaagaaactttgactcccatccttgaatacgtttacgaactctttctttgaggaagcccaacactgccgacttgtttctgctcattgtactggggagaccgagatacaaactgttttcattagcaatattcatcccaagttgattactgatgttttgttgtgtgaccaatgtttgagctgaagaagatagaggatttcgatgagttgactttctgacccgaggccgcttcgaacttactcaacacctcctgaattcttgttgcctccaccatagttggtttacaatagagataactatcgtccgcgaagagcatatgagtaattcttggagcaccattagccactttacaaccatgaagcaaacctctgctctcaaacttacgaaggatggccgaaagtccctcagcgcaaagaataaacaagtatggagacaatgggtcgccttgacgaatccctcttgaaggaagaataggacccatctcatggtttccatgaatcaccatatagcgggctgaggagacacatttcagcaataaccgaacccaccattcaacaaagcccaatttccgaagcatagcctccaaaaagtgccactcgattctgtcgtatgccttgctcatatctaacttgagagccataaatccctctttaccttttctcttcctttttaggtaatgaaggacttcaaaggaaacaagaatgttatccgaaaataagaacgacccgggataaaagcgctttgattctcagtgataatttcatccatgaaaggcttcatacgatttaccataactttagtaatgattttatacaacacattacataaagctattgggcgaagttgagtcatatccgatggattctttgttttcgggataagcactatgttagcatcaccacaattctgttcaaaaaccccagagcgaaagaaacttctgactgtctcaacaacatcactcccaactattgaccaacacttttggtaaaaagccggtgtcattccgtccggtccaggactcttatccggatgcatttgaaacacagccttcttcacctcttcttccgaaatgtgttgctgtaactcagtgttgacaaaggatgagacccgagtttctacactatcgacgatttcctggcaggcactacccgaagcatgaaacaggccattaaaataattggtcacaacagtaggaagcccattgtcccaagtcgtccactccccattatcattcttcaa

SEQ ID NO: 54473 - DNA, 1511 bp, Cannabis sativa
gtccatataaagacttatctagcttacatgcatgcccttatttgcctttgacttcaaaacccttaggctgctctatatagatcgatgtcttcttccaggtccccgtatagaaaagttatagttacatagatatcaccactatcataaccatcacttaagttagcattgtgatagggtatagtcattcttattcttactttgtttgcttgaatcttcttgatgatctgaatttggctttcttccccttctcttgtagaagtaacattctcttttgaaatgtccaggctttccacaatgataatacctattagggtctttatgacctttagaattagatcttcatttgttgtgatggttgtatcttttgtgaaccctctaccaacgtttctgcctctatttttccaaggtttcatctgtgttggtcttcccttacttagatttaaatctccattagaacacccaggtctttgtactttcatctctaaatctgtggactttaatgctgagattactttctcgagagtaatctcagttcttccatactttatttgtagatttaattgccttgtatgattctagtaatgagttgagaattataatagattgattctcagcactcaatgtctcattttcccatgagtttgctaattaactcaatatgcaatcttagatcttgttatgttccagattgattctcagcactcatctaagttatgttccagattctttgaatgactcattttataaccaaagattattttctttaagtaaatcttgttaattaaagacttcttctgaaactgttcctccaatttcttataaatttttattagtgtatcttccttatcaaccaatttgattattgaattagataattcctcttgttaagcctttgtagtgtctgctggtcattcaattggatcacttagaacttttagcagtttgttctgggcaagtaacaagactctgatttttttcctccatattcgatagtcacccgaaccatcaactctgtcaatgtctatcttaatggaactcatgtttatttgtataaagaattaaatcaagaattaaaaagattttagatttagaaatatcctgatgttaatcttgtaattgtgtgaaatacaatcttattcttgatgtactagtttttcatattctttccttgacttcttaatgttattctgagcatcaactaccttattctttattgggttcgtgtagtatatctattttagaaaaattttacaatgcaccattttaaaagggatgtacatttatttagtatctgaaatatttttttagtcaattttttttttctcaagatcatgtacgttaatgttatagttatttaaggcatcttgccaaattttaaaatattcagaaaaatttaacacgtaaaaattagagttcaaatagtgtattgcacgcgtgattattttattttatacgcatgtgaaatagactatttgaacactactttctatattataaattattttgaattt

SEQ ID NO: 54474 - DNA, 917 bp, Cannabis sativa
  modified_base (570)..(572): a, c, t, g, unknown or other
ggatagaattttatgaaagagttgagggtgaggaagtgggatggaataataagaaggaaatcattagaaggtagatttgtgtgggaagtactagcgagtagtagtaggacgcagaactctgtggaactttccagatgaatgtctcaaaatctaaatattattctttaacgatatttacacttataccactaatagtagaatcaagatcttctgttatctcgtttccaaattataatttttctttttaactcattttatttatcaaactattgagaattattgtattagccgctctttgcggctgttaatttaattttttttagtattataataaactaggcagatatttaattttttttaaattacatgtataaaataaattgtttttttattaaataaataactagataataaaaaattatatcaaatttaaattttactaatttcttacataatttttttctgaatattataagaagttaggtgtagatacgtatgatatttttttttaaaaaaaaaaaagttcaaaagctaaagatgtgctattttaaaaaaccaaaaaaaaaaaannnaagaaaaaaagaaaaaaatatttttttaaaaaaataaattcaaaagctaaaactatgatattttaaaaaacaaaaaaaaaagaaaaaaaaatacgtatgagatctttttttgaaaaaaaaaataataaaaaagtcaaaagctaagaacctaatattaaataaaattaaaaaaattaaatactcaataatgttaattaaatactcatttttaaatatagattttggaattattttacttaataaaaaaattaaaaaaaattagagaattaaggagaacagagaaaagtaactctagagcaattttagagtgatacatcaccgtatatagatatatagataggttag

SEQ ID NO: 54475 - DNA, 1967 bp, Cannabis sativa
tcccaaccagcaactaacaaagagtgacaagagaaaaaagtccttatgaccaccccaggactttgataaaaaattggagaaatattagaggaaacttttttctctggcagtagttcacaataacaacaataacaagtcctctttgtctatctctgctcatatttggacaatcccataaaaccaaaaccagtagagatgaaatagggataagacaaaaaatttccaagattggaattagatagacaatcccatatatcaccgaagtttccaaaccaaataaaaaacatgaaaatatgaggagatttgtccttgagccattggaaatacctttgtacccatgtggtgttgtgcacagttggccatggtgaataccgttgaacaataacacttctccctctatcaaaaatccatctcagatatctgagcttttgtcccttccatctctccttcctcctagcaaactgcctcccttgatgcacccaccgagcaccgtacccaagatgtaaaggttcaaagaagatgactgagaaattccacccaatatgattcatccatttacacaaagaagttagggatagtggaaccttccctggatcccatatcataagcacgtgaccctttatatatttactacttgagtgggtccactcaattatgggatttaatgaagaaatgggcttgggcttaacctggtaggagtgtaatgttccatttgaaacataaagcgttaaggggtcatgtacatcaatttgactcttttgggccggatccgaatagtaagaattgggctttatacaaacatcacatatggatttaggtctgaattcatcatctccagacgccggctccgattgtaatagaacccatcgacacccatgttcttcttcttcgatgttcatgaccttctccgacgttgcttccaacctctcgttaaccctcgcgtgacctggttgcactgaatatttttcaccatcgccttcgaacctttcgaatatgcaattggttccagcgtgagtccattgatgcgactccaagtttcccaatgatggtggaattggcggaggttcatttccgttgcaatgcttctccatctctattatcctgttcttcccaatctgtagtcccattgttgtgtcgctgcaagtctttgattggtcgtgatgagtttgcattttattacccacaatttctaatgaagaaaccaagtcaccagcagttagaacttcaacatcgatcgagccatctttctcgtaagtacttttatattgtcgtggatttatttgctctattggagagccacaaatctgcaattcagaggctcgattgtgtgattgagaaataagacgtcattgatgagttttctttcctccatctcatctctaacgagattgcaagtatgatgttgggtctgcaattcttcttcaacaatgaacgcctgggctaaaacatcagcgagtgtcttaggcctttgctcccgcaccttaattgccatctccattggaagattcccaaagaagatatctcgcaaaaaagtttctggaatgtttggcagcatcgttgcaaccatctcgaattgagtccagaaatctctcaccgagttttcatattgtagcgccatcaacctcttgtacggatcatcttcgctttgactacaacaattgaacatggcgatccgaaactccaaccagttcttgaatgggtcttgtgcctccaccacttgaaaccatcgccaagcaactcctcgaagacaggctttagcaacaaagaccttcatgctttcacgaattcgatgttgttgaaaatactcttcaatgtcactgacccatgcgtaaggatcatcgccgtaaaaaatgagcttcgagttttccatggtcgccaaatcgatttgctctgatactatttgataggaatttcctatcatttcggtacaaacagtagcaaaatagagataatagagatgatatatt

SEQ ID NO: 54476 - DNA, 1056 bp, Cannabis sativa
tgaaacgtaaagtacttttcaaatgttgactagatctgacttgcaaagtcacaaccatttgagtgagtaagctaggagtcattgaggatagtaatcacgatagtatgagctgatcttgtgcttcccagtcaagataagttggattgatcctttacagaggtcaatcttcttcattaagaaactttggatgtgagttcggactttgaagatagatcagttacctgctcccatgaaatgcttcaagaacttgttgtatccagagaagatagttgtaatcattgagttttattgaaagaccatagctgaagtagatttgagaggagtcatctacatccttccttttaatttgttgtggactaggattttgtgcaccgttgttgcctggttgttttattaacagaaagtggtggtcatttttgctctgataccatgttgaatttcttaaacatttaaaaaaaaaaataaacacataaagaaagagaaggaaatatgaaaaaaaaaaaacaaagagggattcttattgaatcagtgacatcagaagatgtaatatatacacttgagtaggacaacaaattaataaaccaactgtaatgacagctacaactaacaaccaaaacaaaaatagttagcaaataactaactgtctcaacactaataagtaatgttatttggcacttatggtgctcaatactaaattgatgtgttggtgtctcacaattggttagtaatttttcatattatttattaaatcaaaatatgtgcctaagacccaatattaaaatgtactaataatattttgttacttcttgttgtgcttgacattacaaaagaaaaaaaataactatacctcttactacaaatcgtcttttttttttttttttcattttgctttgaccaaatttaagattttgtggtgaccattaacaaagtgtcaagatctgcaaacaaaaagtaaggctaattagtaattcccctctcccaggaactttgacatgtactaaatcgtgccccctgaacttttttgaccgttaaaaattccccccgaactattgagat

SEQ ID NO: 54477 - DNA, 1180 bp, Cannabis sativa
tagaaattaaaatttagtagaacgctctaggttttctcacaagaaatacttcacacaaatatgaaaatataaaataataagatttgaagagatagattagtttgactctggtcctatttataacacatataacctctaaaaacaaccataaatacaattttacaactgtataaaattttcctaaaataaactttaatttgccagatctacaatatacaatgacagctgaggcaaaatcaacgcactatccatagccaaaatcatgattttacatttatttcttactataaaaaaaaattatacaagttatattgatagcaaaatccaaaaaaatcaaatatcattaattagtatagattataccatacataaatcatttaaacaaggttttgataaaaagaatcccttatctcttataaaaacttttctgaatattcaaaataaattaaataatatcttaacaattaaattacaaaaaaaaaaaaaataacttcacagttagataaagtgataattacttataaatttctaatatttaatttagccattacatatcaaaataataatttttattacttaatattaatttttatagggagtatgaaaattgaaaaatataactcagattctcaattacttcaaatgacacaattacattataattatatggacaaataaatatgtaaaattacgtaattaccttcaattataccaaattttaatttctctttaacttttcaaacgtgccctaaaaaccaatcaacaccttacaatcaacaattattttttaataaataaccaacaagaagaaacaattgatagcaacaatgagttgcttttagtttttctagtaactcaatgtgataatagaatacataaatcgaaagggccaaaatggtcaattttcttaaatgtgaaatattcttaatgtataatgaaagataaaatctcaaacaaatgagacaaatacaaaaaagacaaataaatatattcctttaaatattgtgcatataaatacaagatcatataatctatattgataggacataattattataaaaaatatagaaaaaaatacaaattattgaattatttattacatcacttaataaaattaaattatttttatttacataattttcaattgaataaaaaattattgaggatctgattgaattgg

SEQ ID NO: 54478 - DNA, 863 bp, Cannabis sativa
cattctggatccatttactcctttattgaagatttaaatgaaccccaaaagagattggttttattgagaagaagaagttagttgatataaaatattggagagagagagatttgcctgctataagagatgtaatataattacatttcagaaaaagaaaaaaaaacgacatgaaataattgtaattggtattaaataatttaatattttatttaaaatgctatcttccatcattatgtgagctctttattgcttcagttgtttttttggacttggaagtttgatagggtacgttctatgttctacatatcttacttgcattattagtgaagtatttggtaagtaattaatttaggaaaaaaaatttagtacacttcctaaacacctgtttcggtacattctattttgactgctaaaagagtgttttgttacatttatttttttttttcacaattgactactaattattattttttttttttggaaaatttcgaaaaaattcacaattaggtaaataaggctcaaataattatttaccacatataaatataataaaaatattactttttactttttgcactgtaaattattttttttaaaatatataatttgaaaatagtacaatatacacaatcataaaaaacgagtccttttataaaattatctattgatttattgaagttatatattaattaaagtattgttatttgacaccttaaaatacttaacactatattaatgtggcgtcttttagctaattagtggttttctatattatttattaaataaaaatatgtgaaacctaatattaaaatgcactaataacattataacacctcctcttgtgctttgccccttaacatttc

SEQ ID NO: 54479 - DNA, 1252 bp, Cannabis sativa
ttgtataattttagaaaatacagatcaattttgtcatttaacaaaacagaaggtccaattggtaacttttacaaaataaagagttcaaaatggtatttacccttttctttttatgatttcaaccatgccaaaaatctatctattgttgtacttattgggaaaatcacccacctacctccccatgaatccttgatgaaactataggacataattatataaaccttgccactaagaaatgatattactgtcaatttaaataattaatagtaccttagttgaaaattttaattccttagttgtcataagtataatttgtcaaaattgataagtagagaagatggccttctaatttgactctttagtttttttctaccaagtaaagtgtccctccctcaccttataacattaacatttcaatctgcacatttataccatatttacttctacatttgatgagtgtttcatatctctgtatagggacgaagacgaggccgaggccgagcatgtcaagctgagacaaccgaccgagacggtgttgcccgccaatattataatatacagtaaaaagaaagtaactcttcagtgtcaacaaatggagaagtttcaatcatggaaggaaaaggaaagtttttcaatggaaaacatacaaaaaataatatgatttacatgtttggctcctactcccacctaaggatctatatacacatacaagtggagaatttttggagggtgttctgttctgttctgtagtatacatgtactcagattcttctaatcattgttaacttcaaaaagttcgttacacatgaatgtgcaaacctgtatatcatctgagatgccatcgaatcgttgttcggtattcttagaaccaactcattgtcaccattttcagctagggaaaacataatgcctgtcgtgacatccaaaattgctggtaatggtcaacatgcccaacagtttcctgtgcttcggaatgtgataggtttgtttttcgggagttcttgttatgaccctggaacaggtttagagttgaagatcttaccaagtgcttcatggagattctcatcctcgaaaggcttcgtaacataaccatccatcccacatttaaggcactcttcatacgtagcgtgaatcacatcagctgtcatggctagaattggtgtgtgccactcatcttttcgggcaattccttcaacggtggatcccccgttcatttgttgatttgcttcgctctccctctttctaattagac

SEQ ID NO: 54480 - DNA, 1116 bp, Cannabis sativa
aaaagaacttaaactataaattaaaaataatatataaattaattctctcaaacttatgatcataaatttgtaaatcaatgtgtacagtcgaaaaaatatagtgaaactcttttgacaaacgcgtagaactaagagtttgatattattattaaaaaaaaaagtttgatattaaagcaccatatggccaagtacttatcttctaataatttatattttttattcttctttttaaatagaaaaaatatacttgattttaggtcttggtcaatatgatattgccaattcaaagaaaaaacagtaccactagcattttgtttttttttttttgaaacaaagggaaaattccatagcaaaaaactcaaaatcaagtacctaatttagcaagagcatagagttgggtttgggctaagacagactaggtccacatctaaagtttgcgctaggatctaccagccgagagggccaaaaaaaaatatttttcctttaaaaatatacatattttaaaataaggaacccacaataatttttattttcgtaaagctcacctaatctcaaaaccgattttgagcatgaaaattaatattataggtcctattaccactaatgtttgatatgagttaatttttttttttttgaaagaaattttattagttagaaatttcaactaccaaatagggtagcaaattaattggaacatgctttaaactgaaacgtcgatcagaaaataagataacagcttttgtaaaattatgagctactaaattattagatcgttgaacgaaaaaaaatatttgtaagactagtttcaatatattttgaagtattcatttaatgacttatttggccatactatttaattatgtacatatttgactttttgataactcgaattgtgatgactctcaataacgaaacatggaatcggaaggtgctatgacttcccaattttatttttttttttcaatttctttttttttagaagtacatttgaaaaattattaaaaaataaaaatactgtttggtaacactttttttttaattttttaattacaaaataaaagtttaatttttgtttttaaaaaatttatttttgaaaaacaaaaatgggttctgtaa

SEQ ID NO: 54481 - DNA, 807 bp, Cannabis sativa
aaacaaaaattaatggtgtttggcacaaatttttaaaaactgttgttaaatttttttcttacgaaaaaaaaatcaatattttagcaccataccatgacattaacccatccgggtctaggttctcgggtatggtttcgggtctaggattcgagtatgtgagcaaaatataaaatataatatgttagacaaaataaattatttttgaaaattgaaaacagcttttttatgttttctgttttcttgttttttaaaactcaatttgtaaaattttaaaaaacagtttttaaaaatttttgccaaacgactcttaatagtttttaaaaactattttcagtttttaaactgtaaagccaaacgacctcttagattttccttcgggttttccttggttcgaagctagagagaaagagaagaaatggtggcttttttgtttaatgtttatcctcaaaaccctttgttttattcagctaaataaatctaagacaacacttaaggattttactgaaaaatatactaactcaatgttaacttaagtggttgttcaaaaaaaaaaatgataacttaggtggtaatttaccaaaatgctcttttcttagtacttaagcaatttaaatatctatgggtaaaatggtcaaaaattataattcgaataatatagtcattctaaatgtctaactaacttgcccacttattctaagatacaattaaatttaaacgcatctaagttactctatattgcaaattgtcgtattctacggctaccgagcataatacatgaaaattgtaaaattttgtatagtatatata

SEQ ID NO: 54482 - DNA, 607 bp, Cannabis sativa
actaaaatcataaaaaaaaaaaaaaaaattagcaccacaaacctcgacgatgcaacctgtgggacaagtatgaaggtctaagaatggtgacctgtagagaaaatagaataataagagaagagagacatatctgaattagaaagaaaatgcagaaaacgagggctaggccattctcgaccagcgatcgtggaaggaacctcaccgttagctttgcagctcccaaaatttctcgatctgtcacgattctctcttggcagctccaatggtgtgcagtgcagcagatctgacgaagcaaagacaaaatgatatatatgtatatatatctattctatataaagtatgcctatataaccgaaattcttagtttatgagaaatttatgggtaatttttaatttttatttaataaaataataataaaacaaatcctattaatatttgaactgatattaaatattgaaaaatcacaactatttaaaaagaaaacaaccggagattatttttccaaatctaaaaccctatatatatcgtaatcccaatcgtatacacagctataattaactacgattggcagcctccacggagacttcgaaaaaaccccactttata

SEQ ID NO: 54483 - DNA, 773 bp, Cannabis sativa
tgtacctagtaaattatgtgtgtgttattagggctccttgtagatttatttgagcatgtgaattttttgagtttatgtttaagttttgactggtcaacaactaatgttgaaatatatttgacaactgtcataagctattgaagtcggtttgtgagagttggagttatatgtacttttttttaactatcttatctgactcccatttattcagtcttttttttagagcattcattcatttagagtctttgatatagatatttctctgctagggtaattttttttttctttttacttctttgttattgcaggttctccattaattgaagagttcaaattctgcaataaagtgaaaatggagactatttgatttgaagagagttcaaatttatagttggaggaattttagctagtattttaaggagatcttgagtgaagaattaagtgatttgattatttaattttaagagatgaaacagattttttttcgtagatactcaagtattggggtaaattataatctctatgaatgtaatatgttgatttgattttagaattaaaaaatgtacataacatcaatttaatagtggagttattttactttggttcttaggggactcaaggagtagttgattggaatatgttttcagtgcaggtgaatcttgtaaattcatgtgttcatgttgatttacattctataattttaattttaatgatcttgtaaatcacttatgaaaataggttgaatttactttttttttttggtattagaatga

SEQ ID NO: 54484 - DNA, 2053 bp, Cannabis sativa
agcatcaatccgattggaaaacaagcttgtcagatcttcattaatactcggatttgacgaagtatacaactcttggaagtgaatgttaatgactttcgcaatgtgcttcttatccttccaaattctaccttctttgtccttgatggaccaaatgctatttcttcttctcctaatgatggttgaagcatgaagaacctagtattcttatctcccaaggaaagccaagtctcccttgatttttgcctccacatactctctaatttagaccaagaaatccttatctgggattgaattctagcctcctcttctttgaacaactccgagatgggttgattttggagccattggagtctagtttccaagtccttaatgtcaccttcactcactgtcttgtattttttcttccaagcttgaagagccactcgagccttgtgagtatttttgatgaaagaggcagtattattaccatttgaaattgaccaagccgaagccacttcctgcttgcacgattcctcccatgtccatgcctcaaagaatctaaacgggatgaagcctctagaagcaaaaagatgagtatcaaggataattggggcatgatctgaaactgagataggcaagttatgaatccctgcggagccatattctaacaaccaatcgggagaacatatggctctatcaagacgttctcggattagacctcccgagaaacggttattttgccaagtgaacttgttgccaatgaagtgaagatccacaccgcccgtttcttccaaaaaactattcaaccactttgtgtcatgagaagatactttacgtccaccagccttctcctcataattgcatatacaattcaaatctcctattagaacccacggcaattggcaattagagaattcaatctccatactcctccaaaaagcttcttttgctccaacataaggggtaccatatacagcatagaatttccaattcaattgagtatggacatcccacactgttgcttcgaaaaaaccttcatcaaagtagttcatcactaaattaatgttgttattccacatcaaacaggagcctcccgccaaacctttcgcaccactacatttgatgttgttgaaacccaatttccgagccaatacttccatagcatacttagtaacttttgtttccatcaaaaagacacaatccaccttgtgcctatagacccaagccgagatggcctggggtgtcgggtctctcgcgaggccccgacaattccaggaaaggcacttcatggggctggggggggcttgataagggccgcctcctcgcccataataaaattttgagaactttcaattggtacatcaaccaggttcagcgtgtcaataagatttctctgtgcattgttttcacaatcagcattgttattggtgtttcgattcttcttggcaattgttgcctttgaccgagatcccttcctacgccttttgtcattttttgtggatgaagaggatggtccggaacccatcttgaacgtggagtttggggctggtgagaattcggccatagggggtatctcttgagaaaaatccatagtgttttcagccgtatgttgcacatatggaattaaggtaagacttgctttcctttttcttggttgagggcattgatggattaaatctgaaacatctattgggtcatgaaaaagggtaggggtaggctcaaatttatcaataggtgcagggcccattagttcttctgctagaccaatctcatcagcatatatgggccaagggaaatgagtgggctcagggtgtttatgaggttgtctagattggcataactcaacatgggccttttccaccatctggtcataagtgggcccaatattggccataatggtggtaaggatcccattatcagctgggttaggtggaggccttgaggaaaatttatttaaaatatcaatatcagatggtgtactattattaccttgaataggtctcctaagtacactaggagaaattgatctggctctcctccccttttcgagctgtttagatctgagtgagacaaa

SEQ ID NO: 54485 - DNA, 1062 bp, Cannabis sativa
ggtatttttgtaatattttcattttgggctgtacaaatgttcattgggccggcccacagtattgttgtaatatttttccatttttagaatattcctgtttttttcccatataaataattggcagttcgaaatcactatatataaaaactttacaacaattaagctaagtttcaatgctatatacattttttttttttttttgacgtggaatgctatatacattttattttaaagattttttcaataatatacatgattagtaaactatttacagaaataggcttagacaaaaaattatctaatactaacttctctactttgaaaatcaaagaatcaggtgcactccttgcactttatttatttaaatttgtttttttttttaaactaaaacatgtgttttttttaaaaaaaatatatatatatatttatattcatttccttctcttaatagtttttgttttttttaagaaaaaaatccaattacaccgctagttatttaagctcaaaaaaaaaataccattgcaacaaactctttaattaggagtgtgcataaatcatcccatccaatgtcaaccaactgatccaattacaaccgaccgccaaacattagatatccagttgtgatcggatcagattagatagggtgtccaaaaattctatacatccaacatctaatcgaactaattagtattttcatttattttttataagtaattatcttttatattgttatatgtaaaaactatatgtagatataaaaattaacattaaaagtttactctttttttcttggattgaatgaattcaatctaatccaatacatactggacctaaaatattggatggatctgattcgatccaaaaaatactaggtctaaaatattgaataaacccaaattaaactaataaatatatatgaaattaatccaatggatagaaccgatccaatccatccaatggattagatctgatccaatatttttaggcctatccaaatccgatccgattatatattggatgttagattttaccatttgattcgattcaattaatttcagtcat

SEQ ID NO: 54486 - DNA, 771 bp, Cannabis sativa
  modified_base (280)..(282): a, c, t, g, unknown or other
agctctttcagcagtttacaacgtcttccatgtttctatgttgagaaaatacatttcaaaccctgctcatgtacttagctatgaaaatcttgagctgcaaccagacatgtcgtatgaagaaaagctagtacagatctttgacagaaaggataaagtcctccgaaataagaccatagctttggtcaaagtactatggagaaataacaaggtggaggaacccacctgggagttagaattacacatgagagcccaatatccagagttattcaagttagatttnnnggacgaaatccttttaagggggatagttgaaaagaccgcttagctttaatttgcaaattagcagataattagggtttaattatggaattatttattaattttgaattattaaattatggtggtttatttgattcagaatgcatttttatgtcacatatagaaatttcataattttgtatttttaatgcccgacaacattggaacgcagtgtttggctattagaatcacatcctagtatttttagtatagcggggcgatatagttagacattgggaatgtcgggtatagtcgggattttagaatttcttaaagtaccccttagagacctttagtggctattagtatggaagggtaaaatggtcattttgccaatctttattttgtcctttagtgagaatgaagttgtttattaaatcagattttaattgatttttaagctgaaattaattggataaaaccaatgttatttcattattttacaaaaaaaaa

SEQ ID NO: 54487 - DNA, 509 bp, Cannabis sativa
gttaaaatgaagctttcaaagatggtataaaaagcactatttttcaatcaagaaaaaaagtaaggtaagtctattgtgtgcccaccataaccactttgtttcaatttggtttgcaatttaatgtttagagatttgtgtggtgagattttctttgcttgtccttttctttttctttttatttcttttaataataataataataataatatctatgtgatgatatattgaaagggaaaagagagaaaaaaaaagttgtgtaagaataaaggcataagaacaaatgaacaaactaagattatctattggatatgtaaaatattgaataatttgaattagaaatgagagcttttatcttagttatgttacataagggcggttggcataggcagggcaaccttgagatttgttgggtcttagatagtaacaaaattattggattatttaaaaaaatactatatgattttcaaaaattattaaaagaatatatgtattttaaaatattttttttt

SEQ ID NO: 54488 - DNA, 554 bp, Cannabis sativa
  modified_base (30)..(36): a, c, t, g, unknown or other
  modified_base (431)..(434): a, c, t, g, unknown or other
cttccgatctaaaaaaaaaaaaaaaaaaannnnnnntttaaagtgtaaaaataaaaaagagattaaagttgatgtatttaataattaatggtggtgatcaaattttaaaatgagatacggatgatatactctgataatttttatattttatttttaactatttcataattttgattgtagaaaacattattgttaaaaatttctttaaaagtttttgttcaaaaaaaaagattctttacgagtttgtacatgtgagtgtatttgaattttattaattaatttgttgtttatttttagtaaaattaatatgaacacttcttgcaatattaagatatggtccgatgaatataacataaactatttttctcttttctccttaattctcttatttttaatattttattagagtataaatctacaaattgatattnnnntattattttaataaatttttcataaaaatatctaacataaactaattattttcttaaaaatacactatatacataataccaccccacgtttgacactctaaaatctttccaaaactattt

SEQ ID NO: 54489 - DNA, 1181 bp, Cannabis sativa
tttttatttatttttttcattgaaagttttgtagttcaatataaatcacattaaattttgatacttctttttttgttttcaattaatttttattgataattatatattattagccaataatcatccaacaaatcaatatataaataatcatataatacaatatgcatatattataattaattaatcataaacattatcattaattataaaaattagtagaatgttctaaattttttatatacttataataatatattttcaatcttatgaataattattatactagctaataattacataataaatcaatataaataattatatttatattaattatagaaataatatacatatatattataatttatatataaatattattaataattataaaaaattagtaaaataatgattttttgtataattattaaaataatatgattatttataaaatatataatataaaaagatgtccaagaggtcaagcaggaagttatacaggtgaacaatcgtctagttgccatggagaaggttcaacaagagatgtccaagcaactgtctaccttgatcaagctttgcgggacataagtttttttctttctttttcactttttgttggacatattttcatcactctttgtctttggcccttagacaaacaaaaagggggagtaatagtttgttttaatttcttgttttctcaactctggactctttttccagggagatctagttgagattgatacttgtgtttaactttggattaaaagttagctttttatttcagttttatgttgtgtttctcagggggaattttgtttggtatggctaactttgttttgcaggtactattctgttaaaaaatattttaattatctgaagtgtcaaagagagagattgtaaagtctttttttttggcaatttagatgccaaaatattttttatttatggtacgattttttgacttttataaaactgatttcctcaccttatttaaatatttttattgatcttttctgttataagaaatattttatattcagctgtattttttcttgtttggaaaattcttgtaagagaagaaattctcttatggaaagttttctttttatggaaactttgagtattcttatcatccttaatgagttcgattgtgtcttgataagatcagatcaaacaca

SEQ ID NO: 54490 - DNA, 4209 bp, Cannabis sativa
tccaaaaaaattggacaatggtctgacgaggatgcatgaagattaaataatttggcagtcaagaaattattaagccaagaaagagaagccaattctctatcaagccttacctcggtccaattagatgtaccccttcctctctcccacgtgtaagggtggccatgaagctccatgtcaacaagattgcactccgaaagaacttgacaaaatccctggatcagtctctcggggtaaggtcgacccacatttttgtcactatgactagtgacattgttgagatccccaataaacacaaacgaccaacgagcatttgcagattgttgacgaataagaccctaagtgttctctctttgacttctatttgcttcaccataaacgccaataagcctccaagtaggcatatttggaatatgagtgagaatattgatatgtttgtcagaaaatcaataatccccccctcttccttatatttccataacatggaaagtccaccactatgcccacgggcctccaccacaaataagccttcatagcccaaagatattcggaccctttcaagaatagctttgccacacaatgtttcacaaagaaaaacaaatttaggcttcttttggacaacaatatccttaaggaactgtatggcccgagggttcccaagcccccggcagttccaactcaaggtactcatgactcttggcgagcttggaaacccagacccgccccaaacaagttttttgttacaccttcttctccatttgcaaaaataccatttaaattctggcccaaagcacctggcccaacagaacccaacctcttcctctttgattcaaaaacaaccaactcattatcaaccacaacttgcgtgtcaccccctatatcattggtcatattaatatcaatgttatcaccattattttccacatattcagcaccaaatttatgcacgattatagggtcatcaatcccaagatcttctcctctcccccaattctcaccattactgcccgaccgatgcaccttgacatcctccattgtaatgccgactgctccaccaccattcctcctggctgccgacgattgctcctccccgtatttctccttgcgtcccgatcgtagccactgcgatcgaatcagtttattctgacgttgggtcgtggctctcatgaagactccgtacggcttgacgatcgactcctccgatgtctcgaacaatcttggacaaagcttatcggcatggccgatcaatccgcatatgaaacaaaatgtaggggcatgctcatatttaaagttaacccaaaaccaatctgaaatattcaatcgacgaatcttcattcggcgcttcaatggttgatcaagactaatcgtaacacggactttaaaatattccctccacaccggaaaaattattctatcggactccacgaactttccgatataaccgcctattctctgtatcgtcttttctgttcgaaatccatgttgaagatcgtggatttgaacccaaagatcaagtcggttgagggtgatggttctcagattatcgccaaccttgagtctttcgaaaattaattgctttctttcaaacgtccatggactccctccaatgactcttttaatatccagttcatgatagaattgaaacaaaaatctattttgctccaactccttcacatatagacccttaactggtttccaaaggaaagccatcatgtgttgcatggcttgtacatcaatgaccctaacattcaagaaccggccaacaagacaccaacgcacatcatactcttcctcttcttcctctacgtctaaagacagtccaccaaattcttcaacatcaagcgtaacctcctcgtcaatctcccctggaggataacttgaacttgcagaagccatatcaaaatcagaacatagaaaaaactgaacactaattacaaagaaatctcaataaatcaatgaccaaaagacaaaactcatactgtgtcaaaggacagtactccactagctaatgctaaatgttcatggttagaggaaatacctcctcctaggattttttgttaattttcgttatggatagaaaaacaattacttaacatcaagaaaatgttcccatatatcataaaataaagataaaacaaaaattagttacgtattgtgtttattttatttttttgaacaaggtacagattgtattattaatttaggatcaaatatatatttatttgcttacaaaaattatatattttatatcattatatgttaagatttttagtaagttatttggccgttttatgtaatgtgacatagggtcttcgttcagcacgtaatttctattcaggctgatcgacacatttgaatcagaaaacgagttgagattattataaaatgtgtatatgtatgtgtatgtatattatatgcatgatgtataatgtgatttatatactaccaacactaatacagttgcagtacggagtgcattggtacattatatgatgttaaggtgtatcacacagcgttacaaacactaatatgggatgagtacgaagtgcatgtggtacaacactcagttgtactcaaggtgcgattagccctaccaacactagtacgggacgagtacttagtgcatgtggtatagagatcgtgcttctattaagaacgttcttgatcatctgttaagccttgtaaataggtgtgggggcctagatgcaagtcggtaatatgttttatgtttttcttactgaatttgtcgactcacatatatgtttacatgtgtaggtaaaggaaagatcaaggttgagaaatagtgagtctagagcttgaagatgattgcacatatcaagatggttagacctggagtattcaatttcaggacgatttgggcctttattttgtagtcacaaaatgacacttttgtaaaatgtattttgaatgatgttataaacttttaagataggatctcgacttctatatatagttatgtatttataaaagtttaaatttgacacgattttcaagaaaccatttggttagtaaaggtgtctacattaattaaaaaatcactgtagcaggcctaaacaagtagggctagacaccaccacccctaatcagtcgttcgggattgtcgttggtcggtaatttggggtattagttagtcatcggtgatggtgtcggtcggctggttgggatatagagatctcgtcggtgacggcgtcagtcattggggtttttgggtactacggtcccgttgatcgtggttggaggttgtcgggaatgtggatcaaatttttgagagatctctcaaaaatatagggatctaagcgagagagggagaatcggagggagaagttttggggtctcgtcggtcgggttcaagacttgccaccggtcaatggttgaggttggggtcttgtcgccgaaggggtgctggagttggagttttattgccaaaactgtatttgggtgttgggttaggttgtttcgtgtatgttcactttagggaaaaggaaaagaagaaaaattaaaagaatagaaaaaaaaaatataataaatatatttatttatttatttttaaattatttttataatatttaaataattaatattgtgtagactacttaaattttaccacatgtatattgacacttgagcagtccatcttagcacttaagagatcatttcggatggaaaagtaaataacaaaacacatgtgagtttggagagttttactatcaaaaaattaatttgtaagattaagtgtcacaaatagtataattcagatagtattgcatcaatatcctttttttatgatatatatttataatatttaaaaaaaaaacataatgaacattttcttaagtaaaaaaactttaaccctatctaccccttttgagacgattgtgaactcagaagaagagttacttatattaagaaataagagctacaaacgaaaaagaaacaaataaagaaattgttatgaaaaacaccaacacaaataattaatcacaacatacaacatgcaacagaacaaaagaaaacaagttactattttagtggaatgacaattctattttaaaataataattttttatcaattttttttgttttctatattttattcatattcttatggggtaagttgaaaaataccacttttattaagcagttaatcacatttacctctaattttatatttaattgaaacatacctctttt

SEQ ID NO: 54491 - DNA, 1321 bp, Cannabis sativa
  modified_base (862)..(867): a, c, t, g, unknown or other
gaaagatgttatttcatattggttcagtcatgtataattaaatgatacactaaacctttactgcatgtctatccacatatgtgatctgaacgatcaaaatcacacacactagagtatactgaatagtaaaccgtacttgataattttataataaagattcattactttaatacactaccaacttattttattcatattatataatcttaattctgttttacgaccttacaagaatataccatctacatatgaataagaaattttcagatatttatcaattatatttttataattaatgtattcatttatcttataattacattttatatattttataatatattatttattaaatacttatttttaagacataactcccaacaaaatctccatgtaatcactaagattatggttgctctttaatttagttattgaagtttttcaggaaaaaaaaaacttaaaatgcaagaaaataattctagaatacttagtaatactaccaatctgaaatgaaaggatccaaaattaaatagttacaaaacaattaaaacataaatttagaactaaaaggaaaaatgtgtttggattttaggatatctttttataaataagggaaatttgcggtaaaagtcctcataaagttgagtttgatccagataagtctccaacctctaaaaatagcggtaataatcctcaaggtcatgttttttatttgtccgttcgtcctaattttaactgagtcgtttacttttttaaaattgtcacgtgtcgaaatattattaatccaaattattattttaatttaagaaaataaaaataaataaataaatttaaaaataatttctttttttctttttctttnnnnnnttttttttcctttttctttcttttcttcatcatcttcttcgtcttcttcttcttctcatgccagaaacctaccaccaacccccaaccccaaaccagcaccaccaccaccaagccccttcgaccaccgtccacggtctcattcgacccagagcccttcttcttcatcaccttcttcgtctttttcttcttcttcttcacacgaaatcccacccaccatcactgccatgcacatctaaaagagagaaaaggagaaagacagacaggcaagggctcgagggtggaaggtcgagtttgggtttcaacttttttgggttcatttcgagcttggaggaccgataatggccagtgtcgagcttgggcatggctgttcgacgaaaagagagaaagacaagagagatagagagagatggagggtgagctcgattttctgggttcatttagatgatgaatgaat

SEQ ID NO: 54492 - DNA, 1476 bp, Cannabis sativa
  modified_base (264)..(264): a, c, t, g, unknown or other
  modified_base (665)..(665): a, c, t, g, unknown or other
tttctggaatggttaaaactattccttagataaataaaatctatatctagtagtcaacagacttcctttagaattagccatttagaaaaaatacttcagcatcttactaaagtaagttacttatgctagagtaagtaaattaccaggtataccacaagcaataagtttagataatcacaaacctatgatactaggatcaggatgttttgttaaatccattgaatagacttattatcgacatttcccttcttgtccttgtaatanaaaacttttggttactccatatgattagttttaactatagttctcttggctttacttcttaattccttattatgactatctatttcttatttaaactagcaatggattttaatcacaagtgtcttccaggtcataatagactgagtttcttaaaaccctcccactacgacgaggtaacgtgattttctgtttaggaacattaatgatattatcttcattggttgtatcaagacaacagagaaagtgggaccattttatatagaataagatgataaaacactttgaaaacaaaacaactgctctacttttcttttagatttagtcatattattagaaaagtagtatttgttgaaacaaagactttcttatctgaatgaccatgggatggtccacccctaatnactttagaatagctatcaaacatgtaaatatcttagttaacagttctagcttttcttaagttcatgatcaagacatccttgagtttagtaatggtgtacattaagtacataaccattccatcattctgaagtttccctatcactaaggtatttccctagaaggacttatgcagctgctagtaactaatcatagacctttcattttttttatcattatgcaatccaaatttctagggaggtatgtttggatacaatttgaagtttaacttaatgatctttgaactgcctaacctaatatttcttcacccatatcagttcgcaagatctttagccacttaccttaatggttttcaccattgcttgaaattcatgaaatttctcaaacatttctaatttctttgcataaggtaaatatctagagtgatcatttaagaatttaatgataactcatatcaccccctgaatgtacatctatatgttcaaatatagatgatcctacttccaagtggatattggcatattttctctttatagagactgatcttgtaaaaatcacaatgaacaagatacaaatgccatagatatatattatgtcactgtgttcttctgatgactttggtctagttacaataaagagttcttagaatagtccaagtgaattctagtcacaaaatacaaaattcataatccatacattaacacacagttcagatccattgttaaaaacttgatattaacaactggtgaaagttatactgtattgtctaatgtattctggaaactgaaatttaaaatttctatttggaatcta

SEQ ID NO: 54493 - DNA, 1235 bp, Cannabis sativa
aaatagaagatactttcatttattgttaattgagttttgagatgaatctcggaatatggtatcaaaatctaaattaaattaaaagtgattaaaataaagtaaaataataaaagaagaatatttatttgtcggaatgaatcttatggtaataaaattatattcgatttagaaaattattcatttatcgtaataaattattatatggtatcagaatcttgtttgatttagaaaataataaaaatataatgtttaacgtcaaaatttagatccatttacaaaaacatagattattcttattactcaattaattttgagtaagtttaatgatttgatttatgaaagttaaaaaataacaatttatttttgttttaaatgaaataactgagttttattccgtactaaattaaatagaacacttcagataatatatatttacacttattttttttttcttttttttgttaatattaatttatttctcttttttgatatcataaatatcacataacgtaaaattcaatattcattatctcgttaaatttaatttatccaactctaattaataaaagtaacaaaataagtcatataacatttttgttcaaatgaggtggtgaaacactcctctcttgagaaacttaaccttgatataaatcttgaaaaattcttaagttaaataatttatattatgtttataataattaaattggtgttaagtattattttttaaattattattcactcattgccaacaattagggattcaatattcaaactatttgaatacatattgtgtttaagaaaaattaaaaatatttaaatagggttggtgttgcaaaatctaagaataaatctattacaatattggaataataatttgattaaaaaaataaagagattagataagggcattttagacattacaaaccgtacaaaagaaaaaaaagcattttattagagaaatcaccaaggggtataatggtaatttcaaattccaactcaattttcaacgaagagcgcctcgattgaagtgacatcccagtcaaactttggaaaattattattattatttatttaatttgtttattatataatttaattttaatttatttaataaaataaaaagtatgttcccaagtgtggtcaaagagacctctcgagataggtctttgactcccatttatttatctttataagtttggacatagcaaaatctaattgtctatttattaaaaaaa

SEQ ID NO: 54494 - DNA, 565 bp, Cannabis sativa
catgtgttcagcggtcgtggcaaggggttatctaggtagggtgatttgggtgcatacttctaagctggattgtgctgatactttatgtagagaagcggcgacttgctatcttgctctagatgtcgcgaagcataatggagttaagtttattattgtcgagagtgagtcaagggtagtgatcaatgctctcaatagagaggttacccgttgggagattgagaattacgtctctttttgtcttagatcctctccttattttgttagttgtatttttaagaatattagtagaaactataattttgttgtccatcatgtggctcagtgggcgtttacccaccaaagattcggttgtattccgatttcctctatcctggaacacctattttgtaatgaccgtgaggtctaaatgcgtttgattttaatataagtacgtttttcttcaaaaaaaaaatgacatagatgtatttttagtattttttaattgatgtttattattggaatgaaaaataatgtcagaatgtcatgtcatattatagaattctttacatcttttctttcttatttt

SEQ ID NO: 54495 - DNA, 647 bp, Cannabis sativa
cttgcaagaatgttagaaatctcttattagataattgttttgaagatgaggagtcatcaatacaagatcttatctctagtttttctcttctcgaacatatgagtttgagcttcctcagttctgataggattcagtttttgataaattattactatggatcagactcagactcaaaagaatttgatcagtttagttcaaagcatcttaaaattttgaatcaacacttgaaaagtctcaatgttaggcagtatgatgatgatcattacaatcgaatcagttccagaattaacatcttttcgttatgatggtgaaatccattttagcttatcactagagtcatccaatttgttgaatggaacatttcatgtatacaagcaccgtagtattgacagtgacacaagttttaccaatatgatgaaatttctatcgaatttaaattgctcgtggaacgttgtaagcctatgtgttcacaaagcaaaggtatctgtttctttggccttattttaagttaattccattagtctctacatattgtatattaattagttcatatgtttattatgtttgtatgaaggctctcatctttttcggaaaagttgaagaacatatgttgttctcccttaattaattggaagcatctcaaacta

SEQ ID NO: 54496 - DNA, 1013 bp, Cannabis sativa
gaaaaaatttccgtgtgacagtatttttgtaaaagttaacccaaatttaagtatttttgtaagttttagtatcatcctaatttccaaccacccactcaccactagaccaaatttagtgacttttattttctaattttttttgtcaggtttattttcttaattttctttttttttttttgaaatttattttcttaattttcatttctacataaatgccaaaaaaatattcttaataatgtttcaatatcaaaaacaccatgtaaagttattgtgaaaattagaaaattttcatcacagactccaatacagtgcaaaaaatgtgaggtataccgttctataatggtattataataattgagtcaaatttattacaaagtataacatatgttaaatttggcattttttagttaatatattctaaaatttggataataaaaaaatgttatattttgtatattcaaatttatcacataatttacatcattcattgtattgcagtgatggtcttccaaataatatattttaaaaataagagatagttgcaaactacaaatgaaaggtaaattagaggctgctgtcagcatgttgaacataaaatgttaggtatgatgagtttaagtaaatgataaaatgaactagataggatcccaaaaaagaaaaaaagaagaggaaactattttagccaaataatcccctaaattaagataattgcatatgagtgatattacaattacactttatataattatagttaagaagcgatgttatggtacagctttaacttatttaggaaagtaaattgaaataatttatttaaaataaatagataagtgtgtaataaaatatttaaaatttatttttaatattgaattttattgtttttttagaatttataaatggtcataaataattatacaaggtatacaattataaaataaaaactaataaattaaaaattttcctttgtaccaaaacctggtgtattatagcttacccaatcttagccatgtgca

SEQ ID NO: 54497 - DNA, 888 bp, Cannabis sativa
gctattcctacaaagaaccggttgcactttttgcatgataaaacctgcaacatttgtgaagctgatgaggaaaatgcttttcatttgtttagaagttgtagtttttcaaaaggcatctggtttggaggaagattctccttcagaatagatgacatcccaggagacaatctcattagtatgttggaaggtataattgaattggtgacaggtgtggaaaggaagcaattgattaactacattgggtgcatgttctctgagatctggtttcaaaggaatgccttctgcattcggaatgcagagatcaatctttcctatgcagtggctagaattgaaaagagttatgcagaactccagaatttggtcacatcaaagaaggggggactctctgaagcatgatgcacatacattattcaagagccagagggatatcatggatcactaaacaggcagaggtgcaatgttattttttcagatgcttcatggttcaagggagatgcaggtattgcagctgtaagtgttgagatttccactgggtgctggcatgttaagactcaaaagatcaggacagattcggtgttagaagctgaactgaaagcgatccttcttgctctgtcaagggcaattgagctagggtggcaagaagttcatatcctctcagattcaaagatagttgttcaagctttatcaccattgttggcaagaggtgttccagattggagggtggctgatgtctattataatatagttaatttatctaacaagttccttagctgtcgttttttctttataaaccgtaattttaatgtttgcgcgaatggtgtagccaaaaccgctagagtttctagcgagttggcagttttgtatcaaggggagggtaatccccctgtg

SEQ ID NO: 54498 - DNA, 1456 bp, Cannabis sativa
ttatctactttggtctattaagtgctaaagtggattgtcacggtgaaccaataaaaattcgctacacataacttttgtacactgtagcaatttactttagagcttaaccgattaaagtgaataaaaggactcctaaccaatacgattgtgaatattaagaattttaactataatttttttaacatgaaaattaaatcgtaccaaatataaaagtatagtgagtttagcttttttgaaaacatcaattttaaaaaattaaattaaaaagaaaacgtcaatttaaggcaagagaaaacgtcgattttagttataaaaaaataataataagataaaacgtcaagtttaatttattttttgaaagagaaaaaaaagaaaacgttcattttttcacgtagttagtggccgcgtgacttacacgctcccgccgtccaattttgttaaagtataatttccaatccaaaattaaaagcaaaaacttctttctaattttcatttttttttttctgaatatttttattagttaattggacggagaggacacatgggttgagattttgagattatttaaaacatgtaaaatatttgagaaatcttaaagaaatttaatatgggacgttttaaatgtaatttttaatagagaaatttgaatttatatgcatgcattaagggataattttttccctaaattaatacttttcaatattgaaaatatatgaccactttttcaaaattccaaaaatacccctctcaaaatttcaaaccctttctctctccttccctcagactctctttgcctcttccccttcgcctgaacccacatcgcacaacccactccaactgaccactccgaatgagacctacacccactattctgaccctcatcatcgcccttcgcccgaacccacatcgcacaacccactctgactgaccaccccgaccgagacccacacccaccattccgaccctcatcaccgtgtcacggtggagacccacttcggcacggaggagacccaaacggtgcccaacaatgtccaaggtttagattgcgatttgggtaaatcgcagtttggggaagacaatggcccgatggggtccgatgtatgagcgaaaaaatatagtttttgggtccgacgggtccgatgcatgtgctgtaaatgggagtctgacgggtccgatgggaccccgattgggtctgactggtccgatgagtatgaagaaagagagaagaagagaggggacgggtccgatgcatgtgctgtaaatgggagtccgacggggaccccaattgggtccgatgggggtccgatatgggtatgaagaaagagagaagaagagaggggataggggataatgtaaatgggcgtattttaaggatattgtataatgtgtcacatcccacaaatattacatgttatgtgtttaggagaaaaatattaggtatttgtaagcataaaaa

SEQ ID NO: 54499 - DNA, 1186 bp, Cannabis sativa
aactttttaaaaaataaaatatacataaaaaatgtcaactattatattctcatgtgacataacctattttaagatgaaactacaactccttgattaaaactcaatggcttaaaaaacactttatatgaaagtaaaggtgatgctctcacctgaggaataccttatatatatgagatgtataacatatatagatatgatatatattaacatttagtgtgtcttatatgtgaaatgtgtaataaattaggaagaacaattttagacttaaataaagcttgagaaactgtaaagaaaataaagtttatttttactttatttagtgaattatttgagtatgagaattttgtgtaaagtatacttcattggaccacatctaatggatttggaccaaactgatccaatctaattatttataggatattgaattttatcatccgatccaatctaatcgaattgattcatccaatccgacccgaaccaatagatgtattggattggatcggttccaaccattggatgcattgaatagttttctatttgatttgattggatccatccaatctattttgtctaccatttaagatgatttcattaaatagaaaaatatatatatataaaaaatataatttaaaatttaataatctaacatacataataaatattattttagtccaacttaattctcatgatctcataataaaaaaattaaaaaataaaatttattcaatacgcattgataattttataggcgtttaagaagataagaattaatattttggatctaaagtttttgttctttaatctcttgtgctaattgtatattaaattaattaatatatatttttaactaaaatatattaaatataattggatgaccattgaatgataatttaatcagtttggtcggttatccattggaaaggatgttccatccaacaaccgatccgatccgattggattttaaaaatttacatctaatccgatccaattatgattggatatctgattctattggatcgtttagaattggatcagtcggtagtaattgaattgaataactttctgcatactcctatttgaaatcctcatcaaagaaaattccctctaattgaagaactccctacataaaaaaaaaaagctccaaaaataactcattacatagatatatagtttattaaccgccaac

SEQ ID NO: 54500 - DNA, 4272 bp, Cannabis sativa
ccaccgagccagttaaatcctatcaccagcccctggacatttgcggtatgggggatagattataattagcgagttaccaaaaggaaaaggaggactaaagtatgtagtagtcgtaatagactactttaccaagtcggctgaagttgaagctctaacgataataactgttgcgaagttatgcagcttgtctatcgagctattatttgtaggttcggcattccttacaaattaatctctgataatggaaagcaattcgattgtaaggaaatgcaaaaactttccggtgatctggggattcaaaaagctttctcatcggttgcatatccctagagtaatggacagacagaagcaatcaacaaaatcatcacgcataccataaaagctaagctcgaagagaaaaaaggcgtgtgaccagaagagcttccgcaagttctgtggtcatacaacacaactcctcgctcaacaactggtgaaatccccttctcactatcttatggatgtgaagccatggtatcagtcgaagtcagagctggatcgttacgaagagatgttttcaacgtcgagactgatacagaaaattagttgatccaacttgattttctataagaaaaacacgatcaggccaaattaaaaacatggcctatcaacagcgcacaactcgctatttcaactcgaaagttaaagaaaggaatctgcgagtgggagatccggtataacaaagagtcatgcccaacacacgcaactctgcgcatggcatattcagcgacaattgggaaggtccttacctcatcgctgaaaaaattagtaacgccacttaccaattgtctgacctcaacgactcaatttttgatagagcttggaatggagaatatttaaaatattattatcaatagtactcgcatgtatatacttagttaatttatttcataaatatcctaagtataaggggtataaccgtatattgtactatcgattatctaatgaattctcaatttttgaaatttttgaagtatctatattctctcatgtttatacttaagaaaattttcatcacaccaagctgtgaaaaataatcgcatgggcaaaagacgcacatcaaatttaacgataaaagtactaggcgttaccaaataaaatgtgtatccttgaagggatacaatgttcataaacaaaattgttgtcttaaaatattgtcaagtacaaaacgtgagtacctatatactgcttaaaaaataaaactttgataaaattagacggtaggggcattgggatcatctgcgaccttgcttgtaccatctacgactttagcagcggtcgcatcttcagcatcatcgggaaaaaaatttccacctaacccttgagtctcggtaggtgacatggtacggaaagcattggtcatctcaaccgcctctagtccaaagatcgcaaagtcaaagtctggcagcttggtcagtgtagtgtaaatgtagtcagagacagcctggtcgtaagccttcttcgcgttctctttctcatattcaagattacgggtaagaccagtattgtcctcctccagcttattgactctctcactcagagtcttaacttgctcttccgcctgacgtttggccttgccgagatctttgacttccttgtctttggtagccgcgtccaactttggctttttaaggctctcttgaagagctgagttctatttcttcagaagattatgatctttgaaaccaaccacataggcccgcgaataaacactcatgagctgggagatgagatcagctgatcgagataaaaggccctcgacaagagttccctcaactttagtgacgaactcatcgttcacgaacttgtcctgtaagaccatgaagttgtgagccttgacagcaggatcgatcacaaccttcttccacttgtcttgaacaaccttctgctgcttcttcggcaagttagccactggggtaggaacgacatcgcttttcctcttctgaggcatcacggttgatggtgtcgtaataccaaccttagacttgcgattgaagactggagcctatttcaggaaagtcatatatgcgagggggaagacagaaagtaagaatttgaaaaattaaggcgattttgccagtggtatactaaattatattacctgatgttggcctcaaagtttacttggatagactcttatctattctttcattctacttctcagaaggctctttgtacattggttctcgctgaagtttagcgtcctctaggattagcttgtgctcttgcaattttgtagtagtacacaacaagcgtcagtcgcgatcttccacagggaggccgcttaggacttttgcaatttctaaacagttttggtctagtacagattaagctggtctatctgcgaataaggaaaataagcttagtgtctataaggtgatcaaaataaatactaagtgtaaaaatacgcgacatacgaggatggcgattgaagtcaatcttgactcctggcatcttaaatgcgtagaaccattttgatttctaatcccccacattagaaactgtgccttctaccccgtttatttcagagttggcccatttactaaagcaatagaagccattatcatgaccaacacttttgatgtcataaaagaagctaaaatctttaactgttggttctcctcgcgtatactccatatacatcgcataaaacttgaggattatgcggtagctatttggggtaagttggaaaagaaaaatatcataacgagaaagaatgtccttcacagaaggacgaaaaggaacgtcaccccgcatcgaagaatgagaattgaaaccaccacattttgtgctgggatgatcgcatgtaaaagggaggtgaggtcgttgtgttggcaaaggcttggaggtagccgtgtgaatcagattcagctttgcaaatgttgacaaatcaaatttcttgactcgcgagactagatcctcgtaggacaaaggcttgtttaattgggcattgtcgactgaatctgtctcgcttccttcaccttccgcctcgtcctccatctctcgatttggtaatttgaagtcctcacccatttcctcgacttctgtatctagggcaagtcataaatgaacaagatagccttgggttgacatcatagactcgttgtcgcgcacttctaaggtcactggttccgctaattcctaaacgatcctgtctatctcattcgtagacaacgagcccttgcgagctatggctacaggggcctcaccctcagacatcgaggttgggatgaagctatcgctcctttttgattcatttgcgaaggctccctctctagagtcgtacatctggctatctgacaggtcactcatttgaaagatagaagatcttttcagtgtggtacgagtgcaattttaacaagttaagtaccctcacccacgttataaacatcaaagcaaaaagttcatagaactggtcgtgtatctctataaatggcttggtgtttctcagtgtcctaagggtcatgttgctacatgaacaataagtcacagagaaacacccaccatttcaagaatctagtcggttccaacaatgattaagttcgagaaaatgaaaactaaccacatacctcaagaaatggttgggcgtgtcacagtatcccaaggggcatgcgacagttgcatgaacattaagttaatgtgacacccccaccatttcaagaactcagatagttttcatagtaaaaatatgtataacctaaagctaaaaaaggcgtaagagttaaaactatataaaacatggccataaaggttacctatagcttagataaagcttttctaagcatgcgagtatttgaggtgtttttccaggaactagcgagtattcaagatgtttatcttaaaactcgcaaatattcgaggtgttcttcttgaactcgcgaatattcaacttttaggcacttattttccaaaagaaaaccacatttttcctgaactacagaatctaggatctatcattccatatatttcctactcctaaaaacaaaaatgcatccaaatactcaaataagagacaacgatgataggaaaagtaaattactaacctcaaaatgctaatttccctgtgtaatcttgcaaatgatggaatctcaggaagcaactttcgtaggaagaaatttgaaaggatgcaaaaggatttttggaagatttgaattcctaaggaagagaggaaaatgatgaaatgggagggaaatgaatgggaaccatttcgtatcaagaggtttaaatactagtatc

SEQ ID NO: 54501 - DNA, 856 bp, Cannabis sativa
atttatttatgtataatttaaaatcattatacaaactctatctttttttctccattcttatttttctagtctattatgagtactaaattgttataagaatttttttttttgtttatgatctctaatttaagttattttgataatttttgtgtgtgttatgatttctgatttgagctattttgatcaattttggcatatttaattggtatgattttgtaaaaagttattatataatattaattttcttttattctataataacttagtgaatgttgatattgagtcatgtataacataatttgaaatattgagttatgttataattgtttcctttactaataataatttgtatttttttaggagtcacgttgaataacgagtttgcaattgataacaaaaatatatctcgagaacaagaagtatcaatttttatgtgattgtttagattatgctgaaatattattggcactttgtgggactttttctgttatgaacttgggaaaattttttgatttatttctatatttttctagattttttttttttttacagggttaatagaagtgagtgttttttttaaggatagaagtgaatggttagatatacaattttgaaaaaaaattatagtgtgacatatataatttttgtatataagtataatttctgtatataagtgaattacactaccatatatgatattatcaattgatatagagtattatattaattgttgtgttaaatgaaattagtttcagtagcttttcaaaaatttacaagaaaataaaatattttaataatttattatataatttatgaatataatatattgtgatatacttgaatttatgtttttttt

SEQ ID NO: 54502 - DNA, 818 bp, Cannabis sativa
ggaacgggactagaaacgtaaccagaacttgtacttagacctagaaccgtaaccggacttaaatctagacccagaactgtaaccagaccaggtgccagactccaaccaagacctagacccgaatcgggacccaaacctagatcccaactcattcctatactcagtgtcgaacctagacccaaactcagacccaaacatggaaccagactcgggacacaaaattgggcacgggacctagaaccacaccccagtctcagtcccgaacccaaactcggacttgggacacaggacctgaaccaaaactagaccgggacaggtaaccaggacaagatcagggactcaaaccaggacctgaacccgaacccagaccaggacccaaacgcggaccctgacccagacccaggagacagaactggaacctgaacaagaactgcaaaaccacgacccttgaacaagactaggaccgtgacctggacccggacccaaacctagagacaaactcggacctacccccaaacccaaagcgacaccaaaacttgagcccaaacacgatcgtgtacccagactaggagcgagagccggacctggatctagacctagacctgggacctgatccaagacccagactctgacctagatagggattcggatacgaacctagactcgaacccagacttagacccaggtcgggatcgaaactcaggacctagatccatactgagacgctgaccctgacccagacctggacctgcacctaagaccaaaactcggacctggacccaaaccaagacctagacctagacccagactcggaccta

SEQ ID NO: 54503 - DNA, 1725 bp, Cannabis sativa
gtaaaataatttccaacaaaaccaccataaagtagttttctttttttaaataaaccaaaaaggaaataaaaaataataccaccaatatatttaattagccaagaagttacccctttttaattaaaaaagattttcaaataaaaagtgaaacaaaaagattttttttatttattcttttcgaaaaaatgcaataaagaaaccacaaaaatagggtccacaaaaccctacatgatcagcccaagacactttacctttttttcttctcttttttcttttaaattaaagacaagataaaaatggcaacaagaataactaaattatgacaaatatcaaacataccatgattagttgacaaaaataaagactcgatgaccaagaatattttagaacaaataaataaaatgccaatttttaccaaatgcttcaattaattctgcccactttaaaaaccatgattttttttttttatttcaaaataaaagagaatgacaaagtccaaaaaataaatacatataatcaatgtgcattatcctgaaaaagacataagacaagccaaatgaaaatagatgttagtgtatgataaacacttgtgatttttgaaaaatagaaagaatttttgagagaaacaagcacagttcaatcataaacacatattcttttaagagaatcaatcaacatgtaagagtctgacacttatatttttcttaaataaactttgtaatatttttcttgcaaagtttcaagcatatgtgtgtgatagtgtattcaagggaacattgcccattttacaagaaggtcttttctaaatgtaaagattgtaacccatgaagacgctgtcacactacaccagtggtagcccttttttatggtatcatattcttttcataactgcgaattacgaagtatcaacttactcaaaagatcactttcacacactgatgcaagtagctctattcttacataggagtttgaaataatgctacacaaaggatgctcaaacattaaccataatcacaaaaaatacaagtccaattatctttcaaaacacaaaatacaattttgaaaacgattgccaaatttcttaaattagagataaacacacttgatcaggcaacaaaaagaaacttttgatgattaaagagaacaagctcccaaatatttttggaggaaatcaaagcgaatcaaatcaagagccttagtgaaaatgtcagtaatttgtttatgtgtttcaatatattccaggacaagagctttattttcaactaattctcttttgaaatgatgacgaatatcaatatatttagttcatgaatgttgcacaaggttttttgaaatattgattgcactagtattgtcacaaaagatagttaaagtgtcaagatcaaactcataatctatcattatttgtttcatccataaaagttgagcacaacaacttccaacagcaatgtattcgaccttagcagtagaaagagagattgaattttgttttttgctgtgccatgaaactaaattgttcccaagtagaaacaacctccacttgtgctttttctgtcatcactattacctgcccaattagtatcactaaaacacacaagattagtattagtttcctttgaataccaaagacataatcaacagtcccatgaacataacatatgattcttttgacaattgttacatgagagtccataaaatttccttggtacctggcacacacaccaa

SEQ ID NO: 54504 - DNA, 3431 bp, Cannabis sativa
ttgaactctctcctttttatggtcacaaaattttctactatagaatccaacttcatgcatgtacattttagcttttattacagtcaaatatagaacaatcatcaaattaggttttatctcctatgttattttactccaaagtttgtcataatcaagtttgacttgtattgttttgtcccaatgaaaaagtttccaatagtaaacaatacatttgtatatcttaaaatattatctttcatattggcagagtggtcaagtattttaagggctttgtgtaaagatttaaaaaatttggcctttttgaaaaaaaaaattgtgtatattaaaattacaattccattactcgttttttttcttcttttaagattcgttcttaaactttcagtttcacttataattttttatttatgtatgtgtaatagaaagaagaaaaaattgggccttaaaaaaataagagttttgtacaatagctcaaactgtctaatactttagcatgatgagttattggttagtataatatataataggaatatttacggtaaaatccccctaaacatttataattattacacatatgactctaataaaaaaatagcagcaaaagtactttatcgtacaatttttttacagtcgtactcttttttagctattaagtattagctcagaaacacttgataacatattattggatcatgtattaaataagctaaagagtatttcaccacgtatttctgagttaacacttaacgattttaattgacacttaacaatcaaaaaatggtttgactgtaatagaatcgaaatacttttgccgttattttttttattaagattatatgtataataattataaatattaagataattttgccgtaaatattcctatataatatagctcggtggtacatagcactttttttcttgcaaagaaaaagttatgtgagttcaactctttccttaaaaaaatagtctaacttagtcgaagtgtaaagagattattttaaaaatactcaaaaattacaaaaagtttacgtttttacaaaatatttttttatgtatatacaaacttcttttcttcttacaagatcattatttttaagttattctaaaaaaactgttattttcacgttgcaaaaatatattataatattactacaacattaaaataatattattttctctttaaaaatcacaaatctgtaaaaaaaaaaatccataaaaacattaaaaaaaaaaaacaagtgcaattttataaattttgattaaatttcctattattttccaaagaaaaagttccgagatcatttgtatgttataatcattttttaaatatgttaggaacggttcctaagtagtgttcagcgaaaattgtgggatagtattgtacaagtataacattttgataggaagaacaaatttggtatcatatttgtaaccactttattacataatcatgaattttgaaattaaagctatgatgtttgagtttgaattttaaagtgtagtcttcaaaatactttaagttcacttgtggagcacacttttctatcaagaaattacattattaaaatataaaaaagacttaataattctcaaatttatttccataaaagttcttttaataattagagataggagaacaaacttttgaacaaaaatataaaatattattcacgttcggtgatccttacttttctacactcaaaatttatgagcgtgagatttttcttctcttttgttgatctttattatttgtatttttacttgttttgttcccttgtgttgtaacatatattcttcctcttctccatttctccaagttatgaacaacttttgcaataatgttatgacattggtttataattattttcttagtccttgcaatcttctcacaatagagctgtattgattcttgatattttttttcattgatatatatatatatatatttatatataaaagataataatcaatagcttattctctttgtttcaatggataaagagatatcaagatcatgagtgtacaagaagcaagagtttcatgccattcattattggaggttttttcattacactttgagagaataggaggtataaccaaaatacttaaaatacaaataaaaatattacattaagattatatgaaaagaagaagaatattacaactctaaaataatgtaagatacaaaaagagagagagaagaacacaataaacttaaacaatgtctaaaatctttatcctaaaagttatttcctctctcacatagatatataaaaaaattctaaaaatatttctaaggattttttaagcttcatatgctcagcctagtgtctaaggatgaacatattcttataagattataaccacaacaaatgatttcaagtactagttgtttcaataattgtctcacaagtgaacaaatgatcaatatttatagagttttcactctcatttgaatatgaatgagtaatgaccaccataaagtacttaactatttaccaattataaagtgtgccctcataaaattaattgggtgatttgaaggttttttgagctgttaaaaacatctcatacgttaaaaaatgcacaattaaacatgctgaaaaaaataatataattagttaaagattaccaattttttaagctttaataatacttctaaaaaaattttaagtctcatacgtccaacttagtgtttaaggatgaacatattcttctaaggtttgaaggttcaaaaatgtgtacatgctaattaatgaaaaattaataactactacaaattcatgaaataaatttttaaaaaaaagggagcatcacttttgctctgaccttgttgaagtttctagccattgaagaacaatcaagaacagaacaaaacagagaaggagaaaagatgaagaagaagaaagagttggaaagatttagcaaaagacttctcactgattatgatcaagtgttacagctttatagtctaacaatacaagaagtctataacagactttactaactaactaacagcaaggacacgtggctaacaaccataactaactgacaaaacaaagctaattacaactaacaacaatataacagttttaactgtcttcaacagacctgtaagggtatttttaaaacctttaatttttaatctgatggtaatggtttgttgtagtttatttcgttatcatgaggtagcacatatataattattatttatttatttttaactcccctattttctagctatgatctgattttttttctttctctaaaatgatacacgatatgatcataattttttgccagctttaataagatgatgatgaacgaggtaagttgggactggtgcagctgggttcatgtgaatatggtgatgaggtcgtggttcaggtgaaaagtagtcgagaatgatgatgagatgtgagtgaagg

SEQ ID NO: 54505 - DNA, 1436 bp, Cannabis sativa
  modified_base (1384)..(1397): a, c, t, g, unknown or other
attttttgatatttcttagcatatttctcttttattttagtgtgtttttttttatatttttataagcagttttttttttttttgtatttttataaaaatctaagtaacaattaacagagcaacctaaatcgtaattaaaattcacataaaaattaccggagtgacctaaattgtaaattaaaaaaaaatatttaaaaaatttatatgatattttttttattatagttattatatatcattccaaaatgttattgtttttggattagcattgaggatatgtacttgatagatgttgatgagttttttgatacctcactaatatatttatatatatatatatatatataatttgtcttttccaaaataaagatcaagaaaagtaataattaatatattttttttttgtttatataatatctatttgcatacatagatagaggaagaaatgataaaatatatattgtcacgatatgtaacacagcaaaactgtgtgcggtatttaaacaatgtgttatacttatattatatatacatgcaattatgcctactaaagtagttcattacaaaagtaaaagttttatgcatcattaggcttcaatcttgtaatacaagcaaggctacttaattaattacattcaacatgatgaacaataattgagataaatttgatcaattttcctcttataaattacttttaatagttaaatttgatataattattattattaataaaaatgttatatgatactaatacattaataagtaaaagaaaaaaattagaacaatattagaattagttaattggttttgagatgaaacctcacgcaccataatcacatcttagctactttcaccttaaattctaatagtatcagagtcgcttgtgatgtgttgtgagcccaaagtaccgtcgttcaaaaacacgagccataaaagagccgtttgtaatttgttgtgagctcaaagtgacatcggtccaaaaaaaaaagacgagccaaacttaaaaacttctattgtacctttcgaccaatgtgtcagttttcaaggttggagtctttcacctgttttaaaatccataaatatctcgacgtgtacacctaaaaatttggttttttaaaagtcgttcgttctactcatactttttagacataaacaaaggaagatgtattagagttagtctcacattttattaaagtttcctaaatagttatatgtagttatatgtaagaagaccataaagctcgaaatcgagacacatttttttgtccaaagaggaactcgaaagcatatattcagatttcaaaattggtgttaatgtatttttgtaatatttttcctaatcttttcgcttaatgctaatcttaaattatatatatatatatannnnnnnnnnnnnnctagcaaaaagctacgtgcaaggcacgtatactaaattt

SEQ ID NO: 54506 - DNA, 989 bp, Cannabis sativa
gaaagctttccatcatcttctttcctccaaactaaacctcttcaacaagaaattttttgataacccttactgctccatttgtcttaaccatattgactccaactcccactcccttttgcattattctagggctggtaagtggtggaaaaagtctaagtttcaactttttttctcaaaaaataaagtttatgacattagtaagaatataagttaaaattaagtatagatcaatataatactctacaatataatatggtatacctaacaaatccttaacgaaataaatacaagagttgatcaaattaagttgaattaacaacctaaaagtcgagaaaataagttgaactaacgaccaaaaagttgagatatggatgtagtagcattagaggtattagtagatgaagcagtagaaccggaagtctctctttcttctcgtggatgttggttagcatcaacaaagacaggtttagtcagtggccgagactcctccaataccgatgacttttttgttttgagtaaaaccacaacttcagacattgtaggcctcatggttggggatgattgtatgcacataagagcaatctctataattttcttcaatgtttcttcttcctcctcattcacctctaacttttcatccaccaattctatgtgcttcttgttctcataaagattccatgcctgtaaataaatttgatattttataaaaaatattttaactaatacattgtaattataagcttatagatattcctgtaataaattctatgaactaagtttttggtataatgaattattcaaaaagaaaaaaaaaatgtgtgagatttttttttataacctataatgtacataaagttttcttttataatatagggtgcttttttatggtacaccgcaaaaaaaatatatatctattctatataaagtgtgtctatataactaaaattcttggtttatgagaaatttatgggtgactttttatttttatt

SEQ ID NO: 54507 - DNA, 1068 bp, Cannabis sativa
aagccctaaatatttttttttttttgaagaaaagcttgcatatattaaactaaaaaaaaaaaagaacaattagacctctcggtcattacaaaatataacatcgggcatagaggttagcggcacgtgaccatacctctcttgagaaaagcccacttagcattataagccgcaaaattacattgtctactaatatgttcaaacatacaaccgataaacacaggggaggtgtttgagaccatactcaaacaaaatatgttagttttcaatagacacctcaacaataattatgtgaatgaattaattcaaaaaaaataaaaaaaataaaaaataaaataattatgtgaattactataaaataaaaatagctacatattaattttaaaattaattttaaataaaaaatgattaattattcattaaataataattatgtaattttaaacaaagtgggtttgtctttcctatagtttcattaccctcttttaagatattcttttggaaatttgattatttttataaaattattctttacttattaatttatattttatttattatattatatttgactaagaaggaagattctatctggcttaggctggccttcattctccttggactttggagaatattatgttcttagattattccaactttttatatttttttttaatttttaatattataaggttaattaaaaaaaaataataacaaacaaaaatacttacacaaaagataaaagggtttcctctatttaaaaaaaaaaaaaacatattctctatgttaaaaacacaattaactaatttatatatcataatattttaaaatacgactaatatcgtgataaatataagaagcatatttttctccccttaaacattttctccaattcatttttagattgaatttctatcaatgtagatttgaagttttaattctagacaataatattttgatactaattgataattttcaattggtgaataatatgattttaaatttattttaatatttttggatgtactttgtttgatcatcgagtactcatataaataagtaagagagctt

SEQ ID NO: 54508 - DNA, 1282 bp, Cannabis sativa
tttaaaaaaaaattacaatagaaaaatgttcttgggacaaaaatcttcaaataactaaagaataaatcatatttattctatatttttttttgaaaaaaaaattgtttattatttaatatttattagtcagtgaactcttttgtcccatactgtcgtgggatccactcattagaacccgacccggtaatgttctaggcttaaactaatatttatttatttataattataaagaaacattatctctaaattgaactttatgtaaagattttttttcattaaaaaaaaaaaattagacatgatagttattacaaataatattgaatagaatagcaaacaccttaattatatcaattaagttttaagcataaactcatttagccaaaattacaatctctcgaaatgaaagaaaaattacaacttaactatattattatcaatactcttatcagaacaagtcacgttcaaagttttgataatttttttgaatcattctcaatcaacacaaattagtgctttcagtcgtcgtctcaagtgtcgagaactaaaacttgactaatgaaggtgctagaaatggtgagtgttgaactttttgtaaagatttataattatttgattaaataaattaaatttgaaaagcacaaagtatacctttcacttcagaaaaaaggtacaaagtaaaattttaacacacaaaaagtatctacctttcttttcttataagaggaaaatattatattgggtagatgagttacatactattttattaaaaattgaaataagtaatcatattgtaatattgttatcaaatatcatattttaatatttacaatgtgatgattttttttttttttagaattttgagatattttaatattttaaaatactaaaaagagattaacaataatttaggaaaagtggctcttgcctataaggcaccactagccgacatcaactcaataaaataaaatctaacttgtagttgttttatatcaatttggtgggtaccaataacacttataacttcttcaaatttctcttatgtctataaagtataaacactcaattataatttaaaaagaaactagtatcactttgttcacatagatattttacatgaacttgataattctcaaaaattattcaaaagaatttccaataatgttacaagaagaaaggaaatgactttttgtaacattacatgtcttcattttcttattctctatagaaaactcttttgaatacttttttttaaattcaataaatttatcgttattaataaagt

SEQ ID NO: 54509 - DNA, 1053 bp, Cannabis sativa
ttttttttttttgaagatgatggaaatgagaagagcaagaagtaatgaaaactacaattgaaaaaacgtggattaatctttcaaaaaaatgaagaaatttcttttaaaaaaagtttaagaagaataagaaaattttgaaaatgatggagatgagaagaacagtaaataataggtttggagtaacgtgtattcggctgttaaactgactcaaaagaacacgtcaaataacaataaaacaactgttaaaaaaaaaactaaaactatatgcatacaataagaaacaaaaatatgaaatacataccaatcacaacaaataaattaaaataagtagaatagatcagagaaaaaaaactcagaacatctacaacaaaaaaaggaaaaaaactctaaaataactgaaaaataatataaataccttccacactttgagtattttaaaatcttctcatcaagttcaaaataattcttcaatgattagttacaaacgttttgattttttctttttcagagaatgaacaattaattttcttttgggttcgaagctatagaagatgtagggctacggtggttttctttgaaatatttcttatccatttttaatttactaacaaaaataagagggaaaaaatgaaagaagaagaagaaaaaaatgaaacaaaaaattaaaaaaaaaaaagtgaaaaacgaaaaagaagataaacaagagagagaaaatgacaatataaatggaaaagaaataaaataacctattataactacaaatgaaaaaaaaaaatatgtagaagatggttttaatcagtttttatcataatattgatttggaatgacacatataataaaatgccacataatttttttttcaaaaaacacagtagataatatagaatatatatattataaatataataatacgcgtgctacggtaaaaaaaacaaaaaagatagtatacaacataaattcctcttttgttattgcgatattggcagctaaaccaccctaacttttaggtttataacagttaaccacaaaaactgaaattttggcggcataact

SEQ ID NO: 54510 - DNA, 613 bp, Cannabis sativa
aaatattagattttaggtaaaagtcacttttactgttatttttgtataaaaatattttttttttataaaataaccgtaaaataacaaaatagaacaattaaaataatagtagaacaactaaaaaataaccgtaaaacaacagtaaaaacttaacacagtacatactaatattttaaaaaaacatattattttttaaaaaaattccagcccataataaaaaaaattagaaattttataaaaatcttataatttattgacagtcttaggcaatattggactaaagctgactaaccccacatttagggtccatttcttttaaatgcatatatattttttttattgtttttaaaaaataaatattttcaaattacacaaaaagaataaaaatacagttgaatggaattttaaatattttaacggtttttaagattttatttacataaattacggtctttttatgtatttttatattgaactcttgttattttgttgttaatttttttgtaatttatatattattttcttatgttgttttgatgttgtaattctattattttgatgtggttttttttattgttttcataactacatactgtaaatatatatatatata

SEQ ID NO: 54511 - DNA, 1332 bp, Cannabis sativa
tttaacatagtattatataaaaatatgatatatatatataatcaaattcaatataatacaatacaatatgacgttccaaacgagcccaaaaaaaaaaatagataaacatcaatctaagctaattcaccatccactctaagtgcatgcacaactaattcatgataaatagacattaattaagaataagtctattctctatctatttccaggccaattatcaattttttcaatttttttagttcactcattatcaccttatttttatcactttgctttatttttttttttctttttgtctttttatttttttatttttatatatacatacatataataaatttttaatatgaagaaactaaagaaaacattttttctctcctctttcttttctataatcctttatttaaaaaaatttaccacactattaataatttgagcttataaattacactattataatctagtctttaatgttgaacattttgatatgtgagagtacatatttttttgaattaattacattccagcatgtaaatattaaattatttaataaaattgttgttggttattaaaatattgactactatgttaaaaccactagtttttttaaataggctgacacatataccaataaactttagtactagcgcactgtggttctcttctaggtttcagggcttgcacattcttttgttcttttttttttttactgataatttttttattatttttacgtgatgtgactcatgacatttacagtaaattttttttaataatgatgataaacttatcaaacattgtctttctctttcttcttattttttattaaatatttgagggttttttttatatattttgttaataaataataaacaatatttaaatttaaataaaatttaatgtaaatctgaataataattaagttgttaatttttttatttttatatttaaacattacaagattaaataaaagtaaacttattttcataaaactattttaaaaggtttataaaataatttgtaaataaattaaatagtatcgaaaaaattatatgagttacattaaaaaaaataaaaggtaagctcaaggcatcttaaacaataaaataacatgatataacataaaaatataaaaaagaaaccaaatagtttcttttaatagtataggcgtctattttagagactgaaaaatatatgtttttcacatattaaaatagttatttcattatttatatatatatgtaaaattttaaaataaatgtttttaatggaaaagcaaccaattgatatcttattcacaccaaaagtaactaagtggttgtttttttttca

SEQ ID NO: 54512 - DNA, 711 bp, Cannabis sativa
atcttgcgggtgtcattcacacaccgatccacatcaactggattactaaagtagttgaactgggcaattgggttaaccctcacacctataggtgctaatcatagtgaacccagagagagtggcatactttataagaatacgatatggttataaacaggtaagcacatgatagaacacaactgatacaacatttaaatatgtcatatttatatcatattaatcttacttgacatattaatattttttatctatcaatacatattttacccacataaataacaaataaataaataagttcaaatatatcattctaactattaacacaaaaaatttgttacaacaataaagccttttaaataaaactaaaatattaattatgattgaatataaataaaatatatgaaaaatttacgtgattttataattaaatctacatacttcacaagttaatattatttctgattatatttttataatgtttctaaatacaagagaacatctctggatatttccttaatctctcatagtttttttcttaaaaaagttggaaacctttcttcgtaggactttgtccctatttataggattctttgaaatgacaagtattccctcttgatcttatctaggtaactgtctatgaaacgtagacaatctccacatttcatatttacaacatgtgtgataaataaaataactgctaataaccgcttt

SEQ ID NO: 54513 - DNA, 618 bp, Cannabis sativa
aatcatagttagtgtggtgtggaagattgtaaatgtaaaggtaaagaatccaacacctgaaggagatccagactaagatcttgttattactctgtgacagacaggaacaagggttagagatctgagtggaaggagccataacattttgctgccaccaatgcaaggtttttaaaactttatatgtgtttatttttttttattattttaagaattcatatttagggtgttagattatagaatataatcaacatacttgttagtaaagttagatcctggttaaaaataatcaaacatttatatgatattttttttatgttatttcttgttactttatgcagttttcttgttattttcgtgttatttttataaaacaccataaaaatgtaaaaaaaaaaaaattgaaatgtaaaaatgtaaaaaaaatttataaaaattagtactttatgtaattattgcttacaaataatacattactttggacttatcaagtgaagcccagcccttgagttagagactgtatgctgacttggcatgttgatcacggtcacaactgttgttcccgtgtcttattattgtgggtaattgattatatattaattacttgatcttcaattatgt

SEQ ID NO: 54514 - DNA, 603 bp, Cannabis sativa
ttttttccaattttgctgaatgatttcagttgctgtagagtcggtcaaccacattttttcaaacctgaaccttgacagtcttttatcttcatgctttcgataagccaggggaactacttcaacagaaattgctctatgatctgatttgtagtagtcaaggtgttttgttgtaatcagctgaaaagaatcttgccattgatcattaatgaaacaccaatcaagtcgttctttgatagcaatgacattgtggcgccctttaatccaagtgaatggatcaccttcgaaaggttgctcataaagataacaagaatccaacactgatctgaacttgtccatttgttgctcgtttcgtaaagccctaccaagcttgttttggttagaaagaatttcattgaaatcaccaatcactagccaaggcatcaaaggtgcaacatccttacatctctcaaggagtttccaagtatggattcgtttgtaagtttcaggtgcgccataaaaggcagagaaatgccaggattgcccattatcacacttcatgtagcagtcaaaaatatttatattataattaagaagagttacatcaacattgtctttccataacaa

SEQ ID NO: 54515 - DNA, 609 bp, Cannabis sativa
ttattgagactgattgcattattgctattcaagcttcgcatagcttagtggatatgccttctatctttggtattattgtgtaagagtgcaaacttttattatcttctttcaataatgttactatttatcatgtcaaacaatctactaacaaggtcgcacactgcttgactcgtggctcttgttcttagtctgatcgtaatttttttgagagtacttttcctgctgctcttaaatctcttgtaattgtagatttggctttctaataaaatttatctattttcatcttaaaaaaaatattaaatgactatcaataataattaattttatttatttatttattttatgttttatatataagaacacaacttgtaaatagcctaaatagtgggtgaaatataatacaatttctttttttggttaaatttaacacaaattttaaattttgaattggagatttaaatgaattgaagatgaatcaaaacaataaaaatgaagctttttaaaataaataaataaaaggaaaacaaaaataattggaaacaattaaagaaagcgagaatatgattatttaatttttctttttccaatacaggaacttgctccaaaaga

SEQ ID NO: 54516 - DNA, 764 bp, Cannabis sativa
aaagaaaaaagcaaactgcactaaaaaaaataaaaataattaattagtgagcctaattaacgccacccaattcaaaagaaaaacaaaacaaaaacaaaaccctattttttctctttcacctctctcctctttgtttctgctcacagccgcacagctcattccaaaaaaaaaaaagaaaaatgttagatccagccaaggatttactcgggccaccttcttccccaaccacgattgcaagggaacgtcggagagatcgacgttgacgttcaagatgagctctgtgttcgctgctgtctcggtagactatgacgaagagatcgacccaggtggtggctgggtctcttcggcaaccgacagcttcaacggagctggaatccgagatctttgcaccgaaaatattcaagtacccacttcctcttcttcatcttcttttcttgattcctgctcatcttttatttttttcttcgcatctttccttttatttttgtgtatagatctctggtatatggtgttccctctcgttctctctggttgaatttctctacagacgatggctgggcttgagtctgttctacggttccagcttgttagggacagagatcggaacttgaatcattgtgactaagttattttttcttattttttgtattcaaatgctcatacgcataattatgggtttacattgttcttgtattttattttaaacaattatatattctttttgctgctgaaaatatataactgtaatttattttagaattcta

SEQ ID NO: 54517 - DNA, 1003 bp, Cannabis sativa
  modified_base (43)..(47): a, c, t, g, unknown or other
aaaaatataatatttaattattttaattcaaattttatatatnnnnnataataatttatattaattatatgcaattataattaaatataacaataataaaatttaattaataaaaaaaatataaattacaccattatcataattccaataaaactcatatctattactaaacaaaatattaatccaattttttacagacacaatatttacattattaaatatagagctcactaattcaacaaacactactaaaataaattaggtcagtacctaaacattaacccatttttttttacagacacaatatttagaacaggaaatataacccaaaaatagaccattcaaagtaaaaaaaaaacctaaaacaaattagatccacgacgggtttcaaacgaaccatgagtcgagatccacaacatgattcaaacgaaccccgagctaagatccatggcgagcttcaaatgctgacacttgagatcactgcacaaaaataaataaatgtcgtcaccacaagagagagacgcacgaaaaaaataaaaattataaaaaaaaaaaacctatttaccttaggcgaacgagatagagatctcaaaacttcggtctagcggaggtttgtgcgcgaaaggagaatgagagagagagagagagggggcgacagactgtggaggagaaaggtggtcgacggtggttagagccccaccggtgctgggaagagagaagctgcaggtgcggctgcggctacggctgagaagagaggaggtgcggctgcggctgagaatagaggaggtgcagctagctgagaagagaagtgcaactggctgagaagagaatgcggctggctgagaagagagaagagaagtgcgactgctgagaagagagaagggaagggtgcggttatgtttagaaaatttagggttttttaattatgaaggaagagagagagagatagttagaaaagtaagatatgagtaggttttttttatataaatatgttatttattta

SEQ ID NO: 54518 - DNA, 2163 bp, Cannabis sativa
tgcgttgtagcactctcgcgagtccgactagactcctcgcacagatcctactccagcaggagtaggaaatttcatggtaagatggtagatagatgtcacaatcttcatctcttttaaaataggatgaccaatcatcgcattataggctgagtactgatcaataactacgaagtcaaccatcgacttggaaacagtaggtacagtttctacagtgattggaagcttgatcattccctttaaagcaatagtgtctctagtaaaaccgttgatactcgaaactactggtcacagatccttctcctgcaaccgtatttgtttaaaagcttgaaagttaaggagattcacagaacttccattgtccactaatatacggtggacattatctcctttaatattaacgacaatgactagtgcgtcggcatgtgggtggtgaacccgcctagcgtcgctctccatggatgttatgtcatcgcactgcttcatgaataatttctctagctgctcactcaaattatttacattagtaagtggcctctcccttgcctccttggcatatctttcttgcgattttctggagactcctgcgatgtgaggccctccaataattgtcaatatactgcgaggagttctcaaaccactcacatcattattttcttccttttcatccgctcggggatgaccttcctcattcttcttatactcaccaaacttccctcgtctgatcaattccttgatctcatcctataaaaaccaaccttccagggttgtatgaccaatatctttgtgatacttacagaatttcttcgggtctcttttgtcacaatttctcatgattgggggaggctttctaatgactccattattttactcaatcgcgtaggtatgatctcgtgggactgctaattctgtacagttcacaaaacgcggacctcccttcctctttagagatgattctttcttcggaggggatttggctagctttggactccgctgtctttgagggctgcgtcttcctgggcttcttcctctggaatttttccctctggaactgcaggatcgtgatcgcggtgtgggtgactcgcgtttatcctttcctttctctagtttggccagagaattttcaattcttttatgcggctcagccatagcgaagaactcgactaacgattcggccttcgagcctgcaactacttccaaaaattggttcttggcaagacattttttaccaacgtacaaactaaaaaagactcgggggccttctctactttagttacatcagcaataaaacgtttaaagtaatcttgtagtgactcaccgacctcttgtttaatgttagccagagtagtatagggtggcctataagtcatcgtggccttaaaatgtatgaggaagaggtcgacaaaggtttaccatgtcgatatagatgcttcgggcaattggctaaaccaaccgtgagcattatcttccagggtttccgcaagattacgacattttgcaggctggggtacctggtccacttccataatcgttttaaatttctctaaataatctatgggattagtggtacctttatatttaaatgactcggctaatcagaatcccttaggcaaccgagcttgttgcacttcgatggtgaaaggagaagtcccatgcagcttgtatatgggctttcactattgctcaattatctttaaagcctgcaaaagaataccctaatcgatacctcctggaagagcagcattgctcttggtcattgcaggcgcaattgcgacaacaactatatttgctgggataactactccagtagctgcaactggtgtggtaggcaggttggagagattatttatgccccgatcgcccaattggggatcacgaggctcttcctcaattcgaggcgtttgagaacgcgccctaaaaattgagttaaggtgatcacaaagatcacccctatgtacttggtaccttgctcctcgcggtatctctactgaacccgacctggtgtatctacttggggtgtgactctgtgaagaggaagagccagttcagcatcattttcctcattccgcatttgggccctactgcgtgggttacgtcactctaaccctttctagttgcactttgcggtcaaggttttgtgcagtcagatccctcgaggtcggctta

SEQ ID NO: 54519 - DNA, 964 bp, Cannabis sativa
tatatttaatacattaagaaaattaatataaaaacttaatatgtaataatgtagatttatatatatataaattaagagtaggatgagaaaaacaccaatatgtaaattaagagtaggatgagaaaaatacctgcaaatttggtgcaatatcattaattatgggtgctccaagaattataagcggaccttgcccgaaaccaaccaatctataaagtaaaagtagttgtgaatcttaatacataaaattaatataatttatatataataataataaaaattaaatctataatttaattatattttttaaatatataaaatttaatctaattttaaatttatttatataagatatatctaactaattttattaaataataaagtaaataactttagatattttaaataatatatgtattaaatttattataaagtatcattaattaattaaattaatgtttaattcaaatttaaattaagatttatatatataaaaaataagtatctaatttttttaatagttttaaattagatttaaatatttaaaactattttttttttaaaaaaaagataattaattaatttaacaatttacttttaactgtctactaattattaaactaataatttgttaaactaacaattttcaatagatagtcgtatacactcaaacaaaaagaatagatcgtttcaattttgtttttggataattagtatggcaaataaaatcttatatttagttgcatgcatatgaaaaaggaaaaataagcatatgtacaagtacaaccataatctatatcttatttttttgtacgttaaaacaatttgagttataatatctttatattgggaaattatcctatttactgtattttaaacttattttttcaaatttatggtttgagtttctaaagtaattgcagcgctagttgcaataggagtatctatacgattttttgttgtaatt

SEQ ID NO: 54520 - DNA, 2473 bp, Cannabis sativa
tataatgtaactattatgaaacataaaaaatcagaacagtatttacacgtacgtgactctatctacatgtaaatttactaccctattcgtgatttagtatgaataaattcaccattagaaatctagaaaacaacgaaaatacatcggaataaatatttaactatagtattgatgcaattttttgttttagattatacctgagttagattttttaggaaccccagttcaacattttgagatctgcatttcattaaactagatttatggttgaattttagttttgtagtagtttttctacatttttttttttataaattcgaaacaattcccattgtgattgattctggtcgtcttctcaggtgaagttaccggaattaatggtggttctcttttagttagattttgtttcagttgtattgggttactttcagagtcagccaaccagagcttttcaaatctaaatctgctcctcctttttgttggtgtatcagcaattaagttacaagaaaaggttgcagaaatggtacgatggtctgagtggtagtagtctaaatgttcaattgttggcatgtgaaaatgagactcccattggttgttgacaaaacaccaatctaagcattcttcaattgtgtgcaaagtcgtacgatttttaatccacgtgaaatgatcaccattataaggtacctcttgcaagaaacatttattcaatgttgttctaaaggcttccatttgggactcacgttgaagtcctccacccgacttgtcattgttagaaaggatttcattgaagtttccaatagcaagccaaggttagagtggagcaacatcaccaaaacgttgaaaaagagtccaagaggcatacctattggcaatatccggagccccgtaaaaaccaatgaaatgaaaacttgggctgccattaaatatcatatagcaatcgaaaaaatttgggctgaaattcagtaaggtaacatcaacatcttctgtccacaagagcatgagaccacaactaaatcctacccgaggagattcaagtccattagagaaatgtagtaattgacgaatacgagtaattaaattcatagcaagttttgtttacatgagaaacaaaacatggggaggttgttgttgaacaagcaatcgtagatgtctgaatgcactcgggtttcctaaatcccgtgcattctagcttaaaattttcatgatgaggtgtgggtttgcaaagcaacctccgtagttgagtcatttgagagaataaaatccattacagtagaaacttgactttttgaaccatcttctgttgactggggggaagaggttgatccattgaaaccacgacacctcttaagcatattcctcatagaataagtgtcatttggccttttaggagtgaggtttggtgggggtgttctccttgttaccatcaaggacagtgactgagcattagggaaaaccagtagagatgaacatttttgctggtgtgtaagttctttggggacatgagggaatgtgagaaataagaggttttgtgggtggggtcataggaagggatttagcatttggaggataggttgcaaaacagtttgaagatggtgatgaagtccctacatttggtatgtagatgtgtgtgagatctgttatggtggaaaaagcactcgtaggtgttagtaagtgttgggcaggggttatttgtggttgtgttgcgatgttgggaggggcattagtcgtttttagtgatgctaaaacaaatgaattaaagcaggtaataagggcgatgggcagtgattgtgtggcaaggttgttggcgatggtaatatttgaaggatcactatgtagatatggcataggagatgaagatggtgaagatgtgtgactcttgttggaagtatgtaaaaatggtatgttgttcaggttggtatggtggtgattagttctggttaaagtttgatgaggagttgaatgttcaccttcaaagagcgggtcgggattggcagaatttcttgaagacaacagtggcaaactagttgttaaagtcttctgagacaaccttgtgataaaaggccaagcatttcccttattgaaattcgttcggtaacgatcataattatttgtaggaagcctagcacctttgagccatgggccataagaaagatcgtcatcatttcgactgtcaatgcactccataaaagagatgcattattcaaatggatgcccaagacacccacattcaaagaaaaaatcaagaagtctttcatagcgatactcaatccaaaattcatcccttacttttagtaaacaaatcatttgtcctcgaggtagtagtttagcaacagaaagtttgacacgaacacgcaaaaaagaatcccatcattcattagttgagtctcccgtatgttgatataaaaaatgtattgtataggtaaagattgcaagattatgttttctaataattttataattatatatattttta

SEQ ID NO: 54521 - DNA, 1029 bp, Cannabis sativa
agcaatcataatattatccaaaataaaacgaccttgtagcaatgcactttgagtgtcagatataatagttggcataacgttcttaagtctattagccaccactttggacacaatcttatataacacattgcataaagcaatgggtctcaagtcccccatatccataggatgcttctttttaggattaaaaccaaaatagttttattcagatatggaggaaataagccatggtgaaaaaataccttaccatttcaatgatgtcccctttaacaatcggccaactcttctaaaaaaaaacccggggtcattccattggggtctggagctttgtccagatgcatttgaaacaacgctttgcgaacttcctcctctgaaacgggcagcagtagctcagcattttgctcagaagaaacacgattttgcacactgctagtaacctctccccaatcagtttgagaacaagaaaaaatgtcattgaaataattaaccataagcagatctaggccactattccaatccacccaagcaccagattgatccttaagctttgtaacaaaattatttcgtcttctagtatatttatttatttatgtatactaaaaaatacatattttaattatatttttagtacattttttttttgttgaatttgtaatattttgttattttgtatatttatttttatgatgttttgttttagttttttttttacttagtaatatgttgttgtttgagttatttcaaatttatagctacattatacttataacaataatatttttataaattttttcatatttttaaattaatattaaaaattaaatgctcaccactaagggcttatttttaaagttatgtaattaggattggattatacatctaaattattaccatccaatccaaataactatacttcttgtcctaaccattttagggaaattattaaaaaatagatagataaaataattcatggaaattgtcgttcggtggaacaaatttcatccaggcctcatggtggtggtggtggtg

SEQ ID NO: 54522 - DNA, 1037 bp, Cannabis sativa
aaatatataaatgtatgtatatatcttgccgtatgcttttatatttctttagaaaaggaatccttataattatttgtatatatatattttttgaaaaaattgttagatatatatatattgttaattaagagagtcttactcttaattggtgaaatatcaatagcaatgccaagttggttcttttatgaatcactaaaaaagtcataattatcatgttatgtcacttataataattaattatatactatatcaccatatatagtactatactcgtcttttgcaaataaaaattggtgatattttatatattcccaataataatattattaattatatagagacataaagaactactattatttttattgttaattacagtatatatggtagagcatgatcgaggcctaataaatttcaagatgatttaaataattattcgttatatattaaaacaaaagatatgttgagaagtttattattaatgaaagtggagaatattattcatacatgtgtcgatattttttaagctatatctatacgatttaattataattttgaagcaaaattcaaattcattgcgtcatatggtgatggctagagctaataataaagatttattatatatatattatggttttctctaattaaaatagttaattaatatataattatttagtttcatacgttaagcaatatatatcagttacaacagtttgaatggaccccctctcatggtatggttggcctgtatatgaatatatatatatttataggatttaatattaatagcctattaattagctatatgtatatataaatacataatagtactgaattcagtacttattatttaattaatttttaaaattaaaattcaaagcacaacctaacatgatcatatgcattaaaaaaacaagaaaagggttggttgttgattacaagtgaggttaattaataataattaatagtgtatatacttataataagtggacccgaatattataccatcttaagatttattcgatcgattgagacat

SEQ ID NO: 54523 - DNA, 1565 bp, Cannabis sativa
aagttggagcagatctttgatcttttattagtattcccattccggatgcatacatcgagaattcagtgtgcaaatcatttttataagataggtagattttccctattagtcatataggtaaaaaaaaaaattagagagatccgaacaaatagtattgctttcataaagacattgggtgcacttttgaagagtacagacaatgaagaatgaaattgagaatttgatctctcgatgatactttagacaatatatcgagaataggacgaacgagcagtatcaaaccaatagcctgaatcttgaaccaacaaaatgtactattggttttcatggtactaaatcagatacgcagcgaaagggttttgtattactgattatcattgtaccatagttcaatagatctccagatgtgtgtacattaaatcaaagtataaattaataactttagaatatatacacactacaagaaatgtcacttttgccaacacatttttgtgctagcaaaagtttggtattgcactggtaaaatggagtttactcctgatgtgttggcaaaaggggttggcaaatcaacgttgatattagaacttttgtcagcacatatgaaaagtgcaggcaaaatgacttatcccaacacgttaatgcgccggtaaaagttagattttagccactgcaaatgtcgctagtaaaactttgacctttttgccaccgcagtttgtgaaatacgcttgtaaaagttacttttaccagcgcagtatcgaactgtgctagtaaaactaacatttgttgtagtgaaatcttgaagactatcggtgtatcctcaaaacttctcgtatgttgtattccttagtctagatgatgaggataatgaaattggactcataccagtatctttcaaattgatccaccacaatcaagaaatagtgtgggctattagaataaagtgcataatgttgttcttattgagttctcaacacatgagcaagaacaattgagagagaaaataatttttttttctcctttctatatttcaaaaatattagtgtaaaagagtaagactcatttctcaaatctattttcagtttagtagttaaaaatcattttaattaaatcatatttaattaaataaataaatcaatatatataattgaattcgtttactgatattgatgagagaatctctcaactacttgagagaatatctaaacagctttgaaatatctttaaccactttttaaattcaaatatttatctaattaaattaatttactctgaaagacaaacgcatagggttaggcgcctacccttgtcttgtttaggacaaggatggtttcttttgtcctgataacttttgtctcaacaaatattgtcttaacaaattgtcttaataattttagtctatctcctatttaattaatttaaaaattatttatctattacaacaataaataattattattttgcaattcaaaatagatttttctgaacgacattatactactctttatctcttctcttgacagtgtttcaagttggagattcgaggatgatgaacctataattctaag

SEQ ID NO: 54524 - DNA, 1032 bp, Cannabis sativa
gattagtagcgacaagttgggccttcctggctggccacctctttacatgagcatttaaaggcgtagtcccctgagtacttcctcccaccaacttacgcccgcagtgattgcaaactactttaattttaccatcaatttcttgtcgagtaaaatggtcccatgcacgagaagttctttttctccctgtattatgattttcatctaatgtatcagattgtatttcttcaacattagttgatggcataaaatcaacatcatcctcagaattagaaccgatttgaccagacattattctttaattaacctacaataacatcatattctcatgtctatcaatgcacacaactacttaaaaaatatgataaatatatttcaaaaaaaagtgggacagcattttccctattttattaacctaaccatctgtcaatttcaatcacaaacaatcagataatacacaagttttcatccttatagcaccgcagcacataaatttcacagatcctacttctctatggatgaatatataagatattcaaactcttctattaaattatgagaaatacaatattttgaacatcagtttaagaaaatatatgggtttaatatctaaaaattcttaaacaaaacaatgttatatcatagtaaaagtaccttaatcgcatccacaagctcttgaggtgcaaccttggtgttgaaaaactcatcaacttgttttatagtttctttcctatcctgtcaacaaaactaattcagcatgaattatatgctaatttaaataatactgtattttcttttataaggtgagaaaattacaaaccttagaatcatcaacaaaaggagcacaaattagaatgattttcatttgatttaaatagacctctcctttaatctgatttaaatatgccttgtttacatgaattggctgacctttacaacctgttaatcaaagccagacaacaaatgacaattagtaaaaacgacgtatttagaaaaaaaaaaaaaaaaaaaaagcttaattcaactaccctaact

SEQ ID NO: 54525 - DNA, 1427 bp, Cannabis sativa
tttccctgagtcaacttcacaaagtcttccatctgcgaagttcttatggtgatgttataaaatttttcttcaaacaggctcttaaactcctcttaaggcatagtactgacatctcgggtctgacccacaatatcccaccagacgcgagcatgatcttgtaacatgaatgcaacataattaactcgttttgtccccgtcacccatatgttatctaggatgaaggtaatcgtgcttatccattgctcagccttaataatatcagtacctcccagaaacattggtggttgcagcttaacaaagcgttcaaacactgaatctcgatgtggcagaataaatccaaggctacccaccactggcacaggagctggtggtaacacttgttttgctggagcttccagtgccaattgcctaaaccaacgcaattcatcttcttgatgaaatatgataactttataatttcaaggaaacatttgcctgccagtcggtaggtagattagcattaccaacccccgtgttatcccctggattctgcggaggtggaggcagtgccggtggattggcttggtcattaccaggctctacttgctcgctctatggtcttgatgattgtggagggtccatttttcacaaataaaataaccctcgaaatcaacaaccctgacgagtcaggcaccaataccacacttaagcacttgttgcctaagaccctaattcaaacaatctatttctcttattaaaataaagatttatcaattaaaacactaatcatgattttcatatcacattcattctagatgcgcatatgctgcctaaaatggaaagcggtaaataaataatcacaaaggcagtttaagcatttactctcaacacttactgcaccacgagtcaagcttctctctgacgatgattgtacatgttcagctgttctacaggacgtttgaaaaccttagcgctctaataccaaattgtaacgtcctatcaaataggcatgatacgattgccgattaacatagcctcatcccgctaaactgggattactaaaataagagcaaaaaaaatttaaactttaaattatttacagaatgaaaatatatatatatatatatataacttgtaactttataatttacaaacccttccaaaagattacacgcattttgggatcctgtaaaaattttcacaaaacattacaagttacttttacatgctgacctaggctgcaaaattcaagaatacaaaatacgaccactaattactcaacccgcttggtctagtatggcccgaacatgtacaatccaccgtcgagccctcgcattcatggctgaccacaaacaaatttaccttttcctgcatagtagagcacccgtgagccaagcctagcaagacagtataaataacaataagcattatattctcaattcaaataa

SEQ ID NO: 54526 - DNA, 1176 bp, Cannabis sativa
actccgaaagaacacttgaggggattgagtttcatgttgtactcttgaagaatcttgaagcattcatttagatcttccatatgcccctgggcctttttggacttgacaagcatgttgtccacatagacttccatgttctgactgatcaggtctttgaacattttgtttacaagcctttgataagtagcctctgcattttttagtccaaagggcatagtagtacaggccaacgtctatcaagaagcttgtatgttcttagcctggtggatgcattttgatttgattataacctaaataagtgtccgtgaagcttaggatctcatgaccaattgtagcatctactagctggtcgatcattggtagtggaaaacagtcctttggataagccttattcaggtcagtaaaatctatgcacacttgctacttgtagtttagtttgggcaccaagataggattgattaccccagagtgggtagaaagctttaatgataaagtcattagcgcgcaaccttgtgacttcctcttttagagcttatgcttgctctttatccagcaacctccttttttactgtacaggcaggaagtttggatctatgtttagggcatgaaaaattactgatggatcgatccccgccatatcttcatgcgaccaagcaaggatatcaaggtttgtgtttaaaaatttgatcaatgcggattttatttctagtgctaaaccttgcctgatctttaatttcctggtcggtgagatcaatttcgacatcttataattcctctgctggtccaaagctttttgtaggatccccaaagagaggatttaagtctgcctctccgctttgggctgaacttcattgcccttggtcagactcttggttagagatcttggcaagcatcttttctttcttagctttggacaaagccaagttgtagaagtgttgcagattgttgatctccccttaggcaccctaccccatgggttgttgggaactttaggcataggtgttaaattgacatcattacttttaggtcatacagggctggctgacctatcattgcattgaacgttgatgggacatcgatcactatgaactgagccatcggcgtctttgttgtgggactttctccaactgtcaaaagtagtcagatgtatcagaagggtgcaagaccttagccaaa

SEQ ID NO: 54527 - DNA, 898 bp, Cannabis sativa
tttcatttaccttgcataacttacaaaattaatgtttgaatagtgttctgcttgcgggtttgatataggaatatattgagctaaatggtagaattcaatttgtgagtgtttgaaaattctcacaagcctagaggaatttttgttatctctgtgcagaatgctgaaataatgctgaaccaatgctgtaacacctataaaaataacctcactagaaggaattagctattcaacccagttttgccatattgcattttttttatcttgcaaacaatttttctaggagcagtagtattaattttagcaagtttaattcatgttatttttaattttgaatcattactcaaccatttgcatgttattttctcttactttaagttttaattagttggtttcaaactttgtttgcaatccctgtggagacgatcttacttatcattgtattacttgtttgactgcgtatacttgcgtatataattttcacaacaaacgtgttgtccgcatactgggaccaacgtcatgttgggtcctcctgcaacaagtggtctgagtactggggccaccctcaggttgagtccttctggagcaggtggtccgtttggactgtgggttggaagaccttctggagcccatggcctcttttagacggtgatgagtttcttcgtgtggtgtaatagtgttttctaggtttttcagccatgaaggggatggtttttctttaaaaaggagggttttttttaaaaaaacttttttacaaagactctcaatgaaagcaccaaactattaacaaagatttttgttaaccgaaaattgagcctaatagtgaaatctgacaccgaaaaataaaaacagtaaaggaaaaagtatgaacacaaatgattttttacgtggttttgcagtt

SEQ ID NO: 54528 - DNA, 632 bp, Cannabis sativa
ttagttttggtattatgttgattttattcaatactccatacagtaaaatagaaaacaaaacatgtgaatttatttttttcattaaaaaattagtacttttgattacatatgaaagtgattgatttcttaattcattgctttaacaaaattatttgtaactggtttcttaatcagaaaactagttttttcatcaagaaactagtttcttcaaaaacaattttgattatatagaagtaaaatttatatatgagtttttaagttttttatggtattccttcttaactatgatgatttatcttatatttttaagttcttttttaaaaaaaatgtcatattttgctgcaattaaatttgcttgccatgtaaataaaaaaaaaattcccccatatttttgtaaataatcctatataatattctctgatttgggtctaaactctcacgattttattttaggaaaaactatataaactactatttttggtaaaaattttacattttttacgtttaatatttttatacatattttacggtattctataagaaacatgatagcaataagaaaatcactaagtaacaagaaaataatatcaaaataatgtaaaaaataataaaaaaaaattaacaataaaata

SEQ ID NO: 54529 - DNA, 778 bp, Cannabis sativa
ttgagtctcttggctcgcgccctcgtcatcgggccaactagaacttaacttgtaaacgaaaaaaatcattggttgttttgtacgcgaagctcacgtaatctcacttttctcgcatagaaattattttgttttctctcttatttttttctcattgatcgaactcttctctttcttttctctctcacttgtttcgatcgttttctctcttttgctctcttttttctcactctcattcatctttgtactctcttttttttttgcttaatcaagttctttttatcactccaactcttatgatcactcaaaattttcaatctcacttggtcttcatagacttgttttggtgtcaaaggagctagactgactgtgcggtgatggaacatgaatgagaacttgttggtgaaggcatgatgctggactcgctgatcaaattaccaaggccttcctagataaggtgtccagcttgcactgggagcacatcgcacaataccttatcctcatatttgccaatttgaaaagataccaaaacctgtttggtaactctcacttcaccactatcattcaactattgcaacttgtaaggacgtgaatgtttaagcgttagaagtcctagcttctcaaccatggatgaactagcaacattagtacagctacccccatcaatgatcacactacataccttgtctttcacatgacaacgtgtatgaaaaatattctcacgctgtacctcttcttcctcttctttttcttacgagtttaatactgttggaaatttatt

SEQ ID NO: 54530 - DNA, 964 bp, Cannabis sativa
aaaaatgcttctaagtttggtaaccacagaagaccatgaactggaacaactaaatgttaaaactgactatctacatggggaattggaagaagaaatcttcatgaaacaaccaaatggttatgaagaaaaaggaaaagaagattcggtgtgcttattgaaaaggtctctccatggttcaaagcagccaccaaggaaatggtacaagaaatttgatgagtttgtcatcaaaattgggtttaagagaatcgcatatgatatttatgtctatgttaagatttcaaagacaatattatacttgctattctatggggatgacatgcttatagcgcaaagaccttggtgaaattgaaaaagttaagaagcttcaaagaattggagataaagacatgtcaagaagatacttgggtggacatcatcagaggcagaccaaaaagaagtttgaaattgtctcaagaaagctatatttgcaaaatcttggacatatttggattctcagatgttagacctgtatgcactataattggacagtagttcgattgtctcagactcaagcacctgttatagaacaatacaaagattttatgatgaaaattctatatacttgtgtggttggaagcataatctacatcatggtctccaccagactagacttatgccgtgttgtaagtatagtgagcagattcatgagcaatcctgggatagagcactagtgcgcaatcaaatggatcatgaaatacttaaggggaacatctaataatgttgtggaatcattggatatgtggactctgattatgtaggggacattgattcaagacgatcacaaacaagttttgtgttcaagctcaataactgcaccatcaattagaaaactaatctacaagttgtggtagcactctcaacaacagaagctgagtacataacttgtacaaaagctataaaggaagctctttggctcaaaagaatc

SEQ ID NO: 54531 - DNA, 1244 bp, Cannabis sativa
ggtaaaataatttccaacaagtttcaggttaagcaacactccattaacaagccaaggtcttttgtccaggacaaaagcgcagtcatcctcactctcgaagaagaaaccaagtactccttcatcacactttttcattctccagggacctaatcttctccaaactccgatgaggattttcttcaccaccgaggcaggcatatccttacatccaaatactttacccacacaggccttgttagcaacaacctcttccaaagtaatgtcttcaaagagctccaggagctccatctccatggcactaccacagtaccactagtcagagtagtgttcatggtttcgtccactgactccacatgaataactttagccgaatccacagcgtccttcccattgtccatcgccataggtcagacttgaagagagacgaacaacacaggcagaggtaccactctccttaaaccccaaaaagaaagcaagacaacacacttcacatgaaagaaacccaaagcactcaagaacaaaccaacgaagggcaaacaccgaagaaaataatattgaaaaccaaaaatggaaaaccctagggctgaaaggagggaaaccaaaagttcaaaaagaactagactctacgcaggagccatactcatactgttgattggttatttgtggaaaatctcactactacaaaatagacatttagtgtcggttcgagggacattttttttaaaaaaaaactgacattaaagaccactccaactctttggtctcggtttataactgacacctataatgacttttagtgtcggttagtagagcgacactagaagtataatcgagaccaaaaacatttcttttaaaaaaatataaatatagattgagtaaaagtgtcagttcataaccgagactaaaagatcatttggtctcggctataaactgacacctatagaaacttttttttttaaaaaaaagaataaaaaaataaaaaaaaggtgtaaatagaaactttctcccccttattttgaaaaccctaactctctccctcaccctctcgtgtggctacgagtgaaaccccaacccagctctctccctcaccctctcgtgcggctgaaaccccaactgaaggccaacccgaaccccagctctctccctcagtggcgattaaaccaccaaccccaaaaccccttcttcttcgtgcggcgcccagaccaaagccttaggtgagctggcttctctctctctctctctct

SEQ ID NO: 54532 - DNA, 1936 bp, Cannabis sativa
gtgcgtctgcctctttcctatgtgaaaggataaccacaaagctccatatcttgcaaaccactgtcattcaaagcttgttgaaagccttgaatcaaagctttgtgagagaaaacattgttcaaatctcctcaaggcaagtttgaattagcagcgagggaacgtaaacgactccaggtagcaatcatacgacttctatttggctccccatacagaccagtaaacctccatacagccatgccttcaactgaaaccttcacgtcaatgtaatttgttgagaactgcagaaccgaaacttcatcttcttccttccatagtaatgtaattcctccgctcctcccctgaacaccgacaaccatcatcccatcgtatcccaacgaaacacgagccatttccatctgagaacgattactaagcatttcacatgggaatataattttgggttgcttttggatcacaatatccttaaggaattgaaaagcccatgggttcccaagcccatggctttttcatgataatattttcataatggacggtgggcctggataccaaaacccaccaaactcatattttttgaacccattataactttgttaatctccccatcttcatccaattcattcggcccatcagacaagcctgattccgtccgttttctcttcgtgtccaccaccattaaacaatcattatgtttaacaatattctcactaaattcttgatcagtagcagcctctataaaatcagtttctgcattaatagggatatcacgttgaccaatgttatctaccacaatcataggagatttcaaataaccaactgtacccgcaccaacgtcgactaactgtgattgtcgaacctcactcgtggtcgtgttgacaggagcagtaggtacctcctccatagccaccatgaattgtttcagccactttgctcctatggtgtgattcttacgcataggccgcactctcatcgattctccataaggcttgactatctttccctttggagcatcaaatcgacgaggacaaaacttatcagagtgccccattatcccacaaataaagcagaacgtaggtagatgctcatatttgaagttaaccgagaactcaatcccatccatatttcacagtttcatccgcttcttcaatggcttggtgaaatcaatagttacttggacacgtaaataatctcgccataatcacataaaatttctttcatacgattcgacaaacttcccagcacaattggctatatctttttcaatcgtagccattttaaatcctgatcgaagatcatgcagttggacccacatatcaacttcattcaacactatctgtctagggtcttcccctttcaatcttttaaaaatcagcaagaacttattaaaagtccaaggactacgatccatcatactttgaatatctaattcatgaaagaatttaaataagtatctgttagaatccaattctttaacgaacatacccttcctcagttgccaaagagatgctaccatatgttgcatcacgtcgaaatctatagatctctcagtcaagaatctaccgacaatacaccagcgatcatcataatcattaccagtagtgacagtcgcatcataggataatactaccatcctcttcctcaatgataacatcagctatactctcttcatccatcctctgattactgctggaagccatcccaaaacaaatgagacccaacaacaatggcaaaccagaaaacttaaactctcaaaccagaaaacaatggcaaaatcaagaataatctcaaactagagaacttaaactctcaacccagagaacttagtgcatgtttggcatcataacgaaaaaactgttttttgtttttaaaagcagaaaaattgtttttaaaaacaatttggcttgtttggctttgtttttttaaaaacagttttcagaaa

SEQ ID NO: 54533 - DNA, 2280 bp, Cannabis sativa
  modified_base (34)..(42): a, c, t, g, unknown or other
gggctgaacctctataaaattctggtgtctttannnnnnnnnactatatatcaattgctataaatcacttatcgcttactaaataagactcactgtcgtaggctaaaagcgaggtaaccaataagatagaatattatatagtgtggtggcacaagtaattatgcagggctatatcgtatgctataagttgatattatattttttattactatcttgttgggccttggttcattggtgctcaaatgtgcaagaaaatgtaaagtagtgtcgggtcaactatgagtttgagggcttgatgatggattgtacatgttctggccaggctaaatcacaagggctgggtcgtatatgggagattgtatagaaatctcattttgttgcttaggtcggctaatatctaaaccacttgtgatattttgaaaagaatttataggatcctagatatgtaattatattattttgctttaagctaaaaattattactattataagttgttttgataataagttattttttgtttattcacttggcttaatcgacccgattaataggattaacacaatgtaatcacgacacatgacgttcttttaattaaggtgttatagcttgagtgattccctttggtttgagatactatgaaatcatgttaacactaaaatgtcagcactagctttgatttttggctattctttttaacattggttctcttgtcacaccgtttatttatgtaaaatagatgtagtctttgttccctcctagattgcatccttggaggtctttagtattcttttggttgtgctgacaacataggtagtcttgattatctcctcaacttcacagcaaaggaggcctttgttaaatccttagctttatagtgtaggaggctttcaacttagctttacagcataggaggccttcatcatctccccagctttacagtggaggaggccttcttcatctcctctgctttacaactgaggaggtcttcatcatctccttggctttgcagtgaaggaggccttgttcatctcctcgtctttacagcgaaggaggtcttcttggtgatagccaacaaagtattgtagcagtcgtgggtcattctttagtctattgaagatgcgaccaactcccaaattaacatatccaagacagagggtgatgtcctccctatcttgagtgcacctttaagcaatcataggtgtgctctccattttttccttggcttaaccttagaggtcttcattgttgcttcaactgtattcacaacaggagagaccttctatgtatccttagctaccttgaatgtagaggaggccttttacgccccctcagttgttagcatagaaaaggaggtcttcttcatcccctcggttgttagcacaacagatgaggtgttcttcttgaatgccaacaatgtggtgtatcatttgcatgggactctttggttgctaaggagacggtcgataccaactgcttttaggaacttgatagacagatggtagataaatgagaaagcctagaggttgtagagtgttgaccttctaatggtaaggatacttggtgtcatttacaatgaaggtaatcatagtgattttttccacggggtagttttgactgtgagtggtaatctaattttaccatagggagcaatgttggctctcctgaaaccatacataagctgcttgaatggctattgatctcttagggagttactcattcttttcagagtctattttaattagaatatttggtgatgctctatcattgaaaatcacctttgtcactattatgtttgaaattttgttgatagtgtatgagcctaattgatcttgcccccatcgttaatttcttagtaactggggtgaaaaactttgaagtttgtatgttgaagctatctgctttcagcgagataggccatttttgaagtgtagtgggttatttcttgtgcgtttggtgttcaagcataagtttatttcattagcataagcaaaatgaatcactagtgaagaatagtgtggaaaagtccaccaaatctctaataaggatgaaatcaattgtgttgaagaactttgtgatattaactcatagaaccttgttaaaggtttaatagaaaaaattccaagggagaaaaaagaaaaaagaatgattgtacaaaatctgtgctaagtataatgtcccatacttaggaggagtttagcaactaacagaagaccacaactggggtagcgttcaactccaagagggtttcttacaatcaataagaaaatctctgatggacg

SEQ ID NO: 54534 - DNA, 1004 bp, Cannabis sativa
aagataatcatattaagccacattcaatagatacaattaaaatcgaaatcctaatttttattaactattaatttcctttatttatttgcttcctaattctaatagttttcttactttaattttctttcttaattttcattcaaccaaatagaagtaaaagtttaattttaaagtatttaactacaatccttgtgggatcgacctcacttttggtgagtttactacttgttacgatatgtacacttgtgtgtgcaaattaccacaacacgttgttggaagcctcaaactcaaaatgaagtgcactttgaagttgatgtttttgtggagagaagagaatgattccagctcccaaacctttcttgttcaatgctccgtctacatatgtcttccagacttctagctccaagatgagttcctctggattgttttccatctcggtgcattaaaaatgaaatcttccaaagcttgaccttttatggatattctaggctgataatggatgttaaactagcttaactgcatttcccgcttcatgagtctttcaaatgactctggttttcgcaacacttgatagaaaggatggtttgtcagtaccttaatggcatgggcttgaaagcatggtcttaactttcgtgaaacaattagtaaacaaaaggagagattttcaataattggatatctggactttgcgcccaataatattttgctcacataatatactagaagttttacctttccttctactcacactaaagcagcacttatggcatgatctgaaaatgccaggtacaaaaacaatggttcccctttgacaagtttagataatattagggccctggttaaatgttctttgagtttttggaaagctacttcacactcggctttccattcaaattttttgttcccacagaggacattgaagaacagatacatttgtttgttgatttagagataaatctactgagtgatgcaattcttccagttaaagcctaaacatctttatg

SEQ ID NO: 54535 - DNA, 1444 bp, Cannabis sativa
gatcaccaccgccttttcgacaagttatgggaccttttcccttcgatagatcacgtcttgatggtgattaagctagtggaccctatataaaacactatataatatatcaaatttgatcctaattctaccgaattttcaacaacataatgactgtaattgaacgcccccaaaaattttaaagatgcctaataacaaacaaaacagataaaataattgagtcttcatccatccgaccgcagcacatgtattagcagaacctacttaactatggttgaatatttaagatattcaaactccactaatcattgatgattaattataacaaaccattacctcaggtgttataatgaggtagttaggccaaggaaggaacatgtttgctacttcttcaacgtatatttgcaaccttcaattgagattaagatttcagcatcctcgtgtatcatttttgaaatgagaaccggggcatgtgaatcatcgtaggacttagtgtgaattataatttcaccttcatgttcatccagataagctcgggcaaccatgttatcgatattgtttgagcagagaaatactggctgaatagctgccctctgttcagtgaaattgtacatgagaggtggctcatttagggaagcaaactcctaagcataattttatggaccctcatcctcctgagcatattgttgtggaacatacgcttgataagccacctgtccttcttcctcatcctcatcctcattctgctcttgtttcgataatatttttcttctgcttaaggaatttgatttcggcttttaatttctcaatctccttctatttctgagccacagcattagaaacttccctttttttcttaccaaatagtttacatgccttgacaaggaacctgtaaataaataaataaagttagctataatttattttgtataactaatgaaacaacattttaagtactagcataccaagtagccctaacacatccaagatgatctggtgtcccgagcgcctgcgttagaatgtcattttggccatggacctaaacttgtccctgactaacttgctcctctagttgagcctattgcacatattcatgcaattagtttatgatttatgtatatattaactcattattagtacttaatcaacgagtaatatatacttactatcgtttcaaaaatttccttgtcataatcagtgacaagtttcattctcttggtccgagatttgatccaaacacggtggcatggggaatcttgatcctcaaggtctttttttaaattattttataaaaattaaatgagttctattatattttgatgcacattgtaagaaattattaattgctcaccacatcttcccttacgttcaccattctactccaaccactttgatgtctagattggatttttgacgaacgctccctttgcaccttactcaattccta

SEQ ID NO: 54536 - DNA, 1087 bp, Cannabis sativa
cttttacttttttattgtggagccaaattttttcaaaatactgtataaattgtatactgtaacagtattacgttttcacaattatttcagtgttattttttagttgttttaattattctgtttgttattttacagttactttatgaaaagaaagtattttgtaaaaaaaattcataaaattttaaatttttgtcaaaaatctaatattttttaaaaaacctcattaagaaaaatggaggcaaaagtgccttactttattatttttgttgtagttgttagattttagttgttaagtgagatgtcacatttcttgaacttactcgattggtgcacatggggtagagtgacatgtcaaatttattattgtgaaaatttttaaatcattaaagccaaataataataataaacatggtaatggttccattaaaaaaaaaaaacattataatcaaagtaatgaaataaatctgaacaaaaagctattttttttaaataattaaataataattaaaaaaaaaaaacatattgaaattattaaaaaaaaaattaaacatattgaaaacaactgctatcttcgtaaactatattagaaaaaaactaaataataagtattgaacatgtggtttaatattatattgatgatatttattttaattagggttatataagtaatatttataattattaataaaaaatggctgcaaatacctctgaaaagaatgatcaagtaacacatatttttatttttatttttgggaaaacactactagtaatacgtgtttgtttaacagttattgttattatatcatacagtggtaaaaagaaaaataaataaataaagaaaagggcatacatacgtagtttatacaatactaaataatgttcatgagttagtttattgtgttaatttttatttttatttttttgaaaagagttcatcgtgttaattatttctatacatatataattatatataaaaatatataccactactcccagcaccgttggggctaccgtaccaagttgcacccgcgctggcccaattggcgctgacccgatcaacatcaattgatgagacgttgaaaagctt

SEQ ID NO: 54537 - DNA, 685 bp, Cannabis sativa
tggattggtcggtcggttttcgaagtgcaccaatccagacccaaaatcaaattctagatttttatatagaaaaaaatcgaccaaaccgatcgattcttacccgataactagttatcaatttataatatgatttttgtttttttatgtaaaaataaatatgtgtaatatatgtatacactacattatttttgtagagataattccatataatgattagatgattagtatatatgttatgatgttatttaataagatttttttttgtattgtttaaaactttatagattgattttcaaatttttattataatatttgataatgatgataatgtaaatcgctcaaactgtaacacatcatatttctgtggaatagtttttgtggttttaagatctcgttgtgcggttgcggtttgagaaattaaaaaaattacatatattagtttgaaaaaaatattataatctgcaccacctgcatcacaaacactgttacagtaattcatacacataagtaatttttgatgtaaatatttaactttcaattgtagataaatatgaaatttttaaaaaaattaacagtaaaaatatatgtttgtttgaattttaaaatttttgtaagtacttaatcattatttgtcatgtttatgtattattattatgtgtaagtaaaaaattataaatgaaaaaaa

SEQ ID NO: 54538 - DNA, 791 bp, Cannabis sativa
atattaattttcaatatatatagttaaattttaatattaaaaattaaattattatcattttttttttgttatgtgaaatttgggtggagttgaaatatattcaaaattctttaattataagtgcttttatcaagaaaaaaaaaatactcatttaataagtgatgaatgatttttttttaaaattaatattatataatttaattctttttattttgtaaaaattaataattggttgaactaatttatgcattttttcttcagtaattcataaatataatttaacactttaacatataaaaattaaattaaattatgatcatttttttattttaatcctataattttttttatgaagatttattttaaattttatatacaatttggagagctttgcctaatttagtatttgtagttatatttaagtttatttgcttagttcgtgttaaattatttttaactaaagtttcggatcaatttttatagtttttttcttttttattattatttttgaaataaaattacgcttattttctttagtttcaagtttcaacgcttgaaatgtataaatttgtcaaatatcaaaaaacgatgatctataaaatagagaaaattttacaagaaaataaagctaaaattttaaaccaaaattcgactatgttttgatccgattttgaaaaaagtcaaaacataaaagttttagatctcttttttagctttccaatacatctttaatcagctcatttggagtttgtatgttaaagttatatatattttactgagaggtcgaagca

SEQ ID NO: 54539 - DNA, 568 bp, Cannabis sativa
aactatgcgacctagggtgcgagtttcctgttcatatgatcgcacaagctcgcaggctttgggtgcattttatttttctaaggagggctaatgagcctcgtactagagtgtctacattctatttgatttgcatatatggacacctcatatgcgttgacaacatgatacacgcgagtccttatcaagttatctaacacgctttgtcatttgagaaacgatctttacttagtcacagaagaaggttacctagtcatcacatatatctcggtatatgcgcaacttgtataaatccctcttggtcttgcttatcttattctatgcgaggcatagtatgcgactagactctgtcaagagcgcatcatctcacgagtttagttcaagcgaggtcaactaacagagagtcattaatagctcatccattccttacagattggatccacatgtccatttcataggagactgatctcgagtttttaggcaaaaaaatttcactataacaccttcgtgttttgtttctttgtaacaaagttgcaacaagtatagataacgtagagagagagagagagag

SEQ ID NO: 54540 - DNA, 1018 bp, Cannabis sativa
aaatggcttcgtgggttgatctgatttgccacctttgtcgtttctcaactcccactttcgaaaaatagcttcaagatctcaactgggttgtagccatttctgctccaaaacaactatataatccttgaccttgaggattgagcttaactaatggccgagcctcatgtgaaaacagagagccaaacaatccaaatccctcttctaacttcaaatcaagaggaaagagaaggagaaaacgaggatttaagtgaagcccttgaagggttggagaagtttctggctttactgggttttaatcaggcttgttatctaagccttgctctgtcttggactgtgtttttggtaattggggttttggttccggtccttgtgcttgaattctccgactgtccgagctgtgagaagtatcagattaagaatttcgagcttcaaatcgtggccacgcaggcttgtctggccgccgtctctttgctctgcctttcccacaaccttcgtaagtatggcatacggaggttcctctttgtcgaccgccatagtggtcacatggtccggtttcgaaaagattatgttaagcaaatttcggtaaggatcaaaatataaccaacaaccaagtgtgtatctctatactcgatcacttgttatctacacattatgcatgattattttatgaccctaagattaacactttggtatgacaattcaacatgatttgaatttggtttggtttaagttggatttgtctaattttgttcaattatgaaaatctttcatagcaaaaccaaactttatttttagacattgaaagatctaattttgttgttttcttgttgtctgcattatgcatggttcttttatgagtctaatctaagattaacattttggtatatgatcattgaatttgatttggttcaatttcatgttggaattatctgattttgttcaattatatgtctatgtaaataagaatgagaattggcaccaccaatgttttcgaggccaatggaactaatggtatgaa

SEQ ID NO: 54541 - DNA, 825 bp, Cannabis sativa
aatttttgttgcgcagcttttctacctcttcttttagtgctagggcttgttcttagtccaataatcttcttttttcttgaacaagccaaaaattaggatcaatattcaagatgtttgaaatcatagaaggattgattccgaccatgtcctcatgtgaccatgcaaaaatgtccaggtttgctcttagaaattttatcaatgctcattttacttcgagcaacaaaccttttccaattttttgttttcctgtcaaaacatttgggtcgatttcgatttcttctggttcttccactggaacaacatttgtatttggttccccaagtcggggatccacatcttcatccccgccttgggcagttccctatttggcaatgtcttttcccttgtctgaactctgactagaggtacttccttcttagccttggtgatggcaagattgtaaaattcctgtgcaacttgttgatttcctcttaggcacccgaacccattcttcgttggatacttaaggcacgaatgaaatatcgacgtaatagcctttaggtcatataaggtttttcggcctaacattaaaggctgatggaacatccaatatcaaaaattgtgccattacagttatgctcttcggagctttcccaacagtgaggggtaagcgaattggccctagaagtgcaacactctggccagagaaaccgtacggggtgaagacaagggcttaattctttgagttggagccccattttgtcatatggtgttttgaacaagatatttcagaggctccattatctatcatagtttggacctccattttgttggctatctggactt

SEQ ID NO: 54542 - DNA, 790 bp, Cannabis sativa
aaaaaaaaacagtacaaaagtaaattccaccgtgtcacagtacaaacgaaaaaaaatggaaaaaacagtaatgggtgtaaatttccctttataatttatctttttcgtatcattaagttgggcctatttttagtttgctatatgatttagtttttagtcttgagtttaagtttcgataaaaatgatttatttgttattaattatttttaactattatgtatcatatgaaattttaacacagcattttcttaatcaaattaaaaaaatatattaattaaaattcattacatttatatttattataatatgttttataataatatatacatattgtaggaatattttattccttctttacccctacacacaacaaaaatctaatcaaaagcaaggtcaaatatgacctttctcacctagtcaaagctccttttgactctcagctttgaatcctcaatttaagggaaacgacagcccctttaatttactataggtcatttcaatttaaagcaaaagaaaccctaaactatcacatatatatatatcctttttcttacaaaacacatacacgacctccaacttagaaaacctagcagatctatttctttgttcttctctgaagaacaacaacccagaaaaggaacccagcaataaaccccaagccgtgatcctctctttcttcactgttcttctttgaagaacatgaagaacaccattcatacaacccagaaaaattatcccactgcccaaaaaaaaaaaaatagcccagcagaaaataaataaacacagtagt

SEQ ID NO: 54543 - DNA, 1303 bp, Cannabis sativa
tgtgtttgaatggactaaagaatgcgaggtggcattcagaaaactaaaagaacacatggctaaaccaccgattctatcaaagccagttcacacagaagacttgttactatacttagctgtctccaaaaaacgctgtcagcgcagccctagtctggaaagaggacaaagtccagcatccggtgtactacgttagcaagcgcatgataggggctgagatacggtatcctttgattgagaagttagtttcttgcctcctgatggcttcaaggaagttgagaccctacttccaggctcatcccattaaggtacttacaaatcacccacttcgacaagtcttatagaagccgaaagcgttaggaagactcctcaaatgggccatggaattgagccagttccacatacactacgtaccacgcatttccataaaaggacaggccttagtagacttcataacggagtgtaatgaggcagaagctagttcaagcgtgccagtgcgcggaccctagcatggaaggtattcgtagatgaagcgtcaaacgaaaatggatccggtgctaggatagcaatgataatgacagatggacttcggcaccaggcagccctgcgttttacattcccagcttctaacaacgaagccgaatatgaagccctaattgcaggattgaaattggcaaaagtcgtaggggccgcaagagtagaagtctttagcaattcgcaactggtggtcaatcaagtctcaggagaataccaaacgcgtggagagaaaatggtcgcgtacatagctattgttcgggaactgctccatgagttcacagagtacaaagttgagagaattcccagagagaaaaacgctcacgcaaactgtttggccaagttggcatcagacaatgagatagtgagaccgggggtagtacccattgaacacctcgcggagccgagcatcggaatcaaagatacggtagctgcaattgagcaagagccacgttggatggactccatcatcagatacataacgaaaggtgagttgcctcaggaaagggccatatctaggaggctacagtatcaggcacatcggtatgtaatgatggataagattctctaccaaagaggacttagcatgtcgtacttaaggtgtgtatcggaccctgaagctagacagatcatgcaagaggtccatgaagggttctgcggagatcataccgcaggtccaagtctctcaaagaaaatactgagacaaggatacttttggccaacaatgaagaaagattgtgtagacaacgtcttgaaatgtgattcgtgccaa

SEQ ID NO: 54544 - DNA, 782 bp, Cannabis sativa
tttaacatataacataacctaatccaatcaaataataatataccaagaataaggtgattactcggagaaccaccgataaaagagaggacaagagagctatcgaaataacaaagacatgtcaaaagataagagagccaagtaaaggccgagaagaaaaagtaagtgtgtgtctgtgtgtatgaaagtaagtctatatttaactaattgttactaaattagtgtaatgttgagtcttaatctcatgagagtttgtgcatttcaggtatgtgttgaagaagatcaggcttgctcgccaaactgaacgatgccggcgatcagctcaccaagaggtagcttttccattaaaataattttgattcgtttcttatttattataaatttgttgttgactgattttcatacatatacatatatttatgctatgagtgtatgatattattttaattcattatgtgtatttggtaatttggaaagacagatggctcttattgcccgaattcagcatccttatattgtggaataatttaaggaagcttgggttgagaagtatagaaactttctaatttcttaatgtagttgtcaaaatcataagttttggttgtattgttttatgctgagttctgtatttgtaatgtaaggttgctatttttgcattgtcaccggatactgtgacggcggggacatgtgagttttgataagaattacacattcaaactttaccttatatgaagttgcaatttttagattatctcacattattgttttatgaacgttatgtaggg

SEQ ID NO: 54545 - DNA, 1230 bp, Cannabis sativa
atcctgaatatcagactcataaaaatgatttctaagcttactagaatcccaacacccagaatctgagataaaaaaagaaagcttaggtgaaggaggcatattaccatctttatagtaaagatggttgttattggggagccaatgatcaccaatggttaaaatgttttccccatccccaatcttccaaattagacccgaagccatcaaatctcttccccaaaggatgctcctccaagcataagaagggttatgaccagggacagcttccaagatagaagaatttggaaaatatctagctttaagcacacggcataacaaagagttaggttgttttaagattttccaagcctattttgcaagcatagcctgattaatatgaattagagagcgaaaacctaaccccctaaacatttagattgacagagctttttccaagacttccaatgaattttattattattaccagaagatccccaccacaatctagccatcacagcttcaattcctttacacaatttaacaggaagcctaaaacaagccatagcataaactgggattgcctgaataacagccttaagaagaatctctttaccagccttggaaaaccatttaccggaccaattagtaagcacagacaggattttgtccttaagaaaggaaaaagaatgatatttagatctagtaaggcattagggtaaacccaaatacttactaacaaaaggcctatcctcaagatcgaaggtggtaaagaaaagacttctaatatcctggggagtattaggagaaaataggatggaagatttagcaaaattaataacctgcccagaagctatagaagaaagatgaaaaatatgccttagagagctacaggaatcactatcagcagaacaaaaaatgaggctatcatcagcaaaaagaagatgggaaatagaaggagccctcctagagatagctatacccttaagagtaccagaagattgatgagcacagagaagggatgacagcccttcagcacaaagaagaaagaggtaaggtgaaagaggatccccttgtcttataccacgagaaggtttaatcgatccagtgattgagccattaatctaaaaagaaagactggaagtggtcacacatttcataatcaaggaaacaaaagagacagggaaattgaaatgaagcattacactttccaaatagtgccaattgactctgtcaaaagccttagccatatca

SEQ ID NO: 54546 - DNA, 769 bp, Cannabis sativa
gcccatcaatggtaccaaaataaaccgttcatacttgcatcctaagtaaatttaatatattacattctccacccaaagaatgaaatttattggaagcttgtcaatgtttacactctttgcaatgtctgggatttcctagatgaggatgatgatgagaccacgactatacaataaagaaactcttcgggaatctagttagtcgttcaactttcacaactggacgatgttggatatattcgtgatgatgtcaacccaattgaagtgaccagtagggaccgtgagcaccctcaacctcaccgtcaatatttagataattttattgtttaattatagtgatgatgaagacactagtgataatgataatgaaaataatgtaatattaatgatgatgatgatgatgatgatgatgacaacgacctgtaaactttaaagtactgtaatatttaatcccactgttaagctatctttatcaaacatgtcgtttactataaatacctgattcatatcataaaaatgatcaatggtagatcagcttaaatcctaagtaatcatgaactcatgtttaagttattagtttcttttattcactcattaaagtttcttagagatgattcttacaacttttatttagaaatctaaaaatgtgaatagctgggaatatgatccacaagtatggaatccttacttacctaacggatcaaatgttggttctgtttaagtgttaattctgaaactgaaaagttgtgcacaaatttagattgaatctaaa

SEQ ID NO: 54547 - DNA, 1129 bp, Cannabis sativa
tttgtgtgggtcccactagttttctcctttccaaaatttagtaaacaattgtatgggaatcaataccataccatttattctcattccctttaagtaaacatgccataagagttacataggtataggtggaaactaatattatgtatacagctaaaaaaaaataaagaaaactgagttgaatagtcaatgtaagtatagcaaaagtaataggtataaattgtgaattggtaagatttataggatgtgcaaacaaatatttttcataaaaaatttgcatacatatatttatataaaataaattattgtacaaattttacaatgacataatattaattgaaataataatgcttaaatattgagaaaatataatcatgattttattataacttgaatattttatgagaatttataagcaatacataaatgttacagcaaaaattatttatttagagctcctaatattatgagaatttgaaatatgcgttatttaaaaattctagaagaatttaatacgttccttaagagataaattcaaagttgcgcgcactatatgacaaaaaatcttcatataaattaaagatgtataagtaaattattatttcaaaatacatgtatgatatgtctatgcaatataaattcgaaaattatatgttgtgatagtctcttgaagagcttccggttatattataaaagattgaagaacaaagttttatttctttttcttatattaataaatattaaattgcatataatttgttcataagtattagtggagaagtcgcgaagtacttcatatgcatcaagaattataaatatatgatcatttgatatggaaattaagatcatacaataagaatgaaacaaatatatggtcttggagtaccatcattatcgtatatgaaaatttatattattattattaatgtgttatgttcatatttacttaaaattttaaactttagtatgaacaacgttgtatatacacacatgaatgattcgataagttggataaatattgatgttctaggaacccttcatccataatttacaagtccacacatactctggaatagttatagtaaatatatggtcatagatagtatatgatgatattttaaaagtaataaca

SEQ ID NO: 54548 - DNA, 1414 bp, Cannabis sativa
ttaaaatatttataattattttttgaaactaatattacgtggaccactaaaattttgcagtccaccgtggcacttaactgtgatttttggacgaaggggtacgagcaaaacagaattagggtttaaatagttatgacgctgaaatttcgatttttgtggttaactgttacaaactgtaaagttcaggtggtttagctgccaatatcccaaattaatattaaaattttaatctttttttcttagattggatggatccaatcagatccaatacatactggacctaaaatattagatggatccgatccgatctaaaaaatattaggtctaaaatattgaataaactcaaattaaaccaataaatatatatgaaatacatccaaatccaatggataatggatgttggatgttggatgttggatcgatggatcgattatcgattgaatgactaaaattaattggatcagatcagatggtaaaatttaacatctaatatataactggatcgaatctagattggcctaaaaatattagatgtgatctaataaacaaccttagagacatacaccaagttatatacttacctttagtctcactttcttcgtcaacttgttttggtatctatggaggactctttatgattagcttttcatttttctttttactaattagataaattctaaaaagttttgtttcatctatttatttgtagagaaaatgcatatcaatttcttgccttttttcttttttttttttcttaatgagcatgtcaaagtcttcatctttttaagtgagatttgttgattttatttttttctattgtgttaaattgcttcaggcgaaacccattgggggtttttcactaatttactacaatttattatttttttattaatgattctattttttttttaatttttatttttattttctactcatatgacctctggcctttttgactgtttatttaggtttttatgatattttttggtgtgtatatatatgataatttttatttctaattgtcttaatttattttagaaatagaatctctttggctaataagtggaatagctgatttaatcgcacacaattagtgtcaaccaaagaaaacaagtgtgaatattattcatacttgatatttcttattagctttgagatttaaagttaaactattgtttgatatttatttttaagctttatttaattatgtctttcaaagacaaattagtctgccatatataatgagaattaattattaagttggaaccatcattgttagttagggacaactgaggacaacatatacattgtgctatgattttttctttgtatttatagaataacaactgattaaacaattaaaaatggaaagatttagtcgatattttcatttttgttgcactaataaatattt

SEQ ID NO: 54549 - DNA, 844 bp, Cannabis sativa
ggattggattggatcgattagttttacatgtcaatcaacatctaatctgcacatgtgtggatttaaatttttaaatctaattcaatctgtacaagtgtagatatctatattttacgagttaaattaaattagattggatcgtgtgaattgtattaaatcggctattttatgaagatttaaacgtacatagccaaggttgtaaaactaaaataaaaaagaggatttttcataaatatgggattttttgttgccatttacttttttatggcagaaaaaaataaatggaaaagatatggaaaaaatattaattcaatgaaaaaatatgggaatccaaaaaacatataaataagcttaaaatggaaaatcctatactttccaaactgaaaacataacagaatccatctcaatcgatctctctctccctaatctctacggttttctctctgctcgtcacgtttggaatcgcactatcattagccgcgattgatcactgccattcgatctgcaaaccgaacacaaatgcaaagatcagtcgcctctgatcatcttctccaaaaccaacaacgatcgccgcctctgatcgtcttctccagctccggaaagttcttcagctcattctaatcatctcaaacgcaagcaacatgcgcagaaagtcgatctcaaaaccaaaaattttcattgattgaagacagagcttcagcaacgatcatcgacctccgatcgtcttctacagctacgatcatcttcaggtaagttcttcaattgcttcttatcctcttccttatctttataacctgaaaaatcaatgctaattaaaatcgaaaacgaaaaattgaaaaaacaa

SEQ ID NO: 54550 - DNA, 1114 bp, Cannabis sativa
tcacaattggatatccaatatttggcggtcggttgtgattggatcggtcggttgtcattggattggatcgatttatgcacacccctaggcacaacctataggtctaatacttttgtgtcgtactttgtttgtgttggcccatttttcttaaataagttagtccgttttcatatccgagctcgacttaatgatttacttttccttatttttttacaataatgaattaattactaaactccaaggaaatcagggtgccttcatcaagaaccatcttcttgcccacaacatcatgatatttcaagaccttctgaagggttacacaagaaagaatgtcttagcgagtagtatcatgaagattgacctaagtaaagcctacgacactgtagacagccagtttatggaagccatgctcagccagctttgtttcccttctcggtttatcaattggataatgacttgcctgaagggaactaaataccatctcttaatgaatggtagaatctaaggtaacttcagaggtaaaaaaaggtctccgacaaggagatcctatgtccccacttttgtttgttctaataatggagtacctatctagactgttgattttctattcggagaaagaaggctttggctatcaccctctatgcaaacaccttcgattgactaatctttgcttcgcagatgaccttgtcctatttagcaaaggcaacttgaattcagtgaaaataattcaagaagccttcactaaaatatgtaatgctacaggattatctgctaacaaagctaaatcgcagattttctttggtagagttaaagatgacataaagctgaagatcctggagttagtccaaattgaagaggagacttttcctctgaaatacttaggggttaaccttcgaactactaaatggaaggcgtcaaaagtaaataagaatcttaactgttgggcaagcagaaatctttcgtttacaggtagagctcaattaattcactcagttctgcttgggattcgaaattactggatgaccatcttcataatcccccgaaaactttatgatgtcatggcaaaagttgtcgggagtttctctagggtaagaaggagaatagaagcaaattg

SEQ ID NO: 54551 - DNA, 1498 bp, Cannabis sativa
acgcagatcacccatagtagtaaaaattttcttttttggaatcagcacgagatgagtgtcatttataccaggtggaagctcctcagtatcaaagaaattcataacaagttgcacaatatcagggccaacaacctcccaatgctgctgaaaaaaaccaggacccataccatcggggcctggtgctttgtcaggatgcatttggaaaagagcttgcttgatttcttcaggagtaattggttgcaaaagagcctcattatgatcattagacacaaagcaattgatgcctctcacaacagaatcacaagtgataccttcggcattatacagagaagagaaataatcaacaataacatgatcaagccccgaagaccaattcttccaattaccagtactatcttgcaattgaacaatttcattactacgtttacgagcacttgcagtagcatgaaaatatttactatttttgtcacccgcatgtagccaaaattgtttcgatcgttgcttccaataaatctcttgttgagctaaaatctcaaaataattacattgttctgcagaaaaatcatcagtagaaaaagagccagtagctgactttagatggctcattctctttttacttttatttagtctctgtttaaagctaccagtaatttcatatccccattcagttaaaatagagctacacagatggattttttcagcaagagagacatatgaatttgcctcccagcagtctttaaccaactacccacacaaagattcacggccccaggcattctcataacgaaacaatcggactggtataaaattcatagcttgatcaggttcaagaagaaggggtgtatgatcagaggaagtgtaatcaaaattggacagtttagcttcaagaaaaataaagaaccattcatgagtagcaaaagctatatctaacctgatttcaacatgtgcaggacctcctcttccacgctcccatgtgtataggtatccaccgagagccaattcatcaagtcggcaatcacagagggcaaggttgaagccgttaatgagagtgtcgggataggggcggcctcctttcacatcatcgtgggaagtaatgttgttgaaatctccgattatgcaccacgggagggtcgactcagcagcaatgtcacggagcagattccaggttgttgcacggagtgatcgttggggttcaccataaaatccggtcagcctccagtttgcatacctagtgatagaaatctccatatcaatgtgattgttggagtatcctaaaagatgggcttcacttgatgttttccaaaagagtgcaaggcctccctttcttccttgggcttcaacagagaaacaactttcaaagcccaatttgatttttactctttccacaatattttttttacacatggtctcacaaaggaataagaatttgggtttcttactgacacagatgtctacaaggaattgtaaggcccacgggttcccaagtccacggcaattc

SEQ ID NO: 54552 - DNA, 1268 bp, Cannabis sativa
atggccattcgatttctggatcatattatacgcgctcttgactgagtatatcccggaagtgtctgcagtccagtataaatgatccccacctgaagtgagattaagaggaatcgacttgattagagcttgatctcgtgtgttgaacaggtcagctagaatttcatcatcccactgtaaattatcattaaccatcaaattagatacctttgcattcaacagcgcaggatggcaagaagttacaatcggctccgcatcagttggtaaccaaggctcccccaacacatcaatagttgagccatcaccaatatgccaccgaactccctgtttaacaatagcttgggcctcccaaatacttctccaaacatagctggggttattgcccaacttagccgaaaggaatgaagcattcttgaaatatcttgctttaaaaacacgagaaacaagagaatgtggttgagtcataaatctccacccttgttttcccaggagtgacaaattgtgatcccgcagacttctaaaacccaatccacccacgctcttgtgcttgcttaacttatcccaagacatccaatgaatccctttgtccttagaatttgatgtcttccaccaaaatctagccatatgttgttccatgtccccactaatgtccaaagggagaagaaatacactcatggcatagcttggtaaagcctgagccacagtctttataagaatctccttccctgcttttgaaaggaactttgtatcccaattgtggactctctttctcaccctctctttcagataccccaaaactgcatttttgttccttcccatggtgcttgggagaccaaggtaagtgctattagcatcagctgttatcatttggagaaagctgccaatttgagacctcacttgatgatcagtattaacgctatagaaaatagatgatttccttaagttaacctgctgacctgaagcattttcgaacatatgaagcatttgttgtacataagaagcttcgttcattgttgctttacaatacaaatagctatcatcggcgaaaaacatgtgtgaaatccttggcgctctattagccaccttacaaccatgaattcttcccattgcctcaaatctttaaatcaaagctgaaaagccttctgcacatatgataaaaatgtatggagacaaagggtccccttgtcgaatgcctctgctaggaatcactggtcccatttcacgtcccccatgaacaatattatacttagccgaacgaacacaagccatta

SEQ ID NO: 54553 - DNA, 1252 bp, Cannabis sativa
  modified_base (146)..(150): a, c, t, g, unknown or other
  modified_base (551)..(560): a, c, t, g, unknown or other
ttaatttaatatttataaaattatatcctaggaatatcagaaaaataaaatttattttcaatccttggtattaattttcaataaatataataaaaattacataatttaagttggtccaaaattaaataattaattttcaactcaannnnnattttctataaatatatataattgaaatttaaatccaatgtattaaaaaattcatttttgaaattcatcaaaaataaaataaaataaaactggtaaaaattattctaatttatgttggtataaaatgaaataaattaatttttaacataaatataatttccatattcaattaaatatcttaaaaaatatatcaaatatttaagtgtcttgaacaaaatcaacttaaatattaatttactaatttaattaaatatatctaaaaaaataccaaaatctacctagaaaatatttagataattcataaactaattacttattttctagttaaatataatatatttctatttattttaattaaatcattaatgaaaattttgcttgatttaagttgatctaaaatnnnnnnnnnnattaattttcaacttaatctaattttcaaaaatgaaaaattttgaaatttcctcattaaaatcaatgaaattagaaattcaagagggaaatgattattgaaataaaataaaatatattttaaaaaattttctaatgtaagtttatctaaaattgaaaatttccatcttcaatataattttttatttaattaaatttattaaaatagaaacaaatacttaagtatcttgaataaaattaacttagttattaattctaatttaataccaaagaagaataatctaatttaagttgatccaaaatttattaaaaaattaattttcaacttaatatattttacttatctaatataatttcatgaaatagaaacaaataattaagtatctttaataatattaacttaattatttattctatttatgttgtaagaaaaatatcctaatttaagttggtccaaaattaattttcagcttaaatatatttttttacttaattaaatattagaaaatataaattagctactagaaatctctatctagaatttttttctttaaactaagtgtgtttttctaaattgattttaaaatagtccaatcaaaaattaatttcatttatttaaaaattaatgatgttgctaattcattttaattaggttaaactagtataattagtctaatacaattatttaaataag

SEQ ID NO: 54554 - DNA, 1094 bp, Cannabis sativa
ttcaaaaccaccaccaaatccaagtgattttctcaaaataaaagtttcaaagcaaagagtaaaagagagagggagaagtcggttcttagggctgggaagaatatcagaataaatcattttcattactcaaaaattcattttgttggacaataaatcaagtggtcaaaatgaccaaattgtccctagagtctcataacacacatacatgcattcaagagcattaaagtcattaatcacataacagactatttaaataatttttagaatactcatgtatcaataaaatgccaatataaaatcctaaaaatatatttcggccccaaacccagttcagtccgaaatacccgattttgactataccgcgttaacatgtcagaaaatacctgcaaaaggacacaacaagtatactatataatagtatagtccataagcatgaaaataaattaaatttacagttttaccgttctcgggtcaaaattacgaaaatgcctttagctcaccaacggggtcttaacactacatttatcagattaactcgcatataataaattatataataatataattcacaaatagtacacatttagcaagttagggttcgctaatccgttctcttaatcttagggtattacataatgggtctttctaaattaaacactaacatcttaacaagttttcacgaaataggggcacaataactgaaatgtaaccgaaagcaaaaacctggaacaatgatgaccaggtctttgtgacctgatattccctaaccaaagtgcttttcttactaaccgtgttatttttgataacatcctcattgctcaggaacttattcacgccattaatcataaaaagtaaaagaagttaggttgggtagggcttaaaatttatatggagaaggcttttgataaggtggggtgggagtttattgaggccattcttcagcattatggttttctagatagggtgattggattaatcttaaaatgccttaacactgttactattagattcaacataaatggtactatttctgattcaatagtgccttccaggggtattagacaaggggatccactctcgccctatctcttctt

SEQ ID NO: 54555 - DNA, 792 bp, Cannabis sativa
cttatgaaggattttgggggagaaattggttgacttgtggtaatcttactatagacaagtctattctaagcttataaatttgaggacatcttaatatcaaaggaacaatatctatcttgttgctaggattaaaatttgtcacttgtaacgaaaatagacaagtgaatgtgagagtttggggattgtgtaagaatgtctcaaaatttccatccacacaaatttctaatttcttgagactctccaactgtagaagatcacacaatagaagatccttggtactaatacctaccaatgtctgtaaacttctagacttagttgacctcaagaaattaccaaatttcatgcccctaccaagtagagtgagtaagtatctgataccaactgcagtgataaaatatagatgccttagttgctccaacttgcacattgaatttggtattttatcacctagaatgaaactgtgtaatctaaagggagtttagatgaaactgctgaaaggatttcagctgataagaagcaaggggatcttgacttcggaaatctaaagggacttagattcgtaaacttgatttggaatcaagtgtttgggtaacttttatatgaattcatttctctttactttgattgattgagttgtaatcagaactggatattgtatcttgattattttcatagtgaataacccaggtaatagtcgcctaaaatgtgtttctaggcttgtaaatctggtgttcttgatttactttctgttttaatattcaagttacaaatctagattcaatcaattacaaa

SEQ ID NO: 54556 - DNA, 1100 bp, Cannabis sativa
  modified_base (147)..(148): a, c, t, g, unknown or other
  modified_base (239)..(248): a, c, t, g, unknown or other
taacttttaataagtaagttacaacacataataagttacctaataatttaataacaattaatatgaatatgaacaatctcttaggcctaaattatttttctaacaattttttttttgaaaggtatcaattaataataataataatannaataacaacaacaataataatatattaatacaattataaattataattattatcctcttttactctttttatcaataataataataataannnnnnnnnnaataataataataataaatatcaatatattaatataaagtagagttttgaagtgttgatgcgccacttaaattagtttacaactatttatcaatttaattttttaaaaagtggtaacatcaccttataattttctattttctatattaaaaataataaggggataacaactattcataagtaacttaggtaataacttacctaataataattgcaccatttatttcatataaatataaatttacatgcaatacttacataacatatataatagtaattatttttaatatgtgcaacgactatttgagtctttattcatagctttcatagtttgtatttcttgcatatttattagattaattttgtaacagtcaaactaattgtattccttcatacattaaaaataaggaaaactatttgtattctttgaatttttttcctttataagactttttattatcaccaaagactcttaatgttctaatcatatcatcaatgtaaattaataccctactaaaaatatcttatatatactactaaaattatggtatatgttcattcaaaaaaaaaaattataatatatgtactgacatatgatataatatatattttacaacttcaagcttctttattgaaaggaaattatcatgtgggagattgtaatggaaatcgattctattagtatattgattaataagatatgtatattttaaaatattattattgttgattgtattatatgaaagtagtttttatatacattctgattatccaatcattttatatgtataaatatatatatatatggagaggtctgttgtcacgcatgtgatttttgagtgactagtgctgc

SEQ ID NO: 54557 - DNA, 1322 bp, Cannabis sativa
taaaatatttccaacatatatatcatattattatctcatatacaatgatgccattgcatctaatgtctatataacatagacctacgtgttacgctcacacgtctcttttatacataagatcttaatagggtctcaattttagttactgagtaacacatttatgccttactcgtataactcttcacatttaacaagtaagggcatttttgatattttacatcacacacttatattcatatgatcacatatatttcaaattatagccctaacaaaaaagttaataaattttagatccgaacttgattcgagctaaaatactcgatggtgactatactgcgttaatttatcataaattgcatgcaatgagacaaaataaatatactataataatatagtgcattagcacaatatataacaaaattatgatgttaaccttctcgggccaaaattatgtaaatgcccctaactcataaatggggttttaaatacagtaaatctcaaataatttcacataattgattatataacaacataattccttatttataattaattaatttaattaaggttgctaatctatttactaatctcacgatattataaatatagtatttaaaatgtctcgaaaaataactattggcagttacatatatatattttttatagaagcaattttatatttaagtcttaccttataagataattaaaggtaattcaaaagatattaattgttaaatagagagccagtgagaataaaatagcatatgttataatcatcttaaagataactaagtatagagcctggacattgaaatgaatacgagatatacgaagatgagatgagtcaccacgtaaaaatatttaaaatacgagatgaacttaaaaaaactcacatgaagaattaaaagttattcataagcagcataatttaggaaggtttctcggagaacaaaaattatttattggataaaactaagtgacggttacttggtggttatgccttttatcacactttataattgtatgaaacatggggattatgcacgtttcatgaatagttattaagataagtccaaaagaaataactgccatgtgagaaacctgtaaataaggagattaatcactgtgcaaggagggccaatttttgatcaagtaatacgattctttttgctcgggccaatgagaaagaagctgaagaacttttaaaatgtcttgctacctatgaagaatggtcgggccaaacctgtagcaaacataaatcttctgttctgttttctaataatttgaaggctaattaggtttgccccctgaactttgacatg

SEQ ID NO: 54558 - DNA, 582 bp, Cannabis sativa
ccaatctcaaaacacatatctatatagagtcataaacttacaaacgtatatgtatatatatgctatctttttgcaattatagttgagtaaaacaaaagaaaccaaaaaattaaacaagacaattgaaaccgtatagatatctttatatattaaaagtgcctatctaacgacaattcttggtttagcattttttagttttttgatcctgttaaagttaacgtcagttacctatccataaaacaataaataaacatatttaataaacaaaattacccatcagatcccatcttcctttgaaacccctaaaatctctcctaaaaaaactctaacaaccaagccatccaaaactatcttcatggaaacgaaccccatcattcattgaaccccatcaatcgaatgctttatcattggaatcgtcgatggtaaaattattttccatcgcctcttattatactagaaaattggatcgatcggatcaaggtagctcttttgactcctcgatagatggcaaagatctccatcagcatggaagttattgcgttcctttctacatggacttggagttgatgcagacatcccagt

SEQ ID NO: 54559 - DNA, 1201 bp, Cannabis sativa
tggccggccttggaagcttatgtggggtgctggctaggaattgtagtcccaaggggtgatgggccagccagtgtttcagttttgacactaatgttgttttgctttgttgtcaggccttgatgaagttgagttcagctcgtgatggctctcgaagatcttcagatgcttttcaggagcatgcgaagaccttggaggcttctcttgtggtaaagtacaaagccaattctaagctggaggccttcctcttagagagacagagaatggtttttggcttagagactatgcttggcgctaggaatgcaagaaaaatcccaaagctaccctcatctcccagctgcaaactgaccttgatgatcataagaagaagttgtaggaggctggcaagcatgccaatagggaggagtatgccaacctattctccgaacttacttatgacttctagttacacaaccctcgagctaaattattgtacaagggtagtaaggatttttcgaagagagcattggcctgtggaaaggcacagtttgagagtcgaatggagacagaataggttgctacctatcgagagggatcatcacggggacacatgatgaggagttggccaacccaccagtgaaggaggtggccagccaagacattgaccatcaggccgaccaacatgctgatgatgggggcagcgcggactctatggatctcaatcgcgtgactccaaattttgctctttctgcccctgcacacatttagacaacttttttttgagcattcaacattatatttgtatcgcatagacaatgttttattattcagcatagcctgtggcctttcaactttagaacgttactcacatttttgtgccatgtgccatgtggcctttttggaactttactaacatgtcctaggtggcgcgagtcctttttagaacactactttcatatcctatgttttctgaggcctttttagaacactactttatttacatccagggccttcattgtatctttggccataagccctctatttttggacactactagtatttagccctattggttttttatcatggattgtgtgaccgacaatgtggtctttaatgatagctatcttcttatgcccttgacaagtaagggtccggatttattttaccaagtcaatgtatgcctgcacaacatagaagcaggtatagtagcttatactaagtgtt

SEQ ID NO: 54560 - DNA, 677 bp, Cannabis sativa
cgtcatccctcaattatggtgggaagccacaagatgggacgagaggaaaactactcacaggccccatgcaaaatgtaaggaaaactaaagttccactcaccaacccttaagaaaggattaacaaaagaatgaaggaactagaagcagagatgcaagatctatgtccaaagatggctaccacatcaaggggaaatttaggggatgatgggttcgatgaagaatcccctttctcaagggaaattcaaattgaaccacttttgcccaattttaaggagcctcgcatgacaccatatgatggtacaactgatccaccaaagtacaatctaggagcagcattttttgatgagctaatgaagatgaaaaatgtatcatgcaaggcaatgtgccaacgctttgtggtcacacttaaagcagcgacgtataagtgattcaaaaggcttggacgaagaacaatcacatcatggaagaaatttttgaaggaattcctacaacaacatcagactatgagtgattacgtaatgcatatgatacactatttttactgcaagcgtgcaatgttgttatagcagaattttaatactaaaaagattgtcgaacccacagggattgattattaaattttactaattattatactctttaattttatacattaattagatgtaacgtccccgctt

SEQ ID NO: 54561 - DNA, 2390 bp, Cannabis sativa
gttaatgactttgagagtgcacaaaggaacattgaggttagccttactaaacttcacctcaatattttctacatgaacatgaattccttgatataatttaggcactcgactagggctgagaatttaggtcgttgggctgaccaacctggccaacccaacccgtttttgggctaaaacagtcctctttttattgggccaaaactaattgcgtttaaaaccttgaactcgtggtcattgggttggtaatgggttgattgctttgtaacccgtataaaccaaccgtgccgacccattatagtgaaaaaaaattatacactaaattttttcaacccactaactagcccagaccaatattccattcccttaccctagcatacatataaatcacgtatgtaaggaaaaaactttagcacaatctttattccttcttgtcttttcctattcgttcacacaccaacactacatccacaaccacaatcacaagacctagcagccaaaatattttctttccatgcccgctattcacgcaccccagccgacaatgttgcctcgtcggagttgacatagcaaagtcaaaggcccaaaggtagagtaatctttctttatactctatatttatctctctctctctctctattctatatatgtatctgtctctctctattttatatatatatctactctatatatatacaaatcatttgtgttggagcttcattttttttttttgagttacaggaactatatcggacggtacctgagtttgcttctcaagtcgtcgtcaaatcctcgctctcctacaatgatgcaccacagtcacaatgttgatttttttagtttcttgactttttctttttatgataaaaatagtacgtaaacattattataaaatttatctataaggtacatattaattttaatattataaaatagtatatattcaggcatataatattttggttgtgatttttgtgatgaaaaattgaatgtttattattttttttatttggctactgattttttaaaaaaaattatgatttagttattttttttttgttatgatgttgaccatatagcaattagtaattaaaaatttattagtttttatttgtattataattttcttgatgaatattgaatatatttttttattatatttttatttattaataataatttgactaactagtaattttttaaaaaaaattgtaggaaaaaaaacgttaaggtgaaggtatcatcactaaagtcaaagacaattaattttgagtgtgtttagtgagaccgatatgaaaattgattttattttctttaaatttgttatagacaatgctaattgtaatacactaatattaagaaatttgattatcaaaccccaactagttaaatatgtattattatagaattatattattatatatgaatttttatgatatatgacatgttaagaccccgttggtgagctaggggcaatttagtaattttgacctgagaaggataaaactatgaatttcatttaattacgtgcttatagactatattattatgtagtatacctgttttgtcctttttcaggtgtacactgacaagttggcgcggtatagtcacaactgggtatttcggattacaccgggttcagagccgaaacacaatttttggatgatttattggcattttaaatatgtgtaattaatctgaaatttattcaatagtgtattatgtgatattaaccattttgcccttggatgcttttatgtgtgttatatggcccaaaggggcgttattgtaatttggcctatttgtaccatttgtagaaaagtggaattatttgcaaaaagagaaaacatttttatggatttgctctacccaaatcgatcccccctctctctctctctaaacctatctctaaaatttgttatttttgcttgggaattacttggattcaagcttgcttcgtgggaatcttggagcttgagttcttgaggattttaaggtagatttcttactgctttaatttgtaatttgttgctaaaatggagattaattgttcatcttcctggtgtcccaaagtccattatttcggatagagatccgaagtttacatcaagattctgggaaagtctacattgaactatgggtactcagttgaagttcagcacagtatttcatcctcagacggatggacagtctgagaggactattcagatcttagaagacatgcttcgggcatgtgtgcttgattttgaaggatcatgggaagtaccttccccaaatcgagttctcgtacaatttcagctatcaagcaacaatcgcgatggccccttatgaacttttatatggaagaaagtgtagatcacctattcactgggatgaagtgggtgaaagaaagt

SEQ ID NO: 54562 - DNA, 635 bp, Cannabis sativa
agatccactcgtcaagcacgatactaaaacttggaaattatatgttgatggagcttcgaatgagaatggctcaggggcaggagtgataaggatgtagcccaataacttcaaattccactatgcattaagatttcaatttgatacttcaaataacgaagcagaatatgaggctctgttggctggcttgagaatagctaaagcttaaaaggttaaaaatattatatgctatagtgactggcaattgattgttaatcaagtcctaggtgaatacaaggaaaaaggattaaagatggaaaaatatttagaaaaggttcgaaagaacttgaaaaattttgattattttaaaattgaacaaattctaagagaacataactcaaatgtcaatgcactagcaaaattggcctcacaatgaactcgataagttaaatcttgtaccggtcgaagtcttgagtgacccaagtatatgtgaaaaggaagaggttgagatgatagacgccttgccaacatggatgacacccatagtcaaatatctacttaacagggaacttcctacagacaaaactgaggcacgcaaactcttgtattcaatacctcgctatacaatagtcgagggaaaattatacaggagaggatat

SEQ ID NO: 54563 - DNA, 2099 bp, Cannabis sativa
agaaagaacaaagtgtttttctctttgaaagttctaacaatgaatctctgagtaattctcttagatctctctctctgaagcaattctttcgatccctttcacagtgaggctaagtaactatttatagggccttaatgcatgagggaaggtttcccttttgcttacactgtataaaataaaaaattacatttattacataattatgatacacaaaataggaaactagaaaatgttgctatatttctctgattcaatcccacgattgtcaggattcccttcgtgtcttggcaacgcaagattactctgaagtgattaactctttggaagtagttcggcaagctagacttatacttgctcagatgatctatcttttatcctactcaggtaatcaaaggttatacatgctgacgtacatcatagagtctgttcagaacattcacctccgcctagatacaagaaatacaggacacgtgtcacttgagtattctgccacgtcattgtgcaagaaattggataacaccatggatggaaataaatttcttcttgttaaaatctaagttatgagctaagttagggttggaagtgcgggttgtttttctatggtcattttgatgaatttgagcatcaagttgggcttggttttctccttgaatttgaataaaatgttttgaaaagttttgagcttaggttatgtgtaagttgtgcatgtgtatatttggaatgtttgaacctatttacacttgattttgaggcttgtgtgccattattgtagcaggtattagtatggttttgaatttggatgaaaattcaaagtatatgaaaatttggtaatttttaggttttttcaacctagacattgcaaccctatgcatggacaccgcaattctcataagctcagattacgggggattttacccctataaggggcgcccttgcggtgttaatgcccttttgatcctggatttttgtaaacatgttttggccataacttgtgacaacaaactccattttggatgttctttatactgttggaaagccagtaatgagctctattacttggtccagagttagagtccaaaatgtgaattattatcaaagtgaatttaggattaaccctattttgtataaacctgggattgtgactaggaatactaatacttgtcgggatcacctatggactagaaattctcctcatacattggattttaggtaagacagtgagctaagcacatagagtatagtgcgatggcgcgataatatattatatgattgttcatttatcgtacaagactaggtatcattgaagtacgatttcaagtgtgacaacttggacaagtgttgagtcttaagttggatactttactataatagactcaccaaaaagcatcatacaaagcttctatgggaaccacataaaagacgaaggttgtataggtttgcaaggccatgaaagtattcttgccgaggttgaaaaaggacagcaaactggccacccacttgggaccaaagccctgggccaatcagggtcccatggcatcaaagaggactcgccaggatcccttgacccatgaaagaaccggtcagggtcacatgacccatgcattaaccggccaaaatcctaggacacacttcatgacaaacaccatgggcgggccaagtcttaaacaagacccctaggctggccaaggtgtgcagtggatcaaaatatgtgtttttcaagactcgaacgtgttcttcgtgactcaatgagtcaagaatcaaaaaaaaaattcaaaatcaaatatttttcatcaagaaattatacattatgcatcctaaaactatcatgtagatcaaaataccaaaaataccacaatctaatgtgagaatcaagaatgtaaaaagcttaaacacaaaaatggaaaaattcaagaaaataagtaccgaacgggatttggaagcttacccactagtgaaatttgtcaaggaagcctgtgggaagcttagatcttcgaaataaagtgataatcctaagatttgagggacttaggggcgtcgagcttcaagggaaagtgaagagcttctactttttccttttctgaagagagagagagagagag

SEQ ID NO: 54564 - DNA, 858 bp, Cannabis sativa
taatcaaaaataaataccctcatattatattgtttttttttattaaaatatacctacttttttgagtggattgcctaatataccctcactctttacttaagtctagcatatataatttacagaacacctaaggggtctaatggggacatcatctataaaagtgggtatatctaaaaaaatataaaaattattgaggtaaaaattaaaacaaataaagtaaagtgggtatacaatataatttccttttgattttatcctccaaatggggcccttcatttcaaccgtgctgaatgctcgaagagcttgaaacaaagttttgtgggaattaaaaggaaatataaactgttaataaccttattcaaaatgtaaagtttgtaaatgaaggctagaatacatagtcttaatatacagaaattttgtgacaaagataaaagctggtttgagagattataattgtatcagggtaaaggatcaagggttctccaattgtaaactcatgcacatatataattaatttttagtgcaatataatcagcttacttaccataacatattaatatttgtatattgttaaagtacacttgaaagaataaatattatttatataatattaatatgtttagagaatactattgcattttttcatttgcttattatgagaaaggagagaacagagcaaaagcagagtgtgttctttattattgctcgattaagttttacaaaaagaaggaatgagccttatatagctcggttacaacaagggataatcagttggaggaataaccaactgtaacagaattagctacatgaatcaagactctaacaaccaaaacatatcctaactaactaattcaactt

SEQ ID NO: 54565 - DNA, 928 bp, Cannabis sativa
gattttaacttgaattttctagaacaattttgtccttgttattttaactgtaaaattgagttggtgtaggttaaacttggaatttcaccaagtaaaatcctacatatttttatcaagttggttcatattactttgtttaagaataaagtggtttatttgttacagtaattaatctacatcataattatattcgtttctcttatgataattaattaatagaatttaaaagaaaaaaaagatatgacgttacgtcaaaagtaaaaaagaaaaataaaaaaataatactctgtatttttgtaaaaaaagaaataaaatctgtataaatataaacaaagaaaaatagcaaatttgtaaaaatgtaaaaaaatatgttattttttatatttatgaaataattcctttactcatactaatctttacataaaccaagaaattgggccttttgatgagttttatgggctcggtacactgatacctattggggtgatcaatggctggagtcggattgtaacccaactatactaagccaacctaacaaaactctaccaataaatttcaaacttcttttctttttttagtgtggtgcaaaattttttaaaaaaaatactgtgcaacttcatagctgtattaagtttttattattgttttatagttgttttttagttgttttactgttgttttttattgttttgtttttttattttacggttgttttaagttgttttataaaaagactgtattttggtaaaaaaatttgtgtgacagtaaaattgtaaacttttgacccaaaatttagtatttttgtaaaagttcatttatttatagggatttatattatactaatatttcagacaattaaaaaaatagttttttcatttttatatttgaaaataattttttttttttttttttgcatttttatagaaat

SEQ ID NO: 54566 - DNA, 1643 bp, Cannabis sativa
aaatatttccaacagtaacctcactatctctttcacatataaatgtacatactgattcactgtaaaggttgtttttaccggtagaaaatgtgcagacttcgtaaatcaatctaccacaccccaaatcaaatagtacattcctgtggttctaggtaatccaaccaaaaagtccatggtgacgtcctcccacttccacgcctcaaaagtgcagtggttacacaataatccccagcttgtctctgatgctcagcctttatctattgacaagtcaagcaccgtgatacaaattccaccacatctttcttcatcccgcaccaccagaagtaaggtttaagattttgatacatctttgtagtgccaagatgcagtgaatatggagtggtatgagcctcctcaagaatctcacttttgagttctacactacttggtacacaaaccctggtcttatacaacaacattttgttatctgatatcgtaaaatctttagcttgaccggctacaacctcttctcgcatcttcactaattctagatcagttaactgagaaactttaattcgttctaacaaatcatattgcagcgtcaaattatgaagttaggctacaataaaatcaatgccagatctgagcatgtcttctgctagctgatgtgaaatcttaatcatattagttacctactcgggacccttcctactcagcgcatcagccatagcattggccttacaaggatggtaaaggatttcatagtcataatccttagccaactccaaccaacgcctctaccacatattcaaatctttctatgtgatggtaaaggattttatagtcataatccttagccaactccaaccaatgcctctgcctcatattcaaatctttctatgtaaagaagtatttgaggctcttatagtcggtataaatctcacatttctttccgtacagataatgctgccaaatcttcacaggaaacactactgcggtaagttctaaatcgtgagttgggtatcgctgttcatattcctttaattgacaggaggcataagcgatgactcgattggcctgcatcagtacacaccacataccttttttggatgcatcgcattaaactatgaacttttccttatcagattgtagggctaataccagagccataatcaatctctgtttccgctcctgaaagcttgattcatacttgtccgtccacacaaattgctgattctttttggtgagttcggttaagggtgttgaggatcttagaaaatccctcaacacactgatgataataaccagccaaagttaggaaacttctaacttctgtaaatgtctttggtctcggccaatccttgacggactcaatcttccctggattcactttgattccatttttacagacaatgtgcccaagaaaagacacctgagatagccaaaactcaaacttcttaaatttgttatatagtttatgttctcgtagccgttatagaacaattcaaagatgttacccgtgctcctcttctgattgagagtacacaaggacgtcatcgataaaaacaatcacacagatatcgaggaaatccatgaataccctattcattatatccatcaaagctgcaggagcattggttagtccaaaagagataaccagaaat

SEQ ID NO: 54567 - DNA, 779 bp, Cannabis sativa
cactaaaattagccatttatgtatgtgtatatatatatattatatacttagatatattgttgccctaaatgtggtttattggtcttcttgttcatcttaattataattaattaaggtatcactgatgtctaattatcatgatatggtgtaatgcatagtttatgatattctataataattgtactctagataatgttgagtggtgctagtagtattactggtgtcttttagcatttcttcctaaagaaatatcaattttgctcttaccgtatctttcatcatgaagtatgtcaaactcaaaatttgcttactaataattcacaaaaagattagtaataataaaatcagaacattgattgcttttagaatcaaaataacaatgaggagtattttttgtttttagtatctaaagaaattatattctaagtttttttttatatcacggcgtacaggcgtacagtataattattagtaagcatgtatcttatatattttttagaaattttaaattatttacgacataaaaaataaagttaaaaatagttagttgcacatgtgtaaaatataaaaaaatacgtgcgtaactgattatttgaatcatattttttgcacattaaattactcataatttattgaaaacacacataatatttactatatataactataatgtataccattatatatataaaatattttataattttttatatactgaaaataaaaaagtatacctaccaaataaaagtgatgctttaacctaaattttttcttatata

SEQ ID NO: 54568 - DNA, 849 bp, Cannabis sativa
taattgccttttctaatccacattactaaagcggtcattacaattactttctttcttgtattttgtttgtttttactcaaggaaaaaaaaaaaagagagagaggaataagactaaactattgattgaaattttgggatgtcaaaactaaaaggaataaaattaaactattgggacgccaaaactacaaagcaggccctttaatagataatagtcacatttaattagtcataatgcatagagaaatcatgaattatttaatggtagaaatagaattcaagatgggttatttagtttgataatagataatacattatgaagtcagcccatcaaaatataaatttgtttgtgaattattatgtgaatgcctctcatattaaaataatatttattggataatgttattgatatatttttacaccaaaaatacaaaatgataaatttattacattaatacctatacacggttaaatcaacttttttactcatcttctatattttattactattttaccacatgcacactcattccatgcatgagtacacgtgtgtgacctatgaccccgatcaatcagccatttatcatttccctctctttttttcttctttctgcttttattttgcatttcttttcagtttttattttaaaaattggtaacctccattgctgaacattacctccccacgatccatcatcgattttccctctcatttttgttcttaatttttttttcaactcccactaaaccaatcccataactgttttccctctttctttttgtttctcaatccttatataaaatggttgtgacccgttcttcttcatgtctttcccctgttaaaaaaaagct

SEQ ID NO: 54569 - DNA, 962 bp, Cannabis sativa
  modified_base (130)..(135): a, c, t, g, unknown or other
agtataactcctcaaactgatcaaatcatgtcgcttcttgctgttgatctacattggtcggaacctcctcattcacaccattcacaacatctgtttcaagaacgaaagaccctaccacactctgagggannnnnntagtaggcggcgtaggctccgaattcctaacttttctcaccttagtcacgactaatggcataaaatctgtgtttgacattgttgccctcatctctaagaacgttctcagttggcgttctttcttaataacctctaccggatccatttgtcccttcatgtacaaggaacaaatctccaattttaaatcatacgccaaaggatcaacctctaactctttattttaaatttggtgcatttgttgtatagttgtgtcagttccaactgttaacgtcaaactgtcttcagtcttataaacctaattataaccctcaacataccaaacaccatcgtacgatacaacaagaaacacagtcgatcctacaatttcaaacaaaaaaagtaagttaaggaaaaataccaaaaaatactaaaaatgaaaatatcgttatcttatcgatatcccatcgatattctgtcgatgaaaacatctacaattcgggtggtggtccctatcgacaaactatcgatatagactcgacaatgcacattgcatgtcagatacgtgtacaattagacacataatgctaattaattttcctttctttccaactatcgacatactataggcacactatcgatatagactccacaatgcacatgcatgttagacacgtgtacaattagacattaatggtaattaatttttcccgcctttccaactattgacaagctatcgacattgtattgttattctatcgacaaatacacattgcatgcatttcacttgtacaattacacatttaatgttaattaatttttcctatattcccaacaagtattctcaacaa

SEQ ID NO: 54570 - DNA, 1344 bp, Cannabis sativa
tatttataataaatgataatattattagtatttaaattaatttattaattcaaaaattctattcaaattaatataatagaaggtaatgattcaattctacccattttttaaagtatcaacattatcctcctcaagggtagttataaaggttaaagactcaaaacaaacaaggtaatgtttcacattaccattgccttgatagcattaatccattcccaacacctctaagtgactttgtgatgttgtgaaaaataattaatctttttaatcgttagtggttaattagtcaaatttaattgtttttggagatatgattaaccaattaaactagcattacctacatcgtgtgaatagctcagaccaatatgaacaactcaatagtaaaaaaaaacaattaaatcttattttttgtcaaagtaacaaaaagttaaaaaaattgggatacaataatattattaagcctatatgttattattttttgtcacaactaataaaaagtaaaaaaaaaaaaaattgtgatataataacattaagcctataatattatttttagtgatttttttagagatgatatttaattagaaacaatatatgttgccatcaaaaagttatgactagaattccctttttttaagttagtgtgatgatccatttcccttttaccctttaaggtaattgctttagattaatcaatgaaataaaccttaaacaaataatataaaaaatcaatgaaataaaaaaaaaaaaaaaaaaatgatgaggcctaaccctactccagataaggtgtgaagactttgataggaccacaactatgcactgttatgtaggtctgcaatctgcaataatatatattgattttttttgctatgatgctcatgatttttttttttttttttggttgtgatttaacgtttacttttccttacaaataaaattgatttggattctaaataatatactattaatctttcctacaaatttaattttagtcaaatttatattatatatttataaaatttggaggactaaaaattcatttagtaaaaataaattatatcattttactacaaattatctttcaatgatgacctaagaatagtaatgagttattaatctcaatatctattatttttaattacgtatacattttgttaagatgacgagaaaagaaacattagtttgttataacacaacatgttgaataaaattctcataattataaaattatagcatataacacaatatataaatatataattcagcggcagttagttatactctccattcaaaacataatttgataattaacctaaaaatatgtgattcactagaaatcattcacaa

SEQ ID NO: 54571 - DNA, 774 bp, Cannabis sativa
tcaagttaaatagtgatggctccattgaaagacataaagctcggcttgttgcacaaggatacactcaacaagaaggattggatttctttgacacattctctcccgttgctaaaatggtgactttcaaatttcttttagccatttccactatcaaaaaatggcataccttacaactagacgtcaacaacgcgtttctcaatggggatcttcatgaagaagtgtacatgcaacttcccaaagggcttgttttaccacctgaatttgctggcagatctgacattgtttgcaaattaaacaagtcaatttatggtctcaaacaatcttcaagacaatggtataaaaaactttttgatgcattaattcaagagggcttccatcaatctcaggccgactacactttgttcaccaaagggtcagaagacaatttcattgcattgttagtctatgtcgacgacattatcatcacgaggcccaatctctctctgctacatcagctacaatctattttgcataacagattctctctcaaaactctaggcactctcaaatattttcttggctttgaaattgctcgtgctaaagacggattggttctatcccaaagaaaatacactctacaactactagaagacacaagatatattggaagtaaacctaccaaaactccaatggatccgcgtctcaaactagatgatcaacaaggcgaagcccttgctgacccttctccttacagacagttagtaggcaaactactctacttgaccttatctcggc

SEQ ID NO: 54572 - DNA, 1429 bp, Cannabis sativa
gttaggctgaggcagcaaggcccttaggttgctcctcttcctcaggttggtatggccccagtaccaatgttgccagcggaatatcctatagctggcaacaggttagtaccactatatgagtgatttcggaaatagggacctccagtctttttgggaggccctgatgttatgaaagctgagcaatggctaaccactatgaatcgaatactaaattttatgggagtcaccggtagcgacagagtggcctgtgccacatttcagttctaggaagatgctctgatatggtgggagttagtatcgctcaaataggatgttgttgttatgagttgggatgaattccaggatttgtttaactctaagtattataatgaggctgttcatagtgcaaaacggaaggagtttacacaattggttcaagaagaatcaatgtcagtgacggagtatacgacaaagtttaaacgattggccagattagcctcaggtatagtacctaccgattacactaagaaggaaaagtacttggctgggcttaatgccaagattcgtcatgatttgacaattacaaccgatgatgctaccccatatgcactgatggtacaaaaggctcttcgagctgaaggtgcagtacagttttttcatgagccctgagggactcagggttcttgtggagtcactgctttgcctccttctagtttgggtaggagtagtagtgattcaatttttgattcaaaaaggaagactcctttcagaccaagcaattttaggcagaacaagaggtcccgcgggaaccgtggtcagagtggtggtcgtcatggtggatttacgtacccagaatgtcctcgttgtaagaaacatcacctgggagaatgtaacaagaattcctgcttccagtgtggtaagatgggacactttaagagggactgccctcagttgacaaggggagagccaaagaaggagttcatacccactcctactcgggtatttgccattacacatgcagatgctgaggctagtccatcagttgttacaagtcagcttttcataattaactctaattttactgcattgtttgactctggggctacacactcttacgtggcatcaaaagtaattgataaactaggtaggccctgttatagttatgaattaggttttggaacccttttacctagtggggagttagttatctccaagaggtggattagggatgtaccaatcacagtgatgatagggagttaagtactgatcttatcgagttatcttcagcagactttgatatcattttggggatggacttcttatccaagtatgcagctagtattgactgcatgagaaagatggtaacttttcaaccggtaagtgaaaaaccatttgtatttgtgggaagagttcaaggttcttgaactccaatcatatcagtattgagagc

SEQ ID NO: 54573 - DNA, 1173 bp, Cannabis sativa
ggtccaaagtaagaggatcctatccaattgcgaatagatgagttggaggataatttcaggatacattgagctgccttatcaagtcacgagattctttattacgatagtatagaactgcctgatgagatcagaggatgtactcttggtcatccatccatcttctctgttatgggagtgcattgcaaccaacatcgtgtggttcttcaatttggctgacttagcaaacaactctctaagtctggctaacttgagatcttctcccaagtctacatgaggctcgtcaatggctggctcgctaatggctggctcaccaatccctggccctatctctcaaacataatattgggactagatccagttgtggtgctcaagggttactccatgttggccattcctttaatacaagggtcgagggtcctccctgggcagtaaaggttatccactgagactaactgggttggtagtgtccacctgaccagtcgttgtggccaggtttgtgatgcctgccaagacggcagggtttgccacatttgtcgggtttgtggagattctagttgtggctggaacatgaacatcaagattagccatcatggaagacccgatgaggcagaagttatagtttgatttctgcttgtgttaaccattatgtttgatcagataaattggcaaagctctcaatgaaagcaccaaactgttgacctcaatttggccaacatagagtaaagtcatatttattactgatgctaccgcatgtacataataagaacataaaaagacacaatattttatataggggttctcccctagttagttaataatgacctactcctctttttgttgtattaataacagagataataccactcaaatcacaagagtagtggaatttaaagtggctctcttaagattacaatatatgaattaagtaggcagatctcaagtaagagagagagagagaggtttggtcctataagagagaatggaagagagagttagggttttaaacatagaacttgagagcttagagagcttaagacttcgaagaattatggttatgttcatgctctatacatacgagagctttacaagagattaataaccaattatccttgaaaaataggaaatattatgcatctgttacataattaaataataaatgtgttaattatcccc

SEQ ID NO: 54574 - DNA, 550 bp, Cannabis sativa
atgaaataaccgatgccataggggccctatgctatcggttgttctttacccctacagcgtcacctgaaacaacgtcggtagtatatttcgtcaaaaccaatgttgaaaatccttaaaaactgtctctaaagcccaattttgtaatagtaaaacaactatagaatacattaacaataatataaaaacaacaaaatgatagctacaaagaactagaaaaataacatggcatcgacctcgtttcaatatgcaaaataatataacctcatcaatatgtttttgtattacgatttttttactttgttttgacaacttgaattatttttttatactactgaattattttttccgtgaaatttattatcacaacttcatacttttaactctttttttttttctcttcctttttaacttagtgaccgttacaataataatttattttgtagagagtaataaatagttatatcaataatagaaataataaaatcttatgattttaaaatgaagtatgtaatatataattaaacaacaaaaaaaaaataactagataata

SEQ ID NO: 54575 - DNA, 1362 bp, Cannabis sativa
tcaaccaatttttctggtaacaaattagactttccatataatttctggattatcaatagtggggcaacccaccatgtctgttttgattatagatgttttaattctttccaatcaaaaccacatgctaattgtgtcaccctacccgatgggacctcagttaaaatagcaaaggttggcacggttattattaatccaaaaataactcttactaatgccttatatgtccctcaattttgttttaacttgttatcagtaagctccttgttgcagcattgttctaacaaactgatattcacatctgattcttgtttcattcaggggtcttctcagacattgaggactgggattgctaagaagtttggcaaactctactacattcaacaagagacagctgccactaatccttttctttgcaatgtctcttttaataagaaccaatggcattcccgccttggtcacccttctgtattgattaccaataaaatcaataaaatgtttcacttgtcaccaagtacttcttctcattttcattgcaaaacatgtcattatgcaaagcaaaaaaaattgccctttatttcacataataacattgcacctactgtttttgatctcatacatatggacatttggggtccataccatatagaatccattgaaggatacaaatattttttgaccatcgttgatgatcactcacgatatacatggacctatctattacatgctaaatttgatgcccctgctatcatcaaaattttttttacccttgttaatactcaatacaaatcccacataaagtctgtaagaatagacaatgccaaggaactatccctgtcaagtttctttgctagcaaaggggtcatccattacaattcctgtgttttccgtccacaacaaaattatattgtcgaacgaaaataccaccacattctaaatgttgcacgggcccttgctattcaatctaatgtacctctgatatactggagctatatggagcgtactgcaatttatttgataaatagaacaccttccattttgttacaagacaaaacttcttatgaatttcttcaccgaaaatcccctatgtatgaccatttgaggaactttggttgtttggcctatgcttccaacatggtccactcccataagttctctccaagatcaaaagcatatgtgtttattggctatcctaaacatatgaaagcttatactttacttgacattgctactaatcatatttttcaatgcagagatgtaattttctatgaaaacacctatcctatgaccaacagatctcacacagatgatttcgacaagatcttctcatcaactgttactccccagcatttttctggacaacca

SEQ ID NO: 54576 - DNA, 1190 bp, Cannabis sativa
taattatgaggaaatattatgatattatttacattgttttataaataaatttttttattaaaaaatcattatttattaaatgatagttgaaattttttagaatatttaaaattagttaaaaatgtattgttaacattagtaaatattaatgttaaaatttattcaatgaagaagattgtgttttctctgaaaatatattaaatatatttgttttatatataccacctatattaataaaaaattgtatattatcctattaaaatataaatttatattctgtgaggctgtagagatatgcttaaatagtcttatagttaaacatacgctagctatatatgttacaatttaggataatgagtggagtagctatgtattttactatatatttaattagttttcacgcattatcagtgtaggagtctttaatagttaaagagcaccaaataaaaaataaagccaattttaatatttgatacacctttatttttagagcattgctatttggcaattactagggctgtccagcaccatttcagataatgctttgcgattaattgtaaaagatcttacttttagtcacaacaatatttctgattaattaaaagtaaagtagttgtgactaattataaatcataatttgtgactaaaaaatctattgtattaatcacataaattacaatttgttaggattaaatgtgtttttatacttgttatgactaaaactaaatttgtaaaaatttgtatcaaaatactatattttagtcacaagtaattttttgttgtgagtaaaaaaaattaaaatcgcatttaattacaaaaaaatttatgttattaaaaaattaacactaaagctagtttcttttttatagtaattgattagcaatattttataaaaattattatattactaagttatatgatactgatatttataacagacatttaaagataataaatactattgatacctttaacatttctcaaatttttattgttcggcatgcatgcacctaagacgtcataaaaataatctcaatgatttcaagataagtataggggccagaaaaataatcaaagcatttcttagaaatgagtaaaaggaaatttgcgtgatatttactgttgaaagatatttattaatcaaagcatttcttagagcactcccatgtactaacatatatatatatata

SEQ ID NO: 54577 - DNA, 690 bp, Cannabis sativa
tgtggaaatcgagtacctctactccgttaaggttgttccagcgagaaagaatgccttaggaggcttttattatcttcgtactcactctggcgagcctaaaattattgtggacttgacaaacaaactaccttttaaagataacttcttttggacaactggcctctccccaatcggcacaaccaccttccacaaaatttgtaagtgattattttcattaagctcggttagattgatctatatctttttattctaagttttctgactgaggttttattttttacagccctctcgaaaagacatgcccctactcccgagatggccaaccggcaaggctcctactgattcttccttacggccttaggtcgtgcgacttccttctaagcgaggtcaatctgagatctgtggacctccttactgacaaggagtttacttgtgattataaatttcccaactattcttcttggcagcaagttccctttctagaggaggataaggcttgggataacgtggctcgggcataataccttcgaaacactatcccttgggaagccggtgaaagagcatcccgaggtaatcaatgcaattggtcacccacaatacttagggctgagcgtaacacattagttactttctgagatagccgccttaatttttatatttggcatccccttctcgtagaccgaattgctc

SEQ ID NO: 54578 - DNA, 2735 bp, Cannabis sativa
ccatcaccatttcacagtatttttcaaaaaaattgatttaaaattggaaaactttttaaaaaaattagtttagaaaaagtggaaaactttttgattttattattttggcaaccatttttgatttatatgagtggttggtaaaaacttaaaaagcaaaaaaaaaaaaaaaaattcaacttgtgtataaagaggtaacttttattttatacttctaatttttagagctactacaaatcaatatttttcaattatgaatatagtaaaaactatactttacaacaagatggaaggtgaattttttagtgattgtttgctggtgtataatgaaaaaaaaaactgctaaaaaaattagcataaatttacttatatatgactttaatgatatacaagatggacgtgttgtattttaattttaattataattttcataatatattttgaactatgtatcatttaatccacaatatagtttgccccctgaattttgactctggctccacccctactcacaattagggtactcttagagcactctcatattggataattgttaacaaaatgctccttatattttaactagggaagtaagttatgagaaatgcggtgttaccaaacttatgtaatctttttatattagtaacatgcaatgcatgtttagttagaattgtattaaaattgctattatttaattattaatttaaataataaaaaaaattaaacctaatacaattcaattatatttttaaatatattaaatttaaactagttttaaatttatttataaaaaatatatttagctaattttattaaatactaaaataagtaaataagtttagatattttaaacaatacaattaataaacttgtaataaagtatgattaattaattgaattaacgtctaattcaaatttaaattaagatttatgtaacaaaaatatctaattttgttgatatttttaaattaaatttagatatttaaaactaatttttttttaaaaaaaaataattaattaattaatataacaatgttatctttaatcgttaattttgatgagaaaaaaattgttaaactaataattttcgctagatagccaccttcaatataagaaaaatataatatacttatattgaatgatataatctaaaatataatattttgatgtgcgtattattaaaaaaaatagtattaaaattagaaatataatttttaatttttaaaatatatagaatgatggtaatttggtggaattatcaaagaaattacatccgtttatatgataaaataaattaaaaagatattattttcttatgaggttaataacgtgatcttatgactaatggtgcagttttttttaaaagattatttagatttcttttttttctttaataaaaagaacaatttaactacaatatatatatataaaaaaaaattacattttattttataatgtaggatgagagttgtaaaaggattcgttacaatattatctgattctgaaaactaaaaatgaggaatttatcaaaaaaatattaaagattgcacacaaatttttcttctcatccaaattctgcaactttgagcgtccgaatcatctcatatagtggactaagatccctcctcatcatcgtttgttatttttctattatttttcaataaaatttttaataaaaaacagaataatattttaattcatatattgttaccttgattttttttatttcctcatataattattattagatattattattaattactgtttaccgagatttttgaaaactaattaaataaaatttttaaaagtaaacaattgataagtaactaagacgaaggatctttacgtggttcggacattaattatccctagtccacgagtctgtatattgaccttataggcttttcaaatatattacaagtggtgtttattacaaaaaaacccaactctgtttctctaggtttctcttaaaaaagaagaaagcttagaggatattttggcagaattcaactatctttttttcaatccccttttatgaagaaatgaagggatttatacagattaaagtttggcttcgggcatactcgtgacacgtttagggttttgtaataagcttacccactattgaggtaaaatacattataaacatgactattgggccccttagaaggtttcttctcatggggcgatagttttgtacaactgggaccactattggtgtggggcacatgtcaggtaaagaccacgcctgacaaaggagccgtcagacaaaacgtggtattcagaagaggtgcacgcactacatgctctgacacaagggataagctttgtcttgtggtgaggagctaaaccttttctggaccaaggcctcttccaagttcgccaagtcttctcgcgacctccgcaattagagagaattaagcaataattactttgataatcatctcttattttattttccacgtgtctctactctggaaacacggataatatttacccccaagcttgcaaaactcttgagtgacagaagcttgtagtctccttctagatcatcatgggacacttgaacacatgagtagttttaaaaatgtggaagcgtttctttccatcttgaatttggcaactgaggagtcaagaacttttgtgataaataattgggagtgtgtgtgcgtcgcccatcctttggatccatgaatgccatgcgctcaaaggagggcgtgtttgttgtagaggaacaa

SEQ ID NO: 54579 - DNA, 754 bp, Cannabis sativa
cttttcttaccttagttcaaaactaaagcgtacgggcaaacctgagtggaaaacaagctaggcgatccgagtcctatgtcatgacaattgaaaactcaatgaataccttaattcgaaattctggattaaaactctaattcaaaaccgaatatagcttaaccccaaacaaattcaaaatagaccaaataactcataaacaaccaaagttaggtaccacgttccaccccgagccaaaacagggtttggagaaaacccgagaatttttcccgtgcaggcaaccggtcgaccgttttttggcagaccagaaaaattctgggttttcttccccagctcgaaccaaaatcatcacagacctttatagcatttccagaatagtataacataccaaatacaacatatccaacacatcaattaactacaattcatcaatttgctcaaaatcaccttctctaatgaaaattaatctcaatttatcacttttaacacaaatccaaccaaacagcccctaactccaatcaaactaaacttagacaagcttcaatttgaccccaagaaccaactctaacttcagtttatagctcagcccataaattccttaaaacccttaccaaaacattaactaaacttaagaaaatcaaaagaaatagtggtaagatcatacctcaccttggctagcttctagagttagagatttgctcaagaatttgatgaagtgagatgagttttccttggttttcagcctctcctagggctc

SEQ ID NO: 54580 - DNA, 1159 bp, Cannabis sativa
cttgctttgcaacattcaacagagtcatctgggctgtatttgattttgtagacccatttgttgcttataacatgctgccctgggggaagagggacaacaatccaagtgttgttggcttcaagggcatctatttcagtgtccatggctttcttccagaccttttctttgtaagcttgtgcataagaacgatgttcaattaagtgagcagcaaggatggatgctcgaaaagttggagagagtctgtggtaggagatataatttgcaataggataagatgtgctggtaatttgttgttgaatttggcatatgtaatcttgcaaaaaaaccaggtttcttgagggttctaccagttttggtagttgttattggttggttgttggatgttgcagcagactcagaggttgttgcagtaggttcagaggtagttgttgcatcaggaatgtttggaacaacaggaggttgttctattgcaactgactgaaatggagcagataaagctgcaaagttattgtgaggcattgggattggtgatgctgatttgaggttgagaaaaaagtgtcaatttgagtagtgttattgttggatgtattaagtaagggataaatggactcatagaaaattacatccctggaatggaagatgtaattagtttgaagatcaagaagtgtgtaagccttcatgttatcggggtatcctataaaaatacatgctcgagctcttagagagaatttggtggggtggttaacatgagaagcataagctagacaaccaaaatttcttaaatgattataagttggagctttgtggtggagaaactcgaaggatgtcttatcatttaagagaacagaaggtgttctattgatgagatagaaggttgttttaatcatgtaactctagtagagaaggcgtaaatgtgattgaaatgctaaggctcgaaaaactgtcaaaatgtggtgattttttcgttccacaacagcattttgttggggacgaccaacacaagagtgatgattaagtacccctttgcttgcgtaaaattgtgtaagtgtgagttcctttgcattgtcagttctaacagattttatatttgttttgtaatgaactttgatatatgtgaagaaattttttaattataagtggggatcccgatttggctcgt

SEQ ID NO: 54581 - DNA, 1977 bp, Cannabis sativa
  modified_base (292)..(294): a, c, t, g, unknown or other
taagcagtaatataagacaaacacaaataactaatgatatcagataacaaattatgaagaaaataaaaaaaaaaattacacaaacatattcatatttatatttatattcatattgtacttgaatattagaataaataaatctagaaacaaaatataaattatattggggttacataagaatattaaatatagtgtatcagtgcatatatatacaatataacactacaaaaaatcttacttaattttagttacaacaaaatttatgactaaaagtaaaaaaattatgactaannntaaattattatttctatgttgtaactaaaaggtctgtagctaaaaatattagtcacgaaaattacaatttgttgtgactaaatgtatgtttaatcacaatacttgttgtgactaaaactaaattattgacaacttataaatattacattttagtcacaaatactattttgttgtgactaaaagtcatatttaatcaaaaaaaaattatttgtaattaaaaagtgtaaattaatataatatatatcatatcaaaaatatgtttataaattccaaaataaatcaaacgcaatttatttataaatcataacctacatatatagtatatgcatgatatagatatacatttatatgtgtacgtatgcacatatatattatataaatatattaattcataacaaaataagtaaaataaaagtatctagttccaatatatttcaatctgatcagtatataaatgtatatattagcgtattataattttaaaacaatttgagatcagatttaacaaacactactatatatatatactttggttaaaaattcgtactataaatgtactataaaatattataatttaaagaaaaaaaatagaggagagatagaattttttgagcatgttattttaatgatgttattttaatgggataacccttatttatataaatatataattcataaactaaaaaactatataaaaaaaaatgaaataataattacaattaatagtcattgatttaattaaaaagatttctaatccacaaatatctattatttataacattatattcatttgtaagattgtaattggtttgttgagatataacaacatttattcttaatattgtttatgtgatgagatgatctatcattattatcttctgcaacaaaggaaagcaaatatctattatttatatacaatatatatttatatatatatatatattccttgatctctcctcttgtcacccaaacacaattgcttttattataattattgttcttctattattgttggaattattttacttcatttttcaaaaaaagcaaagcaaagaaagatagtaacatcatatagtacttaattaaattatgtgtgcctgaagactgagaagcaaaagagatattcttaatttgaggtgctttgtacctttatataattcaaacacacacatgaactggagtcatatgcatgtaaattgtactatatttataaatatgtaaatgtaaatgtaaatgtataatatataggtaatgaaaatttataatgttatggggggcaccacacacacatatagcctcatatatagatacatagccttgtttgttccaattattgttagggtttgctcttgcataatatatatataattgtacacacatctctctctgtcttcttagcaatacaatatgtattattattgatgggaccataatatataaatatatatatatagctagccctctcaagtggggaatatatgaatttttattatatatatatatatatattcatatatatcaagtggttcgagcttcataggacagggaccgcttgcagagaggccagttaggctgaagatgagaaggccacagccacagtggaacagggcacagtcacaggttgatgatcagttatatattcaaatagaatattattgtatgaaaaatgtacagtacacccta

SEQ ID NO: 54582 - DNA, 747 bp, Cannabis sativa
attgtattgcattactctttctctactacaaaagtttgtgtcaaatatgaaaagtggacattgttgtaataattgaatgatatcttcgtgatcacctaattttcttttttaaattataaaaaaaacaattgaatatcacacattaccaaatgtttataacagatgtcaatgctaaacatgacattctgtagtagttacttagaatcactaattaacaactcttcctgaattaaaagaaggaaggaaatgaacaacatgaacaacgtatccttgtataagttctagaactctaatactactacatgacaagcgtttaattaaatcatccacttaaattatgcagaatctagatgataagcttatatagttgatgcgtttacttggaaagttcttatatatatatatacatttcttgcactcaactatggttgggtttctcatacacaacatgaaaatgattacaagtaacacttgaggcaacaataaaccgtatcatatttcaatgcttaaataattatattataaccggattggaaaaatttgtggttatttggttgtcaatgctttttgtttagcatatctctctgctttgaggcgataaataagaggaaacagcgaacataccttttagtttcttcatgttgcccatgatttcgcccaatatacgtggaccaatcaaatagggacacgtggatcaaataacttgtaaatatttgataagtctttgtatgccacaaggaagcaccc

SEQ ID NO: 54583 - DNA, 1033 bp, Cannabis sativa
gatcgagtacaattatataaatatgtaagtatatttattttactttaataaagataataaaaaagaacgttaacatgtatttatggtgcctaacaattaagaattcactatcaagcactatttattttactttaataaagattattaaaaaataataactaatcataagctgtcacctcataaagatgctgatacccatagtaatactctatatttaaatataaagttaagtatgtttaaatattaattatgcaataatgtatgtatgtacatgttagttgagactagtgatgaaaatatatatcgtgctataaatatagctcgtgtcgtatcgtactataaaaaatacggatcatgtcgtactataagaaaatacgaattgtgtcgtattgtatcataaaagaatatgggttgtgtcgtacgtgtcgtaccataataaaatacgggccgcgttgtaccgtgtcataaaaaaaatacggatcgtgtcatgtcgcactttactcaggccgacccattttcttatacggacttatattcatactctacttttttatgcttttttttttacaattgatgatataattactaaaattatatatgtatttttatagctttaattatttctacataattttcaacaatttttcacataaattatataaaaaatatattcattaaaactattaaaatttgaatatttactaataaatatttaaattattaaaattataagaatagattattcgtgcttatgtgtcatacttttcgggtttatcgtgttgcgtgtcgtgctaaagtctatatttttcgtgtcgtgtcgtgtccaaactcatattgttcatgtcgtgtcgtgccaattcgtagcaccgtgtcgtgttgtgctcaagcacatgttttttcgtgcctggtcgtgctcatctctctagggttcatgccaatttcgtgtcgtgtcaaaaaattcgatccatatttagagcactagtcgagacttgagaccacgtacttgtaagtataataataaggtttttttttt

SEQ ID NO: 54584 - DNA, 2352 bp, Cannabis sativa
acaattttctatatataactcgttcttcatcttctccatctccctttgtggaaaagttccaattacaggccctaaagctttagcaatggggttaaaatctgtctccaaaaaagagaaagggaaaggaaaaaggaagttaaatgatagtttttcttataatgattttgttaagcccatacccaaatagggaaaggctcctgctaagaagaaatctaatatcgtgaaaggagaggaaatcgatgggagtcctattgttgttggtaaaaaggggaagaatcaagattctcgtttgattgagatttgatatgacatacaactttaaataaactattatgcaactatttaaaaatgaatatgcacaatgtatcaaaaaaaacatttctccctgtatgagttttggaaaaattaaaaaagtcaaataaatttccttttaatatataattgcttggatgtagaagaataggcttggatcatccttaatctcaacagttggtaaccatttttcacttaatatttcagttgctgttgactattttctttgttgcattccagcacttgtttcaacttgtgtacaagctcttcatattttcaatccattgagatgaattcgccactaaatttgtaatttacacaattttattcattgatcaaagtgcccattgtaaaatatgagaagtgaaattacgtccctttcctgacattgtgaaattcatttatagtcagtttactatgagaaaactgtaagaaaaatgtaatgcaacaattatatctattacgagccaactaatataaaatcacaaaataactaataatttcacatatttaatacaaatgaatattataataattgtgttttatctgtttaagtcacgtgtttgacaattctgagtcctgtttttataatactatgatattgtagtagcaaaaccattactcaactaacgtgcaacttaattacaactagaaatattaaatatgaatttgtatctataagaaactatttgttagtattgtttttgtcactgatcgataattaatgtaccttaatagtaatatgtggagaaacaactgttagacatctgtaaactaactttatatcaattaatttagtatattaataaaactaaacatgttataaaagtttctttaaagagctttgtattgtattgccgatatgaatcacttgtaaatatgataaaattcattgtatcattatcaatttgtaataattgatatgtcaagtttcaaagagttagcaaaatgtttatgcaactgtaatgcaactattatgaaacataaaaaaccagaacagtattttcatgtgcgtaactcaatctacatgtgaatttactattctattcgtgatttaatatgaacaaattcaccattggaaatctagaaaataatgaaaatgcatcgagataaacatttagctatagtattgatgtacattttttttgaattatacacgagttggattgtttagaaacttcagttcaactttttgagatctgcatttcatgaatctaaaaattaaagtcaagacattagttttatgcgaattaaactgaatttttagttgaattttagtttgtagtagtttttttgcaaaaaaactgatttaaagaagaaatatctccaaaaaaactgaaatctcacgatcttcaactgctattgaagagtcagcccgtgttttttttttctcttttttttctcctacaattttctatatataacacgttcttcatcttctccatctccctctatggaaaagttccaattacaggccctaaagcttcagaaatgggggttgaaatctgtttccaaaaaagagaaagggaaagggaaaaggaagttagataatagtttttcatatgatgattttgttgagctcatacccaaataggggaaggctccttctaaaaagaaatctaatatcattaaaggagaggaaatcgagggaatcctattgttattggttaagatgggaagaatcgagattctcgttataacttttaattaactgttatgcaactatttaaaaattaatatgtacaatgtattacagaaaacatttcttcccgtatgcgttctgaaaatattaaaaaattcaaataaattttcttttaatatataatttcttggatgtagaagaataggctgggatcgtcctttatctcaacggttggtaaccttctttcacttaatattttagttgcagctaactattttctttgttgcatttaaacacttgtttcaacttgtgtataagctcttcatattttcaatccattgagatgaattcgctactaaatttgtaatttagacaattcattcattgatcaaactgcc

SEQ ID NO: 54585 - DNA, 1038 bp, Cannabis sativa
ggagttgagtgttgacttagtagaactggaactaacagagtttgatatcatacttgggatggactttctgtccaagtattcaactagtattgattacaagcagaaaatggtaactcttcagccagagggcgaagatccatttgtttatgttggatttgttcaggggtctaaaatctcagttattttagttaagatttactacacagtggatgtgtaggatttttagcggttgtaattaactccagtagacctgaaatatttggggcttgagaaggtcaaagttgtaagagaatttcttgttgtttttcctgaggagttactacgattactaccatagcaagagatagattttataattgattcagcatctggggcagaacctagtttgaaagaaccatacaagatggctttagcagaacttaaggagctaaaaataaaacgttaggggatgctggatttggggttacccgacctagtgtattgccctggggagctctagttttatttgtgaagaagaaggatggattccttcaaatgtgcattgattatcgggaactaaacaagctgacaattaagaacaaatatccgttacctaggattgatgatttgtttgaccaactccaaaggaagactgtgtttttaaagattgatttgcattctggttatcatcagttgagaatttggaaggaggatattccaaaactgcatttcgaactaggtatggtcattacaagtttttggtactgtcattcagattgacaaatgctccagcgacgtttatggatctcatgaacagagtattcaaggatttcctcaaaaattgtgtcataatgtttatcgatgacatccttgtgtactctcaaacagaagaggagcatgactagcgtctctaaatggtattatagcgactcagagatcataagttgtataaaaatttaaaaagtgtgaattctgaatgttgaaagtgtattttctaaggggcattatcggaaaagatggaatcatggttgatccaagaaagtgttggaattattttac

SEQ ID NO: 54586 - DNA, 1325 bp, Cannabis sativa
ttcaatgatgcttggattcccggttatggtaaactgcattacttgaggtataattcaaatgctgatatgacagtggctagcctcctcacacctgacaagcaatggaatcatgccctcatccattcccttttcccttctgacatttcacaagccataacggctataccccttcaccccatctccactcaggatacttacttttggtcactaacacctcatggttcgtacacggtcaattcggggtaccaccttgcccacacccaactccatcaaaatgaaccttcctcctcggatagtaaattcttcaatgactggtggaaaaagctttgggcccttcccttgcctcctaaactgaaacatttcctttggcgggtatgttatgatatcctccctactagccgaaacctattcaacaggaaaacactacactcaccccattgcagtcgatgtcactaccacgatgagaccctagagcatgctctcttcaggtgccctgcttcccagaaggtatggaacttaactgattttaataatttttatcaaatgcacacttgttcttttaattgtatggatttattataccttgctgccactgaatttagtactggacattactctctctttgtttgtctgctgtggaagctctggaactgcaggaactcttggattcatgacggtatatccccctccccagatcaggtccttcgtgaaatttcaacttatatggagcagtatacaacctgcaacaagaagactcccaccttttctccagcttctgatgatcaatgcctacacaacaacaactgcccatcaacttcaaccttccatcatcggcttttggtggatgctgcccaagattcgcaactccttaaaatgggctttggcatgaccatccacaccagttcaggtgaagttctcctaaacttggcgaagcctcaaaacggcatcactacacctttgataatggaagcacacacactttactcagcaatatcctggtgccatgaacactccttttatccagatagcattgtctcagattgcagtgtgttagtcaattatatttgtaaaaatgaatctcataatttgcatcttaatccttttgccattggaatcaaaagcttgctctctttctttcctaatgtgtctcttagctacattccaagagggtcaaatcttgctgcccattgtttagctaagacagctttaggcttagagcaggaagctttatggatgagtcctactgtccaaaatgctttgtctcatgtatcatgtacttcaaattctcattaatggatacaggtctttctctctcaaaaaaaaaa

SEQ ID NO: 54587 - DNA, 801 bp, Cannabis sativa
atatatatatacatgcatatgtgttttgttttattattttgtagttatgtgtttatgcattttgaggctgttggtcttcacacgtatttcatgcatttaccaaacattcatcatatatatatgcataattttcttatatattatctaagaaatatttgttattgggataaattcatattttccgaaaaaacaattacactaaagagaactcgtagtatcgaaatagatcttgtaatattaaggaaaactcctattattgaagaaaatgtgcgaatacaccaatcaacagaaataacgatcaagtatttagagtgcaattataacaaacgtttcgtgtatttaataacggatatataattatcacatttagtattaacttattattattatttgtaatggtctatcttgaccattataaccatcagctacttcgtataagtaggtgaattcacctccattgaaaggacgctgattgatctgaataaagaaacaaagcaaaaaatctctttcgagttcgccgctaatgctgtgtgtcagttttgttaatcgtaactgacacataatactaacgacaaacacccgtcgctaatgtcctccgttaataggattttaaaaataaaaaataaattaaattaaattaatagattatataaatatataaataataaattaaatataacttaaccgattctaaatattataatttaacactagtaatattcattaatactattccaaattcttaaattaaattaaataaataaaaattacataatatttataaagtctgaattattaaca

SEQ ID NO: 54588 - DNA, 2569 bp, Cannabis sativa
aaaaaaatacaaatacatttataaaatataaaatattaataaaaataattaataaattaaacgggtccccgtcagggcggggagtctcatcctggtccctgccccgtttaacattcggggacaaaatttgatccccgtcctcgccccgttccccatttagacaggaaattcccgccccattaggggtgggtccccgcggggcaccattcccatggggaaaatgtgcatccctacttacaatacaccggtttattaaatctgtatagttttaatcgtctttctagtggaggtttccaagtaattttgctgctagttttttgcttatttgctccaagcctctttgttccagtttgctcaaggtatggatacacagtacaattggcaattataccagcgagtttggatacctgcagatacctgctcttaataggatgggtgcagggtcgaattttgacggcgggatcagggacaaatataggtttaaatgttcatatttgagttaggatcgagacaggggtggagaaataaatacctgtcccgaacccgccctgatatgatatatttatatattgaacttctaaaattatatctactacaattaaaataacttcatgttttagactttttattgattacattagtgagatatttcaattttcataataatgtctgtggtgatacatataaataattacacttaactgtttaaaaaaaatgatactgaacaacttattttctattaccaatttcgtatttactaactttatttactgtacactattctactttttttttagtgagtttttatgatttgttaaaaaaatgagtttttatgatggtttttttaattctcttataggcatcattttatttttcgaaaatatataaatgtaatgggaattcctcctcctgccgagtaatcctcgtcccgtccttactttaatttaaacgagtattagagtgagtattaaaataaatttaagaagcaggtatgggaatcggagagcaatccccatccccaccctaccttgcctcgtcccgccccgtttacatcccaagacacactatctgtttgttgagaagtgtgagagatttaaccactagagtggacataaggggttcgggagagtgtgcatggggtcctgggatcgaatctcaagttgggcaatgtaatgtatatataaacgctttaataaaaataaataaaaagaagtgtgaaatatacatttgttgtcgaaggaatttggacaacaccaaaaagtagacaaataataaatattcaatagaaaaataacgagtattcaacttaaaacagcgaatgttcgaacaagactgcccagacaatagaacgaaatgagaaaatataatgaacacaaaaatgtatagcggttcagtcaaatcacagtctgcttagtccactgttgcaaggaattttgtctagtttgttcatgttagatcactcctttatatacaaaacaagtgtccgtttagttacacataacttagtcggttatagttccgttcacaattaatattaatattaacaagcaagtgttcttaattaactattttgtaaggcataactttttttttggtaaggtatacttaaaatatttaagatctgttgaatatgtgaacttaaattttaccaaaataatatttataataaattaatgagtaatttacggtataaatatttaagtttaactctcagttgcaaataaatatctaaatttaattttttgctgtaaaaatacttaagttatactttttgaactctctaagtatctgactgttcaatattaagtcattatccacgcgtcattttcttattggtatatttaaattaattttgtttttaaaataaaaatttaatgacttggaccaatcaagaattgtcatatggcaatttacttaacacttaacagccatatacctataaaaatttcagaattataacttaggtatattattgccaaaattaaacttaagtatttatttacaactaggagttatacttaagtttttatgccacaaattactctaaattaatcatagttttttataatgaaatgctaagggcatttatagtgcctattaccctttatgaagtgtcataacctattagtacaatttaatatcgaatcccacttattttacttttaataataattatagaaaaccaataactatttatagagtgtcacctcatgatgtactaaaagatcatggtgattaataacaatgcttattcttatattattagactcatttggtacgccatataagggtcgtattatattaaagaataataacattatgtttggataaggtaatgtattgtattacttactacgaccaatttctttaagttatttaatacataacaaattattcgtattagcttgttttataatatttacaaaggatcccactcaaccccaatcactgacccagtccccgactggacttgggactgggacccgaactttgacttgggacccaaacccggggcaggatccagaccaagaatcagacctaggatccgaacccagacccagacccggac

SEQ ID NO: 54589 - DNA, 1825 bp, Cannabis sativa
  modified_base (1770)..(1771): a, c, t, g, unknown or other
atagtaggtctaatatattgaataaatccaaattaaactaataaatatacaaaatacatccagtggatagaaccgatccaatccaacatccaatagatgttggattgattggatgactgaaaataattggatcagatcgggtagtaaaatctaacatccaagatataattggatcggatttggatagacctaaaaatattagacgtggtccaatgaacaagcctaagtaaaagaatgggatgagtcaattgtttctcattaattggtaatagagtacaaagatgtttatatacaatgcacacacaactcatttcaagttatgagtcaataacaaactcacaacttaaaatcttaaatcttaagttttcagtcactaacaaactctttgtaaagactgcttagttttaatttggaattagtataattagggcttaattatgaaactagattattaattaagatttataatttttatgtagatttaattaaattcaagttgtattatttatgccatatatgaaattttatgtttttcatgttttgtgtccaacaacattggaacgcaacgtttgtctaatagaatcatattttagtattttagttttagtggggcaacttagatatacattgggaatgtcagaaatattcgaggttttagaaatgaccaagttacccctaggtgataaatgtactttttggtgtgtaagagcaaaatagtctttttgccattaggaatatttgccttttagtgagattaaataagttaaacaatctgattttaaatcattatgttagttagatattatcaaaaaataaatcattttattcaattcgaaaaaaatcaagaaaataccatttctctctccaagctctctctctttctcgagctccctagaaaccagcaagaggttagagttttcttcagcaattctaacatctttgtcgaggttccaatcctaggtaagcttcctagctcatccttttgtgatttcttaagtttcaagataacttttcttgcatgttttgtgaattagggttctatggttttaagatttgtttgcttttgtgttttgaagatatattgaggttatttgagttattctaagttgttcttgttggttgttgtggtattgagagaggtttaagtttatgaactcaagcttctctatctagtggcggagtttgattctggttatgttgggttgtttattgcatggattttatctattatggtataaattggtgatctggaagttattgtgtagtttgggatcaaagtgagtaatgtagaaggttttgagtgtttcctgcactgaaccggtcgaccagttcagtgggacctgtaggaactggaattccggttggtccccaggaaccccactgaaccggtcttctaattggggaaccggtctgccggtttgggcagttttgggaaccctagtttttcctgtttttgtgatatttaaggtattgccatgttatcaatcgatagggaaacttttattttccattttatttccctgaaaagatttttagtgggtcactcatcagtttttcaaataatgtgacttagggaccagtttatcaccaagcacccgttctattagtataatgatatgcttatgtatttacatgtttagcgtacatatttgttaagcctgttagattacattagaatagtggtatcagtatatttaaaattatatttgatatcaatgaatgtatgttggcttaagtactatttgatagtatcacatcggtacgactagnntatgactagcgtaccgagtataggatgatattatatatggtcaatagtactgta

SEQ ID NO: 54590 - DNA, 2628 bp, Cannabis sativa
  modified_base (171)..(175): a, c, t, g, unknown or other
tatatattatttaattaattttataaaatgaccttatttgaaatttaaaataaaaatattttaatctagaaaattttaaaaatctaaccagatattttttcaactttcaacttttgttattttatttaaattaaatttaaaattagataaatgatatttatttatcatttnnnnntattagatatttaattttattttcttttaaaaataacgtaaattttgaaaagttagttggccgttttgaatagatatttaggtttgttaaaaacttactttttcaaatttataagtctaattttaaaattaattatttaatttaattttattattatcaaaaaagaataatttattacttagatttttcgaaaataatttaattatttaattacttttaaatttaataaatcctatatctaactatccagtttgttgcatgtgtgttttatatattgtttattattaaaacttttttttaataaaacttattattgtttgatctaaattgccatgattaccttgttgacagatcaaatgatctgattttaaccaatggttcaattatcaataggtcaaataaataatttgtaacaggtaaattttgcaatctactttcatctgtgtatatacctagtaacatgataggatctatccaaatcagtgtgtccctgttcctatatgtttggtttgggcttagatacatatagggagcccatttaatttttgtaattaaaaaggactaggttgctaaataaaattgtcacatatgatagattttatttaggtccaattagtattgagcctattcaatgaataaaaattatttaaattaaggttaaattcctctctgtcaactgaagtttttggtaactgattaaatgatatataggaaaggttgtaggaagtttaatgcatgagatttttacgtggtaggggcattaatgagccatggtccacgagtcttttttattaatgagagtctttattacagagaatgttcttggtgattttttctcctattttctctctttgattcctctgaaccgagaatccttgacccctctctcagtgtatttgtggggtatttatagtgttgttctggggtgatccctaggaatgaatcacttgtctttctgtgcaggcttcataggggcacatattcccagcagaatcgaaataggaaatacatgacctataccgtagatatcttaggggtcaggtggatataatcttttatcccttttggattgatgtgatttctcataaagtagccgtcactagcctcattaatcatagtataatagttgagaaaggggggttacgccatctgtcatatcgtttatggtagtttcaatacgtcatcccccatgcgacattaaatgcgaggtgattgttcaatagagtccagtacctctcggaactgccttaatacgtccttgggctccgggagcgtgaaagtccttctcatgcctcctctgagaggcaccttcctagaggcgctcctctgttgtctaagacttagatgatttccttaaaagctggtcctctcagttccacgtgtcgtccttatccaggcccacgtattttgggcaaaatgaagggcaacatttacccccaagccttgttttttggggaataaacaaggcttgtttagtgcctccgacaggctcatcgattctgtggcttgtgcttcgggcgcgtgagctgcatttatggcagtcatcattaatatttatttccttctgcaggcaacgattcgcttcccgtccattaatgatccggcgcatttaatcgatgttagaaaaggtactcaagcatttttaaccgccctgatgagcatttatcccaaccgttggatctgcagaatatgaatggattacgattcctactgtatgatgacgcctgatcacagctgccttgcactcgttctggcctataaaagccaggctttttccatcattgggttactttcaccactttgccatttcacctcaagaacactttcgagagaaaattccagaaaccatagatttcttactactatttctccgcagctgtcaatcttcattctaccgttgatcaacactaacccccagttctcaaccttcatgtaagttttttgggtactttatgtttttgttgttcatttgcatgctagggtagagttcttggttaagtgcttgatttctaggaaatggctttggcaaagactgttgttgtggtgtacatcccctctcttatttatgttttgttactctcttttctttttttttttatttcgcaaccgacccctctattggaagattacttgagatatgggacagttttcgttcccacgttccgcgtctttcattttccctctgctttcgctgcttttgagatattcgcacccgatgcttgcttaggaaaatcctttaaatttccatcttaggcaaacatccggagggggcctctttccagcggttaggggacccccattccctgttttaacaccagggtttagtttgggggctgactgctggatttttccttttacagaaccaaatttctagttctgcatccggaaccaaatcttcccgcaagggggaagtattggaaattattttaccaggatcttatatctactcacaa

SEQ ID NO: 54591 - DNA, 1366 bp, Cannabis sativa
tatattaataagtaaatccgattatattgaaatgagtttcatttagggcataaaacccaacacctgcttatgtgggctctgagggctctcctagtcttttgtatcccagtatggcagcaagcattccatgaattaaatctccctagtggtagcttgaaataccactgttgtgcggctcctgtaagtgtggcaggaataccatacactgcacatcagcccgtactccttgcaaatccatttgcatctcaaaatatttaagatgtgacaagggatcctcttttcctgtgtacatcttccaggttggcatcttgaacttaaggggtagctcaaggacgttgatctcgggggtgaagggtgatccgcgtgcttagtctagctcaagatcaatgagttttgggtcggtcaggccatgaaccatatttttcagttgatctaactgtgcttgcatagatggatgaaccagttcagcctcttgaccgactgtgtcacatcaggatctcttagagctgggtcctggatgcgaatacctggctgagtggctggttggatgtattgttcgtccaaacctcttcttctattcaaatcattcctgatctcatgggttgcacccaatctattgaatgcggaagcaccaggtggcctcaatgtttgactggtttggcttgtgggttggccagagttgtcagtttggatgaagttattagctataactccacctaacgaacggtcagataggatctagccgtctaccgcttggcccacaagtgggacctgtgactggggattggatggatgaccattatgagtctgggtggtatgcccagcaataatttcttctgtcccgcctagtgggatactgacgtaacagctggtggctgattagcaacttgataggctttctgtatcagtacagtagcctaccttattcggtcatcgatggatgcttgctgagccttcaatgtttccatctccttatccttccactcaatgaactggcgtcgctgctcatcgaacacaaggtttattgcagtacagagatcctcctgatcatggtgcatggtgtaagtatgaccttgcatgagtccaagggcgtcatgaaggttttgaatctcaatgtcatccctcaccatcttctaagcattggttgtgaatgggattctagtgctaggaatgctttgatcggctacagaactggtattcccagtctcttgcacacctggtgtgatcccaggcagaagggaaatcacaccttggcccacaataggtggttgtgtgttaggctgctcgggattggttcttggtaagactcttgtattcccaagggtttgcatagcacgatctatcaccattgggtcactttgatcaa

SEQ ID NO: 54592 - DNA, 1070 bp, Cannabis sativa
accgacgggaatttgggattttttagtagtgcttcaaggccagttttagtgttcgggatgattttcgtggctagtgtagattgtttaaaagtgataaaacctattttggagctaatagaagctaaggtctaccggttatgggaattagggttattcctgaaattattgattaaggtatttatataatgttgttgtcgtgacataggaccaggatcgtcaagttttgtttttcacttaggccggcacgcacgcttaatctctggactgaggttagaaaagtattatgtaccgtttatggttaacgattataattgtgatattctcgattatgattgagattccaatatatgtttgttgtgactcaattatgatcgaggaaaatgatatgaaacgattattatcattgtgactcgattatgatcgagggaaatgatatggattgattattatcgctgtgactcgattatgatcaagtaaaagatatggtaattaccgttatgagtaattactcttgaaatcgcggataggtttcttacttatcgttcgccgtatcgggcaacaatagtgacatacgtagctcgtggtttacgagtggtaagggtactttatgaagtaccaggactgtgtgactacgatgttgtaaaattgattaagcatgttattatgtgatgaggtgtaattgaatacattttgttatagtggactaaatgaattttatactgcttaaggagttagtcacttttcttgttatatctctatgactcacgaaatgtatgattacgtgattatagggatgtcagattgagtgctttatgaagcactgagaatatgtgattatgtattgaacgaatatctatttggtataacaatgaagtgattgactataagatactatgattattcttataatgtgtaatgaatgtgtttgtatagatgttaaggtatatatacatgctgagcatgtaataacacactaatatgtatattatgttgtgaatgttagcactttctatgctttttatttagtagcttttcttgttgagtcactgtgactcacgggtgcttcatgg

SEQ ID NO: 54593 - DNA, 1023 bp, Cannabis sativa
tttaggacataaaacccaacaaaaccaacaacggttcgcactgttttatccttggttgttactcataattggaatgtgtctcagttggatgtgacaaatgcattcctcaatgggcctttgaatgaaacagtttatatgcgccagccccctggatttgaagattcaactcacccaactcatgtttgtaagttacaaaaagctctatatggtctcaaacaagccccaagggcttggaatgatcggctgagacaaacattggtgtcctggggttttcaaggctctcgtgcagacagttcattgttcatgtatggcacaggttcaagtcttgtcattctccttgtgtatgtagatgacatactcatcactggaccaaattcagccttggtttcgaaacttgtttcagatttgaacaagtccttttctcttaaagatttgggacaggtgcattatttcttgggagtagaaatttatagagacaatactggaatgtacttgtctcaaactaaatatgtaactgaccttcttgtgaagttacatatggaaggtgcaaaatcttgtccaaatcccacaagctccagtgtaaaattgtctttaactaatggcgaaccgtttccagacatcactctatacagaagcacacttggtgctcttcaatatttgtcacttactcgtcctgatgtggcatttatcataaacaaactgagccaatttcttcatgcaccaactacagtacacttggaagcttgtaaaaagttactacgatacttaaaagggactgtcaaacatggcttaatctatgcttacaaattgattataattttgagtatttataattaataatttggtccctctgaaattataaatacaacttatagtatttatacattatttctatcattttaatattataatattatatgatgttaatggctatttagttttgaattatgtttatgatagtattatacattgcatgattttaatctaacatgttatatatcaaaaaccttagaatcaaaggta

SEQ ID NO: 54594 - DNA, 1215 bp, Cannabis sativa
acggacactattaacagtattaagaattaaaataaagctgtgaaggcaaataaatgataattttttttgaaaaatggcaaataaatgataataataaaaagtaactcttttttggccatattatagatgctttctcattgaaatataatgtatgagctaaagtctgtaaatatatagaatactagcttcacattattgtacagttcatgcaaacgatatgcatttatgtcaattaataaatctaatgtttaacacgtttacaatttcaagtaacagataatctcagacacaaatacgcagtatcaataaaggttcttttatataaaatcaaaaatgatcaagaacttttataggaaggaaccaaaatgtaactaatacaaaaaataaaaaaaaaaaacctttcctactgggaaggaaaaaggtgtagcagcaaaatttgcagacctagaatcataaataatgttgtgtttaaatacatagctagtttcttagccatgtctacaagtttacgtttctttaatatgctcgcttgctaatgccagagctgaaaactcctgttcaagggacttcagcttggcctcgttgtcttcttgaattttggctggaaccttatctttatagccagaagcagtcatctttttccacaatttctctttttgcctgtaataatggaactcagttgttataagtaacacttgccaagcatacaaactagtaaagactttagatacaaaggcctatttttaagtcaaggtagacaaattgattaataacaagacctcttcactagtgttcagaaaaaaaaaaaaaaaggcgaaccatgaagagaaaaaaatcctttcatatgcatttatccacgacaataaaaaaaaactccacttgtttaataagtgaaaaactgagagccatgtactcagttgattattttccttataacaagaaagcaacattcgagaaagctagactaactgaaattattgacacttacttttggacctcctccatttttttcacgagcttttcacgttccgcctcagcagaaagtgatcctcggagatcaagatatacagaaatgttctcatttacaacagatacagcacatccagcaggagcagcatcagtttcactaaatacctgtagaaaaagaaagaaaaaatgtttcattatacaaacttgacactacattgttcagatggcaagaaagttaggcaaaca

SEQ ID NO: 54595 - DNA, 1325 bp, Cannabis sativa
aattgtgggaagaaaagaaagagaaaaagggttatgaagatttgctgatagagaagacgcgtgagacaaaatgagagaaaccaaaaggtgtgctgatatcatcaatgtagtatttttgtaatttaatactttttgaagcttaaacagataaaaatggttttgtaaaaatgtttaaaaaattaataagcattaaaaatgtaaaaaaatagttaaatttgacacacagtgtaaaaatcccgagaaaaataaaaatgaaatgtgctaacaaaaaaaaggtgtacggtgcaatttcctcttgaattcaaaaatataaggccgtcatagcgttcccaaaccccaaaacgttcgaagttttcgcggggtctgacccgtaaaagaaaaagaaaaaaaaaacgtttcgcggttttttttgctgaaatctgaggatccagcttctacagaatgtgtttcaccgaaaataattctttttgcgatccacctacgccaattagctcaatctcttaatttgtaagctttctcttgtattcatttaagttttttctccaattttcgctagtaatgtatagtagattacatatcggaacagttatcataacaaatttaggggtttccttttaatttttttttaatgtaggttttagaataaaatagggatttttatgttgcttgttgcttttctattgtcgaaaaggcattgctggtttcagtagttgctaatgttcacctggaagtaagaatgaaatgtagaatttttagattgtaatgtgttttattattgggtaaaaattaaaactgcaaaatgatttcagctaagcaattgaacggatcagttatttttattttgcttgaaggaaattgaagatttgtttggttatttagaaatgggaaacatagaagaaatctggaagttatagactcaacagctctactcttaggagagaacaaaaatctgttaattttgacatgagtcctttttactatgtcaatgcaggtattatgtttacaagctttcatttgttgcaagtgtttaacttgtgtttgaatgttttgtttttctttgtctagaaaacaatttcaaacatgaatggcaatagtatttcttccgaagaagatgttgtctcaaaacttattgaaatggggtttgagaattccattgctgtagaagctgtgaaattagttggtccatccgttgatgatgcagttgaacatatcttgaacggatgtcgtagaaacagtcataggacaacaagtaattctaccagctctgagaacaatgtcaaggctttggggaaaagaaccatgtattcctcttgtgtctctggtca

SEQ ID NO: 54596 - DNA, 601 bp, Cannabis sativa
caagatatgcaatttatttatgtctaactcgaatgggaaggatcagctgcagactcttgagtgttgcgagatgctaaatccaagccaaatggactaaaagtttcacaaagtatactttttcttccatgtctaatatcatatacatacaagttaatttcataataggttcacaattttgtcaatcaatttaaaggatattactacttatgtgatgttggatatcccaatggtgaaggcttcttagtactgtatagaggacatcgacatcatttaaacgattggaatgtcccacatagtactcctactgaatttttcagtatgaaacattcttttgctcgaaatgtagtagagagagcatttggactattaaaggaacgatgaaaaattcttagggtcgatcatactatcctgtaaaaattcaataaaactctatttcaagagaaataaaatggtacataaaaacattaatttacctcctgacttggtggtgaattgggctcatgaatttttttttttggaacttccaacatagtcgggctcgggctaggcttcctctctctttgggacaagcagcctctttgccttctgatgaggttgtttc

SEQ ID NO: 54597 - DNA, 1150 bp, Cannabis sativa
attatcgaaactaaccaatttcaaaattatttctctcaccttactattttgatggattaaattaattacttaatttgttattattattgaaattaatattttatttcacatcaattattaattttaaaatgctgataaaaaaataaaaaaaaataaataaatagagtggttttgaagattttaaagtgtaacattaaaaaaaaaaagttattacacattattttaatctttttaggttattttttctattaatttttagcttaaaatatttatatattataatattttgtatttaaggaccgtatcccattatcataaattattttttcaaagcaagattttgtttatattttttgactgtatattttaaaatatatgtacttcaaattaaaatcatgatttgatttattatatatatttttttatttcagtcataatatataacttaaaataattgattttttttttaaaaaaacaatgaaatatctccaatagaggcacatgtcctttggtaaaaattaatatttttaattagatttgtaaaaaaaaaaaaaattcatatgtgtataaatgtagattttttttaatgttttattttacagattaaaataaaataaaaaaaataattaaaaaatcagaaaaataattttagttaattttatttgaaaccgtgactatacaaaatatttgaattaatcctataaaaataatatttaattaataaaattataacaatcactcttataaaaataatatttagttaataacattataagagtgtatataaaataataataaaattctataataacaatacaattaatatatatttccagtttaaagtttaaactattataaattgaatatagtcataaactcgatgaaatttcctatattaatatatcgatatattgatatattgattattatgtgtctttttaaatttatacaattgataacatagattagaaaaaattaacaaattttttttacatagtattgtttttttttttttttacaaaagtgcttaaatgttatatagcacttcaataaagatgctattatattcaaatattactttaagctagcttatgtggtgagaaaaattatttgttatatggggataaaagagttaaaattgatattgtgt

SEQ ID NO: 54598 - DNA, 2507 bp, Cannabis sativa
ctgatcggacggctgttgagatgttagaagtttctctgtatacttggcatcatccacgtggcaaaaagatatacaatcacacacgtccccttcatcattcatgtttcaaaatcaaaatatagctaataataatgctatcggctcgtctgtaaatatcaacacaattcgttgttctttttgtcccccaacttactttttgtttattatttatttatttatttttaaggtactttttgtcttttctattcttttttcttaaaatatttttatctcaatttcaataatcttatatgtaaattaaatgtccgatacttatataagcttcccaaaataatttccactaattctcaacttgacttgtggttaataaggttaaatctcttgattatctttgttccctaatctagctctttgttttgttatggtcctagctagctaggaaagcaaatcattataaggtagaaaaaagaataaatgaagtagcttgaaatggtaatattgcaccctttctaaaagtcttatgactttgtattctcaggtatattaccaaacaatgaaaatgtattttataattaaaaagcaatctttgttttgttcttttgttatttttttatagaaatcatggcgcccactcatgcttacaaatcaactaatagaattttgacaattcatggttaaatatgttgcatgattttattatatactaccttattaattaaatattaaacaaaatatgttatctttttttttagtattaaatttatccacctaataataaaactaaatcccattctctctctacaaaatcaccacacatacacacccttgttggagcaccctttgccaaagtcttagcttgacaatcaagtgtgtaggagcaacccaaactccctatccaacatcattcttaaaaaaataatgggtatgtaatttatttaataattattgttagattaataagttgtatttagtatttaggttgaaatgaataaatctacacatatcattcttttattttagttgtcttgttcttgaaactcgagctgccataattctgcgttttttggtttttttttgtgttttagcgataatttgcaatatctagcgacattagagtatgataaaggtcagggatgatttttaacgacattctgcgacatgtggcgactaagtttatgacatgtgccaatttatgcttaccatagacgatttttgcaatttctgttgacattgtttgcaacatgtgttgataatttaaagtattgtgttggtttactagggggagcaggaattttgtcaacatgtagcgatgttatgcgacttgcttatcgacatggtttacgacataacttgcgatatttatcgatatagtttttattaactaatgtttttccttttttttgcagatttaactgtatttgtggttgtactatatgctggggcttgagcagttgaaagtttcagctggatattcaataacccaaagatgttaatatttgaggttgacactattttacaaaagatgcatgaaattttatatgaagagttggatatagaccctattgtgtatgaattgaatagaggtgtgttacatgtacacgaaatgcaatatgacaccgtcgaaagttttagagaaagatagtcaagtaagattgttcttaagaatgaaagcaaaaatgagtgtggatgagaaccttttgcccctgttaatgactaaggttaagaggcatgcgattttgcagcctactccaccaactgttcccccaagaagtattgttgggagttttattccagaaacagatccagtggtaggtttgaatgagcaaccccctactaatatagatgaggataggattgacaatgcatttgactagattaatgagtttgatgctcccttttacaacaatgatcttatggtagatttgaactaggatggtgatgtagagttgcaagttgatgaagctgtagaggtacatactttgaggttagaactacctccactacctccaaggaactagaggacagagcaagaaagaagaacccgttatagtgaaaatcaccaaacaccagacactagtagcagccggtcaggtcctcctcgtagtattgtaccatctaattttgaagtttgtacaaaattcaaacctattgtgtggacaaggaaagacatagagaaaaatagtgtttatacaacttctcttagtggtacaccttcaggagaaatacacgttgacaagttgtacacaaacaagactgaattaaaaaaaatatagtgggaaggttttctttgaaaatgaattttgagttcatggtgaggaagtctggcaccaatgtattttacgcatcttgtaatgattaaaattacaaatggagattgagggtgaagaagaaggcacgatgtgacatgtttgaggtcattgtgttccacaatgaacacacatgtaacctagattctagacatgctgataactgtcaagcaatactgtgggttgttggccaccttatta

SEQ ID NO: 54599 - DNA, 780 bp, Cannabis sativa
tcagcatcaactttaattttgaattttaatttagttcatcatattgattaattttttgtttagtttgatgtatcttaaatcacaaacattaagcaataaaatttacatttttagacaactttaaaattcgaaagttgtatcattagaacgagtatcttgaaaaaaaaataggccaattgataacttttgtaaaacacaaggtccaaaatagtatttactcataacaatattacacattaaagggtgctaaaatatattggtgtcatgtaacaatgtttaattattggtggcactacctaacactatttatgtcttttatcatttctctccaataaatgtgtccttcaatattagtgtgccgaagagtggatacggtctcttttgttaagttttttttttacttttctttccatataaatgttaattatactcacagaatttatttatggaaaatactatagtagatccttttaaaaggtatgtatttatatatttttatttgttttggtatctgaaataattttttagtcaattttttttatggtcgtgtatgttatagttattaataacatcctacaaaattttaaaaaattcagaaaaatttaacacgccaaaagcagggttcaaacagtgtgttgtatacgtgactattttattttatacgcgcgtgaaatatactgtttggactttctttctatattataaattattttgaatttctcaaaattttgtagaatatcttaaataactatatcatatacgaatatgaaaaaaattaca

SEQ ID NO: 54600 - DNA, 929 bp, Cannabis sativa
gtctgcgttctagtccttgacctggtccgattcctattctgattctgagatcgggtttggatcccggtctgggtctaggtttgggtctaggtacggatccgggtccagatcctggattcaaacacttactacgggttaggtcgaagcctcaagtctagattcggatctcgatcttattccagtttatttcccaggttttgggctgcgtcctatgaatgtttttgggtcgaggtttggggttgtgtccctgtagtaaggtcttgggcttcgggtacaaggttgtgtcccgtgtctcgagtctggggtcgagttttgggtctcggtcccagttctgcggcccagttttgggtctaagtcccccatctaggtccagatccttagtccaagtttggttccaggttcgagtttggggcctaggtcccccatgtaggtccggatcctaggtcacggtctatgtccatgtttaaggtcagctttggatcccgagtttcggtccgagtcgaggtcctagtatgggttcaggttttagtctgggtctcggtcccggtctgagtcctaggcccttttcaatatcgggtctagatcctgatctgggtcctaatcaaagtctaggtcccagaccaggttctggtctgggtttaggtcctgagtctaggtctaggttcgagtctgtatctggatctgggtttggggcctgggatccaatctctgtatgggtatgggtctatacccgtgtcaaggttagggtttaggatttatggttttgggtttagtgtttagggatttagggtttagggtttagtggtacgtgtaaattttttttgatttagggtttaaggtttagggtttagggtttaagggaccgcttcaagtctcggcttcaatttcgggtcacatggtatgatttaaggtttgggtgttggtctggt

SEQ ID NO: 54601 - DNA, 600 bp, Cannabis sativa
ccaattcttcacaatctctgaaagtccagacaataattgtgtctttccagacggaatgtaccgtttgacagactgttcattaggcctctttcggtgtatcggtggttgagttggtggagtcaaatgatctcttgaaactttcttctttcctttcatctacatcaaacaattaattacaatttcaaaatataataatattgacagcctaagatgcaaattttaaggtttttgaaagaaattattagcatcgaagagtttagaaaacataaagtcataaatgctaaagagaatgagccactctttcattattaatgttgataccttaaaaatgttcataatatagttgttgtgaaatctctcaaagatataagctaaagcttataaaaagaaaactagactaaaacaaagagcaagcaagcgactcacaagtcacaaccagtagctaatctccccaattttcaccaagttaattactttggtaactaaacaccttgttccatcatttaagtgaagctttctccttttacttaaacaacctaccctcaacccaaatggtcaaaactcatttgtttagcattactattaaaaagcttaatcaaa

SEQ ID NO: 54602 - DNA, 1028 bp, Cannabis sativa
gtgtaagaataaaattaaaaaatacatttttaaattgtaaattggatgctatacaaattattgattgtttctttctattgaggttgtttggttttttttttttctttatttttctttaaccaaagtaagaaataatttttatttatttttgtaagatattattatcattattattgagtttatatgtacataaaataattctaatatcaataaaaaatgtaatgtacatgataaattttaatttgtttaattttttattattaaagcatatactttctttttacaaaatataaaactctcacaaaatagtaaaattattgttgctatatttatcataaaattatataattaattagatactataaaatatacaaatcatattatgtaggtaatataaaaatacacaaatttaaaaaagtagatagaatactaataattttaacagtaacaaaattaatgtgtaattttttactttaacctaagaagataattaatcaaaactcacacatgactataggtaaaaagctcattaataattgaaaaagaagaagaagaagacgacgttgattaagaacacccaaactcttatttcttcaaatagtacaactacaaacctaaacatatataatataaatatataataagtaaaatatacaaatttacaataagcatatctatattttcagtagtttcatggtaataattttttttataaaaaaccaacttgatcaacatcatgaagatttgggttgaacatgtggtgatgaaggagactgcaacagatcgagtttagaggcagccataaatgtgagaaacatatcataatagcctttagattcacttagcaaaagaaaaaaaaaatagcctttggattattaatatttttagtagaaaactctctctaaaatagttggcatataatgctttggttgttcaagtaatttggcattagctagtatatatatacatatacatgaataatattaagagtccaacatttaacttatattttaagcaaaagagttatg

SEQ ID NO: 54603 - DNA, 901 bp, Cannabis sativa
acatactaactaaatgatgatcaatagataaaaatttaaaccacttctccatttcctaatttaatctaatctgtaaggaacataagttccaaacccataataattaatgaaagtctaactataaccccattctaataattcataataataataatccactttctaccaagttgaaaaataacaataataataataatttattctataaattctctatttccacatcgagctattaataattaaatattttggttattacaatctaccctccttaaaggaatttcgtcctcgaaatttacctaccagagaataactcagggtagtgtttctgtatgtccgtctccaactcccatgtcgcttctttatcagaactatcactccacaggattttaactaagggtatagtcttattccgtaagacttttattcccttttctatcacgcgcactgggcgtgccatataactcatctcctgctgcaagttcaagttctcgtacttaagcacatgtgtcggatcaggtacatacttacttaacatggaaatgtggaaaaaattatgcgtttccgctaatgttggcggtagggccaaacggtaagctacctgaccaactttgtccagtatctccaaaggacctataaatcttgggcttaacttccccttttttctgaaacgcataatccccttcataggtgataccttcaagaacactacgtcccctacagaaaactcaacctcccatctttcaaatctgtataacttctctatctactttgggtggtgagcatcctttgccgtatcaactgcttctagagcttctcttactatttgtaacgtccccgcttcaagcctccattgggttcttacacccacggaataaatggctcttatacacgagcacgt

SEQ ID NO: 54604 - DNA, 3024 bp, Cannabis sativa
tgacaaagtaaaacattgtggggggagtgttgttgagttggggaaaggattactctgggaatttttctaagagaatcaaggattgtaaggaagaaataaaaaagtggaagagaggccatgatgatgtttctgtccagaattataattcggctagtgcaaaattaaatgatatttttctgcaaaaggaaatatattggaagcaaagaagcaagcaactttggttgcaagagggggatatcaattctaaatatttccatgctactgccacggcaagaaggagaagaaactcgatccaaaaacttaaagattctgctgggaattgggtcgattggcagggggtttgtcttcggttgtggaggattatttttctcagcttttttctccatcagtagcagcaggaaataatgatattttccagcatgtttctgcatcagtcacggctgttcagaataataaactgctggaaccggtttcggatgtggaaattcgttgtgcgctctttcaaatgcacccggataaatctccgggacctgatggcatgacaccgggattttatcagaaatgttggaacatggtaggtaatgacattatcactcttgttcagaatttttttgttgttggttcgtttccaagagagttgaattataccaacattgtgcttattccgaaaaagaaacatccagaatctatgactgaccttcgaccaatttcgttatgtaatgtgctttacaagattatttcgaaggttttgactaatatatttaaagatgttttgccgaatgtaatatctgataatcaaagtgcttttcttccggggcgtcttatctctgataatatcatggtagcttttgaaatcatgcattatttgaagaggaaaagagccggtaaagaaggttttatggccatcaagctggatatgagtaaggcatatgatcgtgtggaatggtcttttattgaaaggatgatgcttcatatgggttttagtagtcattgggtgcaacttattatgttttgtgtgactacggtaacctacaatgttactcatggtggacatttaatggggcctataatacttggtagaggtctgagacaaggagatccattatctccttatttgttcttgatttgtgcggaggggttttcatcactgctgaagcattatgaaagacgtcgttggctaactggttgtcgagtagctagaggtgctccaatggtttcccatatgcattttgaagatgatagctatgttttctgcaaagcaaatgagtatgagtctcaaaatgtgattcgtcttctccatagttatgaacttgcttcgggacaacaagtatattttactaaatcttcagtcttttttagtaaaaatactactgtggctgttcgtgatcgggtttgtggtgttatgagactgagtgaggcgtctaatgattatttttacttgggtcttccatgtataatggggcggaataagaacgcaattcttggttttttgaaagaaaagatgaaaaagaagatctttagttggaaaactaaattcttatccaaggcggggaaagagattttgataaagccagttgctcaagtattgcctagctatgctatgagtgtctttcttttaactcatgacatttgctcaagccttgaaggtatgatggcgcgtttttggtggaaatcccagtctaactcaagtaaaggagtgagttgggtgagttggaagcgtctctgtcagcataagaattttggtggtcttggatttcgcgatcttagggactacaacttgtcgtttttgggaaaacaagggtggcgtttgctcaccatgggagacactcttgtgggacaaatctacaaagctaggtactttcctaatggttcttttcttgatgctgagttaggaaataatcctagttttatttggcggagtatatgggctgctcaagattagtgaggaagggtgcaagaagatcaattgcaagtggagccttggttagcattctaaatgacccatggctgccctgtgataataacccttatgtggtcactactcctccgggcttggttgataagcaggttgctaatttgcttagtattggtgagaggtcttgggacttggaaattatgaatgacatgtttgaggagcgggatattagtttaataagaaatattcagctaagtaattctcgagatgtggatagttggttctggaatatggagtcttcgagattttattcagtcaagagtgcttataagtttcttcaatcgtcaagtggaaattggctctttactcaagatgacaatggctggaaaaaattgtggcaaatttcagtacctcccaaggttcaacatttcttatggaaagcttgctccggttgccttccaaccaaggtacaactccaaacaaagcatgtgaatgttgatcttatatgtcctttgtgtaatatggatgttgagcaatttttcatgtgttactgggctacaatttttcgaattcttgctggttttttgctactgcaacaaacccgactggtgcttataatgattttgctacttggttttttgatctgttggagaacagtttggtggaggtggttgttgaggctgctatgctctgttggagcatttggaagacacgaagtgaagtgttgtggcaagggaaaaccaggtctgtgttggaggtggttcagtcggcaaaacgggtccttaaccattggaaaattgctaaatttcagtctcctactgctatgtatgctacgtgtgaatcttcaattagtaatagatggcgtaaaccagatgcaaatacggttaaggtaaatgtcgatggggctatctttgaatctcaacaaaaatttgggtatggtttcattgctcgggacagccaaggtaaacttttggaagctatttctgaaagtctttggggcagtgttcttcctgaaatagcagaagcaattgggattaaggaagctttgagttggataaagacgaaagcttgggaaaaggtggttattgagtctgatgctttagttgtgg

SEQ ID NO: 54605 - DNA, 1376 bp, Cannabis sativa
cttcatggatgcttattcggggtacaatcaaatcaagatgcatccaccagaccaagaacatacaagtttccgaacagattttggtatgtacttctataaggtcatgtcatttggtctcaaaaacaccgatgctacataccaagattggtaaacaagatgttcaaagactagattggacgaaacatggaagtgtacgtggatgacatgatcgtcaaatccaggaaggctggggggcatatagatgacatggacaaatgcttcaaggtcctcaagaaataaaacatgaaactcaatcccctaaagggctcctttgaagtcgatgctttatcatcaatgctcgaggaatcgaagccaattcagagaagattcaagccaacctagatatgaaatcgccaacaaaaacaaaggaagttcaaaggttgactaattggatttccgcactcggcatatttttttcaaagtcaacagacaagtgtgtcctattcttcaacattctgcgaggaaataagcagtttgaatggacagaggaatgcaaaaaagctttccaggagctaaaggcgcaactcacaaaaccttatgtgctctcaaaacctctggacagagaagaattagggatatacatggctgtcaccgaacatgctataagtgtggtactgatcagagaagaaaacaatatccaacacccggtctattacgtcagtaaaagactcattgaggctgaaggccggtattcattgatggaaaagcttacttattgcctaatcctatcaacgagaaagctaaggccctactttcaggctcatccggtttgggtatacattgaccaaccattacgccaaatattgcaaaaactggatgcctctgaacagttactcaaatgggcagtggagttgggtcagtatgagattatcttccaaccccgaacagcgatcaagggtcaggccttggtggattttgtagtcgaatgtacgggtaaagaagagagcatttcagaaaacaacccagagccagtacaaatacctcagtcgagtaatagtgaaaacaagcctactaggaaggtacatgtggacgggtaggccacagatcaactatccagtgcaggaattgcccttgtcacacctaaggggcaacacctgcatgctatagtcaaatttggctttaaggcatccattaatgaaactaaatatgaagctctgatcgccgacctaaaactagcccgcgagatgaaggctgaacacattgagatctgcagcaattcacagctagtggtaaatattatatctagagagtacgaggctcgaggggaaaagatgatagcctatctgagcaaaatacatgatctgctcgcacagttcaaaagctatgctctcaggaaa

SEQ ID NO: 54606 - DNA, 996 bp, Cannabis sativa
tctaacggtatttcttggtttaaccattttttttaatgttataattttttttaagaaaatagacgaaatattaacgtgaagcgttaaccatccctttctctatattgacacaatttttttttttaaatgacctaaagttgcagaacctcactctcaatcccaatcccaaatgagtatgaatttattttttttggatctcaacccatttgcagaaattctaatggcatagcatctcctactctatatttctacatttcacaacagatcttttccttattttcaatcgcagagtctcactctcaatcccaatccaaaaaaggaaacccaaaccccaatctgaatgacaaagaaccattagtcttcattgtccctcctttgaatggcaatggtcgatgccaaaattcatccttaccaccagcaatggccgcatgcagccccttcgcctcctccaaccagcattggtacaactccttctcccatccttgtggaaatccctaatcaatctgttactgatgaggttagtattctcttttgcttgatgcatttcactaaaatttggctttaaaatatcccaattcaagaatatcacgaccaaactcagtaaaaaaaatcacgatcgggttcgactcttgcaaaacccttttcttcccatatggacaatgaccacggcttggagaccgctagcgatggcgagtttggggatatcgataacaacgaccaccgccatccacatcaacaaatagaggagcagatttacactcccaattcgatgcatgggaagaacaagttgtttcctgcattgatgatgatgatggatcaattaagtttgtcttctcagacctaaaataaattatggtttttttacagcctttgcccatgcatgtggctgtggctctgattgtttacttccatatataaatataaatagagcttagagagagagagagagttattagatattaagagattcaccaatttcttttctttggagtgtaa

SEQ ID NO: 54607 - DNA, 1504 bp, Cannabis sativa
agtacaataatcttgatcatattataccattttactttaaaaaaataaaataaaatgatgaatctcaggtttactactcaccacaacaatatgttatatatagagaggtctttaatgatgaaagagataaggatcttgacacccattaaacagtgaatatataaaaatttgaggtgtatatatatacatgtatatataataaacatatgaattgagtagtatttgatcacacaagtactagccaacacatgcaggcatgtgatacaagaagaggcattttaaaactactgtttgtactgttacaatgatcatttttttatatgaatatatatatattacatatacggacgattttgtgtttgtatggttattatagctacaactaataagtaataactacatattataattcaagttccatttgagccatatatcctaaatacaattacgtggctcacagttaatatacacatttatatgtcatgtgtatataatagaagtgaaacagtgcattgtgctttacgtcacattagtgaacagagtatataatatatatatatatatacatacgtacaaaatatgctactgtcaacttcttattataattttgtagttaattttggtgtttaaaaacacatattgaaatatttcttttaaaattttatttcatagcggtattcgttatagttataacatcatctctgtaaatttttgaaaattttcaaataatttattgtgtcgaaaatatcaagaactctattttctagtataaactattcgaaattttataaaaatttacaagaataatattgtaactataacggatattactattaaaaaaaaatattctaatatttaattttggggtttaaaaattaacaaaaaaaattataataagaagatttaattagcactactttataaaaatatataataagaaatcccaaacacacatggcgacgagaacgcaggtgcatgtgcctcttatcttataactaagtacattacatccatttaaattgtactcttcatttttttttgttaaactttactatatatatttctttaattttaattgtgcaacactcaacaaacattaatattgttactacatttcttcaaatggtttaaatattatatatatagtaattattaattaatcttcatgccctttgatctttccatgagtaaaatgtaattaattatttgacattcaaataacttatatatattcaatcacaataaattataatttttttgattaatattaaaagaatagtattttcgatttaagttgtttttaatttatggagtttttaatcacataagtgttgtattatatattaacatatattcaatcacaataaattataattttttgactaatattttgtcacacaaatttttaagtgaacataagtgtaatagaattttttcaatcatatttttacttttaatcacaaattttattttaactacagtacttcagccaaacaaattcttt

SEQ ID NO: 54608 - DNA, 1796 bp, Cannabis sativa
aaataattatttttttatgactaaaaatatgtcctgcgactaaatattagtcgtaaaagctaactattagtgactaagttgatttagtcacaaaaatttagtcgctgaaaacccattttcttgtagtgccagctgaaagtattttttataatattgttatttttttttttaaactgaaaaaaaaaacccctaatttctatctaatccatgcttattttgtttatttgtagtaaaaataaagtataaatttgcaacaatatttatttatttattatatttattttttaatccaactaatatataatttgtttatgtgtagttaaaatactattgttccttcaagcttgtagagaaatgataatgagtttctaaaacaaattgtatgacgctgatgatgatattgattggaaattgttaccatgattttacaaatgtgattgcttttactaaaccagagttccctactctaataactttaagatcattgtaagaagtttttacaaattttgtatatagatttctaactatctgtgttgctcatggattagttgcacatgttctttagatggatgaacaacttttgtttggctagatgaatattcatattttttgtaggatgtttagtattattttaaagatcatggcatgtgtaggatttctttgataaacatgagatgtatagtattcataactagtatgtatggcgttattatattttcaatagatttgtctattactttcaaaaataaataaattagtaaaataaaagatctcaataagttatgttaatgtgggagaaaattatcatctataaaattattgtcaataatagtactaaagttagcatatgcaataactaatatgagatagcaaagatcatcatattaaatgtgttaaaaattaccagcatacattttatttttggccaaaataatatgacgcagtctaggcaagtttactcacataaagtaaagtataacttatagggtatgcaaataaatatttgtacaataatatgaatttctaatgagaaaattacatgtttacatatttgtacacaaagtgaagtgttgtataaatttacatagacatgagattgattaaaataaggtttatatattgagaaaatataatcatgatttgattataacctgaaatatactttatgagaatttataagcgtcacataaatgttgcaacaaaaattatttatttggagctcccataatatattaaaaattttaaatatcttatctaaaaaaataattttgaaacgtgtcttaatagatataaattcaaagttgtgcgcgctatatagcaaatatatttgtatgaaattaataaaaacatataagtaaattattatttgaaaatacacgtataattgtctatacaatataaattcataaattatatgttgtaatagacttttaaaagtttttgattatattgtaaaatactaaagagcaaattttttatttgtttttatatattgagaaatattaaatgtatgcagtttgttcataataaatatttgtataaaaatcctaaagtacatcacatgcatcaaaaatttcagatatatgaacatttgatttaaaaattaaaatcatataatgagaatagaatatatgcctggtcttgcaatactatcattatcacaaataaaaatttatattattatcgtcaatgtattttgtctatatctacttaaaattacaaactttagtatgaaggatattgtatacacacacatgaatgattcaataagtttgataaatattgatattctaaga

SEQ ID NO: 54609 - DNA, 1236 bp, Cannabis sativa
ttagattgaaaaggtttaagagaagaagtaatacctcttgaagtcttaacattagacttcttatttccaattttcttcaagtattttttgaaaattctttgcaagaaaggccatgtcattatcaccaacttcatttgacgcttcctttccagtacttttgaaagaaatagtcttttccttttccttggagatactcggtttctcatttgaacggatttattgattttattcaaaggtacgaagagaccctgtcattttttctactttcatagtattgaaattcttagcgtcttccatagccgcgagctttacattgaacctctaaggaagtacttgtactatctttctcaccacaacagaatcatcaagtttctcaccaagggcaaaatattcactataaatgcagataacctttcatagaattcagatagtatttcagactcagtcattcttagatcatcaaacctagtttgtaacatgataaatctagatcttttaacatcttcagttccttcaaactgagttcgaagaatagtccatgcatatttagcagaaatacaagtagaaacatgtttgatgaaactttgaccaacaccattaaagatagcatgaagagctttattgttataactagacaacttctcttctttagtagtcaataaatgtttagatataacctttgtgctaccatcattgttgttctctgtgggaggtgaccatccagacaaaattaatttccatgctttttcatcttgagctttgatgaaagctctcatcctcactttccagtatggatagtttgtgtcattgagtagcggaggacaaaataccgaacttccttctgcaaagaaagacatttcacacaagaaaccacttaaatggaaattaaacacaagatctcactaagtgtttagtgaactgctctgataccaattgaaattctatttttaataactaccagtgaaattatcaaataatttaaataatgtcgaactgcaataaagttgtttgaatagaatctatatctgttctatcaaacacagaatctgacaaaacagaaatatactgtagaaagtaaaatgcagaaaattaaaatgacacacaacattttatacgtggtatcaacaactcattcgaattgctcctagtccacaaggccacgcccagagaaagaaatttattagatgaataacaagtttttacaaaacaaaattaacttatacaaataaagactcc

SEQ ID NO: 54610 - DNA, 1543 bp, Cannabis sativa
atcaagggcgtaccaattacagacacatacagggcgattctttcatgaaaaatagggttgtagcgttccaaatgtgcatagtagtcagcctgacatacaataatatgcaatagctttgaggctagtgaatgttgagttattagactgtttcaacttgcaatgcttacatattcaaatcatttcaaagtgtgcaatagatagaatatatgtagaatttgtctttatcttaatacttttaagtttccatttggaaacagagaaaatgtactaacacaatacttctcaagtaaattaatgcactacatatttatactgtcaacatgaggatagcccagaaacaagattcgataatgtagaatgtactttatcaaatgactttgttgaatccttgttttgaaccatgtcttggcaagtgacaacacatctataaacttgaaacaccctatttgatgcccttgctggttgagatacatccttaccccttaccaaaagaaacacacataaattgcaaactaagaaaacttaatttctgacattgttttatagatagggaatgttggaccatatgtaacctgaaattaaccattttaaatagctttggaagcttgttcggatccacaaaactgtgaggaagaagtttaaatatctctcgtgctccaagagaaactacatagcacaaaatatatttaaaatttgcattatcacaatagtatagaatagaatatggttacaataggtggtgaaattggagtaattttcaatgttaaaaataccatttcctgagccagtaaatacaaaaccaaaggacaaattcctgctggcaagcccagctgagatgcgatctcttcacccactgaaattactgcagctttggccgcagccaaagatgaatacatataagattcacccaaagaaagaaaaggtgttgaatatccaagactcaaataccttgaaaacaaaaacaaacaataaagactaaacaaatagttttaaataataattatactgtgccagaatttccaaaatggtttcagtaaaaatggtacatacgcagtccaagcccgattaattatctaatagaataaatgaccagagattcagaagaaccattaatatgaaaaattctaaaaatcattaaaacctacaatttgctcagttggaaccagattagttaatgaaataagaaggaaaaaaggaaaaacaaactcactggaaaattcgcataccagattcgttagcgagttcccaaactggatttgattctttaccaccaactccaacgatccaacttgctccaagcgctacttacactccacctaaatcctctttctatattctccagtttcgaatcatgatcttcttgctgctaaaaaaagcatgaaaaccagaaattgtttgattgaaaaattcagattcaagtggaaactttcattatagattgaaagaaaaactcaccactaagagtcgttacctattaaaaatttagaaaagaatgtctgtgatttttaggaagaaaaactcaccatcgattgaaagaaaaact

SEQ ID NO: 54611 - DNA, 1384 bp, Cannabis sativa
agagcagtatgaatcaagattaaatgcgtacaatgaaagatgtgtcttttagtgcgatcaaattaatgtgagatttttttttcaatgatcaattctatcataataagaagaacaataagaaaaatcaatagtttaaaattggtgacaatgttgcacaacaaataacaattagatcactacaatgttaagaaacatactactttcattgtattagaagcccaccaatggcccctttcaaaaaaagaaagaaaaagaaagaaaaaaaaaagcctagttcctattttttaaaaaaggaacataattattcaacctgataaaaaataagtgttgattttactaactcatgaaaagggaagtaatatccaaaaatttgtttttctcaatgaagaagaaaccaaattttaagtagttattttattcaatttcaatattaataatctcattccatcaatttgctcagaaccacaagcaataacaaatcaaatataattatgtgtaaattgtcaatcaatattcaaatcactcatgccaatggactttccctcgatctctatttcgaaataaactttgtgggtcactttttctaaatcaaaacctatccctattaaacactcaaaaaataaaataataaaccattctttgaataccaaaacaaagggtccaattacaaaaacaaaggcatagaaattacctcataaggctccttttcgataacaacttgcacaaaagtttcgcttaatctgctttgatatcagttacccaaacatcaaacttagaacaattaccatggatcataataaaaaaggggatctttcacaaacccattatcctctcaaattaatatagctaagaaattacaattctacattttcttcttcaaggcagccttcaattatattatgagcaactaattttgaattatcttttttctataccacatcatcatagagaatcacaattgaatcgtatcaacaataaatgtacagagatataaaaaggccagtttaccccattataggtgctaaaaacgcttaacattcaaattgataagacaataaagctcatccaactctgtagaagataaaatggccatatcaaactgtacgatatcctgaggaaagccatctaagtattgcaaatcagggtatgtttccacaagaccatcaatgaactcagtcaccacatctacacctaccaccacaagaacatcataacattatataatttaaacttgcatcagtcaaccctttaaagaacattaatcaacaaaaaattatcaatctttaaaatcaacaaataatagcaataacatatatataatatcaacaaaattattctagttttattttagttttcccagaattcaaaacaaaaacaataatga

SEQ ID NO: 54612 - DNA, 1216 bp, Cannabis sativa
tcaattccaaagctcatacactgcttggcgtgcccttgaacaacgatatgccagtcagtcgaaagcccgtattctccagatcaaatctcaactttcgacaattcagaaaggaaatctttccatttctgactatcttgacaaggtaaaacttcttgcagattctttgtcagtagctggtactccaatggaagaaaatgacttaataatgcacttgctcaatggattaggccctgaatttgaccctgttgttgtgcatgttactagtcttgttgatgatctatctcttgaatctatccaatctttactactaacacatgaaagcagattggaaagacattacaacttagcagattctagcaccaagatttcagcaaatcttgctgttggttctgtcagatctgcaactggaactctcaatcgatactctgcaccaggaagaggcaccaattctcaatacaacaatcgtgttcctccaagaaactttggccgaggtgccttcactacacaaagacttatctgtcaagtttgccacaaacttggacacactgctgcagtgtgtcattacaggttcgataaaggatttgttacccccaaaattggtgactctcgtgcattcctaactgagattgatgaacctgatgatcatcaggcctactcctcctccatgctccctgactatgccattgatcaagaatggtatgctgatacaggtgctaccaaccatatagctcttggcatggaaaatcttgatcatgaacaaccttattttggccaagattcactcacagttgctaatggtaagaaacttccaatttctcatcttggtactcattcaattcttactgtttctcaacctttaaagcttaattctatccttaaagttcctgaaataaagaaaaatcttgtcagtgttttaaagctaaccaatgataatcccgtttttcttgaatttcattcaaaatgctgctttgtgaaggacaaactcacagggaatgtcctactcaaagggagggttaaaaatggcctctacatgcttcccaaccaacccacttcagcaccagatttagagcttcaatgtcacatggccaccactgaggcttctacctcagacaacatcgagtccaatgtatctggtctagagtctaagaattgtctttacaattgtaattctgctgctttaccagctgcctcttcttgtaataatactggcattaat

SEQ ID NO: 54613 - DNA, 1175 bp, Cannabis sativa
tggcaattaaatatttgatggctggttggttgtaaacaatcaccttcgttcccacaagataagatcggaacttgtcaaaagtaaatactacagcgagcaactccttttcggtggttgagtagtgtattgagcattgatgagagtcttgcttggatagtatatagaatggaaaatctttcctcttcgctacccaagtacaccaatagaaaaatcactagcatcacacataaactcaaatggcaaagtccaatacggagctacaataactggagccatcaccaatgcctttttaaaagtcacaaatgcctcatgacactcctttgtgaactcaaatggtcggttttgttccaacaatgaacaaagaggctttgaaatctttgaaaaatcattgatgaaccttctatagaaccctgcatgtccaagaaagcttctaatacccctgaccgtcataggaggcagtagcttttcaataacttccgacttatccttgtccacctcaatacccttgtgagaaaccttgtgacccaaaacaatgccttcttttaccataaaatgcccaattgagtaccaaatttgtttcttcacacctcttcaacactttctccaaattagctaaacaagtgccaaaggattccccaaatattgaaaaatcatccatgaatatctcaagaatgctctccgccatatctgaaaaaattgccatcatgcacctttggaaagtggagggagcattgcatagcccaaatggcatcctcctaaaggcgaaggtgccatatggacaagtgaaggttgttttctcttggtcctccgacgctatagaaatttgattctagcccgaatagccatcaagaaagaatagaactctttacccgccaaacgatccaacatttgatcaataaatggcagcgggaaatgatcattcctagtggcattatttagctcctgatagtccatgcataccttccaaccagtcacagttctagtagaaatcaattcattgttcttattagccaccaccatgattcctcctttctttggcacacattgatcagggctaacccatgaactatctgaaatcgggtacacaataccatagtccagacactttattacttcttttcgcaccacttccttcataataggattcaacattcgttgatgctcaatggagttac

SEQ ID NO: 54614 - DNA, 757 bp, Cannabis sativa
attcataaattaactctaaataaactacaaaatatcctaaaacatatactacttttattaatcatgtaaaatatagaaaaatataaaaggattgctcttagtttttatatgagagagagagagagagagagagaggagaaaaataatcagccaaagctcactaaaaaaatataaagaagagaaaaaaaatttaacttttttttttttgatcaagaaggaaaaacttcattaatcgtacaaaactaattacaaatcgaagctatgttagcaacaacaaaccagctaataattacattgaagcttccttgaaaaatcactttccttacaaattttttttccaattagttacaatttacaatctatacaaacaagctgtccttatgtctgaagcagtatgatctatagacttagtgcagccctcacaaatacacttattccagttcaggcaaatgtttgaaatagaagcatccaagacattcacatgtatcaaatgcaataaacctttggttttcgaagccaaccagccattccagcccttataatccataggccaagccctataccccaaccaatcaaaaatcttatccaacactctttgggaaaactcacgcaaagaataaatgatcatgtaattccaaggccaacccgcaaatcaaacagtctatgacttctaaaaaaatttgaaaccttatcattttatctctggtaagtaaatgattattcactacttgccaaagcataaaacgatgtttaggaa

SEQ ID NO: 54615 - DNA, 1212 bp, Cannabis sativa
taagagatattagactccatattgagcatgtggcactcaactagcacctcattattaaaaaaagcaaatagttatttacaaaaaaaaataataataataactctagtaatgtaattttttaatgtatttttttataaataattttttttataaaaaatacattattatttcttaaaggagttattctacatattattttttctagtaatgtatttttttttttaaaaaaaaaatacatttatgtatctataataaaaaaaaattcttacaaaaaaaatatttatatactaatcaaatatatatattaaatcattatttttttttccaattttattgaaaagtaatcttttgatttctaaaataaaaattatatatattataatattttatttattattattcatttaaaaaaaaacgtaaacatattagtaataaatttgtattaatataatgtacattttaataaaaaaaaataaagtaatggcaaaagtgttattgatgtagtacttttctaggtgtcatattggtattggcgtaattaagtatcatgtcttatataatttgattaataatttttagagagtatcactaactaatcataggatttacacatctagatagtgataagccccactaatgcttaataacaatgctatataacaaaatgtaagtagaaaataaataaagtataaaatgaatgcttaatacttaatatatattttctatcttatcaacaaaatatataactattttcttataatttttaactagcacataaataataataatagactatttatgatttttaaccccaacattgacttgtaccaaattatactcaaacttttcaagccattaaaagttccctttgaactattgagatcgttggactcaaggattttgttcaattttactaacggaaatcgaacgtggataaaagtttagaaggcacaatttgatacatgtgaaagttttgagggaacactatttggtacatgtcaaacttcaagaggcacaatttagtacatagacaattgttggcttaaaattgaaagaaatttgacaaaattcgttgaatccaacactcactagttcgggaaaattttttaatgacctgaaaagtttgagagacatgatttggtatatgtcaaagtttacagagcaaaaattctaattagcctaaacaataataatacaaactttaaaaaaaat

SEQ ID NO: 54616 - DNA, 805 bp, Cannabis sativa
atcaacctcaagtttttggggacttttgccgcaattatccctttgcaaaaatcgtctaagatattattctctgtacccaaggcactataacatattaagaggttgtaagttaggagataatatcatatactctgaccacattagaagtcaataaaaatattatgtttcaatattattaggcctttaaaaatatataatatttttgagagagatcacaatgctccacttttattttatccgactagtaaacaaaaccaaagaagaaacaaaaaataatcacgtttgtaggattttgacccttttgccgtacaccaacaaaactatataatatcagtatcaaggtcaaaaccaacctttatttgtctaaattaacccttagactaaaacggcatcgttcgaactccacgacaccaaacttagtgtcgtactgaactttgagtttaaagactctgatcgaagagtttagaaaccttagcatacacacaacacacaccctgcctcacaaactcgaaaccctagattctaagccagaaacccagaatcacacccacacacgaatacaagttagattaaatgagtgaaaaagaaaaataaggagagaaaacaccagaaatttgtttcagagttcaccaaaaaatagggctacgtctctgtcaagctcgtctcagagattagcttgatatccactatcatcaatggttggttacaaggttttggagattcctgtgacagaaatcgatcaggtaagctcgatttctttcttttacactttatgttttgttctttcacttgatttgctctcgat

SEQ ID NO: 54617 - DNA, 1892 bp, Cannabis sativa
aatgccaaattgtagtagtgttttagtcacagcaaaaagttatttgtgactaaaatataatatttagacacaagttgtcattattttacttttagttacaacaagtattgtgactaaaaacacatttaatcacaataatttgtgatttttgcgactaatacttttagacatggactttttagtcacaacatagtaatgatagtttataattagttacaactattttacttttagtcacaagtacttgttgtgaccaaaagtaaaaaaaatttagtgtgtctcaagatatttattgtagattggattagattggattggattggattgagctaaaaataattatattagattaaattggattatgctgaatgtaattttgtgtttgattttaaaatgcatattggactattaaaaaaaattaaaagaaataaataaataaaaactaatcaaatttaaaatatattcaataataaataattataatagaaaatttaaattaaaataataaaaatttaaatcacaaaattaaataataggtttttataaaattagaaatcaatatattatatgaaaattaaataaataatatatcatcctttaacataataaaaaataaaaataataaaataaaagtacagtaatatttaattaattattttgttaatttaatataaatattagtttattaaaattttgaaaaaatatttataataatttaaagaaaatatactatgtaatatactatatattatatttattagaatacaagtatataatttttaattatagccatcttaaaattgtaatagcctatatctatgataaatcaatattatactattttttatcaatttaaataaataaatttttgattataaatctataaataaaaatttcgttcttccatttaaattttttttataaaatatatttacaaaattaaaaaccataaaaggaaagataaaaaaagttaattttatcaagaattatttatctcacactactaaataagataaataattctataaatgagattaactaaattaattattcagaattgccaaatattagactggtgaaattatatctagtccaatctaatcatgcttgttaaaggagtcttaaaaataacacaaaattatattaattgacgtgtctatctctgattcgttgcacaaggaagaggatatgattttcggacacaaaattatattaattgacatatatatatataaataggaatattatatataaagctaatataatatctagaggatagagagatatttatacatgtgcttgatttgggggcaatcaatatatcttacagcattaattgcatgcaattattaatatttatgctagcttgtctgtatttgtaagaagcctatattatgggtttgtttggcataacttatacttttacttttagacagtagaagaagagaaataaaagtttgagcttttcatttagtgtttggattttaattttaaaagaacttcttctccatttgaagagcttttataagtgtttggtagtaaaatataaaagctcttacaaataatatatatcaaatttaataataatagtaataataatataattctttttcttgtttaaaaaaattaatcttaaaaaataaaataaaaatatataaacgtgtcaatggatttgtgaagaagaatagaatggagattattttggtgagtcttcatggattaactccaagttaatgatgccatcaccattatttttacaagagaatctgtgtttgtaacattaattaacaaacaatgagattttaatgtttttcaaaaaaaaaaaaaacaagactttaacgtaacaataaaggaaaaaaataaaaaattcaaaaaattaattatttttttac

SEQ ID NO: 54618 - DNA, 1103 bp, Cannabis sativa
agtattaaactagtttataaaatcacacaagttgcatccctttagattagggcattacaacttagtatcagagtagccatggtttcattggtcctgaagactagtcgaatgtgtacatttactgcgaagaccggtcgactcgtggtataataagtgcttatattatttgctattggattacatgcctaggctatgataaattatgttgggaaaagtagtatagtgatgattatgctaagaatatgtgtatggtatgtgcattttgatgttgatatctgtctgagttctaaatgcttagaagatgtagattaaatgtgtgacaacttatacagtaagggcaatcgaattgcctgattagtgaactgtctaggctcagggcaaacgataaggaagagaatcctttattgccataatattgggaacatgtaaatttcgctatgcatgatatgattagacaataatgggaaatagatccaaaatctgagagaataataggctcgtcttgtgtctattcttgtactaccgacacttcatgttgtaccactggatgtggtgaaatatatgtagccaacttacgagcagatcagggagtaaaaacttaatgaaccactaattatggggtaggaaaaaaaggttctagagtaaccagcatagcggtcaaggtgagaataagaaatggcaaccttattctgagtgttcaagatgcaaaaaggcaccatttgagccaatatagagcaagatcttattttcttgtggggtagtgggtcatctaaaaagagcctacccacagttaagaaagactaatgttgaaggagaaaagtgtacgggtcctgcccaagtgccagttatgactcaaggggactcttttatcggtccttcagccgactcaacctagaatttgatggacaatattacaattgctatttcaattgatatagatattaaacattttacattcagttagagcaagaaatttgaatagactctgtaggtatgttattaagtggtaacccatttttcggggtagaaagattagagaaatgataatatgagttaaattttcagatattccaaagtacaatataggatatgagtagctaatg

SEQ ID NO: 54619 - DNA, 1001 bp, Cannabis sativa
aactttcaaaagctgataataattctctttttccactagaaagttaagcattgcaaaagggaataatcactatcatattacttctgtcttttttgtttaagaaacagtacgcagtaaatgtaccttgtggtggccaggcactttccagagggtgaaaaataagctgaatatacagctcttttgtgtgtaactgtcttcaaagtcttaggcttatctgtattaatacttctcaaatcccaaatgcaagcagttccatcagagcaacttgttgccataaagtttggattttgtaaattaaaatcaatggagttaatcctgtcaccatgcaaactccattgagttgcacagcttccagtcctctcatcccacatactcaagttaccatacccctcgccaaaatatacacactttgcatcatttgatcgctgagacagtgagaatatagctttattgttatcagaagaatatactaaatcaaacacctccttttcagcatccatcaatcggatatatccatcataacaactggtaaacacctgcacttgagcaaaattaatataactttaaatccaaatgaacatacaaacaatttccattgatatgataatatttgtctaaaagactcaaaaactaatctctgtttatcaagcgtgattgtaaaaagcctagagggaataatactaattaaaagttacctttgacaaggaatgttggtgaatcgaaatcccagaaacagggcctgagtgagtatgatatgaataaaccccatcatcttcttcatcaatcccattcgcatgatcaagattccaaaacccaacatcaccacccttgctcccagccacaacaatactagagctactacaagggaaaaacttcacagacattattcgattctggacaacccgagctacattctctggattcaaagtcatatcaacccaaatcctatctccaccaaactctgttcctaaagactgacccggttcagatttgatcccagt

SEQ ID NO: 54620 - DNA, 692 bp, Cannabis sativa
cgatctcacaaactaaatatatactgtaatatttttattataataaataataatattattggtatttaaatttatttattaatttaaaaattctattcaaattaatatactagaagataatgattcaatcctataccattttttaaagtatcaacattattctcttcaagggtagttataatgctaagggaataacattccaaggctaaagactcaaaacaaacaaggtaatgtttcacattactattcccttgttagcattaacccattccaaacacccgcttagagttttgttttaacaaattcatatgaaattcttttcccaattttaattattaattatgttgtggtatttgtaagtcgattttgcatgtatttttctactaattggtattttttttttgaaactactactaatttgtattcagcattgatttttttggtccatttttctactctctgtttcaatttggattgatactttttagagcttatatatatatatatatgggtatgctcttaatgggtattacccatatatgagtattttattcttgaccattggatcaaatatctaatggttgttatttataatcattaattaaacattaaaaaattaatatttcttattttgttattctctatattcctaaaatagataaaactattaatagaaataaaaaatttataaa

SEQ ID NO: 54621 - DNA, 937 bp, Cannabis sativa
tcaaacaaaatgaaagtatatattagagtctcatatcatatataaaaaataaaccataaaaataccttacatattaatatgtgagtatatatgtgagaacaaaggaccttttagtagtttacttagttaaggcccaaagtattgtcacttttattatagtaatagatatatatatttatacatagtaagaatgttattttactatggtgtaatatatacacaatatatgtatatgaatataataaatgaaaaaaggaaaaaaaatatataaaaatatatatatcacagtatacctgtactagagaaatgctaattacaatctctaattacaacatgttagttaaccttcacgttcgaaatcacatgccgaatttttttttttttttcaaatttgtttcataacagtattcgttatagttacatggtatcatccctataaattttaaaaaattctgaatagtttacagtaccgaaaatagagttcctgatattccaacttaccatacgcgttcaaaaaacctcaaacgtattttctgcactgtaaattattcgaaaattttcaaaagtttacagagacgattttgtaagcataacgaacacctccgtgaaaaacaaaatatttcgacatgtgttttcgggcatagaagttaactaagaggttgtaacaggaggttgatgttaagtgttagttaggattagtctgttattttcctggtttttctatttttttcggttatttcagttacaaagctatagttggcttctttgcctataaatacatgtaatttcacttttgtaatgacataagatacaactcaataaagctttttcttctctgaaatcctctgtttctaatatggtatcagatgaaataatgtgaagcttcaagcagtccccttcgagcttcaagaaccaagatcttccctccacaatcatg

SEQ ID NO: 54622 - DNA, 969 bp, Cannabis sativa
gtttgcattctgatagtcattcttagtcatattctgcttgtttgattcttcttgatgatttgtgcttgactttccattacttctcttgtagaagtagtattctctcttgaaatgccctagctttccacagtgataacacccattaggatttttagtgccttttgaatttgatctccctttgctatggtgattgtttctcttatgagaacctctactagtgcttctgcccctattttgccaagatttcttttgtgtaggccttccactgcttaggtttacatccccattagaatgtccaagtttttcaacctttagctccaaatctttggatatcagagctgagattacttcttcaagagtaatttcagttcttccatatttaatggttgttttgactttcctgtaggattctagcagtgaattgagaattataattgcttgattctcatcacttaaggcttcattctcccctgagtttgctaactcaatatggaatctcaagaactcatccaagttctgctccagagttttagattgactcattttaaatccaaagatcctttccttcaagtaaatcttgttgatcaatgatttcttttgaaattgttcttttaactttgtccagattttaggaggtgtgtcttctttatcaaccagctaattatagaatcagataggttgaaaattatcaatccagttgctgttttaagcaattcttcctgttgagccttggttgtgtcagctggccattccacagggtcacttagaacccttagcaatttattctgagccaatagagccctgatattcttcctccaaattcgataatcacatgaaccatcagatctgtcaatatccaccttcattgaactcataattatataaagttatttcaagaagttatagagataatgggtttagaaaaatcctaatgttgattttgtgacatgtgtgatgtgtagcttgatt

SEQ ID NO: 54623 - DNA, 3037 bp, Cannabis sativa
gagttggttggtatctttgccacccaattctatcagcacttgggaggaattggccctgaaattcctttctaagttctttcgtcttgctaagatcgccaaactaagagctaaaattaacaacttcacccagcatgacaacgaatctctttatgtagcctaggagagattgaaggacttattgaggaagtgccccaaccatggggttgaaaagtggctgcaagtgcacaacttctacaatgaattggttaggaatgcctgcacactcatagatgctgcagttggtgggacttttatgaggaaacgtgctagtgaggcctttgaattacttgaagagagatggccatgactaaccaatagtggtcaacagagagagtccaatctaaaaaggttgttggtatgcatgaagttgttgctataatcaagttgacaacccaggggccttaacgaagttggtgactgcataagcaaaacaagctcaagttgtgtgtgaattgtgtggaggacctcacacttctgacacctgccctatagatgtagacagtttgcaaatggagcaagcccaagccattggaaactatcagaacaacaattatgctttcaaccaagggggtcatcagtggaactttcaaaagcagtttcccaaccagcaacaacaagggttctacccacagaaaaattaatctcagctaagccaacaaaatcaacagcaacaaaaaggctctagtggagggtctaattctcaaatagactcgctattgcaatttatgacagagattaaatcttccattaaggtcttggaacttaggtggggcagttggcttctaaaaacactaacagggctcagtgtaactttcctagcacgaagttaatccaaaagagaagtactgtaaggcaattactttgagaagtggtaagaactatgttgggccaagccaagataaatcagaggatgaagatgatgatcaaccagcacctacacaaaagaaaagaagaagactactaacgctctttagcaaaaagaaacttctcctcctattagtattgatcatcacacaaaaattccttatcctcagaggctgcgcaaaaataacatgaataagcagttcagtaaatttcttaaagtatttaaaaagctacgtatcaacattccctttgcagaaggtctggaacaaataccaagctatgtcaaattcatgaaggagattgaaaaagatggaagaatttgagacagtagctctaacagaggagtgtagtgcgattcttcagaagaaactctctcctaagttgaacgatcctaggagttttaccatatcttgcactattgggaggctcagaaacattcatgcattatgtgatctgggggccagtatcaaccttatgcccttgtcaatatttaagaggctacaacttggagaagttaattaaacctacaattgttatactacagctagctgatcgttcattagcctatccaagaacactttaaggtttcacgctttgaatcctaaattgtgacaaatatataatatccatgattttagtggtcaaagttcacaatttaacccttgttagtatataatgcttacaaattatcttttaatttagactacaaaattttatagaatgcatatttaaaataatagaataactattataataaataaaaaataattataataaatgtaagactatatcagtatatatgtatataaacaatagtatgttcatggttatgctatcatcaaatgattaatttaataaattgtaaaacacgaaaataaatacttagcatccatcattcctcgttgaccatccattctaatttagatgcgagatcaaactttaaaagaatagttaattaataacaaaattagactaagctaatcacatcattttttatcaacgattttctctcatttacaagtaccaaattgagttcttaaaaggagaaatatagggtgcgagcttataatgcccactagaaaaatatttaatatcaaaggaccaataatttattgataaaaatttatgcatgcttagcttttaaaattaaagaatcttatcatcatcatcatcacgtattaaaaaaaatagtgagatcacaagtaatcacaagagacaagctatttgtacatatcatactgttttctagacccctagttttcagtatcaatcatagaaaataacatcataaactgagcagtcgcgcctgataaccactagaataccggaggctcaaatttcattaatttcctatacaaattctcggtcttttatctacacttgagtgcacacctggtttacctatgatgacatagagattaggttatgaaacaacaatatgcacaaatcatgatcaacatggctctctataaataaaaaaaaaggcgaacaattataaaaaaaagacggtgttccaagtaatattaaggatcttgacataacatatatcaaaatgacacccttagcgagtagatcacggatatataacctgctagcccaaacaagcaccaacctcataaaaaaaatacttccaaaggaaaatcttattactaaaatttagtgagttgccaaaaatgacttagtgatcgatattcttttcatgactttgattccaactgtaccaatcattcctcaaatggtcgccgaagttggttgtaatattgacttaaagtttttaacatcaaaactttgcaccactcgtatgagtgcgtctcagtttcaattgtcaccgaaagtgaggtgtgagatcaccataggtcaccaatcgcactggtccaatgcatttaaaaaatgacgcgcagctgagtgggtagtagatctaagcttgtgcggtgatggtttgtgtgaataataaaagaaaaagaacaagttgtcaagggagatatatagaagaaaaagagtcatttgactcatgtgagtcccactacaaaataaaaaatatatataggtggcgtttggtaacacttttttaattaattttttgtttttaaaattagaaaagtgaaaatatatatcactttcaatatttttttaa

SEQ ID NO: 54624 - DNA, 688 bp, Cannabis sativa
aattaattttaaattttaatcatctaagcgattcaacattcattaaatattgtattaaatcaattctatctatttaatgtatattgatttaatttgagttaatctaatattttaatcttaattttttagatcggatcaaatcattcaatattttaaatccaatatttattggattagattagatcatttaatcaaaaaaaaaataaaattttaatgttaatttaaatatatatatatttgaattttttgacgtcccatccaagttacaacattcgattcaatctaattagatatctaaaaatagcatcaaattcaatctaattacaattagatattcaatatttggcgctcgattgtcattcgatttaatataaggtgtatattatagttatgtaagatatctcgtaaaattttgagaaatttaaaataatttacaatacaaaatatagtatttaaatagtttaattcacacacgtcaaaaataaaagaatcctgcatgcaattatttactatttgaatattgttttcaccacactattacaaaaactccctttagaggcggtttttaagccctttcagtgttagtttttgcgaacttcgctaccgacgctgattagggcgacgctaaagggtttatacaaaccgacgccatatgtgtatattataaaattttctaattttatctaca

SEQ ID NO: 54625 - DNA, 1933 bp, Cannabis sativa
atgatgtatattttttttatctaattcaatgtaaaaagttaatatcatgtcaaaaaaaaaaagttaatattatattcataaattaatatattaaatataatagcttttaaatgatgaacttgggaagataaatacacattttttatgtatgacaatatcttttttcgttgaacgaggaaccttgttttgtcctatttatttaaaaattaatatatgtataaaggtaaatctatttttaatttaaggtgctaatattgggtatagaatctaattaatagaaattacccaatataataaagacccacgtaattaatgggaaaaattttcaaaataattattagtcaattttcattttatttttttggctgaaatttgtggtttacatggtggaattttaagtttgtaacttctcaagattacttataaataaaaataaacttcaaataattttttatttgatggacacaagattgagtaaagaatttagttaattcaaattaccaaatatagtacaatccatgaaataagtaggagaaatcaatttaaattaaattttcaaaataataatggaaaataaaagtaaaaaattatatatcatgttgaagatatgcaacctttggtattatttatggttacaatttaaataattaatatattagaaattccaaattaaagtgaatgggttctatatatataccacatccttaaacaattattttcacaaacttctattgtactctctcctcttctcttctaatatcatttatattgtctcctaaaatcacttctgtttatcagtcatagatatagatcaatttgtactttttcaactgcctattcactacataatcagtgcgctaaaagagcaattgggtattctcaagagttttgcaaatccgagactcaccacatcccacgatggattcgaagttgaagttatcaactgtagtatcgagcaacaaaagaaacgagaagctttgtctacaagtcttattggacttttggagaaggagatcgatatgtggaaagaacaactgaaattgcaaatttcgatatcaaaatggtacatgatttcgtgactcgttgtgacaaagaaagatatgtacagtttatgcattccatcatatgtagtgagtcaatgaatctgacaaactatgagttggattaaacttgcagtaaacttatttagaaaaaaatgtataagtagatatgtttatttttctcaattaatgaaattacttctttgttctttcttctattcttcttttttttttatttcatctaatcaaaattatttacttaatccgagattctatatattttttaatatagttttttttaaaaatacaatatgttcatttagtattcctaacaaataaaatattttatttttctctaaaagaaaatattttattataactttctttaaaaaattaatataatattttattggtgacatctcctcggagaagattaatttaataatacttattctcaacacgtgcaactttttattatttcaaaaataggtggctgtaaattatgggaagtggaaaagattacaacatgtaataattgtgagttattgaaaacataaattatcttttgaataaactaatctgaaaattatgtatccggcctcattttaaataaccgagaataaggatttaaaacaattaaaaaaaaatataaccatcaatgttaaattaatatgaacggtcccaaacaaaattattaatatattatgaggaagccacgagtttaagtaaatgtattgaaaattaattaaccttattttattttagaaatattaagcaattagaaaggtgtgaggactcatcttttatttctctcttaattttcccacactttcaatgcacccaaataaataatgtaaacccataccctaatattttaagtagttcatgttaat

SEQ ID NO: 54626 - DNA, 1387 bp, Cannabis sativa
  modified_base (525)..(532): a, c, t, g, unknown or other
ttaagtatttatttgtaatcaagaattaaacttaagcatttactccgtaaattattctaatatttcttttattttttttatagaatagcatttaaggattttaacaataatttcctcattaatttaaggaatatttacaccaaaaactcttactttttatcaaactttacatttatactttgacaagataatttttatgtttatactttccctacctatttttttcttactattttttatttattaaagcttcaaaaaaactttttttcttcttcacttttttatatcttttttttagtcattagttgatttttttttaagttagttgttgatttgtttttgttattctttcttttctctctctatttcttttttttatatatttttttccgattctttctcctttttttcatcaaactaattaataagtattcccttcgaatgcactcttaatggttattacccataaatgggtaatattataaatttttgagttttttataattaatttttctatttaattannnnnnnntctcatttttacattatatgggatgggattggtccatcagctgaaaaaaaaaatattaaaaaaaatgttttttggcaaaaaaagtgataaaaaaattgaatttgacttaaatatttttttatatgaacatattttttatatagtgtaaaaagatgtattttttgatattttctttaattaagtagctaaattaaatatagaaattcaaatttctctttcattatttgctatcggaccaaaatccaatgatttaaaatttttaaaattaatatttatagttaaatttatttattacacattaatggataatacccattaaaaagtattccctttatatatatataaatatataagaagtgtacatttttatatctcggttttttaacatttttacattctcacaaattttattttattattttgttttgaaaaaaaataattaaatacaaaaacttattctatttctttttctctctcagtcactattgagataaccgtttctattaataattccttaatgaatcatctattatacatgattgtgatagaattccctatcatgtatatgtttgaatagtaattcaaacctttcaattatatcttatttaattcataagttatagaactaaatcatattttaattattttaatataattatagaaacactaataagtcactattgcaaatagttacttatgtattatttagttaaaataaataattaatacatttaaactttattttataattatactatgagtattgaagtttgatttagctgcctttgcacacataagtttgaaattaaataaacattattgagaaaaaataaattgttcaaaataaaattattt

SEQ ID NO: 54627 - DNA, 918 bp, Cannabis sativa
  modified_base (645)..(646): a, c, t, g, unknown or other
tatccaattcaatttatttttaaactaatattgaaagaacaataataattaatgcaaaaaacgatgtcaacaataatcatattagatgagatttggaccccctttatatccatatgattgtgttgggtcgcatcatcattatttatacatgtaaaaagaagtcctcggtagcttagtggagtggagttatccaactttttggggcctcttttgtatagtttaagaccacatatttttcccgtcacatcaattcaccttcggctcaatcacttgtggctaaaatcaaacaaccaactaagactatcaatgtagttttttttttttttttaagcttttatatatattacacaatgactcgaatttaggatctctaacacacatgcacttttctatgactacttaagctaacatcaagtagtatcaatggagtgttataaatatgacaatatgatttattgtcattttttataatactttgttaaaatttaactccagtcataatataaaatgtatttattttaaaactagtacaaaaatgatcattttatattatttactatttatattgtcttttgtcataaaaaaaaaaaatcaataatattttttcatattttttttagaattaaaagtaaattacttaaagannatggtatatctatattagttttattagaatcttttttatttttaaagttatgtcgattttttttaattttgtatgggttgttgtgggttttcagtttataaattttattgcacagtgtatttttattttgttatggtatattattattcttagataatatttgtttttttattttgctatgtataatagtggtatataattttattagcacaatacaaacattttaatgtatgtatataattttagtagcatgctacatatatttaataatt

SEQ ID NO: 54628 - DNA, 937 bp, Cannabis sativa
ccaacaatttagctccagtttattcttctattattatttttaaatatgttattagttaatttttttttgtaagattttattagttaaattagatacctaaaagagaagtaatgatgagaacatctttggcaactcataatctattatgcttattttaatcataaacactcaattgcaatatattgtaactattataattatatataatcatattattataagtatgttactttttagaagaacaacaacaataattgtgtgtatgtttaaagttacatggatttatttgctccaaaaaaaaaaaaacatatatatatttacatcgcatttttcttttttgtgtgtgtgtgtggatttataagtgtgatgtgtgttgtaagtggtgtcaaatttattaaatattttctcaatttttaattatataaatataaccaggttgattacacaagtactattatcgatttattatttaaaaattagaactaatatttaaaaggggatttagattttgaatgcaaactattaaccttaaacaatcattcaagatcaacaataataaatattattctaatttcccaattaaactattaaccttacataaaacgctataacagttaattttctaagtctctctattacaattaatcaaagcgaagcgtttaataattatatctttttaccaagtaatagattcacgaagcatgtaatttatttaacttagaaaaaatattaatttttatggatatacattaatctagttaacaaatcaatgaaacatataattcatttaatctagattctatttttcatcacaattaataatatctttgacattaatattaattgcaaattatcactctacttagaatcctaaactattaggtgagaagtaattctaagatgataatagaacaatgtaaaactttaattagttgta

SEQ ID NO: 54629 - DNA, 851 bp, Cannabis sativa
  modified_base (645)..(652): a, c, t, g, unknown or other
attaatttcatattatgaaatttatcattaaattgattttttttggtgaataagaatcccttaatttattatcatataataattgtactattttgtatttatttttgcaaattattattagtacaattaatttagatttgtatgatttaaatgctatactgcattccatatatagtgctagatatgtttagaaaatatttaaacattaagatagactcaatatactatttagcacattaagtttcataaaattattcataaaatatttctaaaatgaataaaacatgaataaaacgtaagtaattttgtggtttgacataagaaagcataaaattggatcaaatgctcatatgtagaacggtttttaatgatcttcggatgaccacactaggagtactaatctcactgattgtctactatgttaataacgaaattgcttttagatagagcccaatacgtgatgtcaaagtgaaaatatcattttaaataattagggagtagctataacatctttaattatataaatttatatagtaattaaaattcaccataatggatataacttgtaattaattatataggtatgataactttatcccacaaggattttattatatttatataattaattaggataatatgttnnnnnnnnttctcttaatttaccccacaggaagttatggtgatctaatttaatagtgttatcacaaatttaattaagatagataataaaccttcatttttttctaaactaattgtttaaataaatctatcataaggttcatctaattttattaaatttaaaatttagccaacagataattttggatttagtaaaatttccatcttca

SEQ ID NO: 54630 - DNA, 1006 bp, Cannabis sativa
gtgttatattgaaataaaatctgattatgtaaatgtatgtataatatttttgtatgaaattgtataatattaggataataattttatttttcttttaagaaaagtttatctaatgttgtgaaaattgtgaaaaatatgattcaataaatattgttgttgtttatatgtgtgtgagtgtgtatatatatgtatatgtatttaggtattttttaataatagtatatacatatgtgtgtaatgtatgatatatatttgtgtgtatgtatatatatgaatatatatgtgtgtgtgagtatgtacatgtatatagtgtatatgtatatatatgtataaatttaggttaataattttatttttctttaaagaaaaattaatttaatgttttgaaaattgtcaaaaatatgattttttttttttttattgttgttgtttatatatttgtgagtgtgtatatgtatgtatatgtatttgtgttttttttaataataggatatatgttctacctgaactaagtttcgaccatagtcctatcttggtgactatttatgaaaatatgatctgtgggaggaagtcatttaggtatttcaacatgtggaaacaagctcttgagtatgatgacttggtaagcaaggcctggcaagaagatattagagggacgaaaatgtattgtcttgtgcagaaactaagaagattgaagatggtgctgaaacatataaaccaaactggttttacagacatacagaagacaatacttactacaagagaagcgttggctgatctgcaagctaaactgaacaaggaaccactcaatgtgggatttatgaatcaagaacaggaactaagaggaaaatttgcagaagttagtaaggcatttgctagcttcatggcacaaaaaagctaaggtgagttgagctaaatatggtgatgagaactcacacattttccatgcctctctaaaattgagaaggattcataacagatgtttctcgattgaggatgagcatgg

SEQ ID NO: 54631 - DNA, 2034 bp, Cannabis sativa
gtaatttgagtattttttcatcaagcaaagtatttgacgatacacttattatatcataaaatatagagactaggagttcctcagtattttcttataaaaaatgaatctaaagggtgtaagaagctagctatatgaatgatgtccctatatgtttattttaggcagaaagagatgggtcgaatgagtatgcaaattcccaaccaggctcacttaacaccacagatcaactcataaaagacctcaaaaactatgacatacttttccatattggtgatatggcatatgctgatggatacctttctgaatgggaccaattcatagcacaagtttcacccattgcttcagctgtgccttatatggttgcaaggttatacacatacatatataggttcaattacatgttcatgatttctatttatggttggttagtgatgtaatttgtacatataaaatttgtaattgtgcagtggcaatcatgaacgtgattggccaaattcagggtcattttgggatactactgattcaggtggtgaatgtggtgtgccggctgagactctctactatgttccagctgataacagagccaaattttggtaaactattgttgatatcagaactcctttaatagatttatggaatttaagaagtgatgataaaatattatcctatatatatggacaggtactcggcggattatgggatgtttaaattttgtgtagcagacagtgagcatgattggagagctggatcagaacagtatgcatggattgagaaatgtcttgcatcagcagatagaagaaaacaaccttggttgatcttcatagctcatcgtgtacttggctattcctctaactattggtatggccaagaaggctcattttcagagcctgagggaagggatgacctccaaaagctttggcaaaaatataaggtggacatagctttctttggtcatgttcacaactatgaaaggatatgccccatttaccaggtatatagccattgatttatatgtatctaacacattgttcaagggtacctaaagtccatgctaattgggcaaaagtaaatgataatcttgttatgtttgtgtggattgttttacagaaccaatgtgtgaacgatgaaaaatcacatttcagtggtgttgtaaacggaacaattcatgtggttactggaggaggaggaaaaagtttggccaagtttagtagcttgtctccggtgtggagtgtctacagagattatgattggggatttgtcaagcttactgcctttaatcactcatcactgctctttgaatacaagaaaagtcgagatggtgaggtatatgactcctttactgtttacagggagtacaaggatgttttggcctgtgtccacgacagttgtgaaccaactactttggcaaactagaattctatctaatttgtcataacctataattatcctgataataaggacaatgagaggagtgttatggttgaaacttgaactttgtactaagacttttgtcaaggagattgactagtaatatttatcatctgtttatctattttgagatatcttgaatcgtaagttccttactttcattggctatggtgataattacattaaagaatgcacaagtttattcaaatcaaagaactatgatcattccctctgtctcgactttatccaaagatttcataaaggtttaacatataaaatgcaaaagtaatgcaattatatggattgttgtacatctagctcaggtaaaatctgatgttgagttgagttctattgcagaagagaaacattatagttacagcaagcaacaagctttgtttgattgctttacgaagaatataaaaacgtgattgagaatgattaccagacttgaaccaggactcaaaatctaggctttagggctcctcgaaattgattaaaatctggttcatttgcggttgatgcttcctaaccttcatgagataaatgatgataggccagaaatgtaattatccacatggaacaaaaaccaaagaaaaagtagagcag

SEQ ID NO: 54632 - DNA, 792 bp, Cannabis sativa
tttcttaccatcaccaacatccaaagattcaattccagtgtacggagggagattcaaaagattcagatccattggtcacatgaacatttgctcctgtatccacaaaccaaagattatcatcaccaaggtcaggtaaaatagttgagttatatacttgatattcactgtccatttccatttcagtaaaataagcatgaggtggaacaacactagattttggtggaacaaagtttttgtcaaaacggtagtgacacatagcagcagtgtgtctactttcgaggcacagttgacacatcagacgattccgaaaaataaaagaaccacgaggacaacctttaccaatagttcttaaagatgagtcattggtatttcctcgagtagatgggagaatatatcggcatggattggttcgattgttaccaagagcaagattggcttggagcttcatgaaaatatttgtcattgtactatgatgctccagtctactctcatgagacatgagaagagcctgaacctcatcaagagacaaagaatcactttttgaagtgattccagaaactacgggatcaaattcagcacctaagccattaaagatttgaagaacaacatcttgatcactaatgttagaaccaacaatggccaaggaatcagcaagacattggaccttatccacttatataatcatatattgagagattgcctatgtgaacattaaagaactaaccttttagctgaagcaacctagcacgagattgactcacaaatctttgttccaaggcacgccagacagca

SEQ ID NO: 54633 - DNA, 4872 bp, Cannabis sativa
aaatcttctacttatacaatttactcacctaaaggggtttgttttttataactgtcccttaattaatatgaggactaaaatggttgctaattaatgtacatgttattagtgttttattaatttgtaactaattctcgtaagccatgcatgcatatttgatttctaaaaccatctttcttacttcatctctgttttttttttttgaaagaatatttcttacttcttatttctcccatttttctcattgttaagtcggtttataaatcaatctaaaacacaccatttatttattaataatattactttttttgacataattaataatatcactttttaaattacaaaaaaattaaaatatctaacacattttttctctcagccgtactctccagaaaaattatttaaccaataaaaaaatctctaaactatatcaccaaactgatcgtataattcccaaatatcacaaccattatatatttaagttttctcattttttataatttatataaattaataaaccaataaaaaaaatctgtaaactataaccgtaccacataccaattaccaaagtcaaagctaagattgcttatgatgtctcatatggctaaaatataaagaactatttgtagcttttacataggctacattaaaacatgtatgtaattgtcaagctcttatactctatctataatcttctcttctttcccttcttcatgcattaaccttttagtcttttttgtcaaaatttaattccaataatttggtatatatttttacagatcgtataaaaataaatatatagttaattctatatttaatttgttttacttacaacaaacctattaaaaaaatagtaatgactataagtaacatacagtgatgatgataatatttttgaatatagtgaatattacaaatgagatacagttatgatagtaaatttaaaataatataatgagttttccataaatttattaatagtctttgttatagatttttattttgtaggatgattttttttatttataatattttcttcctttacttaaatatatttatatttattttgtcattattaattattagatttcatttaaatataagtaagatatggtcatgaaaataaatttttaactcaaatgatgatgtgtaatatcttgatttatcaattattagaaatatgtattttaaattcatatttatttattcaaatgatatattcataataacttaattaattaattaaaaattattatttttaaagttcaaaataattagaaaaattaaaactaatttttttaaaaaaaaaatatcacaacaaaatataatcgtacatgaaacgcattttgttttttaattttatataaaacatgtcattgtgtcaaatttagcacacatgaaattaatatattttttttatcttataatattgctattaacattactaattaactttaacatattttttaattacaatattatcattatttaaattaaaaaatataattaatttattaattatcattattaataattattttttatgtcaatttatattttattttgctattgtgcattggagcgtacaattgttaaatgtagacacaagaaaatcacttactagtatggtgttttgtgtatgtaaaaacatagtgagttggaagtctaatatgcaaattgttggagctgagtacatggcagcagcataagcatttattgcgcaaattgtaaacagctacacaagtatacgtgataaattgcagttttatactcacacaggtgaggtcaatccagggaattaatattgaataccactaaattagatttgtatttctatttggtaaaatcgataataaggttgaataattaaataactaaaaattgaaaaacagaaaaataacaataaaaagtgtaattaattatggatgaatgtttaggaatatgaatcatgttagttccgtttcccaattgttaacgttaattattaattctctctcttttggtgatgacaaattatcaaattaaccctaactcttctcagatcaataaagtcgtaaatcatatattatatacttgtatctctgaagtaaattaacatataatttgcattaaattcagaatctaaaaattgcataagctatgtaaatactcccgttttacatcaaaacttatgtttgtcttattagagcatttctaatattcaattctcggatttcatattaagatcataaatcacatttaagatgaccagtctaaaatatgtaattaaaacaaataagaacaaatcatacaatatatagaagaaaaactaataatctcattaactaaattgaagaaacatcatttaacattcattatatctctaaattgggaatttagttcataaaactcatgttcacatccataataaaaattgaaacagaaattaacatgaagaaataaaaagggaaaagaaagaactagttggtgatctcgctccaagttgccacaattgcttcacttgcttccttctttagttctagggtttaatttttgagtattttgcttctaaaacacgagacccttatatagaaattaacgttgatatcttcaaatggcaaaatttaaaaactacccaaaaatctcgtgtttagcccattcttgtaacttcctaaagcctagtcgcgaccacataattcgtcgcgactatggattgtggtggtcgcgacaattgaagcaaattgccagtttcagcagatttttctccagtttattccgtcttttcaccaattagtagaatttaaactctaatacctgggacctgaaacaagtaaaatcaagtataacaccattctaaaaaataacataaacaaaagaaacaactctaaaatcgacttgaaacttaaactaaagatagccttaacaatatccactcttgaagacattctattagtttgattttgctcattacgtattcaatacaataagaatagactcatatcatcacttgttgtggatttctcagcggtttgcaatgagttttactgttcctttcaaaccatattatccaagttgcaattaacatttctttataagattccttcatttctgatgcatacagaattcccttttaaaagatatgctaaatcaagttgtttaaagtgtactttcaagtgaagtgtagaaatcaattgggtgtagtagcttaagagaatcacaaactcacaaacaccaataacatgtacaaaaccaaccattttagtcttcatattaattaagtgtcagttaaacctacctatcccaacaaaagaaaccccttcacatgtggtaaattgtagctaaactaattaattacaacagcctattcttgagaaatctcattttgtctaaatatggtaactttaatctcaggtttattcttgttaatcagctcaaagatgcattcatcatttggctgaagagagttgtctcttgcaaatgcatgccatccaccagaaaacctatgctctaatccagaagatgatgaccccttattaacagttaaattcacatgccaatattcctcaccaacccaaagagtaacaatttgtgcctttttctcaaaccaagggtttgcaatagccattggaatatactgcacaaacaagaatttatataatgaattatctaagaaaaaagacaattttgatacaaagatgtcattataataatgtatatgaatgagcagcattttctacataccattgttggacgtccacgcacttgagatgatctcaatttcacttcgaagtaaggattgtttgagcaaaatttgctggctgcttcagaaactatgccaaatcctgaagatgaaagcatcttattattaatgccttgactaatagtattttgtaaacttttctaaattaaatatataaacaaaatgtatataagccgacttttcttggggagtgctttcaattgcttctttctttacaattatgtcatagggaatcgtactggctttatcataattctagctagaacaagaaggttcaattttcatgcaaggagcattattataattctcacctggactgttataatgatcaagaatgtatattattaaaatcagagttcttgtttacctggtattggtaacatacaggaagttgctactccattgccatgaaaaataaccacttcgaatgatattattccaatgatatttctcaaaacaaaggcacaaacgtcacctactttcaactcattgtcttgaacaaatgccttccaaccaccctcgattgtggctttcgaagatgttcctagtggcctgacatagtactttacacaccaggtcctcccatcctgaaccttaaggatcacatcttgaggactagtactggtcccgacaaggtacttttttccaaagagagatggcataccctagacattagatgaacacaagagtaaaatcaatatgagaaacatatttgaaaagataaacttgtaattaagaagtttattatttaccatacaatacttggatttggatccaacaaatgatggttgcatgggaacaatgaaaaagggatcttcagatttaaagtcttttactctcttgaaagcttcatccttttcttttctacccaactcctgatttcttataaaattttcaagttcaggagattctccacatactttatatgaaggttcaattacttctttctttggaattatgtcatgtgaaatcatacttgcattgtcataattattgctagtaaaagaaggctcaactttcacacaaggggttctgttatttgcagctgaaaacaacacttatatatgtcaacaacattattataattctcacctagattgttattataaaataatcgagttcttgattaatta

SEQ ID NO: 54634 - DNA, 914 bp, Cannabis sativa
ttcgggtcttggaaatgcactaccgaacccggtgttcgggtgtgcgggtgcgccgggtttcgggtcgggtttttcaggttgggtgtggtcgggttcgggtcatattaggctaagcccgaatatttaatttataggctgaaataaaatttaatttttaaaaataccatttttttttatttttaacgtggactttttttttatagttaatatatcagtatttatataatataataaatactgttcatactattctctatatcagtatttatataatataataatatataagtaattatttaagtatataacatatataataataagttaataacatatatatataatatatatgagtattaagccttatgttaactgagaagtgagaacgccagttgccagtcgccaccactcgctagggcaaacggcagtcagtagtcaccacctcgaatctcgccggtcacaggcagactgtcgaacagtcagccgcacggcagtcgccaccagtcgtcggagaagagaaccagtcgccgcccttagagaagaaaatattttggtctgagaattggttaagccttacaagtgagaaccaaaaaaaatgaatatgaagtatgaaactatgaactgagaattgagaaagaactgagagtgagaaaagtgagaagttgtgagtcactgtcacacgaattagtattgaagacaatgaagagtcttttttcttaatctaattaaaaaaatgaataatattaaatttagtaatttacaatacaacaacttaattaatgtatagtaatacttaagctaatattgcggcgttttagactttgtaataatgaatagtttttttttctgaatgtaattactgtattattaatattaattttttttttttcaaaaaaaaaaattaaagttacggg

SEQ ID NO: 54635 - DNA, 2649 bp, Cannabis sativa
ctcatgatcgcaccatcaacgatgatgtttcaagcccattctacctcagctccggtgatcaccctggattagttcttgtgtccaccgttctcaccggacctaactatcaatcttggaagcgtgggattactatggctcttgctgcgaagaacaaagtctccttcattgatggttcaattccacggcccgtttctggtaattctcttctcccatcttggttacgttgcaatagtatggtgatgtcctggttggtcaattcggtttcccccgacatagctcatagtatcatgtactttgatcaagccactgatatgtggcaagatttggctgaaaggtttaatgaaggtaatggaactcgtattttccagcttcaaaatcagttaaatcgcctccaacaaggtgacaattccgtcacctcttatttcacaaaactcaaatccctttgggatgagttgaaagaatttcaacctaacaccacatgttcttgtggtgcaatgaagatctttcttgattactacaatcagaatcaagttttgcaattcctcactggtttgaacgagtcatatgcctcggttcgagctcaaattttgttaaacgaacctataccgaatctatctcgggtttttgctatgatcgttcaagaagaacgtcaacgcacccttggatcatcggacaatccacctcttgcctcctccgttcgtcctcctcccaccaatcctccaagaacaaagaaacctcgtccttcttgttctcactgcggcaaaccaggccatctcgtggataaatgcttttttttacacggtttccctcctggttatggagacaaaaagaaggtggataaaggcaaggctcaagcgaatcacactgtttctaacacttctgccgaacacactacagcacccatttctgcagatctctcatcacagtgtcaacatttgatttccctcctcagtcagcagctatctcaagccactcctactgctgaaaacactcctgccgcctcgaacatggctggtaacatcattcctcaaccctcttttgattggattcttgatagtggtgccacccaccatatgtgctcaaacatttcatgctttaaatctttcactaatacatcattccctaaacatgtcatcttgcctactggtagtttagttcaagttaaaaacattggcacagttcatataaatgattctttatttctgcataatgttttatatgtgcctcattttaaaatcaatcttttatccatcaatgacttagtctccaacacaccctacaatgttctttttaagactaattcttgtcttatacaggatccttctcggaaggtggtgattgggatagctaagaaatatgacaaactatatctcttacctcaagaccagcccattgctgcagctactagtcaatcccatttcgatttgtacacatcaaatgtaaaccaatggcacaatcgccttggtcatccctcaatgtatatttcgaatttgttcaataaaaagattgacaattctttcattcccaattctaataatcattgtcatatatgtcacttagctaaacaaaagagacttcccttcatttccaacaacaactttgcaatggcaacctttgatttaatccatatggatatatggggaccatttcaaataataagcatagaaggttatcgatattttttaaccattgtcgatgatcattctcgtttcacttggacttatatgttaaaggcaaaatcagatgttaaaactgtaataccagatttttttaacatggtgtgcactcaattttcaaaatctataaaggctgtcagatccgacaatgccaaggagttaaatctcacctccttttatgcctctaaaggcatcatccaatatcattcttgtgtggaaaaaccacaacaaaactctgtggttgaaagaaaacatcaacacatattaaacattgctcgggcattgagttttcaatcccatttacctttagcctattggccttatttggtctccacggccacttaccttcttaaccgtactccatctaagcttttcaaaggccttacatcctttgaaaggctctataataagtcccctcaacatgatcatcttcgatcatttggttgcttggcatatggatccactttagattcaaagcgccataaattctcacctaggagtcgggcatctatctttattggctaccctatgggaatgaaagcatacactctcttagacattgaatccaagcaaatatacatttcccgtgatgttgtattttatgaaaaaattttccctttcttaaactctacatcatctcaggaaattgatttttttttctcacaatctgtgttaccaaaccagatttccatcactaaaaatcagcctactgctgcacctatcacacctcttgatattcctaccacggctactaaaagtgtcacttcaaaggaggacacaaccaccaacaccacggctactggtttggctcataaaccagatacacccatcaaacctgttgatatctccaccattcaacattcccaacatgctgcaatcaacaacatcgttaataaaaatgtcactccaaaggaggacacaaccaccaacaccacggctactggtttgaaccataaaccagatgcagacaacc

SEQ ID NO: 54636 - DNA, 1403 bp, Cannabis sativa
atataattttttacaaaaaatagcttatgtaattattccataaatatacacatgaaacaaaaccctaaatacttaaaggtttttcaaataaaaacaaaacacaataatcacagtaatgatgaaccctattacttaacatagaatgaggctcatggtatcatttattaaaaattagatctagaattacacatgaattttaaactcatgtcaaattattaaaattacttttaataagatacttgattgatgagattgtaagtatatagtcttctacacattaatcttttctcgatgaattctcacttaattaatgagaataaaggagaaaagtggttaaaattaattagcttggggaccaaatcttaatggttctttatataaaaaattaataagagtccaactctaattagatttactattggtttattgatctcatttagttagatcactttatacaaatttagaatattagctcaaataaattttttttaatttataaacccatgtatttttttttttaaaaaaaaaataaaaactcatgtattagattaggctcattaggattttttttttcctgaactttgacatgtactaaatcatgccccctaaatttttaaggttgtaaaaaattgaatgaaattaaacaaaagtacaataatgttatcagattcataccaaccaacgagtagaacaatataatagattagacagaaaaattaactacaaatattttttgaattaattatgtggtgggaattggccctaggggcatttgggttttttgacctttattttctatatttgataaagatgactttttggtaaaatgaaagaatttctggtttattctctccctctcacctgatctctatctctctctctctctctctctctcactcaaaccctcttgatcttcaaacttgatttgggaagaaaagcttgattcttggcttgtttggagctttgttcttgtcgaatcttaagcttgctcttggattgagtttgaggtaattttctttgggttttgatctttgtttattactgaaactaattatagaaaagcatgaataggtgttgttgatcttgagttgcatgaaaaaggagtttgatgttgatcttcttggatttgggtattgattccataactttgtgatgaatttttatggttgagctatggatgttattttagggagattattctgttagaatctaacttgatttggtattttgctactggaatcggttgagtatattggcttgaagctcaagctcttgagcttgatatttattgtgagtttaagcatgttttgagttgtgtatgcaatctgaaattaggggttttcatattgagaattttatgcatgagttgtgtattttgaccctctattatgtgttagcaactc

SEQ ID NO: 54637 - DNA, 976 bp, Cannabis sativa
actgtagcgtgccttagcattagggcgttacattgtaatttgacagtaacctgctacttttttttcttataaaatcttaattaaaattaattatatttaaaattaaattattaataatcattaattaattttttgcaatttgttactaattaaaaaaattttagaaattaatttttgttcatttaaattattgaaatatttgtaataaaatttcttataatttaaaattattacaaacataaccttaattaataaaaaatagtaagaattacctttaattaaatgtaattctacagtcaatcttattatcaatactttaagtgccaaattgttgtgccagtccgtgattggttcaagtaatttagttttttttttcaataaaaaatataaagtaaaataaaaaattaaaatataataacaattataaaattaaagataatttttttgtcgcactcgacacatttgtatttcattctggaatctgttatgtaattctattttctcagagatgatgttgctttattcttccttctttgcagttctaaatatactgtatatgtatcaattgatcggtgtaaaatcataaaaattaaaaaattgcaaaaatttaaaaattataaatcattaatggttattgatcttgaataaagattattgaaatgtttgaaagttattaatgttaccggttattgatcttgaatacgtgttattaaaaaagtttgaaagttattaattgttattagttatagatcttgaacgtgtgttcttgataacttaattagaaggggtgaaagtttaatttttataaaataacaaaattttattataaatattataatttaatggcttaatcgttaaaaaaaatataataaagacttaaatataaagtaaaattattgatattaaagtttgcaaagaattttattaaatatttaaattaaagattaattattaaatagttaaatctagctaattt

SEQ ID NO: 54638 - DNA, 3968 bp, Cannabis sativa
aaaatatcttggttggtaaatatttttgaaaaaacagaaaacgcgtttcattaatatattttatgaaaggaaactaaaaaggtctaattaatgtcctaatctccataaatattttatttttaaaaggcaaaaattagaaagaatgtaatgaatttattaaacaagaaaaaaggaaagcattaataaaaaataaaataaaataaaaataaaacaaccttattattcttttaaatgaaaaaggaaggtaattaatttgaaattgatatttcttctcccaaaaaagctgggtaattagtttcttcaaatatcacgatttattagtatttttaatgaaaattaacagaaaaagaatattaattagtcaaaatattaaataataaattaaattaaataaccaaaaatttcatacttgaggagcaagaagaagagtattcatcagtggcaatttcgtaaatacaaaattgaattcgacactgtgggtacgtttccgagtctcaacgccacgcgtagccacagacgtgaaagaccttttccgtactgttattagaagagcgtacactacacgcgtgactgtacgagtggggagaaaaaatagcttgaagcggcgcaacaaatctgtgagtgggaaggatagcatggtatgcatgacatgggtagataagatggtcatgcaccatggatgtgcataactcatgccagctattcagtaatttatttttttattatgattaattattatttttttttataacgtttttttatagaaaattaataattaatttttatttaatgcataatttttttttgtttttgactgctttgggaatggtgtatttttttttaatgtggcttaaaaacattggcttgagtagtcaagcaaaacagagcacagactaagaaaaaattaaataaatttttaaaaaaaataaataatttttatttatttattgtgtcactgttctgagaaaatcgataaaaacaatttattcatgttttaagagagagaaaatcagagccatagattcctaatctcttttcttcttcattttctcactctctactctctctgatctatctttctatctaatctccttcgttgaaaaaatagagtaaaacccttttgagagtgagagagaagagagaggggtttttgttatcttcatcatactcatgagggtttttgctttttgttaggaaaattaagaagaggggttttcttcttcttctttgttgagattctggtcttgtgttctttcgtggaggaagaaaaaaaggtggttgagtttttggatttatgtcggctgattccgtatttgatttggtagtgattggggctcctttgaagaagctctgtcaagctgttattttttgctgtatgattttgattgggttcttacacagactgttcaaccttgtttcgatgcgtttgagaccaaaaaggtatcatttttataaactcttctaattagggtttttgataatttttacacttcttgaaactgattttgcttttttttttgtacaggacttggtctgcaattgggtgttcttcaatagagtgtttcggagatttttaccaattttcaacgattttcttgttcttaagagggggtctcacttgatctcttgaccctttcaccatttttgttcttttttttttaatttattatttttatttagagttagaacacctgattttcccttaaaaaaaaaatgccagagcctagaaaccagtcatcaaaatccatgagaaagattcgtgtaatctgttcagatccttacgctacggactcatcttcaagtgaagatgaaggtttcggtagaaaaatttcaaagaaatgcaagagaatcgttaaagagatccatgttcctcttttccctactaaacccactaaaaccctagaatctgaaagctcagttcaagacagcaactatggtggttgtgttgttgttagccaaaccctaagcaaccccaagagaagggtttttgctaaaacctcaaatgggtctagaaaaccttcttcttctccgtacagaggtgttcgccaaaggaaatggggtaaatgggctgctgaaatcagagacccttttaaaggttctcgtctctggttaggaacatacactactcctgaagaagcttccaaggcctatgaagctaagaggctcgagtttgaagccatggcgaatgctaattcgaccccgaaattcaacagttcatcttcttcagcctcagcctctgtttcggcctctgtttcggtctctgtttcggtttctgcctcggctgaggactcagagagtgtgttgtcacacaattcaccagcatcagttcttgaattggagacatcagcctctgattccaagcttgatgaaaccattaatgctaatgtaactgaagaagaaactcctgacttgggtttcatggatgaagttcttgcttcatttccaccattggagcaagacataaactttggaccagagctcgatacccttttcttagatgacattgatgaccttcttaatggcttcaacaacatagatgatattcagctttttggtgttgaagacaaagattcaagtaatctacctaattatgattttgatgatcttgggaaagatgacatttctttctggatggaaggagcactcaatataccttgcctataaacaaaaatgccttgagtttttttttttttggtttattaagttaaaaagatcttataagttttgtttactgtgttcttgagtagagtgtttatgtgagagtgaggttttttgttttagttgttaatggcggatgttagtagattatgaggaatgagtagtctcaaacattgtgtaattgttcttagaaaaaacaagagtatcacttgggttttcctgtgctataagagccgtccaagggttactcttaacaaaaaaatcttcatcaatgtgttcctcaaatctctttttcattttgtctcgtaattaaatgaagatattacttactacttttaattactagaggttgactaattgttagaatttagaatgaatctcatagtgttctatctctaatgcatctattttacatttggacttgtaaattatcatttattttataattttcttagtaaaaatctttagggtcatagtcatatgtattgtgtcgtttcaatgaggtttgtttatgaaaataacatgtttctaatttttgattcttcatagagtgagggtagagagtttagttatatagaactgtgtagtgtgtagactgcagaaaagagagtctaaaatggtgaactcttagactttttgtcaaaacaaggcccctatggctatggccatggctatattgtgggaccataaaagctggactctttacttttttgccacgcaaaacacatctttaataagaggtaaaaatgaaacaagttatccatttaattaaaaaaaatatagtggaagtttttctttttcttggtcaagtatatattgcacttttgaaatagatattgggtacattattttttagccaaaaaaaattaaaattgagagttatttttagtagaattattttatatattattttttaatttttaaatttttttcattggagttcggattgttccggtagcttttatataagttgcaatgtaaattttagttgctatttaagttgtttcgttggttgctatataagttactatatgaattttcgtaaacaaaaaaaaaacttcttatttttattattgttacgtttttattaaaatattattatttttttgtatgattcgagctcattgtttattttaactaaaagtgtatttagaaaacatgattagaaatactctaagtagttttaactttcgaaatagataggagtatatgaaatgcttctctcctaattttaactactaaaatatatagaaagtatattgttggaatataaggtgataattactaatttttaatattttgtttgataa

SEQ ID NO: 54639 - DNA, 1693 bp, Cannabis sativa
ggtattatgggaaaaaatcaaatgtagtcatatatgagcaattttaataggttagatttagggaaataattttagagatttttatggatagttattcaaatttcctaaaaaatattataaaatagcatcacataaaataaataataaaatttgtacataagaaaaagaaaaaaaatatgaaaggttaacctgtatagatataagaggagatcaaaatgaaaaataggagatggaatagattttttttcctggcaaatggcataagtaggtcgatttgagaaaataagttgatcatatttttttgttggttaagagagggaatatataaaataactaggttgtataggtgtattgacatgtacagatgagtgatccaggaaagggaaagtcaatacacaattaaaaataattcaaaaacatatttattaattaaaataattgaatttctttttggtatgtaattctacttaaagtgagcatgagaactagagagagtaattgaaatctcccaattatctctagttacaaaattactatgtaattatgtggtgagataatcacaccaaaccgtgtaattactttcagttacatccaattccaattctcaagtgtgtttccaaacgcgcccttaattaaaaattgaaatcaaatttcatttacctatcataaaacgcacacttcatgttatacttgtataactaatcaatgtttttagtttctaaagaagcaccactcgagtgatatttgtcaactgtccttttttatcgacagaaacttagctatattttaaggaacacaatcatttttttttttgttttgtttttgctatacatagatattcatgtttgaaaaaaaaaataaactaaaattatttcaactagatttgtccgtaggccttgaacttattaccaatgaacactaaagccactatttgcatgatcaataacatagagaggtgtgtcgtgtgtgattttatcttttttaatttaagagtgtaatacccatcaatcgcctctcgaatagaggtcaatgctaccaatctgcagccgtgaatttgaatgagagtctctaactgccaggaatctaaacctgcaaaatccacaaattaaaccatcaatgacaagaactttacaaatatttggcagcacctacttcaattcaattcaaaaggagcgaacaatacttcattactttgaatacctgaacgcatttaactgtggacccggagatgcaatcttgtatgtccgatgctggaatcgctcagtgaaaatttgtgaagtttgtttatccaatagatgccaattggaccctccatcatcacttccctcaagaaccctaaacaatatgtacgcttaatatgatcaatcagtcaagaaataatgacattgaacatgaaaaaatgaaatttttgataggaattttctaccaaatagctaagaataacaagaacagttgataaaaataggaaaatagaagaaaatattgtattgatatcggggtattcaagagacccagtactctcccaactccaagagcaatgctctcttacaaattcattcacaccctcaaccctttctaatataccctcctatatataccacatcaataccccaatacaatgacccatttaccctcattatttagtaccctaaggcctaacaatatcagccgctaggggtgttcatcaaactgc

SEQ ID NO: 54640 - DNA, 833 bp, Cannabis sativa
cctttgccaggaataagaggtcttgtaaaattttggaatgaatggagctcataactttgaagtgaaaatagccgttggctgccattttaggaacatccaaatcttgaacagagatgacactaccaatgagccctgcaagtcatattatattgttcttcatcatggatgggatatggagatgaagaacacgaccttccagaggaaagcattgcaattctgcttcccaattaaaaaaaatgtggtctatttgtgcaagaatcaagaagccatgctgcaacacccatgtcattttcaccagcactcaatctaggtgggtcaaattgttgaaagacagagtaagaaagagactagaatcaatttttcccttaaatttgaaatcccaatctttcttaattaaattccgaatacgacacaggggattctttacgaaggatttacagtgctcttgctgagtgcacaactagccaaggaagcatagcttgccctccgattttgagctagactcgtctatttcccagccctttttgtcattaacgtttagatgctttgtacgctccaaaagatcctccatcgtaccagctctcgaagagtaatactagaaagactcttcgttgaaatgagaatgtaacccacccatgggagaaggcaaccaacgttggagaagcaaggaattcaacatgaaaggaaagggtcgagaaccctagcagagcgacaaaaaatcaaacctggcaaactataaagggattatttcacaaatacacaaaaataacaaaaaaaaattacaaaaatacggttttacggaattttaaacatttttacgattttttgatttt

SEQ ID NO: 54641 - DNA, 2262 bp, Cannabis sativa
  modified_base (215)..(226): a, c, t, g, unknown or other
  modified_base (2184)..(2185): a, c, t, g, unknown or other
ggtaaaataatttccaacatttttctcttcaaatttccgccccttacagtgatagagtacatgcccacacatagcaagtaagtactcaatcatagtgtgtaagactgtgaagaatacaacatctgaaggagaatcgtgctcaaatcttgatagtactatgcgacagaaaggaacaggggttagagatctaagtggaagaagtcatttaattccgnnnnnnnnnnnntaaggtttcttgaactttatatgtatttaaattccattattttagaaattcatatttaagatgttaaacaacatacatggtagttattatcctatttttcgcactatgatgtggcagtatgaactggtgacacgtgtttgttattatttatgcttgacacgagaaatgttctaaacagacttcgagtaatacatctgcaggtacaaagtatgcttgaccgagcaaagcaagggtagatgatccagacaacaaatgaagtcatttctccgagccgtgcaccaagacttaaatacttcaggattgatatcgtgaagctcaagcacaaaagcaatccctacaatcatgggatcgaatcaaagggatatggcaagcttttttaatcccctatttcatgtattctaattatgtaatatatgttcttaccaattatagatattgtaagcaaaagggaaaccatccctcatgcatttagccctataaatagtgatctatcctcactgtaaaaaggatcgaaagaattgctttagagagagatctaagagaaaacactcagagatttccttgtgagagctttgagagaggaaacaccatattctttgttctcaagtcaatacaatctaaggggagtaggctattaccgaactaagggggtcgaacctctttaaaatcttgtgttcttccttgcttacctatttttactctgtcttaattacatttctaatcttatttattgactcactgtcgttggctaaaagcgaggtccacattttggtgctttcattgagagcaaaaatccaagtttgctctttgccttaagtttaagcagacacacagaatggtggtgcaaacttccagaggcgtggttgaccatagtgacccactgctgacagttcttgccttacaaactcctgaaaatacaagggtctcaccaaaaaccaatcctgagcagccaaacacgcagccacctactgtgggataaggtgtgacatcccctatggttaggatcacaccaggtgtgcaagagactgggaatacaagttcggcagccgatcagagcactcccagcactagaatcccatccacagccaatgctcaggcaacaataggagacgatattgagattcagaacctctgcaatgcccttagacttatgcaaggtcacactaataccttgcatcatgatcaggaagagctctgtgctgtaatgaaccttgcgtttgaagcgcagaggcgttagttcattgagtggagggatagagagatggaaacattgaaggctcaacaggcagccatcgatgatcgaacaagataggccatcgtactgatacagaaagcctatcaagttactaatcagcaactagctgctacgtcgggtatcccactgggcggcatagaagaaattcctgttgggcatactgcccaaactcataatggtcagccgtccaatccccgatcacaggttccacctgtgggccaagtggtaggcggccagaccctatccgacaattctttaggtggagttatacctaataactccatccaacctgacagttttggccaaccaaccgactaaactaatcaatcattgaggtaacctggtgttttagtattcaacagattgagtataacccatgatctcaggaatgatttgaatgaaaggagaggcttggacgaacaatatgttcaaccagccgctcagcccggtatctgcatctaggatccaactttaagagattttgacgtgacacaggtcggccaagaggctgaactaattcacccatttgtgcaagcacagttagatgaattaaaaaatatgttctaaggcctagctggccaaaaactcactgatctcgagctggaccgagcacgcagatcaccctttactcccgagatcaacgtcttgaagctacctctcaagtgcaaaatgcagacctagaagatgtacacagggaaggagnntcccttgtcacatcttaaatattttgaaatacaaatggatttgcaaggggtatgaggtgatgtgcggtgtagagtat

SEQ ID NO: 54642 - DNA, 2165 bp, Cannabis sativa
ttagaattcatataaggatgttaatgaaacatacttggtagaaaatctagatcctggtaaaatatttccaacatcgtctccgcatgatgtcaattggctctttaatttgaagtctacccctaagaagatcaggttggggtacttctatttctctcagtcggacggcaagtggctgacaggcaccgtggacacgaaggttagcaaaattgggcattttgttgacgagtattacttcgtggagggcatggagactgtgcacactcggtttcagcaaatcctcgtatactgtcgtcctcccttaacactgaggcttagggaaagggctcatagaattctccaactttcggatgctgctcggaatatcactttgttggcctcagaggccaactttgtggagtacaaactttacccgacagattttgtacttaagtcggtgaaggggaggaagaagaaatccaggtcgggccaggccgagggagttgagcaagagaaggagctcattcaactcaagcgtgaggctaagttgaagggtgatgctggagccaaacggtatgctcaagaatattctgagcaggagaaggagactcaagaatattcagagcaggagaggccgcataagaagaagaaaactctctcgaccgatcagaggctaatagaacatgcaatccggattagggaacctggcgtgtctaatcagtcgtcacttcatgtcgatggaaagagaaagaccatgatggaggagcaggaagattcttcggatgatgacattccatccgtacttattcaagaaaatgctcctgccagcgtgcagagtacttccacttgcatatattttctctgattttatgccttcatatattttatatcttcctttgactgtattgttttgcccgtgcagaaatgtctcagaagaagattgaggctctgaagaagagagtaggagggagctcgggcttgtctactccgactaagaagtctaagggtggttagactctgtccaaggagaagatgccagttgaggaggtcattgatctctttgaggagcaacccgttgtggattcttctaccttgaatgtcgttaagtccaaaaactcctgaggggagttcggacggacctgagcaggctaagactggatccgagcaagccaaaggtggatctgaaaaagttagggtccctgctccaactctggtgttgtgcaccgagaccaagagaggcaaagatatgcttaaccactatgtgtctcggtcgctcctgaaagtaaatgaacagctgaccggggcaaacaatgagttgtctttggagctggtcttgggaggagttttgaaggaaatttctcgagtaagttccctctatcacttttctttcatctttatttggatagtttggattttaatgcattccccgtacaaactggtctgaagatggcttatgcatactctcgagccaagtcaatcgctatcaagaaccttgccacttccaacacaatgtgaagagaagctgacttggccaagtgctgaagatgcacggacctagctcgaggtcgtgaggacggagcttggagaagcaaataagaaactctttgctgctgagaccagggttaccgagctgaccaaggagctgcaggacatgccatcaactgcctagcttgaggcagacaatgtttctttgtctcaggaaattaccagtctccaagatgagagagagggtctctagactcttcttcgcagggtggaagaggaggtcaagttcaagaagaccagggaggaagagctcaaagctgaggttaagagccaaaaatttaaggtggaggagctcgggaagagggcggataccttagagacagctgatctcgaggattttttatgacttctggaaggccaatcccaaagaaattttgaataccttggcacttccaaagacatgtttctcgactactgaacggctcaggcagccaacgagaaccccgaggcgacccatctgctgctcaatctaaaaactttgccatagatcctacagggccacttttcttaatgtctttccacagttctccaagtacttcaattcccccagtatggcggccaacctcccctcttcagttaaccttactacttttgtagcttctgtcatgaacctacttatgtaggctctaagaggctctcctggt

SEQ ID NO: 54643 - DNA, 980 bp, Cannabis sativa
aaataatttccaacatgatgaacttcaatgctaagaaaatagtgaagattgccaagattttttagagcaaattttgaatccaaagctttaaccaaggctgcaatcttttaaggatcactaccagtgatgattatatcatcgacatacacaagtataagagtcatggagttgcaggtatgttgaatgaataagctatggtcatgaattgacagaccttgttgacactgaaagaaatttcaggtctggttatttttctttctaaagtaacttggtacctgaaatattaaatttggtcgatgttctatatttttacacatgtaacttattggaaacatcaaaaagtaactcgatgtttctaaagtaacctagtaactagaatattaaatttggttgagtgtgctacattttgactggttttaatgcaaaagtaacatatttttctgtttttatctttatcctgttttttaaagtaacttggtacctggaatattaattttagttgacgtgctacactttttacacatgtaacctattagcaacattaaaaactaacccgatgtttcctaaagtaacccgacacctgaattattgaatttagtttaatgtgttatattttggctggttttaatacaaaagtaacatgtttttttgttgtcttttattatgttttctaaagtaacttgttacatgaaatattaaagttggttaatgtgctatattttttttgttttaatgcaaaagtaacatgcacagattaaaaagtgacatgttttttttttttttttttttatatatttttgctttttattatcctttctaaagtaacatggtacatcgtgtatttttcactatgtttaaagatttaatttcattaatggtacttgcaacctaaatatgtgcaaaagtttaccaaagagcattgttattaggcactagtggtgcctagtaccttctcagcatgtcgtgttgcgattggctag

SEQ ID NO: 54644 - DNA, 1419 bp, Cannabis sativa
ttagacctttttaacaaaatagttgtcacaatatattttaatttaatttgaatatttattgtaaatgtttaaatgacttgatttaattttatatggctaatcttaatttattgtattattctcatagaaaggaaatattccttttttagattaaaggatataaattatggttaatttgacattaatttctccttgttacttgattcagtttcggttgtatacacactcattcttgtgtgcatgaacttagatggaatcatgggaggatactgattgagttgcaacatcaaatggtgaatttgttgttgcggatcaattaacatttaagtcaaagaatattttattttagaaaagattttatactgttgtataaacgtgtacaagttatctttagggtttctataatgtataaatagaacctagagcaccttttttctcttatctctcctagtatcttattttcatatcttaagttttgtgagaagagtgattcttttgtaaaaacctaaagttttctactaagtttttgtgtctttgttatttgttatcttgttgttcatagaataggttcaagagaagctttgaacaagcatggtgtttgggtgcaaacttttctaagtctcatttcacgaggaaatgaacacatatcttcgggagaatatttttctaagactcattttggaaggaaatgagctcacatcaagggctaaagagattttactacttggtgtgtttcaaaaataaagattagcaaggtggattacaaaaggttgcgacaaaagtttggagggattcaaactttgtataagtcaattgaatttgtaatctttgatactttactaattgattttactctctgagtatgatctcgtagactagtagtatttgaaataccgataccacttataatcttttattttctgcaattattagctgttgcaagtactgattctgtgttcgcaagtaaccaagttgttactggaaattatcagcaacgattcaataattattgttatagaaatcaaatatttttttgtaaaacaccgactttcaaacttattcaaacagttgagtgaactcaatacaaaactcccctaaagaaaatctagctttctccttgtttttgaatgaatttctctcctaattctatttctaatcaattgtggacttgagcaccacataatatatagacaatatgaacatctctaataaagtgctaaaaaagtggtgtattgctatattttagcacaattaattaaaaaaaatattattctaataattttaaaaagtgtgctaaatttggcacatgctaaaaattatgttaaatttagcacaaaataagatatagcattgtgtgaaatttggcttataataaatgctacttttttatttactataatgccactaattattataagg

SEQ ID NO: 54645 - DNA, 1379 bp, Cannabis sativa
actggagtgtttggagagaaggacattaccgatttttgattgttaagcatctgacccgaagcacgatgatataagtttagtgttctctcaattgacaatgcagaactatttgttgtttcacaaaaaagcaagctatcatccgcaaaaaggagatgagaaacagaaggtgctctcctagtaaggcgtagtccttggaggttaccaatagcttcttcatgatgcagtagtcttgagagtccttctgagcagatcagaaaaagatatggtgaaaggggatcgccctggcgtagacctcttgacggtttgacatagcctgcaacttccccattaagggagaatgataagcttgatgaggtcaagcaattctgtatcaatgcaatccagttactatcaaagcccattttcttcatgactgcccaaagaaaaggccactctaccctatcaaacgctttgctcatgtctaatttgagtgctgagtaacttttaccacctcttgttctgtgttggatatggtgcacgagttcaaaagcaaccaaaatgttatcggttataagcctattggagagaaaggcgctttgagtttctgagattacaagcggtaaagcatccttcaaacgcagcactatcattttagatacaagcttgtaaatgacattacataagcttatagggcgataatccgtcatagcagcaggtgagttggtctttggaatcagtgtgataatggcattattaatcgattccatgctttgtccctcattgagtatccctaaaaccacatcagtgacggaattacccacaatgtgccaataattttgatagaacattgctgacatactatcgcttcccgggctcttatcaggactcattgtctttagagcatttgtaacatcggctacagtgaaaggctgagtgagtgtgtcattaatttctgcattaattgttgttggaatggtggctgtcacaagatccaaggcttgaaaatcaatcgctgaggctgagaagagatcattaaaataatcttgtattatagtggtcattccagcctttgatgttattttatttccattgcagtccatgagagaagagattttatttcctactttacgcgatgaggcatgagcgtgaaaaaactttgtgttttggtctccactttgtagccaatcgactctagatcgttgttgccaatactcttcttcttgtgccaataattcatcaagaacactctcagatttcttcaattcatccattgtagaagatgttctagtcacagcattattcaagtttgaaacttgctgttgtgctttagcaatattcttcttaaagtttccaaacttagatacatgccatttttgtaaagaactagcacaagctccaat

SEQ ID NO: 54646 - DNA, 936 bp, Cannabis sativa
  modified_base (902)..(905): a, c, t, g, unknown or other
ccacgctgctgggcagagtttatctgagaaaattctaaggcaaggttatttctggccggcgatgatcaaagattccaaggcctatgttaaaagatgtgataaatgccacagattgttgaagatacctcgaggaccgcccaacgagttaactcagatgcaaagtccttggcctttcgccatttggggaattgacctaattggacaattgtccaagggcaagggtggcgcacaggatgcagtggtcgcggttgattacttcaccaagtggacagaagccgatccattagcaatcattatgtccaaaaaagtgcaagacttcattgtgaagaacataatctgccggtttggattatcgtacaaaatatttttagacaatggcaaacaatttgacagccagtcctttactgatttctttgcaaaccatgtcattatcaaaagtttctgcgcaatggcacatccccaagcaaatggtcaagttgaagcagtcaacaagacattgaaagataaacaaaagaaaagacttgaggatgctaaatgaatctggccggaggaacttcctgaagttctatggtcataccgaactattgagaaaacagcaactggatggactccattcgccatggcatatggatatgaagctatgctgcccgtagaactcaaaccaccatcccacagaagattgacatatatccaagaggccaatcatgtactccttgctgaatcacttgatgaaattgaagagaaatgaatcacatcaaacataaaactgatggcccatcaacaaaaagaagcttggtatttcaacaaacaagtgaaggctcagaaattctttgtgagacatatggtcttaagaagaatatttttaaacactgaagacagtacgtgttgggttttatgccctnnnnaaaactctatttcaatgtaatccagattatt

SEQ ID NO: 54647 - DNA, 4008 bp, Cannabis sativa
  modified_base (1227)..(1237): a, c, t, g, unknown or other
tgggtttgggtccttggttcgtaccttggtttgggtccaaggtcgagtttggattcgggatccgtgtttggggtctaggatcaatctgagatctagggcttgggtggctccagcgccggctccggggccgagccgggcctgagtccgaggttggaatttggggccgggttcagggccgactttgacttaaagtattgaagtatttttaaaaaaataaaataaaaagattttttgtatgaaaacattagctaagcataatttgtattttaaaattttaaaaaactgtttttattctcattttttaaaataaaaaacagaaaataaagacaaatatgctcgaagcttctcaaccaattatgaaacttaaaaactatttttaaattttatattagcacaaaccatacacttcacaacagaatgtggaattaaagttaaaaatatagattcctttcacatattgtagatcatacaccattctaaatgaatgttgtatattttgagttgaatttgattcaaaatacaccataaattatatttgatttagtttttgtatttgtgctttaacgaacaaggtacaaattagctataaaaaataatattagtattaatgcttattaaaaatacacaaaataattaattttatttatattatttaaatattttataaatataaaaaatattttttattaataaatagtattaatgaatgacaaagaggtaattaaaaaactggtatttattgtgcactaaaatttgatttatattaatttttgtgttaaatttagcacaattttaacttgagtcaaacattattggaattaacaatacaccacatttatagttctcaactggagatgctcttaagctgcagtagtacttcaagaatcactctgcactaaacaagaaattacaatttgtgtacaacatttacctaattcgggtagggtgttcggtcgttagagagaggatttttctatggatatagatgaaggcactgtggagagaaaaatttagcgttaggatttaagagaaagaataggcaaaagaaaattttagatctacttcttcgtagagacacaaaataaagtaaaagagaaagcgttattttttaaaaaaattttattaaataaaataataataagtccttgtactgttaaaaaagtagtttaatttttatattcgtgtatattataattatttatgatattttataaaattttgagaaannnnnnnnnnnttacaatataaaaaataatattcaaacagtctatttcatatgcgtataaaataaaataatgatttatgcaatacaatgtttgaatcatatttttggcgtatttaattttttcaaattttttaaaattttatagaattcttaaataaatataacatgacaataaaaaaaaaaattatctaaacaattactttgaataccaaaaaaaaaaatacatgagaacatatttttttaagaggtcttttgtaaaaaatttcaatatttaacaaacggggcacaccattgcaaaccatatttcagagaagtcattaatcacctgtgcttagatccagtaaacctggtccctctaataactgcttccaaccaatcacaaaacaacaaaattggaaaaatgagatttcaagagtgtgtcccatttaaggggtctattatagaattttttccaaagaagaaaccaagttggagaagtgttcatatgaatttgtagagaataaattcaaaaacggcaagacgtgtcaaaacctaaaaagtgaacccagaaaaaaaaaacagtgtagtgtaaagcaaccaaatagagaatgaaaatgaaagaataactttattaaaacgcgaacataaaaagcagagtctatttattaattatgtaaaagacttgaggtagacatcatagggtttagactattaaaaaaaattaaaggaaagaaactattttgtttttggtataaagtccttccacaccaactcaactcaaacacaataatagtattttgtccactcatcacttactcctcttcagtcttcccctaaattaagccctttctctcatttgtaatactttacaaactcttcagttttgatatctcttacttggttcagatcagaacaaattaaatcatcatgaatgatccaaaatatgcttatccctaccctgctcaaggtacctcatcatgtctcttctgggtatacctgtattaattactttttagttaattaatttagtagtaatctttcttttaccttttcctggaaaatattttaaaacaaatcacaaatattcaacttgggcttaggttaatttgtctttgatttgatttgatttttatttctttttaaaaacaattatcaattggttggtactgtttttaggttactatcaaggccctcctgtaatggctcctccacaatatgctgctccaccaccaagaagagagccaggattccttgaaggatggtaattaattactaattatacttttattcatatcactcttatcattattattattagctagattaaattatttatatataataatctcttacatagatctgttttgtttttttggggatgatatatctcagtcttgcagctttgtgttgttgttgccttattgacgagtgctgctgtgacccctccatcttgttcatatgttagtattataaatatattaataagatatatataaatgtgtgtgtgttgtttagaggatcatgcatatgtagaactatatagacaatatttataacttttgttgtggtgtgataatgctattatatatatgctcgtgaaggattgtttccttatcttgctagatcattcttcttctgtaatctatggtttttacatacctagctacaacaaagacctttaagtttgtgatcttctacttatatattttgtttcaactttatattttaagccttgttggagattaatctagttttaaaaaaattataagaaacatatgtatgcccattttcttattgccaagttttctttctttagaatagaggtcattattaacgtatgtctttcatttcaagttaagaagataatgaactattcattttttgttacattttaaagtatttgaatattattctaatggaatgacttttcattatttgggtagaataattattccattttaaaataaaatgaaagaacatttcaatgcaaaatttgaaaaaataaattaaaaaagaaattatcaattttttttatatatttttaatcttattcctatttcaattttcattcctatttctttcttatatttttaatactcccaatcaaacgctacttagttcataaattttgacaagtaacaatggattgaatatatacttataatcatacattgtgatgactaggagacaccaattaattacattctctattattagatatatatatatatatattcactgtttcttgagaagaaaagggaaagaaatattccatattaggtctagttgtaatagttactgtttgaacaattaatatttcaatatttgccatattattaaaatgaaagtcagttgttattttttcccttggcaatgaaattcgaacttaaacttattttattcatgacaaatgtaccattttgtttttggtataaagtcctttccttaaacaacaatacttttctacactacacgcttaaaaaaacttactattaaagtgcatttgtcaacaaaatcatgttgcccttagaccttagtcctaaatattatttaataaacaaataaatacaagagtatattgtatgggcatatgggtaatttgaattcactttgaattaaagaaggaagaaagaaaggtgttggatttggagcaatatttcattattgataagcctcttttttcttctgaaaatgacccacttttcttgattttgttgcaatgtgaatgggacagccatggtcttactcgctccttccttgaattttcattcatctacaattgaacaatgtacatcatttttttt

SEQ ID NO: 54648 - DNA, 1145 bp, Cannabis sativa
  modified_base (1076)..(1104): a, c, t, g, unknown or other
aaaggctttatagatttatgatttagggttttctatattaaagcactttatgaatatgtttagatctgtgatttatatatttcttaagtgttttataaatccctaacacaacattgtatacattaagctcctaacggtactttctcatgttctccatctcccgtgaagtctttggacattgatccttgcacagagtaatttcatgtctagacggtaactgtcctttcttagaattctccattgagaatctttcgagcaccttattgatataagtttcttgagaaagtgttaatgttatttgcttttgttaattaggttatttttagtattaattttagattaaaaatttagtatatttttaattaagttttaatatgtgtttggagcatttttacgcttgttatcttttatttttacagatttaaaataaaagaagattagaaaaatatcagaggaaaaagatgggaaaaaagataaaaatatctcataaaaagatgatatttaaaatagagaacattgtgcaagaaaataaagctgaaacttcaaacctgaattcgactatgttctgattagattttggaaaaagttaaaacatgacagttctagatctttcttttatcttttcggaacatcttgaatcgtccaattccgagcagcatcgagagagttatggccaaaatactatcagtcgacgcagtagaaaactcacctcctcttctaatccgaaggagaataggttttttcttcagcgaattttatcttattttatcattttttggctataaaagaaggggacttcaatagttttggccaggcaattttagagggaaaatgggagtacgaatttcagagaccaaagttagtactggaggcatcattctacagagagttttcagcattatttgattctctatcttcttctcttttttaaagtttcttggaaattattttaccaggatctagatttactagcaagtatgtttcattaacatcctaataggaatttctaaaacaatgaaataaacacataagagttagaaaatctttcattgggtgcatcggaatataatgactcnnnnnnnnnnnnnnnnnnnnnnnnnnnnnctttctgtagcagagcattatcgagatctgaacctggatct

SEQ ID NO: 54649 - DNA, 946 bp, Cannabis sativa
cccccccccctcaaggtagactgtattgtcatatacaaacatctggcgaatatgagatgagagggtagtagcaggggtaagggtttggtgaaggcatctgccaattgtaatgtgcttgaaattggaatgaggcaaactgctgagctgttattttgtctcgaatgaaatggcagtcaagttcaatgtgttttgttcgttcatggaatgtagggttgttggctatgtggatagcagattggttatcacaatatatgaaagcctgacctgtttgttgtatttggaagtctgaaagtaagtattggagccaagtaatttcacttgttgttgcagcaagggccctatattctgcttcgactgagctttttgagatggtgggttgtttcgtttttttcccaagagatgagacagttaccaagaaaagtgcaaaaactcgttgttgatcgtcttgtaattggataggaagcccaatatgaatctgagaaaccacagaggttgagagatgaattggttgaatatagaataccttgacctgggttccctttaagatagcgaatgaggtggttaagggcctacatatgctgtgtgcgaggggatgacataaattgactaagattattcactgtataagtgaaatctggtcttgataaagtgaggtatagaagcttcccaataagttgtatgtaggcagagggattagtgaggggttctccttgctgatcgtccaacttattccttggatccattggtgttttggctggtttacatccaaaaaaacaagtgtcgtcaaggagttgtagtgtgtattttctttgaggaagaaaaagaccatcattagatttggcaattttgaatccaagaaagtatcttagcttgcctagaactttgagtttgaatgttgaggtagagagtgctgaacttgttgtaaagtgttgatgtttggacccgt

SEQ ID NO: 54650 - DNA, 1082 bp, Cannabis sativa
tttttagtttgttttatgtagcaagaatagattactctgttttgaatcttttctagaagggtgcccattaagtttaaatctgtttatggtaacaaataacaagttcagatttcgttttttttttttcaaaagatttttgttttttcagttttctttgggtgagaagtgtatatgtatcattactagtcatcaagttttcatctttttatggtagatatacaagtgcagatttttattcccttgtttgagaaatgtatgatcagattaagatttttgtgattcttaatctacttcatggcctctgggttatgcttataattaaacttttctatggctagacaccaatttagttgggagagttcattccacccttctaatagaaataaatgtatattgatttcagcctttaaaagtaggattggttctttgtagtctgaccaatattttctggccctgtaagctttaatttctttctcaattaatatgccttccattaaatattgtttgtgcagttataacttaaaacggatgcccggtttgttatgcattttggaggcatttttctttttagtcttttttttttaggttccacaatttgtttgaggatagtctttttgtgtggttttatttgataaagtctaaattttagtagtttattctggtataaactatagattgagcttcatttgcaaattttagaatcatttcgttaagtgtatagattctatagaagggctactatgttaattttcgggaactttattgtttcttttctttttgaagactcttgatcagttgacacttttggccactagcaggactactttgagggcttcaaaatactgagccatattactaacatgtaaaaagtcattaggggtctgtaatttagcagtgttttaagtatgaaacccacaggtcttatttaaaagaagttcagtgtttctcattataaaggaagtataggactataaaccctggattaaacttaaatgtaactttctgcttttgtcccgattattggagcgattacttgtcagcggcacacgacaaaatcaatgatccatatatgttatccaatt

SEQ ID NO: 54651 - DNA, 1209 bp, Cannabis sativa
tatacagacatcttacggatatgagaagccagaattgtggatggaagaggtttggtgaaggcgtctgcaagttgaagagtggtattgacagggatgagtcgaagggcagaggcttttatcttgtccctgatgaaatggcagtctaactctatgtgtttggtgcgttcgtgaaaggtggggttgttggcaatgtgtatggcggattggttgtcacaatagaggaatgcaggagcctgttgagggatctataagtcatgaagcaagtattggacccatgtaacttcactgctagcagcagctagtgctctgtactctgcttcagcagaactgcgagagattgttgtttgtttcttggttttccaggagatcaaacagtctcctatgaacaggcaaaagcctgatgttgatcgtcgtgttgtaggacatgaagcccagtccgagtctgagaatcctcgaaggtgtaaggatgatgtggaactgtataataaaccttgtccggggcacctttttagataccgaagtaagtgatgaacgacttgcatgtgaggagtgcgtggtgctgacataaattggctcagggcattaacagtatatgtgatatcaggcctggaaagggtgagatataacaaacgaccaaccagttgacgataaacagaaggatcgtctagaggtgtgccttcactgtcagtgagcttagtccttggatccattggggttttagcaggtttgctacccgtaaaaccagtatcagtgaggagttgtaaagtgtattttctttgagataagaaaataccttcagtggatcgtgcaatttcgaaaccaagaaagtatttaactggtcccagggcctttaattggaattgtttgtgaagtgcagcttgtaattggtgcaatagagcaaggttgggacctgctatgatgatgtcgtcgacataaaccaatagtgcaatgaagtgaggtcctgtccctttagtgaataaggtatagtcggcttgagattgttgaaatccttccatgataagagcatctgaaagcttggtataccactgcctcgaagattgtttcaagccgtagatcgatttatgcaacttgcaaactaaatttgatgtatcaccatctgtgtttgggggagttatgcctggtggaataaccatgtatacttcttcatttaaatcgccgtttagcaacgcgttgttaatgtcaatttgt

SEQ ID NO: 54652 - DNA, 1593 bp, Cannabis sativa
tacacacttgcatttacatctggttctgaatttgggatacaatacaattcagcaataaaggttgaacttccaataataaaaattggaacttgacgtaatcaccaaatcaaaaacgcagagctggggaagaaacttgcaaatggacaggatgagatcaatcatttatacttactgctttatttggagagacaggcaatccatcaaaaagtcccatgcttttcctctaatttgatgtggggaacttatgagagtgcacgacagcttataaaattttgtgctctaactgggaaaaaaaaaggatagagaaacaccaaattgaacaatatcagcaatgaaaaaaaactgtaaagagaatgagtcaaaaattatgtttttccttttctttttcagcaaatataaaaccaatcaccaaaacttgtttctagttgtgtatgtcaacacaagaatggatggaaaaggattatgcccattggagattaagaaacaactaaacttggcctagttgataagaaatttaatatttactggaaaaaaatagacaaatcatattctgatactaataaagaaaagaggattgagcctaagcaaccaacaatgtcctattatggaaggaaggccattggcttacaaaaaatgtacttgatcagtgtttgtgaactgaaaatctcatttcacctaaatcatacgaattcaaggatttgattctaaagtttctttcttttttttttataccttcaaaacaaagctctaagcaccggaaagttaaaatgcccatttaaaatatattatatctacaaaattcaacctaaaatttgaagaagaggcaaatcaaaagcaatcaaacaaagggaaacaaacgaataaaaatcatacctctagatctagcgtgagaaacttaaatgtacacagaatccatacgtctacgcaattaagctaccaaaaccctgaatataacagagtaaactaaaaagctcaaaaattatgtttaattaacaagattaacgcgcataaacaaccactgctgagcataaatcgaaatcaatcacaaataaaaaaggcggtgaggaatcgaatccagattaaaacaattagaaagaattccatgaatgaaggggaattgaataaggaagaagcttgaatgagaagtaggtcgggttttggagctacctatacggatcgaaattcggaaaagaaagtgcattggagttagaatactgaacctcgcgattatggatcaaagtgatgccgaagtacataggcccaacgaagcagaatgatggcttcgcgccgagaatggtaatcagaagaaagtggaacgaagaagacgaagatgaaatacgactatggaaaaaccattcgcgaaggttgaagctgtcgactgagctttgtcgtttatcgtttatctttcttataaaaaaaaaataataaataaattaaaaaaaaaaaacaaaatataaggtttgaaaacgaattattatagattggactcgatagccatatcggagcatccaagagatgaaaactaactttttattattatcttctttaaaaaaaaaaatagaattattattaaagtaatttacacttaaatac

SEQ ID NO: 54653 - DNA, 2555 bp, Cannabis sativa
tgagcaccccatgcccacacatagcaagtcaagtactgaatcatagtgtggaagacagtggtaaccaaatctaaaggagagaaagagatccaggctcagatattgtttttactctgtgacagattggatcaagggttagagatctaagcggaaggagtcatattatttcactacaatcaatgtaagcttttctaatctcttatgtgtttaattttatcgtatttgagaattcatatttagggtgttaatgaaacatacatgttagtaaatctagatgttggtaagataaatcccaataggcttatctaagcaagatccaactcgcacaattcaagggttacaccctcaagaaaattccaagggaggaaaacacaattgttgatgccttggcacagcttgcgagcagcacagtgacagatatgatcaacttagtccaatccaattcttggaagaacccaatatcaactgtgctaaagttgatagatacggtgccaaactagatgaatagcagcttacctcaacactggaaaactcccaaacaataaaaatgagactcagaagatgatgagaaaagttgcgcaatatatcatagtagaatgatgtgtaatgtatagaagaggcttctccatgccactgctaagcttctgtaacaaaagaagaagctgcacatctcttgtccaaagtacacgaaggattttgtggtaatcaagctgcatggcaaagtttatcaaaaaaaatagtaatgccatgatatttttgaccgaccatgatggaagattcaaaggcccatgtaaagaagtgtgacaagtgccaaagattttcaaaaatcgcttgtgcaccccctaatgaattaattaagaagcaaagcccatggccctttgccatatggggaatagacctaatcggacagttgcccaaaggcaagggtggggtaaaatatgtagtagttgcagtggattacttcacaaagtgtttagaaattgagtccctggcaaccataatatctaagaaagtactagattttgttgtaaaaaaaaatcatatgtcggtatgaacttctgaacaagattgtctcggataatgacaagcaatttgatagccagatgttcacagatttctgtacgacacatggaatcattaagagtttcttcgtagtagcacaccctcaaacaaattggaaaatcgacgcagtcaacaagacactcaaagacaccattaaaatgtggcttgaataagctaaagggaactagccagaggaactaccagaagtattgtggtcgtactgaataatagaaagaataacaaccggacgaacaccatttgtcatggcttatggttatgaagcaatgttgcccgttgggttgggttagagcctccatcccataagagaagagacgactaacttatgatcaagaaactaatgacacccttctggaagaatcacttgacgaaattgaaaaaaaaaaaagagctttgacaaacctatagctagtggcgcatcagcaaaaggtagctcgataattcaacaagaaagtgaggccaaggaaattctacttaggagatatggtcctttgaagagtgtttttaaacacaaaatagagcacagctggagtgcttggatctaaatgggaaggaccatatcaagtaacaaaagtcacatattctagaggatataaactttgtcgatacgatgaaaacatggaactggttctggtaccaaggtattggaacaaggaacatttaaaaaaaatactaccaataagtgcatgtacaaggtctgatgacccctacaaagtacacaatgctcgaacatctactcttaagtaggtggccttctgagcggactttgctcaaaggtttggaaagaaaacgactagcactcaggtcggatgaccatctttaatgtatagtctgtctagaaaaacaactgttttatgttttaataatctaaatatcagttagatcatgtaattgcttttataattcaataaatgtatgttactacgttaataacacatccagaccaataaatgaataaaaatataaattatcattctaattgtgtctattattttcttttctatagcaagttatgtaattaccattaaaaatttgtacaaagggtctacccgaacctggtagccaaaaagaaaaaattaaacttgtacgatgcaagtgagcaagagtcctaagtttgctcgatcacttgggggtaactatacttgtataaagcataggttaatagcaagcttgaaaaacaaaagatttgcatgtataattatttaaacataagagaaaatatttattttgaaaaataacaaagcatgataactctggaattacaagctgctcggccagctagttatcttaaaacaaaatgaaatattatccaagttcaaaatccacttggttggccatattgtactaaaaaaatgcccctaggccaaactgaaataaaaaagaaaaaaaacaagaaaaactacacttggagtcctcacttctttgtacaggtcagaagtatcatcagcggctgggttctcattgctttggttggc

SEQ ID NO: 54654 - DNA, 873 bp, Cannabis sativa
taaggatgttcatttagagaataaatagttttactcttaatcgcatgtaaggatgctcatagaagaataaatagtttcactcttaatggcatgtaagcatggtcataagagaagaaaatcttttataatattacgagcatgctattgcaaaacttatgtaagcatgtatatgtaagttattatgatagagtacgttttggtatttaagtaatgtataaagaaattatgatacttaattaagttgtttctattatatgtgttgtggattgaccgacagacataggttaaatacatgtttgttgggtccatatagtaaataaggaggtaatgcggtaagtggtgaaagacatgaagactcaacaccccaagtgttggtaagttaaatttcgaggacgaaatttcttttaaggagggtagaatgtaatatctagattaaaatagtatttaatttttcatagcttcttgatgtggttggttgtgcaaaaccggttgaaaactcgagaaagactttacaatttcaatatcattgactcacccgattgtactctctgcagcaggtcacctaaaaatgtcgaacacttattttttaagtgtgacattgctcttgagtgcctaaagatgttgaaagcttggctgaattggagggtgtaggccaattctttgcttgggctgctgaagtgtatccgaaagtccaaagactccaaattctgcaagggtgtaaagatggcagctgtagctgccttggcttatgtaatttggagagctaaaaatgacttattgtggaatgcaactagtcatctcccagctgatttagttaagcaagtgaaatgggcagtacagaatagaacattgtatgttttaccaaaaaaagta

SEQ ID NO: 54655 - DNA, 1595 bp, Cannabis sativa
agtaaggagacaatccatatgacaatgtcgaacaattccgatttagaaggtaacattaatttgatcgagctctattcttgtgtctcaattttaagtttttaggacaatttttacgtaataattaaattgatttattatattttctgttacaaaattaataaatattatcataggtagatagatctcatattttcatattttttattttatatgtattaattgttgcaaaaaaaggatcgtttacatatgtatttttttttttttttttgtagatacgtattgaaattttaggtgattacattaaggacaagtactgtttcaaaataaataaaataaaatatggaatccctagaattaatctaatatataatttgtcagttatttattataatttaaatcaatctctgcgggagtcgagaaagttacatgtatataagtaatataaatataaaatatagttcatctcattaaaaatctattccaatggtatgttaaattataatgtaaaaatttcacataataaaaaatgatttaaatttacattacaatatagtatgatgcaaaatttacatcacaataaatactttgtatatttactattatgcaattttttaatattttattattaaatcttattaatatacttttttgtattaaatgacttgtattattattaaattttatattattattattttatattttttaataaatttttaagtaaacattaaataacatattaaattttatatcaaaatttacgtattacagcacaataataaaaattgatataaatatcataaaattatttttttttataaaatataattcaatttttatattttcctaataatggtgaaacatatttataaattatctcaatatctctaattggctcagcacatcttttttgttaaagttttaagtttaatggtttacagttacacatgggttttaactttaagacctttgttttttgtaatatatccttattattagctatcgtacttattaggataaaagtctaaacatttcatgttatttattttcaaaacgtggcatcacatggttttatatgtcatttagcgacatatatcaacaaaacagtccttattctacactattatataaaatagcctaagctactcttaatttacaaattcaatctctgttgacttattgcaaaattttgtgctatacacacaccttggatgaagtaaacgtataattatcaataaaaattaaatatatgcacgtattccatagtcatgctgaaaaataaaaacttttttttgggggataaattaattacaaaaataattaaacatcccatgagatatggtagtatagaggggtcaaggagatatatatgtcttgataatgttaccaatttctataaatcaaatggttaagattttggctggcatccattcatgaacatatttagccacacattttaaattatcaatttattatatacataaaatatagggaaaaaaacaaaaaaatacaaaaaaggaaaaaaaattacaaaaatactttgggccggcccattaaacatttatacagtccacatacaaatatttataaaaata

SEQ ID NO: 54656 - DNA, 806 bp, Cannabis sativa
  modified_base (45)..(59): a, c, t, g, unknown or other
tttcaatggccttaaaagttcagggggcatgatttgatacatgtnnnnnnnnnnnnnnnaaaaatcctaattagccttatttatatgaataaaatacatcacaaattataatatttgaatgatatatagagaaaaaagtagaaaaattagtgtatggtataatataaaaatgtaagatgaaatagaaaaagtgagattttggtaatattttgaaaaatagagtagagaaaatgttgagagcactttagttaaaaaaaatagaggaggtataaatattttaatattattttagtccttttatttactttaacatttattattaagctatatatatgctgagaatttttgtgtggagacttaattgtcataaaaaatattaatatttatatatatatttaaattaattttaaataaatgatatttatatttatatataatttatgaaattaactctactaacaccgtaaaatttaatgaaatattcttatattcttaaaatattttgctaaactaacaaaaaaccgttagatagccacattttatatataaagatatgtgtgtctttcacaatagttataatattaattcttttacaatgttttattagtagataatggtagagaaaattaattgggcttacatttaaacaacacgatagttgatacgccttaagttcaagaagcgaacttgtatcacactgttcttgtttgaacataactcataaaagtaagatgtatgattaacttataggtgttgttcgggattacgtgcatttggcacgtctccagagagagagagagagagag

SEQ ID NO: 54657 - DNA, 1034 bp, Cannabis sativa
tagatggagatcatgagatctcaacatgcagcgattgataatcgctctaggcaagcgaccatgctgatttttaatcatacaggatccgaacagagggaaagaaacctctatcccaaatagaccggagtatgggccagaagaacatccaaccaactacccttagcagacctaaggtaatagaccgtccaatctaaggccacaagatcaaacggtgggccacacgatagaagagaaagtttttccaacctataatctttgggggaatggtcagtataatttctgtcctcaaaaggttataccgaaccaatcaattgctgataacaatctgacaagaaggccactaggtgaatcagtcttcaacaggttgggacccgtacacgatttaagagacgatctaaatcactaaagaggacaggatggacactttcctccaaatgttcaaccaattaatttgaacaattacgtgctaggtgaagttttagggggtccataggtgacacaggtcgatcaacaagcatgttaagttgatccagtggtgcaagtcgaaatagatcaacttaagagcctcgtgcaaagcctgaccgatccaaaactcatcgacctaaagcttaatcgaacacgagattcaccattttcaccataaatcaatgcccttgatcttccgcacaagtttaagatgcttacatagaagatttatacgggcaaataagatatcctctctcacatcaattactatgagatgaaaatggatttacgggctataaagggtgatgtacgatgtagaatttttccagctacctcggcagaggttgagcagcactgttacttcaagttagccccaaagtttatttcatggaacctctgctggttttgatggtactaaattaggtacccaatggatctctactctctagatgtataaacattaatcaaaacataaaatataagtttaaaacatacacttcttgatgcaagtgagtgtctaatttctcaaattaggattctgtttagtagttaaatctcattaattaaat

SEQ ID NO: 54658 - DNA, 1214 bp, Cannabis sativa
tctccttatgaccatattctttatgattgtaggactttgatttctgattttgataatatttcttttaagtttgttaagcggtctgctaataaggttgcttatgctttagcacaaacttctttttttgaggctgactaccattttagtatggattctttacctagtgtaattgcatccttagttgtggatgatttgatttaataaaaattaatcattattcaaaaaaaaactttatttgagatttaagttaaaaaaatgtaatagatattttttaataactttatttgagatttaactttatttaataattttaatatttattttttcctctatccatttttaggtgtattcttaatactaaataacacaaaagagaataactattttatccattcttcttgcttcttgtatcctttttaaattcttcatctattatttatttgatttttttaaaataattatttcttaaagttaaaagttgaattcatcaattatccaagtgattttagagctctaaaaaactaatggcatgtttggtttagtgtaatgagaattgtaatagaatcatttttactattacattgtttgctttcattttaaacctttgtaatggctttacattgtaatggctattacactatgtattgtaatccccattacatcatataaccaatgtaatgatgattacattgttagaaaatatctcttttaccattttttattatttttttttttaaattttaaatattaaaaataataaaactaagggtatttttgttgttatacaacttacttatttgattacaatgttcattacagagttaaaccaaacatcataatatcattcttattacaattcttattccattacattaccattcatattacaattactattttcagtacattacattacattacatcaaagcaaacatcacctaagtatttaatggtacaaccccaaaaaggattggtagacatttatctgttttagcatatatgaggacttttcattttttttttacaatcgtaaagttatttatcatcacatgtaaatctttagattaagattgtgcttagcaagttagcatcctttaagataattaaatattgaattatgtaataatttttatgaaatatctaatagagaattgttataatgttattgtgataattaaatattgaatcttgtaatataaaaaaataatttaaga

SEQ ID NO: 54659 - DNA, 1617 bp, Cannabis sativa
ccctaaagcatatctagccaaagtgtgagcggccatattcgccgtacgtttgacatgtgatattgatacaccccagagaaaggaaagaagacaagaaatatctataattaaatcattaaaagctgcaatactatttgttcggccatataatgcattagtcaccattaaagcatctatttccacatgaccaatttgtagctcccattgtgaggcccaaaccaaactgagaaagatagcctttgcctccatttcgtgagaagaaaattttcgaataataggcattgagagtgcagcaatcacctgacctgtgctattgcgtacaacagcaccaactccttttcggtttgtagatgaatccacagctgcatcaacattcatttttagttcacaaaaagatgggggctgtcatgaaatgttagcaggttgtgttggaacagatgaaggagaaacaggatggagttgaggacgatactttaactgggcagatctgtaattggacaggtaattgttagcaaaagaagctaaatgagttgctggtttggcttgttgtccatgaactacccgatttctctctgaccaaatacaccaaagaatacagaaaattgattccatttcggtgactgaatgtagcgtggtaaggtttaaaaaatcacccttgtgcatctgtgtagccatattccagtcaaaatgaaagttcgaagctcgccatactgctctagcgtatttgcacccaaaaaatgcatgaccaatggactcccaagcaagacgacataaggaacatgtggagtccgtaataatttttcttcgcaccaaggaagtagcaacagacagcgcttcatgcaagactttccaaacaaagattttgattttttgtggcagctgcaatttccaaaatacttccaccaggccgtggatgaagttgatggggaggagaggtttgtttcttcaagtgaggtttgatgtttccttgatatttagggtattgtcctactatttatcaatagaaaaacttttagttttgagtttaggtccctagaaagggttttaacaagctgtttacccatttatgtaattgtgacatagggcctccattcaacgcgtgacttttcattcaagttgaccgacacacttgaatttagaaacaaggtaagattagcatagaatatatatatatattgtgattcatatgctaccaacactagtacggtaatggtactaagtgcattggtacataatatgatgttcaaagggtacgatccggtgttagcaatactagtacggttaagtatgtagttcatgtggtacaacactcagtagtagtcggtgtacaattcagccctaccaacactagtacagtagtggtacttagtgcatgtaatacagagatcgtacttctattaagaatgttcttgattccaagttaacacgtcactgctttttttcttgctgtggatagatcatctgtatgaattgtataaaatctattataaatagtaagaacacataatacatgaatttaagaatatatatacaaagaagataaaattaaaatggtttttgaaattatttttgacagataaatatataaggatatgattttgtcccgttattgtactt

SEQ ID NO: 54660 - DNA, 5856 bp, Cannabis sativa
ccacataccggtcaaggtcttgcgcagggtaccatgagagatcatctttttagaaaaaagacgtccgaccaccgtcttagctatcgtgtccttagccgattccaggtccggcaccacctggatagagaaatcctccaaacagcagttctcagtttcttcaatcatctcattcaccagggtagtatccgatgaagccatagtcagaatccacagcaaaaggttgttactcaaagcagggaggtaacggtcttgggcttcgaaggctagagacgaagggtttggtttcaggggaaaacacagagagtaaggaagtctatgagcagcactcacagggatacaggatttgtttttcctaaccaggaaaaaagggatgcaataccctacgacaccacgtacggtgtcagtggacaacatgccactactcgaggccaacggcccaccgtacatggccagcaatcacacggaatcacagcaaattcaaaagtcgtacggagaaaatttcttatgaggcaggttattttccataagataaccttggtcaatgaaaatatgcaataattgactagtgtttcaccaaacgtgattaagataccatattcatatgtcaaaatgtaaatgggtcaatctctaaacattgatttatcaacttaaactaatatatataaacattataacaccttatattggtaggcaatgaaacttaatatgacatagttggctaaattgacaccgtaacttttgtaggtaatgtgctgcattcgattattctaattatcatgcatatcatcttatatcaatataaggaccagacaatatataaataattaaaaatctccttagctgtagagaaaagaaaaaaaaaatagacaatacaaacaattcacaagtgctcttcaaaattttaaaattgttttaatttatacttgttaagtgcaattccaatgtataatacttacaaagttaaattatagttcaaaactctcaaaatagtgcttctaataaatgaatattttagttcataaatagtatattttagttcataaatagtatatctttaggtttagttaagatttacttcatagcaagatttacttcatagctaaatgtttttattaatattttttgttattttcttctcttaatttctttcacatcacttatataaagatatacataaaataaaccaaatgaataaaatataataaaaaaatataatattttaattatataaaaaaattataaaataactaatttatggtattatgtaaaagtttgatgcaaaaaatataaaaaataatattttggtgaaatattttaaataacaaagtaaaaaagttagttgggaatactattagaatagtgtaagttatttatttatatatattaaaaaaaaggaaagaaataagaaaagtaagaaagaagaggagtttgattgtaaagaatattaaagttgttagttaattcacatataagatgagcttggagttagttaggttgttagaggtaaaaatgggcatgtgatttaggtgtcgggtgatacaacattcacattgtcttagaaaactaatatgactaaactaaggctattataaacaagacttaaacatttgaacgattaactatacactaatatagatgttatatcaaagtctacttctctaactaaaaaaaaaataaataaataaattaagtttctacttccctaaatatactccaaactttgtgcttaaatatatatattcttaccattaagcacaaaagctaattggattagtcactaaaaagagatcaaatgagattatgtacgacttatttaatggtttaagagtaaagaaccaccaatgaaaactaacagaatatctttttgtataaatattttgatatagtcttatgccttatgaatacatttatatgttttaatataaattagtttgaagaataagttgtttgacgatgttcattggtgtaaacgaaaaaagtttgatgttgttaatttatttaaaaataatactttggttatatggcgaattatgctcttcttctttttaattaactaaatgatcatatgtttgaacttaacaggatatttcaaaagttcaatattatcgaactagaattccagctttaatgaatatatatctatctatctataccattaccaaccacataaaatgttattttcaaatgatatgattttaaaactgatgacaatcaccagtgataaaaaaaaatcagaatattcttcattcttaatactcttatgggtcctaccaattaaacatactgtaattttattcaaatgataatgtaataagaaaccgataacaacatgatttggtggaaagaataaggtgattacatttttttagtgtttaattatataattaattacaatgaaaatcttgtaaaacaaacagtatgtgcactaactaaaattttatgactgatcttaaatgtatggctctgaaatattcaccaatccaccaacaccttaagattatatattttacttacaccaaagaaaaattccaagatatataacatctatactatactatactaaccagaagagtgaaacaaaagaggttcttttagaaagcaaccagattctccaagacaattacaacatcatcaacttcttttagtctggctttttgactctacttcagcttcacaaaccactctaattggccacatctctttattctctcattttaactctctttctctctctctgtacacttattatttttttatttttttaattttaaattgggggtggtgtttttaattttatttttattgtatatgatgaatgatcagtctccatcgattctatccaaaatggataaaattgtctgccaaagaacactgttcccacccaatgtcacttgtcagcctctctcattttaagtgtatgcagctgcaacacccaagcttaggctaaatttatcaatacatgactatcatcagagccatggcatgggcacaatcttatcagttcaccaccaattaaaacaaaacaaatatctctatcaatttttcttttattaaagatttgggtccacatttttgcttccccagaatcttaaattgtttctttttaggcccccaatgctgctgtaatctctatccatcacgtttttatataactataactataactatgaatgatatgaacacatcattaattcctccccctttcatgtttggtttcaaaaaaataaaataaaattaaaagacacatcttcccctttttgctggactttggcgtttgtttggaaatgaaaatggtacaaaatattcaccaatattgtttttttagtgcctaaccatttctcattataatattatcaagtttcgcttaccttccacttagtataatcctttttattttactgtcggtttgtctatctaatatgatgataagaacaagcaacaaccattcaagttttttagtgattgacaagaaaataagaaaaaataaactcaccaaatattcaaggctcatcatggtcatcagatcatgatgagcaataatgttattgtgaattttaaaactataggttccaaaactatatatgtctttacttaatttttcactgttattaaacagacaaaccatagcagttgtctttagaaagagagaggtgataactataaatatcatgagcgcataattgcttgaatgtcaaaatttgaaatcattttgccttttatgaaagtgtgctacaattacaataatcagtcaacattacaatatcttacctgatactattggatttttttctttctttttcttttcttccctttatgctcaattgggcatgataaatgcaatttgaaatcagaaaaaaaaaattaaagagatcaaatgaaaattcaaaaggcaaattaaccaacacacctgctaacaacaacaaaggttttttttttcttatttcttttttccgagtctcatgtgtttagtcctaatccatggttagctggatcatcctcaagggacaatcacttttaattcactctagtatccaaacccaaaaagaaagagacagaaaatgataggaaaccatcattttcatattgttttttttttaattattaaaataaaaaatgaaaataacttgttttattaatctctctgtatatatatatgcctgtcacatggcgtctatctattccactgtcattttttggaaccgatatctaaggttagatactacaagattttgagcatccaatttgaccattctccccctggtttatctctctttgtttttgccaagtggatatttttttgaccattatctatcatttatgttctgcccatcttttgattctgacataatctcttttaaaaagcataagttccaccccattattgcattctaatgcgaatttaaaacccttgtcttataaaatggtcatgtggtcaagctacaatattaatgggatttgaagattatgcttaaacaatgaatcatcttgataataatggaaggtaagatcttgtactattaggtatccaaaattggcaatttatgtaagatttcttagcatgaccatactaatgttttgtcttttcgggtgaattcttaactttcatacctgtgcccacatctgtcatcccttgaaaaaaagttggtttttctcttcccttttcgacttaaagtaaaccaagaagtaataatgaaattagtactagttttatgaattagtgatttgatagatcaatgatcttcaccctttgggcttacataaataaatagaaaaagaagaatagaaatattggggaccgacctatcaaacttagattccaaatgtaacagagttaatgaggtaggattttgctcgtactagtatttttttgtctaatttttccactatcaaaggatggcattttatattatagcttgagggggaatcaaaaccattatcacccgaataagagaggggttgggatgcccaattgttgttggtggtgctatcgtctattaccatgtcaactcaactttttaatttcagtacttgaaaatcaaatgggtcaaataatggatattcaagagagttttaacaccaagtgggcattgggagactcttgcatacggaatttatcaaaagaaccaacctgcttcacactttgatgttggtattttaaaggacttacacaagaagaatcaacaaaacccttttaaatcaatatcatttccccccaccatttccttggttatgcaatttactttgaagcccttgggtttcttttttcttttatttttttggtggtgggggagagagggaatctagatttttaagttggtagtactcgagtacaaaatattttgaatgatatccatccaatttgaagtaattgattggaccacaatcactgtatatggtatcacttctctttcgttctttcaacttcacacatttatttccaagatttcatcttcatttatagtatagctaatgccttacataacaaaattgctcagacatgtaacgcaagaacaataaacatgccacaaatagagcccagtaacatcaatccagatttcatcagcaaaaatatgatcttttggtgattccagattctccaattctgagtaggtgagatcaccttgtgcatattgttcaaggggattaagtaaaatcttcagttaattttctgtaaggataattttaccgtattagattgtattgtaatttattatattaaattgaattatatatatcatgttttaaaataataccagttaaatttcattttatactaaaatattgcatatttaagtatctataaaaatcaatagggaaatttgaattattatgcattttttaatacaaaattggttt

SEQ ID NO: 54661 - DNA, 1075 bp, Cannabis sativa
ctttctctttacttagtttacatttttttgagaatttagactaattgcaattatttttatttttttttaaaatatactttaatacatttttttaaaaaaaaattaattttaattttacatatatatatatttttaaaatttcacacgcagatgcaaccctaaaataaataagttaaataattataacgcactcacatacatataattaaaagcgatattatcttaattaaataatatttaaataataaaaaatatttagactaataaatacatgtacataagtatatacaatactacaatagtgatcctaattagtgtttaatgataatatttaactgaaaatctaaatttacaaatagaaatgaatataaagtagttttgccacatataaaagataaaagaattaaatgtataggaatgtaaatacacacaaatttagccacaaatttctcaatagtaaatatttattatacattactatatgtataataattgtgtgcaatttaaatatatatatatataacattattctataaataatgtaatgaagagcataataattccctatatttatgttgtaaataataaaaaagaaaaattaattagacaaaaagttagtacactagaatgattagtgcacttattagagcttgtgttttcatttattacacaaaatgataggtaagttagttgagtttctcttttatcaaaatagaaagtaaaaactcacatcatgaattcattattataccattttaaaaaaaaagaacactattaatgattaccccacaaattttctaaattcttctctattgtttttttatttattagatggtggtgctttctctttcaacataatcaaatttattaatgataataactatatataactattacaacaataatacaattaaatatctatctaaaaatactttattcaaaaataatttttaatttgttataaaaaaacttaagtctaaatttgggtcaattataaataaaaataatctctaaattgtaattagttatttatacattttctaagtgtcgtattaaaaaaataaatatttatata

SEQ ID NO: 54662 - DNA, 1287 bp, Cannabis sativa
aagttatttttttaaaaaaaaaagttaaaaaaccaagaaacaactacaaaaaaactaaaaaaaactacgtaaaaacagtaagaaaaaataaaaagataagcgttaaatgtaaacaacataatttataatataaccatcaaaaaaataatgaatacaaaatcagagtatgaatagtagtggcaaattaatacaaaaaaaaaactataaaatataaaaggacataacaacaacacagaagtacaaatccattaactaaatggacacaacaaaataaaacatacaaagtaactaaaacctcattacactgtctaattatctaccttcttctcactatcatcatcatcactgtccttatcatctttcttttggactcggaatcttcattatcatcatcatccttctcctctccgtcactaccctcctcctcttcattaccactaccttcatcaaaatctacatttgcagcatcttcttcttcattgtcatctgcttcttcaatgtcatttgaatcaatatcttcttcattatcacttccaccataatcatttgaagagttactctctttgtcctgcaataaaaatataattaaaaacagatgaacataactaaaaataaactagataataaccataaaaaaactaacataccttagcaatagaatcagcaaaaacaatagaaaactgtgactgcatttaagccatttgagcagcaaaggaaaaaaactgtgcagaaacaaacactttcaactcaaccaaatcagaagaaatcttctgttgggaagtatgcagcaaatcaatcttcatctccaaaccatcaaacttttcaaaaaaaccgtcaagcttgacagaaatgtcactctcaaccacagaaggttgttccagaacaggattactcttgtaagaattgtaattattgtcaaacttgaaattgctcaatttcaaagcttcgaactcagcagcagtggatttcatattagatagttgcagctgagaaaaaaacaagaaaatgaaaaaaaattaataagactgtgtctttaaaataaaaaacaatagcaaaacaactaataaaaaaccaaaaaacaacaaacagaaataccttatctttggagacatcaaaaatagtagtcttcaaaattttgaaagtcggctgactagtacaagtccattgaataatccttgggatacaagaatttttcttttggtaatacttacctttcatgtacttacaacactcataaacccaaacttgaagtatatgaggacaaccaatcaaagtgtaaaaaacact

SEQ ID NO: 54663 - DNA, 709 bp, Cannabis sativa
aaaattcattacccttaatgacatttcttacaaaattggtgggagaagttctccctttcttttctcccttatttaatcaacttctccctttcctaatattaatgatgcaagtaaacaaatgtaagggaatgcttaccttactattgattcccattacttattagtaaacatgctataacagtagtgtttaatattattatgaagtggtgtcttataaataaccatcatttcaaaataattattaaattaaattttatagagcatgatacttaattccaccgatgtaacgatatgacacttcaggtgatattatggtattgccttttaacatttttatcattttataataattattaaattatgatatgtaattcgacatttaattatgatattaaatataatatcttttagtattcatcattattaattggtattataattttccaacacacatgtgcatgtatatgggtcctgatttttaaaaaataattgagtaggattttattttttggctagaaattttgtggtcagattcttgtagggtatgtgcttattttataacattattatatactagatggatgttacgtgccaagttaggtatgttaattttattttagtttctagtttttttttaatatcataattttaaaattaattatatttaatgtagtgataatcatttaaatttgaaagcataatagtgatt

SEQ ID NO: 54664 - DNA, 698 bp, Cannabis sativa
ttttaaaattgtggcaaatactttgctcgacggttcaaaaccgtcgggtatagtgtaatattttttttagaaaaaaaattttgctccacatttttaaaccgacgcttcatctatacgagtgttaaaaaccgtcgcctatagtgtattataggcgacggttttgaacactcaaataattttttcagcgacagtccaaaaaaaaaaagcgtttttcaaaccgtcgggaaatctgccttttgtagtagtgctagctagggttcggtcaaggcttttagctagctccttttcaattactagcactactctaagatcatgaagaatgatatgataagaacaataatagtatgaaataataaatagggttcaaccctataatgaaagagaagaacacaaaagttcttaccttatttttttttcaataatataataatttgttcaagtgtattggtcttcaaggtttccaccatccaccaaacattagagtagggtcaaaaggatgagatgaactcaagaaatgaagctcaagagaacctttaggatttatccatagtgaaggaaaagaaacaaaaagaaatggatactacaaaaaattttacttttagttacaacaaaatttgtgactaaaaatttaaaaattgtgactaattataaattattattcctatgttgtaacaaaaaggtctgtggctaaaggtatt

SEQ ID NO: 54665 - DNA, 1937 bp, Cannabis sativa
tcttggtggtaacccttgaccactaatcttacttttatgtagaaatggtgccatttgaatctccttgattgtatacacctatttgcaatcaacgggagttcttattggtggcagattaactaggatccatgttttattcctcttcaaggcctgatgcttagtatccatggcattaaataagttagggtcctttagagcactttgaacagttgttggttgtagagattccatgagaaccttaggctttctgatgcctaacttagctcttgtttgtatatgctaatctttttttgtttgtagaccttcagtagtcttctttttttcttgtgttagtgcttgttgatcctaatcctcttcttcaattaacttgtgttcactaggcccaacgtaattctttccacttctcaaggtaattgtcttacaattttcttttggattcacttctatagtgcttggcaaacatccttgggctcgattagtcatatgagtagccaattgtctcatttgaatcttactattttaaatagaagatcgagtttctaacatgaattggcttattgtatgagattggttctcgaaccttccacccaaaaattgttgttgttgattagtgggttgaaaattttgttgatgatctggcctatttctctgttggaagaaatcttgttgtggctggttgtattgctgcccttgataaaattgacgacgtccattaaggtaagcatactcactatcttttgagtatcctaatggcttgcgcttgctccatcgataagaccatctccattggatggtgtctattttggattaaatttggcctaaaatataccataaagctgtatttggcccattttttgtatttgtgctccaatgcacaaagtcaaattatctagaaaagtcaatattaccattaatgatcattcaaaatatataaaataattaattttatttatattattttaatatcttctaaatatatattaataagtggcaaagagataattaaaaaaagtagtatttattgtgggcttaaatttggcccatgctatgtttcatgccaaaattggcacaatttttagctttgggccaaatttggcaaacattttacaataccattggagttaagttttagcagaatattttaaaatatagcaatacacaacatttatagctctcaattggagatgctctaaactattaacatcaacttggcaacagtcataagagtgaggccctccacataactcataaattacttgggcctgttgcacttgagtatacttggactgttaacttagtgatggcatcaacttcatgtaaacgtattactttcttcgattggcttctctcacttagctattgttgattattcatggtcatctcctcaagtaattcataagccttgttagtacttttcctcttaaaggccccaccagaagcgacatctatgagtgtgcggctataattactagtcaacctattgtaaaagttatgaaccatcatccacttttcaatcccatgatggggacacattctgatcaggtctttgaatctctcccaagcttcataaatagactcattgtcatgctggatgaaattgttgatcttcgatctcagcctgacagctttagctgaaggaaagaacttggaaatgaacttcagggccaaatcctctcaagtattgattgagttagatggcagagacaccaactaactctttgctcgttccctaagtgagaatgaaataaattttttaaccaattaaattgattttaagatgagtccaaacaagttaaaaagtcttactaggtactgatattttaacataaacgaattttatggatgaatatttccttactaataacataaaggggagttctatttgctttcccatacaattataagtacactattattaaaaaagagtaaatttaaat

SEQ ID NO: 54666 - DNA, 877 bp, Cannabis sativa
tctttttcttctctttaaagtcttactatttattatgatttctattataatgtctagtttatagtagtttcttttaggttaagggctatttcaaaatttgagacatgattttttgaatgttttgattaatattagtattttattccttcatattgaattatttacattcttctatgcttaattttatgattaatattttgatcttccttagacgactgctaaattagattttatattattctactatcattcttggaagttctattcacctagctaatagtctagaattataggtttaagtgataaattgctttaatgatattgtgacgggtatcattatttgtgatgaagaataaaacataagttaaatgaattatatgttaaattagtttgttgctaagattaacttgtctccataaaatttaatatttttcctaagttaaatagattacattcttcgtgggtctattgcttagtaaaatgatttaattattgagcacttcgttgtaattaattgtaacaaggagattcggataagtgattatctgcggggttaatagttcaattttagaataaaaaataatatttatcattgttgttcctgattgattgttaagggtggagattaacttatttcttaaatattgtagtgttatagggctagtttggcacaactgtgctgtgggaaaaagcagttgtagctgtgttgtgagaaaaagaagctgtagcaaaattgaggaaaaaagctgagctgagtatttggtaaattaaagatttttaaagtactgcgagttgttaaaattgtattataataatgataatattttaatctagttcattataaccacatatatatataatatgttatataaaattt

SEQ ID NO: 54667 - DNA, 667 bp, Cannabis sativa
ttatttttatatgttaatcaacatttgatcagtacaaatacaaattttaaattttctaattaaatttaatctacccaaatataaatattcacacttaataaattaaattaaattaagtattttataaacactcttagtgtacataataatgaatattttaaatcgattatatttttcaaatataaatgcataatttatattatgtagatatagttaatgaaggtatacgtatataataagaataaatatatacatttagagttattaatttataaaagaaattgttgaaaatgaaaaagttttggtagagcccaccaacggagtgtcggtgggtggctgtttcctggggtcagacacattggtccattttctctagatacatatttttcattatgtgggaatccatatcacactgtttaaatttaaattagttcctaaatatatttttaattatatatttcgtaaaaattattgattagattttgtgttttgtaaaattattaattaaattttctattttgttaaatggtaaaatagactttatattttttaaaatattaaaaataggattttaaactcatattttgataattttttttaatataacttacttaaagataatttttaatatgaacagatacaaaaaatgtaatcagttttatcataa

SEQ ID NO: 54668 - DNA, 595 bp, Cannabis sativa
aacttaacacacacattagaataaaaattaaaccataaatgaattaaatccaaactcaaatctctcttcttcttattctttggcttggtctctgtttgaccattaaaactcttaagtttagaaatttgaagattcatgctattattttttaaatttcggtatttattagcaataaatttaatattttaagtatttatgtcacgtattttttaatagtaaaattaaaattttaatataattttactaagtatttattattaattaaaatacataatttattttttatatataatttaaaatattttatacatccgccgcgaagcgcgggatgttgactagtcttaacaataatatgaaataaaattaatttagaatttataccttaataacttacaaaaagctacttatgtttattatttctaatatcttgtgtttattatttttaatttttcactacaaaattttttacttttagagtcacaataaaacttataactaaaagtaacaaaattataactaattataaatcattatttttatgttgtgactaaaaagttcgcgcttaaaactgttagtcacaaaaattacaatatta

SEQ ID NO: 54669 - DNA, 875 bp, Cannabis sativa
  modified_base (509)..(512): a, c, t, g, unknown or other
gtgttgtctttttcaggtgtgttttgacaggttggcgtggtatagtcacaaccgggtatttcgggccgaacccgatgcaatttgaattgaaataattgccattttgatttaatggtgataatctgaatttaattggatttaattatgcatggaatgacaattatgcccttgtgagtgaatatgtatgttatttggccctgggggcattttggtcttttgaccttaactagtgggatttaaacaaaatcggatttttggcaagaaaggatagaatttctggtttccctctcccttacccgaaccctctttctctcaaaacccctttgaaagtttcaagttcttttggtgaattgcttgggtttaggttgaaaattgaagtaaagtgttgggggattattgtgcttgcctttggagtgattcttgaggtagttattatgactttgattctcattttgcttgctgaattttagtgttggaaatgcatgaatatgatgatgatgatgatgatnnnnatgatgatgatgataattatatgttgcatggagtagtgttcttttgttggtttggttatgttttgcttgaattcttggtggggaattgaattgagctcttgatagaattctagggtttttttcctcatgtcttgaattcaatttgttttatggtggttgttgttgaaagtatttgggtttgttggaatttaagcttgttatcccaatttttgcactttgacgtggcatcacatgatggtgacacatgaaattaactttgagtaactgctcggagggtatagtctgaacaggatgcctcataggcatgtctggaacaaaacaatcagcaatccgcgcagagcgatcaacacttagtgaattcag

SEQ ID NO: 54670 - DNA, 831 bp, Cannabis sativa
ctaaaaattctagctgccacatactaatgagtggccccagagtcaaacaacatagagaaataagagttgttgactgagagctaacctgttaccacagaggggcttgcttttgcatcagcctgagttatcgtgaacacccttgctggagtgggtttcggtgcaatctttggtgcttcggtcctaagctggggacaatcccttttgtaatgccctggcataccacactgaaagcacccctaccctttacactcccccaaatggtgctttttataactggggtactctgggtaagtgtattgggtttcggtgccactctgacgattacctcaaccctggttcccccgaaacctcttgttcttacccgagccactggttgcagtagatgcctttcttttttgatttgtggtcgagccactacttcccctactgaaacatgatgcaagaggggtaggagccccgccaacaatcggagtcccacgagactcaattatgcatctcactgcgccctcacctcgcagtgccttatccaccatttcaaaataggtggtactgtcgtcagtagtgatcatcaagtcgtgtctgatcttcgcatttaacccatccaggtatttctctttcttatagaagtcagttggcccaattcccgaggccaaccttgccaaacggtcaaatggcgttgtgtactcagtaacactcatattttctttctgagtcagttgggggaattcttttcttatagcacttctgactgctacattataatacctagcattgaatagttcttggaaattttcccaggtcatagttgtcacatcatgaatcatggacacc

SEQ ID NO: 54671 - DNA, 1546 bp, Cannabis sativa
atctgggacaacttgttctaccaacttctcttctaaactcacatagctatctttaacatcatttccactatccccaattttaccttgttcaacttctacatctccactgaccctaaaccccgactccccaccatattctttaaccaacttctcagcttctaattctacctcctcaccgtcaaaatggtcgcttttctccatcaccaaaaccttatccccttctttatcatcattactaacaccattgtcagccaccaaatcctcctcctcctcctgtttctgaggagtaacacctccaccctctaataaactctcaaccccaagtactacagccgactcttccttaacctccaaaaccccaactttcgaaccatacaaaactccatcgtcatcactttcatcatcaacaacaacatcatcgtcatcaatggaaaccttggcaattggtctcacaccaccactaagcatattaacaaccccagcacccttctcaccattatcatcaaaattgtaaggagaagaagcatcaacaaggtcggaatattgaaaaggagaaaacgaacctgttgagaatgaagaaggcggcgtcatggtggttgttgttggtgttgtggcatcaggcgaagagggagactttaagggctccattggagaaagtggaaaggggtatggaggaaagagataagggatttgaggagtgtgggagagagtgagtagcttcgatagctctgtttggtttagtttggttgggagggagaagaagaagagagataaggcttactttggtttggacgaaacctttctctctctgccttttgtctctacttaccaccaccctatatacattacatacggcttttaaaacttttttcgacttttatttttgattttcatttatatatatatatatatagtttctcttttttatttttttgctttaaatttaatttgtcttgccattttttcaccaaacttctccctattcatcttagtctttcgtcttctaattgttatagcaaataatttttaaaattgaattataaaagactgcagataaattaaaatatcaataatttgattacccatattatgtgtgccattgtcaagcaaattcttcgtcttatactttcaaaatgatgagatagtgattgggcaagcatgtggcgtgatatgcagtcaatgaaggaaaaagcgtttactttcctagatccagagtatatgctgatggaattttgtagaggactgcttaaagccaggaagttttctcttgctagaaactatttaaggggtacaaacaagttctgttgccttggcatgagagtcttgtcattcaagctgcaagggaatattttttctctgcttcaagtcttggttaccctgaagtaagtatcaaattggagtaaatagtttctctctgcttcaagtttaagttgtttttcttttccttttaatttggttgtttacaatgcataataattcttatataccatcttgcattgtgttatgatgatgtgtcaatatccttaaagttaattgcatctgcatg

SEQ ID NO: 54672 - DNA, 1228 bp, Cannabis sativa
gacccaactattggcatgcatcctgcattgaacctctgttttaatcaaccatagcaaatgtacaacctcttgaaccaaggctttccattttctgttgtgtcaattaggattttaactattgaacccttcttagtccacttgatctccttgacataatcctagagagcattacattgttcttcataactcccttttataatcttagattcaaatgtcctagcttgataaaatttatctcttgaaacttttagtctatgatctttaaccatttttagttggaatgaacaaatacatcatctgtcatgcatgttgaactcatctaaatacttcttagcaagccattttcctgtggaaaatctattagtatttattcttggtcatttgtgtgtttcattgtaggatttcactataaatgttggtgtgtcatctattttagatccatacagctcccatggacaattgacaccaccacacttagccctaacctgagttgggtcatcgttcttaaaaaatttccttcccattttgaatagcatactttctcccaacatctttgaattgtgaccctaattgaaataccaatcacttctcaaactttacttacaccatgttaacatcaggtctgaactcaggtagatgggacatcctaatacttttagtcttatttttccttgtattaaactcattagtctcctcaacttctgattcaatgtcagatgaacttgtttcaaaagaaatttttataccatgagattcaacaactacctcttccacatcaaagtatacattccttttcccttctctctgtctacaatcatcattactctcctcctcatccattatgtaatttggatatccatcatctttagtgtctgtaatttcttcaccattgtttatctcaaaagttcatgcattcttagcatgaacatcattattttgattcaattattcaccataatttctctcttcatcgtttctcatcccaaaagtgtcaaatacatcagctccaccattaagaaaatgctcattttgctcaaaataagttgaaaatccttccactgtagcagcaacaaagtcttcaccattaatagctcgagcaaggtcatcatctcgagcaatattttttagcttcatggtcaccactaacagcccctgtctcacctcctaaaccaggtagaatttcctccaaaccagcttcatattgatcttccaaactagtaccaatctc

SEQ ID NO: 54673 - DNA, 1035 bp, Cannabis sativa
ctctctgcagattcatctccatcgccctggatcggacctttcactcttttcgctccgttcgacacggcacttcgatcatgcatctcttgctcagtcccgaacctcctccgcgagcacatagttcctggcctcttcagcatggattacctccaaaatctggcgttcgaaaccaagatcgagaccttgagccccggtcgctgcggaaagatcaccgctcgggagcaatgagatgacgtcatctaagaacttcatttctggcttggagataacacaaccggatcagtaatggtcttatcatcgttcactgtctcctcttaatcgtaaaaaatgaaaaattgttcctttattggatttgatcatcaaatttggtttgattagtatatggtatgttttatttggtgacaatttgataaaaagatcgatttttttttcatggatttgattacattttcaatatttatgtctttttggatttgggattagaagaattttattcatataaatatttatatatatacatacatatggatttgggttgagaaattgaaaaatattgtcttgttagatgacataaactggttgcttaacatttcaaaatttttctaattggcttaaattgagcataaaatacttgctaattttgatccatacattagattttgatgcaattaaaggtgaatgaattagtatttgtgttttttggtttgttgcaggtgcatccccacatcagatagagtcagtagaggaaaattccaataaactttctaaaacagagaatgattaaggattatcaacctacttttgtggtctttctgaaaatttggcatgtggggtgagttttcttaatgtctttcttgtttatatacatatatatatcctttattgtaatgaacttaatactaataataataatcatgcttctgcttgcttgtgtttgaaattgaaaatgaaagatagaaagatggaaaggataggaaagatggagatgaaagtagctctccttttgtccaacatgtttggtattaggagtggaat

SEQ ID NO: 54674 - DNA, 1804 bp, Cannabis sativa
  modified_base (1436)..(1441): a, c, t, g, unknown or other
tcttcgttggaaggtggcggatggatcaaaagtaaggataaatgaagataaatggattcctaggggagctcctttccttctcagaaaaccggttcaggttcccccaaatacatatgtaaagttcctaattaacgaggacggaaactggaaaaggaaatatatatatatgcatagtgatgatgttccttggattttgggaatcccaattaacaccggttatggcgaagatgagatcatttggcagtatactatgaatagggaatacagttggcagtggatacactctaacacagaaagagaagcatgaaaccgagacttccaacaaaatgaaggtgcaaaaatggtggaaggaagtttggcaatcgaacttaactcccaaaatgaaaaattttgtttggagagtatgccacaattgggttcctacgaaaagtgaattaggaaagagaggtatcaaccttgacggaacttgttcgggttgctggaacaaaattgaaacgatcgggcatgctttgtggtgctgtccaaggctgaaaccagtgtggaaaacagcttgtttttggcatcttttccctgaaagcctcggcttaatgacgaatctgatggagtttctaatgtacatgaggggacattgcactaaacaggagtttgagtcttttttggggctaagttggatggtttggaaccataggaacaagcaaattttttaaaacgacaagactcccctgaagaattggatctcgtgggttgtggattatgttgctcatgccctggagaggaaggaaatgaatctgaatgtgaagacggagaaggtgaggaaatcttggcaggctcccccgactggagcttttctgctgaattgtgatgcagctttaaagaaagaacaagaaggttttgctattgctgttgtcatcaggaatgagaagggtcaattgatagctgctgaagctttttttcatcccggttatgctactgttttgatggcagaatgcttggccatcaagatgggaatgaagcttgttcaatatatggattctaaacctttcatagccagttcggacaaccacactgcagttcaccagattattattaaaagagctcccagagccgattggggtcatcctatttaggaaattttgtcatctaatcttctcaatgggtgtatgggaatttggtttgtcaatagggactgtaataaggtagctcactctttagctaagtgggctttaaagcaaagatgtaattctttttggtaagaggttttaccctcttgcgctgctgctattttaaatgcagaaaagcctgaccttttgtagttcttttgttggttgaataaaatgttttgccttcaaaaaaaaaaaaaaaaaaaaagtaaggccaaacaaaccaaattgtttttaaaaataattttttgttttttaaaaacaaaaaacagtttnnnnnntatgatgccaaacatgcacttaacattgcctcctctgttcaaataaaacaaaaaaaaaaaggcattgcctcctctgtaagtagtttcaaaggcaaaaagattttgaaatttatatggttaaataaaactaattagctaacaaattaagtctttttatttaaaacttatcattacacactaaatgctgcctcttaatttaaatttctacctattatgttaaaaactaaaattattacacacaaacatgaatttaaaatcaaaataataagaaaagtgagatcaaacaaaaccttgatgatcactgttaagcaaaaatttcacatttagaatattaaaaataaatgcaaaacacaatttcaccta

SEQ ID NO: 54675 - DNA, 1129 bp, Cannabis sativa
gatgaagattcccttatcaatatgttgtaaaacaaatatctcatatcatattatgtgaacactgcatttgaaattttcatggttatagaaagatgtatatacatgcagagattagtcacagacagctctcacgagaaagaaaaacaaactatagttgaagcaaaggcccaatcatcaaaaattagtccaaagaaagtgattattgctcttattataaccgattactacattgaaataggaatgtagaatgtgctaaagaccgagagataatagtagtgttgtgtaattgaacttgagctttagactcagtccttgagttagatttgagctttgagttagattgtatatggggtttctaaagaggttcaattgttgacctgcaatgaaagttggtcttagagggtgcataacataaagtgttgagatgtaaaatgactttaaatttaaaaactaaattagtaaatgttttttttttaaaaaataattaagaaaataactaaatataataaattaactaataaaaattataaaaatatacttattacatattattatttttaaaattataataattaattaaattatatatttttttttagtatttaatattattatattgtaataaaaacaaataaatacattagatcattaaatatatacaatagtatttaatatatattgtatcactgaaaataatatattgtagtaataaaattatataccacaaacaaattataacaatactaaattaatactcaaaaagtatatattatgttaaatatatatactatagacaacaaaaatcatataccatacaacaaaaaatatatatttacaataaaaaataaaataaaataatatattattattaaaaaaattatatatattatattaacaaaattatatacaactataaaataattataccatacttaaaaaattatatatcacctttatatataataaaataaaaatacaataaaacttatataccatataacaaaaaacacatattttacaatcgaaatatatatatacaataacaacaaataaaaataaaaaaaatatataagatgttaataaaattatatatcatgtcaacaatagtacaatagaaaatagaacttaa

SEQ ID NO: 54676 - DNA, 2422 bp, Cannabis sativa
ttagaggtctgagtggaaggagtcatttaattccgctacaatcaatgtaaggtttcttgaattttatgtgtgtataaattctattgttttagaaattcatatttaggatgttaaacaatatacatggtagtaaatttagatcctgagaaaataatcccaaacagaatttaccttcactgagagaggggaaggtggcatcgtaggtcaggccacaacaacggtggtgttggtcagagcacaacagcataggcagcaacaatgatgctttaattttttttttttaaagagggagatagaaggagagaaagggagaaagagaaagagaatttggtgaagatgatgatggtggtggggaagtttggaggtgctagagatgatggtggtggtggagaggattagaggtttagattgagagaaggagaagaagagaaagaagaagaagaaaagagagaagaaaatggtgaaaatggggttcggttcgtgttttattctggttcaccttttcctagcgaagtcaggctccccagcaaaggttttttcctcaaaataaaaatgaaactcaatgtttcactaaatgcaaaatgttttgctggtgagcctaacctcgtcggtaaaactttttcacctaattttgcacacatgtttttattgcacgataattatactgttaaaaaatttaattgctttttccaacgaagttaggctccttggcaaagggttttttccaacgtaaaattgaaaaaaaaattatttttattatttgtaaagggttttgtaggcgacctaacttcggcgtcaaaatatttttacctaatttctgtgcacatttttactaggtgataattaaactaccaaaaaatttaatgacttttgccgacgcatttactcatcgaaaaaagtaaaaaaaaaatagttgaaatattataccactttgccggcgcatttatttcgccagcaaaagtgaagttgaaccgccaaaagttgtcttcttttggcgatttgtttacccccataatttacttatgtcggtgaaatacctcgctggtgtaggtttttttataataaaaataggtggataattttgccaaccattgccagcaagaaactggaactgcaccgacaaaagtcattttttgtcggtgcagttcatgagcatcgctggcaaaagttcttactcttgtagtgtctctttgggagttttagatacttgtggctatgactattttagcaaaagatggtgaaataactattaaaaaaggtggcttggtgtgaaggataagaaacagtaaaatttgtataaattattcaagaagactattttaagtggagttgtgaatgtggagtcaagtcacaaaaggcattcagttagagtgaaggaatgcgataaggtagagaaaactccaatttcaattagaagttgtttttcccttcaaaaaaaaattagaagttgtttgaagaaagaaggcatcagtgaacgattgaagaatgtgaagtcaagtgctcaagtgaagttcaatgagatgaattcaatgcatatattctcttaattgatggtttgagttgtgaatttagagaacttaagtcaagttggagattgttggagtttaactcaaattatttaattatctatatttgtaaaattgaaatttttttttgggtaactataaattgtgtaaaaagaaaaatcttggtggctaatttttgaaagtcttctagagaaagctttgatatgtcttggtccccatgccaacttgacttggtgccgaagtttattttccgtataaatttgtgttttgtgagtgggtgtggtgtgtggagaaaaagagtaaattgtaaaaaaagaagtgaatgtgagtttgttttgtgatgagagtgaagaagaaacaaagaatactgaaattcaagtacacagattgagataaaaagtataagtgaatatatctctttttgtgagtttagtaattcttactagttctatccaaccgagtaaattgatctcttcgtttctttattaacctgcttcgcttcaagtttattatttttccaacataaattaatagaactcagaaaggaataaaaaggcaggggcagtaaaaatttaggatccgaaggtacaaaacaattctttaatgtaaaaaagtttcagcttcaaaatatgagatcaatgtgtgtaaccaatagtaggtgtaagataaaaattaagttggccatgtatacccacaccacatgtatttgtgactatatatttgtgatcgcagcaaatcattaacccttcaaaatgagacatccagggacccatattgtaagcagatacaaatatttaatgctcaaaagacttgaggggatcattagggtcgatttcagatataagggggagatcgattcttagagtgtctaggctcaggccttcctccatcagctt

SEQ ID NO: 54677 - DNA, 540 bp, Cannabis sativa
ttttagaatctccaacaatatacgagccctttataataactaataaatgcccgtccacagatagaggcattaagtggttttggttattatcgggttgggtgaccctttgatcttggttagcctttacatacctttgaatgtgtggattattctttctaatgtgaaatttaatctcttcttttaagtttttgcactcattggtatcatggccaaagcctttatggaaatggcagtactttgaatgatctctcttgcttacatccttcttcattggtggaggtcttttgcaaggcactactgattctgtggccataaggatagcttctatatcttcggtgaggatagaaaacttgtaaactttggagctttctcacgaggatattgatgttcgggaatgttattaaactttctattttttccatttccttgattgtttccaccatttgaccttttcccaccctaattatttctagcttggcttggaacagacatactagaggccacgttgggaatttatttttggccagttaaatttactct

SEQ ID NO: 54678 - DNA, 1046 bp, Cannabis sativa
cgtattcttttttagttttgtaaatagatgaaaaagataaaaaaaaatgtttaaacttagcaacaaaagaaaatattaatatgcatggcttcctgtgttttcgttatgcatgattttaaaatgttattgtttaactgtgtaggagcaaccctttctcatgttagttaactaggggttctataataagcattttatgaattaatttatcatgtccttagttaggtaacgcaatgagcaagtttatttgaatagaaataatctagatctattcactttttttgtgggtcaaaaaattatttttattcatataataattgagacataatgaatcaaacaataatatcttttaggctatgagcgaggagagggattctaactacttcttaaatgaatcaaaccgcaaatattagatcaactctcttcgtagatgcaactatcttaaaggaatctagggtaattagagtagggccattattatgtcagcatatcatacagtgttaaaacattacgaaattggtaatgtagataaattttttcaaggtttatagttttcatataatggacaattgtattttctaaaaatcttaatgatttttgaaaagaaaataatgttataagggctattactaactaaggaaatctatttagagtagtatgagttattccttagttttctcctttagtatagaaggggtttgttactgccttggatctagttttgttttgtgatcttcattttcttgaaagcttattgagtattggttgtttggtctgttttatttttattttttgttttaaaaagtagtttcagttttggcgtcagttgggttttgctttggttgatagtttcttctttgttctctagttttagtgaataatactttctcccacttgtattaatgttgttctattgtatggtattttgatatttagtattactgcttttcaagttgaaacttttgctcttctggttagcagggccggccctgggcataggcgggctaggcctgtgcctagggcccacctagtccaggggccaaaaaaaa

SEQ ID NO: 54679 - DNA, 1588 bp, Cannabis sativa
ccataactatataacatgttcctaattagtcttatttgatctcaaaagtcaaaagcagaccataaaccaaataattttatgtataacctttgaactatacacgccaagcaaatagtagctccaactactcactactcttcaatctgatcgaaaccaagtttcatatccatgacagggttgatcttcgcatcaattggtgacaaaattctcttcaatctagtccctctcatttctcctctccaagatttgtcaaagattcttatttaatatttttttgtcaagaaaatatatttaatattctgtcttttactgcatggtattattatactcttccactactaataatataatctgaaaaggcagaccatgcttaaacattgaccaggtacagctaactatgcatgccaacctaacaacgtacagaaaatataattataaaattaaaaaggggagaatttcaatgatatgtatgagttgtatcactatcagtagtctttactaacttgtaaccaacatctgaaactctctcttcaatcaccggatcggcaccaagtttgaaaagccatggctgaattgatcttatctccgattgctgagaaaatcattggtggtttgggatctgaagctgtgaaacagatctctctggtttggggtgtggaaggtgagcttgaagatctcaaagaaaccatttcaacaatccaagctgtgcttttggatgctgagaggaaacaatctcacaacaaccaagtcaagaactggctccaaaggctgagcactgtggtttttaaagcagacgacttgatggacgacttcaacactcaagctttgatcatgtctcacaacccaatggccaaccaggttcggattgttttctattttcaaaaatattttttttctaacatattatattttatatttttactcacatatatagaccttaaatctggactcggatttcaaaaccagacccggacccaggccctgatctagactcagacatcagacttgaaccccaattgtaggtcgagactcggacacgaaccccaaggctaggtctgaggttcggggtccaagtctaagttcgggcaaaggtccgagttcaggtccaggtctaggatctgaaataggataagttcggtatagaatattaatttttttagtaaaacaaatctaaaatagttttaaaaaaatttgagccaaaaactattaaattttgaaaatgacaaaaaaactattctttattcttacttttaaaaatacaattttaaaaatttaaaaacacagtgaaacaatctcacacacatctaaagagtgaggcaacaaatattgctttgcttctataattgtcaaattcctaccaataatgagaagagatataaactcaacaactaaataaattgaaataaaatattttttttgaacaatgaaataaaatatctttgaattgcaacaatcattcgaatttgttcaattttcgttatcttattattttttttttgaaactgatacgaaccacaccaacttgtgatgaaacccgacaccaaatatggaacagccaccaagaacaaacgatgttggaatggaacct

SEQ ID NO: 54680 - DNA, 1426 bp, Cannabis sativa
aaaaaaaaaaaaaaaaccagttttgaagtgtaaaaataaaaaaaaaataaaaaaaaccataataagtttagccgaaaaagctacgagcaccgaaaaagtcactggtgccggaaaagtcactgaaaaagttattgacgccggaaatttgtcgaaaaaatcaccgtcgctggaaaaatcatcgacaaagtcactgtcgccgaaaagtcactggaaaagtcagcagaagttgatgtctcaaatataaataaaaatagaatcggttctataatataataaataaaaataaacaacataaaataactcaaaccagttataattgaaatataacttgttctgtaacataatgaaaaaaataaataacacaaaataactaaaaccagttataattaaaatagaaccgattatattacagtgttacaatgaataaaaataaataacacgaaataactcaaaccggttataactaaaataaaaccagttatatatcatggtgaatgagtatttttgggagagatataataatgagtttaattatttgatggtttagagcatgttgaatggatatttttatttgagttattttatttaactgtttttgtgtgtgcgattttatcttagttgttttacggaactaatttttttgtctcaaatttttaactagttgataaatataaccgatttttttatattatatttgagttattgtgtgtattatttgtatttatttattttgttatgaaacgagttcttttcatatttatgcctcaataaattttaaaattgatccccactttttttattaaaaaaaaattataactggttttatgaggtattttgttgtggagctatagttttgtttttaatttatgtcttagtattttaggaactgatttcctgtttgttttttttttcattataatcggtttgagttattggatgttacttgtttatgttcattatgttatataaccggtttgagttatttcgtgttatgtatttttattcattataacactgttatagaaccggttttattttaattaattataactggtttaagttattttgtattatttgtttttattcattatattacagaatcggttatatttcaattacaatcggtttgagttatttgtttttactcattatgttataaaactgaaactatttttattcatgtctgagatatttatttttgataatttttctagtgactttttcggcaacttttcctgcgatcgtgactttttcgacgacaataactttttcggtaacttttccgacaccagcaacttcttcggcgccaataacttttcgacgaaacttattagtacaagttttattaaatttatttattattttttttcccatattttaatcctatatattttggtattatttatttatgtcatataaaagtaaa

SEQ ID NO: 54681 - DNA, 1575 bp, Cannabis sativa
atctagaattttgttagccaatgaagttgttagattcttagttaccacactactaaaaacttaatatgggatgacacacaagagacaacagcttctataaaaatgttgtctcatgttgaaactaaacataagacgatagcatctatagaactgtcgtattaggtaaaccaaaactttcatgagacgatattttttcgacacgctgtcatattttgatgtctatattgtctataactatgagctttgcaatagtagttatatttataatagcgattcctgaaaatacttcatctctctctctttccttctttctctctttatctgtgtctttactcttgattttatcaagtttggtatcagagcagttgtccataaactttccacaaactcttttgtagtgtgttcttaccaccatgctttttctcccactacaattggattggaacaattttttcttagtgcttggatgtgcttaccgccattagagcccacatgaccttcaagaaattcttctcaaacacatccctcaacctccattgctcattcttgacaaagaggaatcactataagaaatgttacttttactagcacagttcgctagtagtgcgctggtaaaagttagtatttcgcaaactgtcctagtaaaagggtcacagttttaccagcgcacatttgcagtggctaaaatctaacttttaccaacacatttacgcgctggaaaaagttatttttgccagcacttttcatttgtgctagcaaaagttctaataccaacgttgatttgccgaccctttttgccaacacatcagaagtgaattctattttaccagcgcaataccaaacttttgccagcacaaaaatgtgctggtaaagtgatatttcttgtagtgaatccaagactacgctacgtgatcttgatcactttaatcatttgttggttgtcttttgatcaatttttgttatcttgcctaatgttggaattcattttcttgctaccactgactactttattcatcaatcacttcaaaaaaaaaaaaaaaaaacaaagtcacaaaccaaaaaatacctaaagaaatatacacataaaccaaaataaaatatataagggcttttttaaattcaatcaaaattttgttagggcttctccaatgggcattgcccaaggttgttgcaaaaaaaggtgggtcacgtgtgtatgaagtggcaggagagagagagagaaaagagagagaaaacagatatggaagaatatatatatatagggacacgattttgtcctgtgattgtactttcacggatgtatgacaaccgttagaagggggagttatttgatctgagggcagggattgatctagggataattagggtacttaaaaaatggtaacgtaccgtgagatccattattacgaaccctgagacccatctaatatatttcgtacatcatgaaatacattccgtaaaagtacatcacgggacaaaatcgtgtctctatatataatggatcttatttaagcatcggtgctcactaaaataaaaagaaaaaacagaaaaaataattggttaaattttacaagt

SEQ ID NO: 54682 - DNA, 649 bp, Cannabis sativa
  modified_base (129)..(130): a, c, t, g, unknown or other
tccaatgttgccgggcactgaacatgcaaaattatgaaatttctacatatgacatataaaatgcatttggaattcaaatgaatcactgtaaattaataatttagaattaataaataattttcataattnnaccctaattatctgctaatttccacattaaagctaagcagcctttacagttttaggattcatggatatcctcctggacacgaattgcatgacaaatttcctaaaagaattgcaatcgaaacaccactaactcaggaaaggcttctgctgccaacttcaccaccaactctgaaggtagtgaagggaatcatggagacaatacaacatatgatcaagacttggttgcttgcttgactaatgtgcaatgtcaaagattgatggcattgttatcttagacaaatcatgaaccaacaactagtgcacctgctgaacctcctatggtgtctcacttttctggtaagaattctctcacacctcactctaaatggatcattgacacaggtgttactcaccatgtgtgcaatgatatttcattgcacaaaattacatattgtgatcgagctatacctgctattaaactgcctaatggaaattttgctaaggttatttgtatttgtactgtcaacatctatccaactct

SEQ ID NO: 54683 - DNA, 721 bp, Cannabis sativa
agatttatgtaaaaagctagaagataaagatgaagatgaatagtgagaaatgagagtgagatttttaaatctatttaaataaaagaaaaagagtgagacatgtggtgggattttaaaatttatttaaataaaaaaaaaaagtaaaacatgtcacttttgtgacagcccacatcccatcaactttttcatcaaaataataattattaaatattaaaaataataaataataatttttacatccattataataaaaaataaataaataaataacttcagcccatgtcccaatcagtcaaaaaaaaacaaaacaataacatatacaatttgaactaaggcagtatactgccgaaatttaaaaaaaaaaaaaaaaacagtaaaaacgttaagattaccgtaccacagtataactgaaataaaaatgaaaaagttagtaaagagtgtaaatttcccattttttttttctacattgaaatttggggtaaattaaatttacgagtattttggggttttttaactacaggggatgaagacttagatcaagtgacgaccatggaaaagaaaaataaaataaaaatttataggagaaagtggaaaaatagttaggagagaaaatgtgtttcaaacaaaatagaaaactaattaaaactcaactactaagaaactgctcaaaaccaactacactacccataagcttaaagataaagaagaagaactgtacaac

SEQ ID NO: 54684 - DNA, 1013 bp, Cannabis sativa
gtctaacatggctttgatggctctcggctcaagtgactcaaaggtgttcacaatgattcctgtaaattcacataaataattagccgcgcatgcaagaaaactaccataggccttgtcacggcggtcgagcaaaggcttcgccatgtcagaagacagcagaggcggaactccaggaatatggaggagggtattttggtctttgaagctcttctgggaatttctgtgaagggtgggcaaataaagaaaggcagctaagtcagaagccgatgaggtgtagaatatgaaacaggggattttgagttgaacagagacagtgagtgtttcagcacaaaagaagtcgatgatgaaagcgtggagggtgtagtttttggatatggaggtgagagcttggtgtacggctgacttgttgaaggtggtgagttcgaagaggctgttctcatggtggagcgaagaggctgagatggatggagggaaagaggtgggttgtgggaggtgatggaaggtgatagaaggaatggttgcggagactgtggcgatgtaaggagcagtgtcaccggagttgtaaggagcagtggagatgatgatgtgaatggagagtgatggtttgaaggtgagtattagctttccaagctcaaccatggagattaggtgtcctatggctggtgctggatacaacactattgttgacttcatatttctgatcagttgattgttactcagagtcagattgtaagaaacaatatatgaagagagctcttaataattttagggttgggatgggtagcatgtgttgctgcccaattcatttatgacacggacatgtacaatgacaacgacaagatattcttttgaaaatatgattcatgccctttatatagagaaatgtagtcatagttaatgtctttctttttagggctattgagaaaataaagataaattttgatatatatggcataaaaatttaattacactaaatatgacatttttttaaaaaaacttacaaatatgggaaa

SEQ ID NO: 54685 - DNA, 2999 bp, Cannabis sativa
aacctttggatatagtctttcaacgactgtgtggccttggtttcattttaaccaagccctttagttgggaaggtatctgtctagaggatgaaaactctctgtagagctcagtggtgaaaacgttctacgaatcaaatctcattctggacagcttaaaataccactattgtgtagtttcagataacattgttggaaaaaacctgcaatgggtatcgtctatcacatttttcaaatccgtgtggatttcaaaatatttaatatgggccaggggatcttctttcccaatgtacattttccaagttagcatcttcaacgtggttggtaagggcaacacgttaatgcgtgtagagaaaggtgagactcgggccctgtcaagttccaggtcagatagctttgggttggacaggccttgtacaaggctcttgagttgatccaattgtgcttgcactacaagatcatctctagctggcctttatcctgccagctcctccttagggttaacaggggttacaccataggggtcagcaagatttggcctatcctatccccttggttgaccattttagggcaggatgtatccgccctgaatgtttcttcttcagtttaagttagttcgaagatctactcctatttgggggccccttctatcaaacgcaaaatcccccggcctctggtcagaacacatttgagcattcccagaaggaatgtagctattgcatttagtgtttttatgagttcctcggttagtgtgctcaccaataggctgactactagcactgtcctcattgagattcgggtaaaactccccaccgcgagacctacttcaaccttgccttggtggaatatcttcccttctctgtttcgctctaagcaggccttgaaattggtcaatccttgcatatgctctttcgggtagaatttgatcatcagtgggcggatagagaggcggtcttatttaggatgatgttggctcttctagctgtgaggttttcccatgatccctaaggcattgaattccgtctaagacacttggtaatgagtggcggttcttcaactcgtaatctggccctttcattgaatcatctatttagttcattagcctcgctattctggcggttcaggtccacttgatgggcttggaggatcacagcatgttgatccatcaattcttggaattcgcatctttgccgggcaaaagcattgctcagagtagcgtgtgtttctttttgttcatgatggaggatgtttgcatgaccttaaacttgccctatgacctctctcagtctggccagttcagaatcatccccaagtcaacatgggattcgtcgacactaggttagccgacccttggcccaatttttccagcgtataccaaggaggtaggacttgttaaaggaacccccgttgtactttaggcagaatgtctagcatagatcgagactttcccagtacttgttagattctatccgacattgagtgagcctttgggtctgaaccctgtagatggagttactcgaggtggccagccaaggttggtcgggtagtcaatagtttttggaacttggagactaggattcacaactattggatcttgaggctctgtggacatgctcatctttaaaaggaccattgtggttattaggtgtaaagaggttagatctttgtaagaatatcgatgctcttaatgaacgcaccaaaatgttgacttggaaaatcgccaaacgacttggagtctaataaatgataattaatcacaaataaggagttaagaatagtaattaaataaaaagaacacaaaggatttatagaggttcagcccccttatttctgggtaatgacctactcctctttttgttgtattgcatgtgagataatactgtgcatatcactaaggaagacaaagtgaattctagctacaactctcaaagtatttatagagaatatcttttagcaaagtgctcttagatacgtgagtataagatttcagttctaggtctcttccccttgtgaattcattcactatttatatggggaaggttgatacatttggctccataaaaggagtgactaaagggtaaatatccttattttctagggtgcagttacgatctgttgaagctcctttattcttgattagatttgttgattatgagtttttaggattcagtttgagatatttgtggatgcttgttgaagaagaaatcaaggctcatatggccttgtctggtattcctggtagtatttcctctggttggcaggtagatcacccggttagtccttcctcgagacttgtcttctttgtgagtttacttatggaagcacccttgcaaggtgttattcttattctctggctgataggtagatgactcagccagatgtttcatggaacatctgtagtttatggatgtcagctatatataggacctgctaggcacacttctatcaagaagatcttagtcatgtttaataactggctggattatgccacatgtaagtgcaacgtcagatgtgaaatcattgggagaaaaaagtgttacttctagaattgaaaagttgtgcacaaatttagatttgatctaaattatactttcactagtgaattaatagtactaaattataaagaagaaattagaaggtaaaccagtaatttgaccaaaactaattaagaactaacacaaggagggctaatcacttgaattgattatatcaattgctaacctgaaagctttccctggtgacatggacatcgatgctttatacgtggcatgaaggatgacgttgcggagttaagcatacttgagtcataatagtcaacctaggagggaaccctagccctacaccaaggttgactcaaagatctctgcgatggaagtttggacttcaataacttgaatccaactcactatctttcagtattttgtaccatgcagtcatggagtaacctaatacaaggtccgagagctaaaactacaccagcctgggtacctagggtttccact

SEQ ID NO: 54686 - DNA, 798 bp, Cannabis sativa
taccaaaataatagattggtagttgaacattactacatatattcatgagataaattaatctacatatccaaaattatgttagttaagaactgatcatccacctgccataaacatgagaaaaatattgagattttagctataagattaacttataatattcttatagtgcactttataataaaagtactgttttggctaacataataatttataaacatatataagataaaaagagaacaaaaaaagaaaaaaaataaataaatagagctgtgcataaagatgacgatagtagagatctagtcagtataatttatttagtactataaatagtggttcattttgagtttatcataagaatatacatgaggtaatcaggccaggctaatagtctgtgcaacatggcagttgcacagggccccaaaataataggggcctattttttttttctttgtttgagaatataaaaggatgttaattaatattgagaatgagaaagttttttttttttttttggtaattgcccataacgttaatgttaatgttatgtacaattattatataaatacacaattgatatgtccatttttatctcattcttcctctttttctcatttttttttaaaaaaaatcagtaccattctcttcctttcccttttttttattaatcaattttagttttttgctaccatcaattctcataaataaagccaggtatatatatattattacataatataaatgttacataatgtatatatattgtttatatgtattctctttctatctaatctaatctct

SEQ ID NO: 54687 - DNA, 1156 bp, Cannabis sativa
tttaacatattattcatattaatttttcgtatcaaatcatactatattctttaattcatatacatttataattataatcctaaaccgtattatatactctaattgagttgtattattcatattattattgttgttaaaagagatcaaaactattaagctgtttctaactaattaatggaggtatacgtaaatttactctatatatgactatggagctgtttcccaatctatatatgacattaacaattaattgaaactcaaatttaatttccaaattcaaataatttacgaaatatatctataataattaaataataataatgactatacatatataagtgagctccggtaatgacatcgattttaaagtgactataagtgaaatacaataataatagttattttgaaattatatatatgatgagtttctttataaatttattatctttttttaaatatctatccatataaatatatatataaataagagatatgagagggtgacatgacgttttaaaatcacttcacataactttatatcttctctctttaattctctctttttttaattttttattagatttatatatatttatttattttctcatatttttttatcattttattattattaattatattaattaataattttgtttaagctttttttaataaaacatggatgcttttttttatataaaatattatatatatttataacataaaattattaagagaaagaagaaaaaaattctttctattgcaatctaaaagttatatttgtgaatttttatatgtatacataaaaaatatatgtataaaatatacttttaaatcaattgtttctatgttaaacaacaaaagcattaaatctataaatattttcttatacatattgtgatttttatttttctctcttttaattaatttttgttttttatttttattctttattagtgttatttttgagaatttagagctttaaagaattttttcaagctttaatttgatatttttttttcttgctatattgtttggagtgaaaaatatcgtaagaaagcatataacattacaataattacagtgatgaggaagttgatgatgatactatagagtcaagcaacaacaataataattttggaagagaaagagaaat

SEQ ID NO: 54688 - DNA, 1757 bp, Cannabis sativa
atcatccaagacaatgctattttagggtatgaaagccttcgttgtatgagaaaagggagatttggtaacgagacaaaaacggcgttgaagcttgatatgtcaaaagcatacaacagggtggaatgggacttctttaaagctatgatatcatgtcttgattggggtatgaagacgactggataactaacgtaatgaatgaattgtgtctgatctgtctctttttctattcttattaatggttggttagaggtaattttactcccttcccttttcttttatattctgaagggctgtcttgtttgattcatgaggctgaacgggctgggagaatccatgggctgaaatttggtttattggaacaaaggttgttccatctcttatttgcggatgatagccttgttttccttgatgccactaaggaagacaatcttgcttttaaaaggggttttggagttctatgcaaacttatctgggcgatgtattaatcttgagaagtccgatctttgtgtttggctgcatgataggaatggctaaggctgaagagttggttgaaaaccttcgggtaaaattggctaaacaccacactaagtacttggacatgcctacctttgtggggaaaaacaaaaaacaggtctttgtaaagcttcaggatcgggttgaggctaagcttcaaggttggaagatgggccttttttctcaagcggggaaggaaattttaattaaggcagtgattcaagctttgtcgtgttatgtcatgaattgtttttgatcatgaaagggattcttcatgatattgaaagtttgattgctcgcttttgatggggttcctccacaaaaatacacaagctacaatggggtaattggagaaagttgtgtaggctaaaagagcaaagtggcattgggttccatgacttagaagattttaatcaggcactcttagctaaacaaggttgaaagttactttctatgcccgagtgtcttttggctcgggttatgaaagcgctctactatcctggacgtctgaccaaacaatataggttcacgagaccggaaggaattgcctccaagctcaattcagttcccaaatgtgtcgatcgtaattgtcatgaccaacctggtcggtatagtgatatgttggaatttggactccaaaaagtcacttgaaaatccttcctcaaaggattctcaagaaaatgaagattcacttaatgatgaagatgaactagtagctcagagtgttgggtagtcctcaaaaagtagctcgagcaggtcgtcgtctatttgatgatcacctctccgaaattcacctgatttcatctataatataaggatagagaggtgaggcacagaacatcttgaaaagttcctgtcattgaaaaacacctccagtcctccaatcagagaaaaatttggatcaaacccaaaagaattcatcttcttgatgaagttttgaaaaaagagtttttaggctttcttgaaaacctaaattactaaagtgctttaaatcataatagcacagttaaaaattaaagtatacgggaagcgagagtttggtcgacccttaacaaacagggtaaacaaaacaatgaacaagcaaaatgtagatttgtgatccaagaacgaagaacattcaaccaacagtttgcagaacctacatgcaaaatgatgaaataattttaagcaaaaaaggaagggtgttaaaatttactcattttttggcttgatgtttgaagaagagatccttgaagatgtagtac

SEQ ID NO: 54689 - DNA, 1490 bp, Cannabis sativa
  modified_base (1225)..(1230): a, c, t, g, unknown or other
cttacggatctcgggactactgactgtcacatttgtttcaataatttaaatttatttatatgttcagaattctcttctgatatgctttaatttttttttttaattaactagctatttcatgtttcaatatatcattttattattttaggcttcttatgtttttgtttctatattaattgttagttttgtttaattagctatctaatgtaattggttcctgcattttgtttaagaaactaattttatgttttaatttatctagtgtgattggtttttgcattttaattgttggttaattgttggtttaattttttttttaaaaaaaaaaactagtttttatgttccgattaatcttttgattatttttggttgtattggtatctgatttccctattcagttattatttttgttgtttttcataactggctataacattctagtttttaattttgctgatttaaataattagtttttcagttatagttttaactagttgattattgtaaatggtttcagtttgtcaaatttcaacgtctaacaccagtgacaactccaatgtccaactcctgtgactttttggtaatgaagacaactctaacgaattttttgatagtttttggacgacaataacaacttcggtgaatattctcattctattttcattttttttttgcggctaatattttatttttgtggataattactattttgggtagtgtagtgcatgggttgatggttaagtattggagcttttgaaaagtttgtaactagttttattttggtattctatttgatttgttcaatattctgtatagtatctagaatacaagcatgtaaaatttatatataattttttgtatacgcaattgacttttttcattaggataacaactctagcgaatatacccttattctattttctacttcttttgcggctaatattatgctttagagtggataatgaatgttttggtagtggattgaaggtctagtattgaaatttttgagaagtttgtaactggtttttatattagtattgtgttggtattagttttggtaatgggttgataatccagtttttgagcttattagaaacatgtaaaatttatgagttttggtatttgtatagttggattttttattaataaaatagtttcgattatatagaaaaaattgttttcttaatttattgccttaacaaaattatattattattattattannnnnnttattactattattattattatagcttctatagatttttttatatgcttttatagttgtaatatctgtataaataactagttattttatatgataaaaaaagaattacaattatatagttttttatgacattccttcttatctataatattttttttttcatattttaagttttttcttttaaaaacaggtcatatttagtataattaaatttgtataccatatatatcaaaattctaattttttttttccatatttttg

SEQ ID NO: 54690 - DNA, 1567 bp, Cannabis sativa
agagttaaagaaagttattgaaaattatcgagattagagcaaaaatagtatgatattttattattgaaagatgggtaacctgggaggatcaatagaatattagaaacaatttgtgaacatatttgattaatgttagattatcttagaataatctcctccctgataaagtgtttgtctaaaggtgataattaaatgtaccactggttaggtactttaataaaagtggtatgagagaaatattagacacatgttcactggagtaatacaggtgagaaaagaatatgatagaccaaaaagatccaaggaagttataaaatcatagactgaatttgagatgtatgctcacttcattaattacacaaaaaagctacactgatttaaagtgtagggatatcgagttccaaatagaaactttgttttctccgagtattacttataaaaaggatacattggaaagagaatttaaaccctaaattcattataccttttatactggataaataggtcggtagcttatttgttagccttaactcctgcgttgtccggagtatataatgtgtttcatattaccctactgagaaagtatgtatcaaacccgattcatattctgggttataatgatttcaatataattaattatatggagagcagattgtccaagttttggactagaaagaaaaagtattttagtataagacaatttcactagttaagagtggtatagagaaacggcatggtggaagaaataacttcagagttagagttgtaaatgagggagcaaaatcccgaattatatatttaagtaaattttgaggaagaaatttctataaggagggtatggttgtaatatcccgaaagtctaatcatgaataattaggatttattatatattatgggttaactaagtagtaatgtaatcctactaacttaatttagcataaattataaattttgctttaagtggataaataagcataatttgttgattacaaaaatttaattgaaatatgtggatataatgtaagttatttgtgaaataaaaatattttcaagttcgacgaccatggagactcgattggagactaaaaatgtcacaacggtattagttagaaacattattatcgggataacttgattttagaaataccagagtattttagggtactcggaattgaccaaatacccttaaagtagaggtttcttagtggctaagagatgataagataattattaataagaaaaataactgatggggaattctagttaagcgatgtagctattctctcgttctcccatggtgaagaagaataggatagttcgaaagcctactatcaatgttgctgaggctatgtccagcatggaattcatactaatgacaaagatgaagcttcaggtacgaatccagacttgagtaaagttgctattgatgactttggtgaggaaataggtcaaaatatggtttgacaatctccaagtatcttggagtttcacacacctcatattagcatgaattgggctaaggagggggaattggacaaggccagtttcaagaatcagctaagagtct

SEQ ID NO: 54691 - DNA, 1078 bp, Cannabis sativa
aaatattaatttgtagatttatatctgtgagaacgaaaggcctacattcattggttgcctaatgcctgacttgagagattacagtaaccagactcgagaatctttaacatgttggaatcttgattgtattggtttcaattttattgagtatcttttgtgctatatcaaaagactatatgcaaacatgcaagattgaaacgaaaaatttacactatacagaataagtataaatatgatttagacaagaaaattaacctgatccttggagttgttaaatctttcaatgattttctaaagttaagctacaatagaagttatgataaaaaaaaaaagacgtcttagtctcacaggtacattttacatttgctgaattttattacttattgttgatgcttctaatattctaaattaataatttattttttggtcttttaactataaattatgtaaatgaacatggaccagtaaaaaaaaaattctactcttttgatgaaaacatacatgagtctacattctcttcagtaaatggtgcaatcccgaataatggtacctcttaaaattaaactacatgtgcaattaataataataatataatatatatttatatactattgcatcgtttaccaatataagatatcattcaccacaatgacgaagatgcaaataaagaaattgaaatttccagacaacaaactactactcatagaattaaaactgtacagtttgagaatgaaaaatatattataatattcttttctttctaattgaataaactcacatacaacaccttggaattttgagcctccttcatacacatgccaatattgcggtgccattttatggtatgaggaacgaactacaaaaacaataaaggtcaagcatcccaattcttattttgttgtatggaaggacgcgtacaaataccaatattgaaagaagaacctccattactcaattttctgctcggagcagaatttggacaaaagggctttaaatttcaaaaaaaatataagggcttataactctatgtttgcattcacattaatgggaggctgagttgatacaacaatcaaccaat

SEQ ID NO: 54692 - DNA, 757 bp, Cannabis sativa
cacaatatatcatcagtgtgccttttagattgagtggggtatatatacataaataaataataacatatataattatggtgcactgtgtttcaagatcacatatctgtttcgacatattaatagttttttaatttaatttttttatatatataactacgttataattatctaaaattattggtatatttttaattttttttaagtaatttataatgacaaaaataaaatttatatatattttattatacgtgtgattattttttttacatgtgtcacgtgaggtaaataattatttatgtcttatttttaacatggtaaattatttagaattttttaaaattttactaataatcttaaataactataatatataccattgttaaaaaaattaattaaaaaattctcataaatatcaaaacaaacaaaaaatctatccaatcacgactcttttaagtacaaaaaatttctataattaaatacacggtgatcaatatattatagttgcatgtgaaaaatataaaattaagctatatataaaataattttattattagtaaagtactcatattaattagagtcttatatataaattaattggttgatcagtttcattaattagttaattaattacataatactgcctctgaaatttagaatacacaattaatttcagactagctaataagattcatcagatagagacaaatgtatatagttaccattggaaatatacatttctgaaattaataaaatagca

SEQ ID NO: 54693 - DNA, 927 bp, Cannabis sativa
atagacgctctacctcaggttacagcgtctacttaggagggcacgagttcctttcaaaagcaagaacagacagtgctacattattccaacaccaatacttaaatttatatgtatcagaaaattagctaataaatttcatatgtattaggtaggacactataatcaactagttcacaataaaatatgagaaagaaataatatctcatgctaatgcaaagtaaagtaatcaagttcatcatcatcagattttgatttctaatctaaaactaatatgaatgagcagttacaatattttaaagcaacaaaaatatctgcattttgttaataaacaaaatcataatacaagtaagcacctcacatctttaagcatgtaagcaattcagattcaaaaacatttttaacatatcaataaaccaggcttcatcatattccccatgcttcttctcaaaaatcacaattctaacttccactcaacgaattagacgactctattgatatgaccttcgtaacaaaagtatccttaaaactgacaagtgttgacccgagaagaggattataagaaagaagaatgtgtaatgatagctcaaaatcttcactagtatcatctaatcatgtaaccgaaatttctcaatagacaggcaacccaacaaaaatgttgtaatttacaacaactttagctagattaatcctgcacaattcgaaaccaaaccaaactaaaccaaaaaacacacaagcgattaaatgtaaaactgaaagtaaaagaacacaagaaatttatagatcggttcacgtcttaaatggagctactcctcttgaactcctcttgggaattcaatctttactatgacaatggcacaattacattcttggattctcaacaaatgtgtaacaatgtacagcagccctccttgaacagttgaaaactaa

SEQ ID NO: 54694 - DNA, 1450 bp, Cannabis sativa
actataataataaattaggacagaaatatagttagagttagctacgtcttaactaactgtttgatacttgacagttagtagtttgtttgttggttggctagtagcttttacattcttaattaccatgatatatataaatgtaaatcattgtctaacctatacaaatacaagatgttgacggtgagaatttgtcaactaacttattggctgaaaaattaaattatgttttaagctcagatctaagacaaaaagaaaaataaaatatgaatgcaaattgctatctcaaaatggaaagagaatgataaattttctattgctctcaaagtcaagttataagaatgatttttcaaccccctctcacatatcaaaaagagatatttatagctctaatcacctgagatacaaagtggtactgagattatttttcccgaattactaaatgggataatagtctcccacaaatgtaattaagtaaactagttatcaaatcctctagcatgggtaaatactgaattagtaaaattattcaatctagtccaatctcaatatgcatattgtatagtacttcagtcttttcgtaaaaaacactaaatatatatatttcaagtataaagaattggtttaactaacatgatttcataatcaaatttcatatggacttcgttaaccgatattactatgtaatctttatcttaattagcatatggaccctaaattaatcttcgaaaattaaagtacttatcatctaaaaattaattgaaaaaagtgaaaatttgataattaacaaaatactacgatgtccttttttatataaaaaaaaaaacaaaacaaaattaatacatgaattttctagtggatttagttaaaaatatatattttttttaggagaaattatatttatttatgatatgatttaaaaattgaaaatgtgcagtactgtggaagtagatatgtacatgggttcgtaaaagagaaggtgccaaagttggaaaggactgagtaaataggaccaaatacaatggaaattaagatattctctttgcaaaccaacaacatcctaatatgtattagctgtgaccttttgtctccttgcatgtgctcatgcattttatattataaatctttgacctttttgtttaaaacaagtaaattaaaaaaaaaaacaaaaaaaacaaagaaacaatcaaagaagatgtaccaaaagtttagaaataatttaagtacatgaaagcttgttcaacttatgtctttgctgtctgttgcatgtatgatatagtttgtaaatattgtgtggacaagagatagagaagataattgttaattaaatagtcttctttatgcaaatgagggacaagtcaaataaagttacaaactaatatcaacaattttactatcacatttacaccatgagattagtaataaatcaactttaagttattttattttaaat

SEQ ID NO: 54695 - DNA, 786 bp, Cannabis sativa
cttcccaaattcgaatcaaaccccagaaaaacatatatataaacagataaatgtaatcataaatgcagaaaaggaaaatgaagagaacacactaaatttttatagaggttccccaaaattgtgttgggtacgtcctcttcgagctcgcctcgttccactatgaatcttcaatgttcaagagttacaaaacttggattccaactcacaaaggtaagagttggtaatctgaaataatttacagtgtttttctcctcttttttctctctgttttctctctaaaatttgtactgatgttgttttctttcttccttgtgcatgaacaatctctcctgagtttcggatctccgaaccacaaccttgggttccaaagcttactccattgtaagcctcttccacgaactcacttctctttttgattctcaatactgctttggtgcaaaaacgaatctgagttttatttttccctttgtattttgttgttctgattcttagatctgttgctctatttttctgatctgatattgtgatgttctgccttgtaataatgttgtttctagtggtttatatatgtattgtattagagcacacagagaggagagttagttacaaagtattaataaactttttaactaacccaactactttgtctgggtaacttagaggccgaaggccacataagatttttacaatttgtaaactctttgtaaatgtactggtttattttacagtgtatagttaatatgggattttatttcaacaatttccacctaaaatcccatatgaact

SEQ ID NO: 54696 - DNA, 648 bp, Cannabis sativa
attcaattaccaactatatcatacaagacttttcacaaaatttcctagtctttatcgataattttcccagtttccttcaaatgaggttacatatatatatagcaaaattataattttcaaatcataatatataaatatatatatgtcacgagatacaaaatattaaaggtccatcaacatttaaagttgcctaattattcaactgcatttataaatttctcctttattattggatctttaattcttaaataaagatttcaaaaagagaaatgttataaagaaatcaaacatattgtaattccaaaatggttggcttgatatgaatccacgtcaatcatttgaccttaaaatatgacgtaatataatactatatttatattctctcttctactataatatttctttaattaaataaataataataataataataaatcatcaaactgttttttgcaaattaaactactcgattaagatcttgagttttctctatatagacatatatcgatataatattattcataacatggaatgagaatgaataataatatataataacgttgcatatatattatatgtatatatttgactaatgtagtaaaattttatatggttaaatattttttgatctaagctaattaattacac

SEQ ID NO: 54697 - DNA, 1358 bp, Cannabis sativa
tctccaatcccggtccgggttgttgtgtcggtcctccgtgtctgggttcgggttcttgtcctgagtcccgatcttagttttaattcggctctgtgtcctggtccgggtctgggtcttggtcctagtcagattctagttctgggagtgagactcggtcccattccctcggtcttgttcccaggtcccggtacgcttagaattccgcttccagtttcgggtcacgaggtaccggtttaggttcgagtccgggtctgggttcaggtttaggtctaagtctgggtctgggtccgggtttaggttcgagtctgggtctaggttttactccggtggatccaaacaactatgggttaggtttaagccccgggtctaaatcaggatcctggtctcatgtcccacactagtttcacttcgggtcctaggtcttggtcctagtccgggtttatgatctaggtctggggtcaggtcctgggtctctgtgctagtttttgaagcccgggtaccggatctaggtccccatcttggtccggttcctaggtcccagtccgagtccaggacccgattggggttcaagtcctagtccgagttcgggttcgagtttccgatcccggtctgggtctagatctaggtttgagtcttgattcaggtccgggcccgagtctcgggttccgatccgggtctgtgttttgaggcccgggtcaaggtcccccatccaggtccgggtcctaggtcctagtctgggtccatgtttgggttcaggtccgggtcctaggtcctagtctgggtccatgtttgggttcaggtcgtagtccccagttccgatttttattccgtgtctgggttcgagttttggtctgggtctccgtctaggtcgggatttgagtcctagttcgagtctagggttgggtcttggtccaagtccagatcccagtctggatttgggtttgggtccgaatccgagtccaagtcttgggtacgggtccaggtttgggtcttggtctcggtctgaatccaagtcccaagtttcgatcccagtgggtatgggtctaggtctgggttcaagtctaggttcgtatccagatccatgtctaggtccgagtttgggtctgggatcgggttccaggttcaagtctgaccttatcccggactcgaaactggaatcagactaggactgggactagaacccagatattggaccgtaacagggccaaaacctaaacccaaactcagactagaacccataccgggacttggacccagaccgcgacctgtgacctgggaccaaaccaagaccgcgacctagatacagaccaaaaccaagacccaaaaaccaggttcgaacccaggacccaagaacttga

SEQ ID NO: 54698 - DNA, 1369 bp, Cannabis sativa
caatcaagaaaaaaatgaaattattaaaatatcgaactcatcatataattaaggctaactatgattttagtcctgaactttgacatgtattaataaattgtgtctccaaattttttcattaaaaatttttcccgaactattaatattgttggattcaagaacttctattcaattatgttcaattttactaatgtgttgattgtttatgtatcagatagtacccccaaactttgatatatacatcatggtgctctttgaatttttatcatgtcaggcggtatccgttagtaaaatttgacaaaaattcttaaatcaaataatctcaaaatataatttgagagaaagttttaacaatctaaaaagttcgatgacacaatttaatacatgtcaaaatttaaaagcaaaaatcataaattagttcattaggaagaaaatacaatgcatagtttcaattacaatcaaaaaaaaaaattgcacatgggaatatatgtatctagggcctcttgatgcccatgatgatcaaattaacgaaattgaagatatgatcataccatttattttaatcatttaactgaaagaaggaaaaaaaaaacttgtgcagtagtactaatatgtattaactttgcaatagtactttatagagatctctattaatatgatcaatatattagatcatctttttatgaattataatatggctaatacatatatgtctacaatagatgatcactaatataattaaatatttagtgataataatactctaattaagcttacatatatatgaatgaaggtatacatagcttaattaactaatcaattagatagctagctatatggttaggtccaagtttatgtgattgtgatcataagttgtggaattattattagaatgggaagtagtaggaggaggaggagtttcttgtgaagtagtacttgtagttgtagtagtggatgatgatatcaatgagagctcacaaagctcattacagacttccttttcctttttcttacgcctattattaatatcactactgctgttaatatatagtgttgtaacaatattaatgtttgttgtatcctgtaaaagaaaaaaaaaattatacatagaaattttatttaagaatacatttaaaatcattgaaaatttaaactatatatgttatatacctgatgatgaatagcctcattctgggtggattgacattctatttccccattattattagtatgatcaaaatccctccaatcatttctcaactcattattatttcctaatgacctgcattatcaattcataaatacaaataaataattaataatttagagatagagtaaatgatgtatgatgggatcaccccttccattc

SEQ ID NO: 54699 - DNA, 522 bp, Cannabis sativa
gttttttcttgtatgtaccactcgataggtagtggacgtttaaggcttttttgcttttctcttgtgcttaatcccttatggggttcacatttctttggaagagttactgtcatgtttaaatattcataagttagtacattcacacaaatattaataacataagttaaatattttaaattacataacctcgcacacagtcagtcaatatttgtcgcaccaagtggaggatctccatcacccccgtgagaaccagcagcatctgtcatatctgagaaatataagtagtaaaaattttgtaataatattaatgtcacaatgtaataaagtaccaattaataatatatatacaataaattactatttattcatcactttaataatcatcatcattataaatttcttttaaattatcaattttaacgttgtgcccattgtcattttcatcttcatcctctgcttcttctttgtcttcctccactacttcttccatctctctatccatctacttcatctatgtcttcc

SEQ ID NO: 54700 - DNA, 1433 bp, Cannabis sativa
  modified_base (665)..(670): a, c, t, g, unknown or other
taactttttgttgtggttaaaaatcacaaaaaattaatgttgtgactaaaagattgtcactaaaagtagcagttttttgtagtggccccggcccaagacctggatttaaacacgaattaaataaaataaaataaataaaaatgaaataaaatttatagaacacatttttttcgttttttgttttaaaaattaaaaaacaaaaatggttattaaacacattttattttttaaaaacacacattttacttttatttttgtgattaaaaaaataaaaaaataaaagtgttaccaaacgcccccaaaatgtgttttataaccacttttatttttttaattttaaaaacaaaaaaaataaagtatgttttctatttatttttgtttttcaattttaaaagcagacaacaaaaaggtattgtaaccatttttgtttctcaattttaaaaacaaaatttgatgttttttgctttttctaaataaaaaattatgactatcattgataataaaaaaaaaaaaaaaagtaaatacaagactatacataaaattcctaaaaaaaattatatttacaagacttatgtgataatgaaatccaaaaataacaataatccatacaaaataatccagttgggtcaaatttgaaaatcctgtaaaatgaagtgataatgaannnnnnggataacccaagacaatccatgtcttaaggtcccaatgagccagcatcaagtaaaacatgccaattattatgtggagctcatgacatctacttgtaagaatactcggcccttgttactctatattgaacctgggaacacaaaaaagtcagaagcagaatccttcttcctcttcttcttgtttaattgaaatttgctttctcagattagtggagctgagcttcaaggttgaaattttaaaccaagtactagccgtccactttagcaccttctctctatcactctgagtcatccaattaatcaaacttttgctcttctttttcattgttgtttctccttatttgatcataataagaaactcttgataacaatggaatcatcaattcgtttaagtgctccattatcagtagtatgaatgaaaactacaacttccagtaggacctcaattccttgtaggcatgcaatctcctaaccatctccttcaaaattagttaaaacttttgcgtaatggtacaagttgatcatagaaaatatatgattcatatatctttatatattaaaagtgcctatttaacggcaattcttgattcttggtttaacagaatattcttttcttattctgttaaatttaacgatacactttaacatcaacgttaactccaataaaaaaataaaaaaaaatataaaacactttagctccaaaaaataaaattaaaataaaacgatagtaagcctaattttctaaaaaattgtaatttttttatt

SEQ ID NO: 54701 - DNA, 1600 bp, Cannabis sativa
  modified_base (1253)..(1262): a, c, t, g, unknown or other
actcttatgtgtttattttcattgttttataattcatattaggatgttaatcaaacatactttgtagtaaatctagatcttggtaaaatatttccaacagtaacctatttgaccgggtggacaactaagagaaatgaaaaaaaatgagttaaattgctggtattcccatgttgaatataaaacacgagtagttaatagaggcatcgatctaattgattcaaataataaaatattttgtttagaagtgatctagcgttaccaaaggtgagacaatttatgagtattgtttagaaacctagatgaattgaaggcgacgattgtgtactaattttgatataatgtgggcatgtgactacctatgttagcaagaagtatttttttttggtagttcaccatgacggaactctatggttgagtgtccttgacttcgggtggtttcatttaggaaatttccccatgaagcgtgcgagtaagagcaaagcacgttagaaacacttggattggtctgtgggaccaattatcaatccaggaaatagctatagtgatgcactcatgtataagagccatcattgtgggagtaagggtccaatggaggctcgaagcggggatgttaccgaggtaacgtataaaagaacgtcaggaagagtagtggtgtcaataaggtaaagaagattacctaaattacttaaggtgatacggtaatgatggagagtaatttataattgactggatagtcagtatggtatataaggagaccgttgaaattttggaaaaagattactttattaagtaatcatagaaatgcatacttacccaaaatggagaaaatcttatgaattaagatgcaatttaatagacacgtattgagtaattggtggatattagatcacaaagtaggttgtttattaaataacgagctatataattgagtgtagaataagttttaaagtggttaaccaagtatgaagatagtgatgattgcaaggaagcaatggtagcatatgaaccagggagtgaaaccttaatggtaatgatggaaaaaaaagaacaagaacacgagagtctcagatgttgatgaatcaacaacatgaacgggagactcactataagttggtatggtaatttgtaccaatgggttatcaatataatggagaatatttctgggtgtgttgaaaagaatatcaagatttctaccaaacatagaaaataaatttcaggatcacgaaatgatctttgattaaatgttattagtnnnnnnnnnngaaaatgggtatttccagtttagttgtgggtacctggtataagcagtattgcctctactgtataggtttaatcaatttactttacaatggttgttaatcataaatgattgggaaatttaaaagttgtgtcagctaaagagaaattgatgcaagttaaaataagtagatttgaacaagattcaagttgacaataagatgggaattcctcaagtttaagtgaacgaaaatcgatgaggcattgcaagaggttaatgaagggagtgatggcaattgaattttattaatgaaagaatgaaagcaagaaatacaattaagaacgacaaagaagcatctacttt

SEQ ID NO: 54702 - DNA, 1000 bp, Cannabis sativa
aacgaaacaaaacaaaaccatatcatacagacaagattaaaacactcaaaactatactacagagacaagactaaaacattcaaaattatattacagagtcaaggctaatcagaatatcaaaaatcgaatcgcaatagcaaaacacaactccgaccaaacaatacctaagcccaagaaaaattggcgggtgtggccggagaaaaaaacaacctcgagtaagtatataatatgtaaatgaagaattaattatggcaaaattgaaaggagattcgaatttacgccctaggcttgaatttaagttcattattgaagacttcaaatacttttcggtcatacaacatacaagtgagtattctcaacctgcaagatacacaacttcaacccaaagcataaagcacctcataattaacttttgtcacattaatgggctacctacataaaccaattgacaaaaaaaaaaaaaaaactaaaacaaaatggaaattataacaaatgatcataaaattatgttagtaaattttttcatttcaaaacttgtagaaaaatggtccttttagactatttattttttacattatttttttcccacaaaaaagaaatcaatatttttttttttttaaaattagaagcaaattacttaaaaattatggtatatctgcattagttttgttaaaatcttttttatttgaaaattatgtcaattttttgaattttttatgagttgttgtgggttgtgtgtacataaatattattgtacaatatatttctttgttattgtatggtattattattcttagatgatatttattttttattttgttatgtataatagtagtatataattttgttagcataatacaaatattttaatatatgtatagaatttattggcatgctacgtttagttattatttttataattttaattgtatgatatatatttattttaaatagtatttaattagtttatattttcttatatacaatggtgatatataat

SEQ ID NO: 54703 - DNA, 737 bp, Cannabis sativa
cacacaatgagtggaccgtaaaggctctcgagctatttgaacggtcgtcaaaccattatggactgcagagaaaaaggaccgaaggttctagcgctaacatcgagaacaattcttgtatccccatcgagattgtaccaccatcaacagtgagggaaaaaggccacgaggccttcaggtctcacccaagtaaagggcacaaaacttgagaccagtagaggtggtggtccaatcatcgtgcatggttagggcactaactacctgagctccatgaaaggtggttgtggtgatacagggccgagattccattagaatccgagctctgcgtctttcagcattacaacgtaatattacgtaaaataattttcgaaaaaaataaattacataaaatacctatgtcccataagagcttacaaattttctagagaaaatcaaaagcatatcttacacctaatttttaccatacaattaatgattcactatctcacatgcattaacaatattatcaccaaccattcacataaatatcacatatatagatatatctataaatacataaaattcacacaacatttaatatacatacataatggaatcatctctgatattatttgttgattttgtagtactaaattaggtaagaagggaaataataattttttattatcattgtgccacatcccaaagatctccatatgtacatatattaaatttagaataacgagatgaaagaaaatatt

SEQ ID NO: 54704 - DNA, 662 bp, Cannabis sativa
accctatcaataatactaaattttcaaatgtaaagtaaatgaaatatcaatcgactagagaaaaaaataatcaaattatcaaaccactagaaaagtaattattcatataaacatttaattcattttcttttttctattgtagtaagttttttccattgaaaaattagtggcaaacttctaacctatttttataatgggtgaccgggtaaaatcttctaatttaagtatagtggtatagaaaggaaattaacgagttttaaaggcaatcattttatatatatgggttgttcaagtggttgctatgtaaatttgagttgcgatttagattgctacgttaattgttatatgaattttcataaaaaaatagaaaaaaaaactattttgaaatttaaaaataaaaaaactcctaattttaatatgtgctataatttgagcctttaggttgaggttcatcgaaagatttaaaacttgtgtataaatatatatcaaaaattgtgtttattgaaagagaacttacagtaggaaattggaaacaatgtgggttagtctgacaatcattatagggccaagcataagatccttggccatcaaaagagcctcctccactaatctccaagttaacaatatatctaaaactaatccaactttcaagaccaacccaa

SEQ ID NO: 54705 - DNA, 1036 bp, Cannabis sativa
caacatctaactacctgctcaatacataaatacatgttgcaaaatgtgatttcatcccataatttattacaggaagagaatgacatttgcaaatttgaattcaaatatatatccgaatgttttgctgtcattagtgttatcattgaactaaatattaaacaacataggcgtctagatctaaacttcttattaacacactttctggttacgtacttcaagtggaaagtataccatacttgcatattctttcaaaatctcatttcattttgagttttctttaaagaataatgagtatttttacccttttaatttatgacactataagattgtgccccttaaatacaaatagttatattaaaactaagattaattttatccaaaattaaaatgtttaatgatattttcgaaaaacgaattattcaatattatgactaaagaaaatacgattcaaagaattaaataaaagaacactcaagattttacgtggttcaggtagtaatgagccttagtccatgagtcagcattattatcagataagctagaaaagcctaaaggattacaatgaatatgaaccctctattctcttctcaagcttgtgaggtaagaaattccaaccctttgcatgaaggattcgatgcgtatttatgagtatggaggtcgtacttagttaccctttccttctaatggggtgtttacagataatacattactttggacttatcaagtgaagcctagctcatgaggcaatgactgtatgctgacttggtatgttgatcacggttaccactgtttataatgtgtcttctgattgtggataattaatgcaatataaattacttaatcttcaattatatagtttcttgttctagcttgatatttattctctgttagagatcttaggaaagtgattttcttattctgcacgaacaataaataggaaactacagatggcttctaggtacacactagagggttgttcaggttacacaaagctaggatcttcccagatacaaacaagccttggcggagactcgtt

SEQ ID NO: 54706 - DNA, 1669 bp, Cannabis sativa
  modified_base (829)..(831): a, c, t, g, unknown or other
tgctaatcatgtttaccgttttcaaggaaaaaaaatggcaccacaagtcacagtttacttccacaaactaccaacaacctcttctgcccaaggagggaaaaataaccacttcttggcaacattctctatcgatgaagcacccatttcatgcaaggtactcgaacctgtggagaatgtgaagacatctataccagttagaaagactggaagagggaaaagtgtgaagagtacccctaagactacgcaggccttgagaggcaaggcagcaaagggcttcaaaaagaggcaaacccgggcaataaaaaagtccgcggcaatagttgtcaagacagaagggaggccacagaagattggctcccccgtaatgatccaaaaggaatggggccatgagcatatcttgattggttccattcttattttcttgcccactgtcgcctcagtgatggttatctctgcggaggaaactgaggcaacaccgacttctcaacctcggagaggtaggaaggcaacaaatggcaggagggggacaacaacttcaccttcaccaacccctcttaaaacgagagagttagtaggagacacgccgattaggcctccgatcgaaatccctgtcaaccaccaaggtcaacaggggacatttactgagatcaatgaacaccctttattagatgaggggtgtaggacgcctttctccttcccaaagaaggctagaagtgacagtgtaagggttcccaaaacaagccctaactcattccgaaaagaacacagtgactagatgttcctccagggataccgaccagcaagggtcacttcaactgttaagcctacnnnctacacgggccctgtaactcgatcaagagctcgtgtcatgcgtacaattcccgttcaggaatcagtgaaccactttgttcaaaaagttcaggaagagatgtgttgcacatctgaacactctttagaagacaccctttattgaacacagtgaggtgatgtctacttatctcattactcaattcgaagcactaaccattggcaatgataaaaatatgccaatgttagtaattgagagaatcagtaatgaagagaagattcaagaactacaaagattattggccgagagggatgaagaagtagcccgactctcaacacaattatctcatcaagctaatatgagacaaaaggagagtgaggttgggcaacattcctcgtcttcagcgctgcctataggcaatatacaatcgccaccactcaatgtgcaaccaacactagctggtgtccaaccttagcagaacttgaaggcttttatcatggagagtattcgggaatatgaggctgcacaatgcctattcttggatatcataagccatacccgacttactatgaccaaattccatttccaccagacgacgtcagacaaaagtttgaaaattttgatgggattaatggttctccccatgaacatttcgcatatttcacttctgcatgtggtgaatctgcccaatcagatgcactattgattcgacaatccgtgcaatcgttaaaagaagtagcattcacatggtatactcagttacccccaggatcgataaatacttgggatgacacgcaaaaagcttttctggcacaattcgtgagctcaacgaagacaataagtctccatgacctggtggaa

SEQ ID NO: 54707 - DNA, 667 bp, Cannabis sativa
tcatattattagttcgagtactagtactataaactaacttcgttcattattaattcttaatgttagaagtaatttctaatggtatatttcaaattacttgctaaattagtctttttgaaagtgtttttacaaaatggtttatactgaatagataatctctttgaaatacaatttatgttactatattcaattcaattcgtaaatacgtatcgtgcaataaaaaaatataaatcgtgtcatattatgccataaaaaatataggtttgtactattaaaaaataccaatcgtatcatgtattgtgtcataataaaatacggatcgtgtcatgctgtgctcagattcgtgggataataagtttgaagaatacttatttttatctccattaataaaaaaattcctcatattatattatattaaaatttacccacttttatgaatgggttgtttaatatacttttgctttccacttaaatgaagtacataatttacattaacctaaatggtataatgagaatatcatttatacatgtggatatatcttaaagaatataaaaataaaggtaaaaattaaaatagataaagtaaagtgggtatacaatgaaatttcctctaaatttatatcttgttttactcggacagacccatcttcttatagtggctcaaatt

SEQ ID NO: 54708 - DNA, 1133 bp, Cannabis sativa
tttatttattgttcatgtatatattatatgatatagtatagatgcaagttcaattcatcaagcttgtgtcttgttagaacttcccactttatgttttgtttttttgtgattgtatatatatatatatatatttgctgtcttaattatgtgtggctttttatgtttctcattttcggtttgttttttttttttcttttgtcagtgactaatattattgtgatgatgttgtcttgattaatcttctcaagtattagtgtacaaaaagtagtgaaatataatttattaatatagatgtgcaagtttttagaaactacaaaatgtgttacacggcaaatgtataacccaatgttaacatggaattaagctatatactatgttgaatgaacatatcatgagcatattagtattatttatttatggttatgtctattaattattttgtaatgtttctccttttattccgtttattaaaaaaatcatatatctacagataatcaaaagaattaataaaagggtatggttctataatgatgaacttgtaatatccattataagaaaacactgcctatgaatatgagctcacaggatctattgccgaaactgtaggtataaacacatctctcggtgttggtaggccatgtttccacctactagaatgattgacttagctctcctgcactaattatatatgaatttgttagattaacaattagattactacttcttacccttttattttgtcactacatatttttatctttattactggctttatataatgtgttcgatggcatcattttgttgagttcatgaataaaaatcatattgtaatcttattgattaatttttaagtacatgcatagaaatacatgcaatatactatattttggtattattgtattcttcttggagaacttatacaagtgtacactcgatgtttgatattgttgaattattataatatttgttggtgttgaagtattatgatacttctaactttttaaatattttttcttcttaatattaaaatattaatttaattaaattgcgtataactattaaagtatattaaagtatatgataaaaataatttaataaataaattaagtatatgactaagcatatcgtgatat

SEQ ID NO: 54709 - DNA, 878 bp, Cannabis sativa
tttctcgctttcctatggatgcgaggccatggtaccagtcgagattggggcaggttccttacgaagaaacattttcaacgtttcaaaaaacgaagaaaaatagtctctctacctcgaccttctggaagaaaagcgcgatcaggcacacttgaaaaacgcgacttaccagcgacaaaccgcaagatatttcaattccaatgtcaaggcaagagtccttcaaataggagacttggtccttcgaagagtaatgccaaataccatgaacccagcacatggggtcttcgaggataattgggagggaccatatctcatcgcagaaaagattggtgacgctacataccgactcgcagaactcgatggtactgcgattcaaagggcttggaatggcgagagcctaaaattgtattatcaataatactcgcattttctagtttgtactcgccttgtatttatacttggtcattttttgtacaaaaaaaaaatcctaagtatagggggtatataccatgatatactattgattatataaaggaaatttttccaagtttttctagtttgaaatttttcaggtttctaaaattttttacttattgcaccaagtcaaaattaaagtcgcaatcaaaatattataaataataaccgcgagtatccgtgtactgcgaaaatactgtaagtagatatccccgcgaggatataaagttgttaaaaataaacataaatgtaaattcgtctaagtacaaggtgcgagtacccttgtaccgcataaacaaaaaaaaaatagagtttgacacaagcaagtattaagggaaaagtcaagcatttggagcagtaggaacagacccatccgcgactttgctgacggcttcattctcgacttc

SEQ ID NO: 54710 - DNA, 923 bp, Cannabis sativa
agttctccctttcttttctcctttatttaatcaagttctccctttcttaattttaataatgtaagtaaacaaatgtaagggaatgattaccttaccatagattaccattacttattagtaaacatgtcataagagaaatgttgtttgttttcaatctctctctctcttcttttatacttgttctcaatcttttcttaaacttttctattgacaaaaccgctccacaaaagataacacccaatacaattcaatccctttttacatgtttatatgctcatgatacaaatctaggaaccaataaataataatgtgttcaattaagctcaaacaactgtttaacaataaaaagtatatctttaagctcaaagagggtaactaagaaaaatttaatcaagctcgacttgaaaggcacaatcggttcaataattgactaaatcactttcctagtcatatataatttatcatttcacctcaataagtaagcaagcaagttctaaaatttttctcaaccaactttccacatttcacatttagtatgtataaaccaacttcaattgctagaaatttaccaattatgattacatgtttaataaagtacaaaattgaagttaatttgaaggggaatttgtgcttggaggacacagacagtgacactacaatgtagagtcgtggcccacctgctaatctgacgaaaaatagggttttaacccaaagctataaaatgacttctttttcaacacttaggaatatacaattaaggagggagaaaatcactgcaagaaaaaatatttacaataacactcaaaaagtgtaattaaatatattttataataactgttaagataacttatgtaattatattttcacatgttattaaatagcatattataacaatattttagtgttataaattataaatagtt

SEQ ID NO: 54711 - DNA, 1257 bp, Cannabis sativa
actatataatagcttaaataactcaaacataactctagaagtaaaccctaaacacttcaagctaaaattgaaattagatttccaaaaattcgtacaaaacctaaatttctactaagaatatcaaatagaaagtttacttttgtcacgcagttgctaactcttgaaaatcttgctagaaatccctcttaattttctatgaatgtgatgaacacttaaggattctcttcaggttgtatttggctgaaactaaagacagaaaaaatgaagagatttatttgctttttgtttttttgtttacagaagataacataaatttcctttgacctattctaaacttaattaaacaagaagaatttagataactctaagaatttcactatcttcaactaatattatcttaggcaaaataccaaattgccccatgcaaagactcttaataaatctttaaaacctaggggtagaatagtccaagccataatctcgaatactcctgacattccaaatgcctaactatcttactacactaattctaagaaacctgatcgtacaaaaataactctatttgccaaatcatctcattctactgttaccggccgtataaactatgaaaattgtaaaattttacatattacatatatattatatctagaattcaaatatatctccgtaattgagaaattattttcttaaggtctatttctaccaataagctctaatttctattaagaagcatttaatcataatattaattaaatccttaattattttctaattttcatgatttaactatacggtcattacaattatcccctagttaaaagaatttcgtcctcaaaatcgcatctagaatacaccaggcactgactccccatggtgttttttaaccttactaattctccaggtaccttgatcaatacaatgatttggcatgtctctcttatcaataattttaacttatttatactcataatataggtctgacttaagttctagggtttcataaaattttaggatatgtgttaagtttcttaacatacaacatggaaactttatgtgtactgaaaatattattcccatggctggatatgaaattattaatctaatttttcttgagaagctctaaaagtcataggaacctagggcataccttacccttgtcactaaagtttttcataccataatacatagaaagacaagtttccctgacttgggatttgggtgtttttgagcttgaaatctacatatcttttactgttt

SEQ ID NO: 54712 - DNA, 963 bp, Cannabis sativa
tggcttactagataaccggcttcaatgggtcacgggaaatcgaaatataggtcgggtagcgtgtgactatttcaagcaattattcacatctaatccagctagtaagaatgagttagatgatttccaaagcattattccaaactgaatctcctgagctacaaacgagtacctgctggagcctttcaccatggaggaggttttcaaggctatgcgcgacattcacccccataaagctccaggcagggacggattacctgggctcttttacagacagtattggccaacaattgggactgaagtgactaaagtttgccttggaattcttaatgatgggatacaagtaaaggatattaatgacacactcatttgcctcattcctaagatctcaaagccaacccgaatgtcagaatttcgaacaataagtctatgcaacgtgatctataaaatagtagctaaatgccttgctggccgaatgaagacaagtatgcaccaagtaatttcataggagcaaagtgccttcgtgggggatagacttattcaagacaatgccataataggatttgaaagcctccgttgtatgaagacaaaaagatttgggaatggaaggaaaatggctttgaagttggatatgtcaaaggcctatgatagagtggaatggaactttttaagaacaatgatgaggggtttgggctatgaggaacaatggattgaaaaaatcatgagatgtgtggaaagtgttgctttttcggtcctcattaatggtgaacaaattgggaatttccaacctacccggggtcttcgccaaggtgactcgctatccccatacctttttcttctttgtttggaaggtctttcttgtctaatacataaagccgagagggctggccgaattaatgggattcaattcgggagagatagaatcaaagtttcgcatttattctttgcagatgacagctttgtttt

SEQ ID NO: 54713 - DNA, 1703 bp, Cannabis sativa
ttgaataaaatttgtacctctgttatcctgggcaaatcttttacctcaagaagtttaattatcttatgcttcttttgctctattttttggtaactgttgtggagtttttgttttgtaaactctagtttagtttcaaggtcaatattttgttgtttcatgcatattataggcttcatttgctccatttgtttcctttttgtggactctagttttgtctcatcctcaacactttgctgtttcatgcaaattataatcatatagtaagaacattaatggaataacttataactttcaattctttggctaataaatataaatatatgtaccttttcggatttatcttgcttaggcacataatcaggaagtttgagagtcttttgttttacttgcaaggaacttctgataatctttggtacctcaatctttttggagtaatctttcacctcagaaagtaggatcgattggtgtttctttttttcaattttttgataactgtcgtggagtttttgttttgtagactctagtttcgcttcaagattaatactttgttgctgttccgtgcatattataattatagagtaagaacattaatgtaaaaaaaaatatgaatgcaataaattataatttatgtgcttgtctaattagtgtaaatataatataccttttcgggtttgttcttagggagatgatcaagaaacttttgggtgtttggttctattgcttgggaccttttgtcacacaagtgctcacgagccttgttactttctggtaccttgatttttttggaaaaatcatttacctcagaaagttttatcgatttatgcttcttttgctctattttttggtaattgttgtggagttttcgttttgtagactctaatttcgcttcaacatcaacatatcgctgtttcatgcatattataattataaagtaagaacatcaatgtaataaattataacttttatgtgtttattttataagtgtaaatctatatacctcttcgattttattttgcttaggcaaataatcagaaagcttaggagtgtagagttcttgttcgaaatttttgtcactcaatctaccaccaactttgattatattttcattttcatcttcataatatatcttgaaatgttgatctaacacacattgattatattgtgttaaatattcttcgtccattgagggagttggaagtcccatgatatcattgtcatcactctcctcaattccattaaatatggaagttaagctatgtatcatgtctttatccatctaaaatccaaattaaattagtatattaataaacagaaatgatttttcaaaaaagaaaacagaaataataattaatttggaaaaatatatataccatttgcaaatcttgtaatggactaagatgatgaattgttagtataggccgaaaaagagaagagattaagagtaagagagagtaattaagagagtaagagattaatattgtaggtaatacaacttaactcaatttactttcaaaagtatgttttggtgtcatcatctatttatataggtacacaaatcctaattctatacctagttaagatattatataatcctaattctattcttattataattaaattctaaattttatacacgtgtagagttgtttaaatttaaaattgaaatttatttgattttataatttttacgttttgtctaaaac

SEQ ID NO: 54714 - DNA, 3789 bp, Cannabis sativa
ttccttccgaactcataatataatacttaatataaaacatagcatacgtgcatcgcacgtaacaatgtactagtatatatatataaatatataatgaatacttttcaataaatattacccataaatagtatttaataaatttaactataaatattaattttaaaaatattaaattattaaattttaatctaataactaataatgaaagataaatttaaatttatatgcttagtttaactgcttaattaaaaaaaattaaaaaaaatatctcttttgacactatatcaaaaatatgcaagtcaaatttaatttttacatttttttttactaaaaacttttttttaatttttttgaaccgatagaacaatctcagcccttacgatataaaagtgagagatttttataattagataaaaaaaattaaacataaaaactttttttttttttttttttaattttatccattcataagtaaaatctattaagagtacacccatatatatataaatatatcaagtacgtaactataattttatgggtgataaaattgtatcatcatacaatttaataccatgtattttaaaattacacatttaatattcgaaattaatttttttttttttgatgaaattttgtcagtacaatcaaattttctaaatctttataaattttaaattcaaatttagttatttgattacatatataatttgtttaattaaattaataaaattttaatataaagtactaaagatgtactaaaaatataatcaattgaatattattaaaaatacaaagtactaaatatgtttttttacaaatatacaaagtactaaatgagtatattccctaattttaattgtaaatttgtacccaatggatgagtgattgatatgaagtacttattgtgcgtccaaatttgatttaagttataagtaccaaaaatcgacttatctctaatcttggtagttggtcgacctaataataaagctggaactgttgtttagaaacacaaatagtagttatgtgtccaagagtttataggctgattaggattttttatttaatgatttagtatatgtcaaagttcaagggacacgatttattagatatcaaagtttagggagcatagtttagtatataaacaatcagtgaaatagtaaaattgaatgaaattaaataaaatccttaaatataacaatttaaatagttcagggagaatttttaacgctcagaaaagttcaagaaacatgatttaataccctaattaaaatgaagtggccatctttaatagggagagagggacagatagagcctacctcacaacctcatgagctgcaaactggcatgggacatctattgaggatcataatttagaagaagaaaatagtcagctgcgcctaacaaacaaaatcagacgacataataagtagcaatttaactattaacactgtcttgattcagtcgatcgtgcatgaattatatatagtgacactggccgctggacaggccacaccacacagagaaaagttaacctatatatatgatcacattcattgaagttatatctaactaactataacttggaaattcagacagtactctcccaaacatctccaaattttaggtgaattttaccaaacacatgcattttagcttatgcatattttataggggatatatattgttaaaaattatctattatattcgtaaaataaatttaatataaacccaacataatgaaaagcaataatcaagcaacacttaaaaaaaaagagtaaaatgctcctgtccttggaaatagtcgaaagcttttttgaagaaagattccctctttctgcttgcatggaaattaattacctaaccctgcttgctactcaagttgctcttgccccacctaattaataccaggatcgtataattaattaacgtttctttataattttatttaaataaaataagtgagatataaaaatttattgtaccaatagcgtagcaatattacacctgctaagcataagtatcttttaatatttctcaattaataaatccttttagcatttcttaattaatttttatatgatatattttagtatgtattaatattctggatcgatattgtctaatggcagagtattacgttatatgtaagaacataatttattttatttatcactaattaattttaagataaaattaataattctaaacatatatcagaagtagtattaggtaataattgtaagctttatagggcaaacttatatatacagcctgttaacgagaacatatggagaagactgagaatacaaatgtagcttaattacaaatatcaaatgtgttattccatttaatgtttgagccataataattattggaactgaatttattagccatgacctcaagactcgagtagtactaaagatagaaaagtgagccaattaacaagttgcatgtgaagtctcaatcaattgactgggcatctcacactataaatattaaacgtaatagtaagcatttaaagcttatttaacgctgcttctgaacctgttatgagatgtttcccaatgataatttcagtgaaaatattgcacataggtgcgtatatatacctacctgtagcctaactatatatatagtatacagctatagctagtgctgttaaaaattgttagggcacgatctcaagaagtacatgcccgacccatatgaaaaaaaatataagtttgaatatgttatacgttatgatgttataaattagtatgagaccacataatatgaaaaaatatgaatttaaaacaacaactttgaaagttggacatataagcataaataaattaagttaatataataacacatttatttatcaattgtcaattataaaaaagatgaaatgattagcaaaatatttaaattttaataattataattatttttcatataattgtgcagttattattattaaaaagttatataaaagtagtaaagaatacacatagtttagtaattctataatttcttattaattgtaaaaaaaaattagaaaataaatttttgtcagtattaaaatacgaactgattttcattcaagaaaaataagtcaacataagtacgattcaaatccgaatacaacacaaaatactgaaattacagtccatatgctaaggttatatactttataaaattattgtcatgttagagtacgattcatattttatggcccgatacaatataatttgtattttcgtatttatacaactctacgtctctacgtatagctaggacctcataattaacaagctaagttcagcttcctggtgattgactcaccaatcccaaacccatgcatgattgtacagtatttaatcttttagtaaaataagtcctctttaaatcgtactagctagctagttaatgctaccttacctaatggaatcttaaattggattaataaatgagcaatcaataatggttgtttccacacacacaacattagttttatttgaaatggtacacttttcacattcgtttctttaaatggcacacaattcacgttatttacaaatagtattcttattagatattagtagtgtcctacactttctatagatgatgtttcacgattttttattggtattttttaaaagttatttttttttaaaattatataggaatcgatactgtaaagtccttttttggcaagttaggtgacaaaataatttttcctttttatggtaagattgccttgcattcattttcgaaatcttacctctattattcggttattagttg

SEQ ID NO: 54715 - DNA, 1263 bp, Cannabis sativa
gcataaagacttagcaaatattcttaaattgcttgatccacgtgtccctgtctgattggtccacgtatattgggcgaaattaggggcaacagtgcctaatagctagtactctccaaagtgtcatattattattagtgtatttaaaaatcaagtcttatataaagtattgttatggaccaccaaggtgcgtagcaccactatgaaggtacactttataattgattaacagttctctataatctttataaaaaataaaatatatggtacccgatattgaattacactaaagcaatactacacatcacaagggtcctagcaccatgaatgccttttagcatttctccatataatttaacgtaataactttaataaaatatcgctaactaatctcaaaatttacatttaagtggcgctagacactaataatgcccaaggacattgaaaaataataaagggtacccatggtgtctaatactcttatgaggtgtaatatcgctattgtatggatcccgtttattttaatttaaagattataaaaaatcactaactaattaataaaagttatgccatagagttgctaggtaccttggtgtctcataacaatacttagtatagtaacataaatactaatataataacaattataaaatatcgctaagagcctaataacatagtattgttattgaacagtagtggtgtctaataccttttataagtgacacttcacaattaattagcgatatttttaattacaataacaattagaagatggatctattttagcaaattatgtaccaaatatacgatcatagggacttgacctatcttcattgaaatttgtgaggtcggattctcatggtcactttacttgtcacaacttacacgcgctatagcgctcgttagtttcacgaccaatcaataagtatcgtgttctacactcgctgttaaaatatttgctccaacctgattttagtataacaataatgaatagattattataaagagccttatcatattcataccaatttcatactctagttatgagagtatctccaatttatatattaaatttagtattttattattattgaatttaatgttaaaatttatttttactccaattgcaatactaaaaattacactaaaaaaatagagaaattatcttatatactttttttttaatttttttttttaaaaatacggtttgagtttctaaagtggttgcaacgttagttgcattaagggtttctatacgattttttg

SEQ ID NO: 54716 - DNA, 1214 bp, Cannabis sativa
gaaacctgaaaccaaagaaaaacaagcataattttattctaaaaataataataaagaagaaaaataattgtaaaatgtgacccaaaacttaggctaaaaatagcctaacagagagaatgagataaaagattctagttggagttcatcttatttgggcgttcgatggtggcgtgagtaaagaccgtgttgttcgttggagctttaagatctggtatgggaccggtggaagaagactccatagaagatgttagtcaagagagacgactgatactatgtaaaattttaaggaaaaaaaaatcaaagaataaacaaagaaagaaagacaagagaagatctcacagaacaaagctcactgatttcatcgaattcatggatatttatacagtctttttaactaaaatacagttaaaataaattgaccaaaacggttagaaaattaattaggaagtctaactaacttaaccaaatatgctacctgttaatgcttacatttactaataagcccatctcaaggtggttcttgtaggggtgacaagtttacatactaatgatgttaaaaactaaaactaacccattttaatatgtttatataaaaggggaatattgcgaattaaatctctaaaagtttattttgatgcagataaatctacaacattaaaaaatagcagtaatagtcttcaagctcgaaactcttgtaagtccattgatcctcattttaacataatcattagttgtttctaaaaatatcacgtgttgatattaaattgctctgcataagtctttaaaaagctctcactttgatgtagataagttcctaatctaaaaaaattacattaatagtctctaaatttgagattctcattagtccgtaagtacccaatttaacaactttgtttgtagttcttaaaattgtcacgcgtcaaaagtttattaatcacatcataaaaaattatttatttaagtgttaataccattttagactctgtattttgtaaaagttactgatttgattttctattttgtaaaatgacaattggaccttgtatttttcaaattggtacaaaatagtaccatgaacttattttttaatataaccaacttgaagatgattcttaacacgaacaaatgtaaacaatgtatccaattttttttttttataataactcaatatatacatactgatatagtaattatttttaatataaataaataat

SEQ ID NO: 54717 - DNA, 739 bp, Cannabis sativa
acaaggagtatccaatctgagagttactcaagtacaagtcaacgagcaactatgttcaaagacggccagaccttcatgagcaattgaatcagaggaagcccgatctacgtaaatagctcaattccaacaaaaagcaagaggatccaatctaattgcgaatcaacgagttagaaaataaattcaagaaatatcaagatggaaaactgattacgactcagatgaggagctcaaaccttttcatccaaacattatgagtgctgattttctcgagggatttaaaaaccctcacgtctcgttgtactataggactacatatccagtcgctcatctcaacaactttgacacaataatgcgagctaacaatgtcacaaataacttatgttgtattttatttcccaccttgcttactggggcagcgagcagctggttcaataaattcacccatcactcgatcatctcttgggaacaactgtctaaggatttcaagaagcagtttcagtcagcaagagataggcgacctgaagcgtcttcccttactaacataaatcagcaaccgagcgagacacttaaggcctacttatgtcgtttcagtatagccgctgcaagacttagaaagttgaacaacagtatacagcttatttctctccaagcagggattacgaccaacctctcgatagctagaggcgagttgtgggatgacttacatcgccctataaaaaatattagtgagttcaatgaa

SEQ ID NO: 54718 - DNA, 1791 bp, Cannabis sativa
tgcatcattatgaaaatcctccaatagttataacttagtaagttgatcttactaactctactcgtgagttgttacggggttgaccttcgagttgcatggatataccccgagacttgcaagcattgatcctcaagattaatgagccctaagctatatgtcttgatttagtcattcctcgactgactattacagtcgatgtctctcaaccactgagactaactattgactaatctaaaaaatccactttgtcaatttttagggttaacacataggttatgttatagtatacgagagtcatatgttacacaagcattcaaatatttttgcacatatgtgtaagtactcttatggtaaagataactttaagaagcagtgacattactcccactaatcgagtttcttaagacatggtgtattgtgcaagtgttaaacggtcaagcggtaatgaataaagtaatataaaaaagcaaaaatcagaataaaagtttcattaagttagaaataatttctaatttaactaaataaattttgataacattttactaaggcttatccacattgaaaggctgcccgagaacgactaactaacacactaaagttaaatactaaaaaaaaaagaagagtggaccaaggcaacacccttaaagcttatcacatcaacaatagcttcatccttgcccttactttctgcaactggcacatcaacatcagaaggaggaaagtcaggatgcttagggttgtagccttcaacgtttgaagcctcttcgaccactggctcaccaccattcacagtgaagtctattttctggagagtttctacactaaaaccccactcatagtgcttgacaaacttcgacacctatgtgtaggggtagcctaaccaactaaatgactttgcttctccattggcaaaccaagctttatagatggcatcaaaacataagcaatcatataaggtgacatcaagaagagcctgatctttaagagtagtcacttgctcttttaagacctgacatggtctctaagatcgacagctattgaagttcatccagtgcaagacgataagactcttcaaggtatgaagtctattttgagcaactgccaagtttttcttcaaactactctctcaatttttggcactattagccacttctcgaagactagtcagctcactctccagagaattgatgttctttttcaaagcaatcacttattcttctacaacaataacatgatattctacaacctcgagcttctcagcaagcttaaccacctttttgtgtttgttattcatggtgtaagcataacaaacacaaacctaaagataagaggacaatgtcaagtgaagttaagctagaaggagacaagacaaaaaagttaccttaaggatgtcagtgaagcatcattgagcaataacattcggaggcttggtgttaaccatcttctgcaacaggatattctcaaccttggagccaatcaaggcctcaccatttgcaataagccaagagccctttgactggtcaaggagctgagaatgaggttagtctggggcaaggtattgggctggacacggtaatgggccttcctaatgtggaggagacaaatttaaataatggtccacttataagtgggaaggaaagtgttgactccaccttcactttccaagcttctaagcccatcacaaaggcacttaaatccaaaagtcttgttcgaaaggatactgttggagtggctgacggtcgagtaggtgagtttgattcctctagtgtgaagaagctttcttattaggtg

SEQ ID NO: 54719 - DNA, 1897 bp, Cannabis sativa
  modified_base (1350)..(1351): a, c, t, g, unknown or other
caagatgtaagtattgggttgatccaaatggtcagttgtaatatatttaagccagaatctaaccatctcaggattaagatctttgatctaagatcgactaagcgatattgacttagaaaagacataacggtaagtttatgatattttttccactattaatatctgtccaattcaatgtataaccaatacatttgatattaacatactttgctaatatcttggaaaggacattctacatattagtgtgtaagtaaactttacgttgatatgacattagtgtaaatctagttcactgataaatcatggaactaaatatttgaagcatataatcacaatcactttttaccataatgacatccatataattgtgaataaatatatgttctgaatttaatagaacttgtatattaaacctataatcatgtataaaacatgtgaacaaagcatatgacaaggtcaagatataatttctgatctttattaaaagtaaataagattacaatgaaattgtgttttatttagggtataaaatcccaataaacttctacttgtactaatatgaaaaaagtacatttcttttaatctcatattcttgatgtattgattaaatgtactatttggcataaactatgaaacaggatctgatatttgtattcagtattaaccttttctactatcacattttccttggtcataaaatttatgattttgcgaagaagtttcagaagtagaaaaactaatggtgcttcactgtgacaacagtggagcggtggccaactcaaatgaaccaagaaagtcacaagtgtgggtacataattgagaggaagtaccatctaataagagatatattagagagaggtgatgtgacggtcttaaagattgtgtcaaaacataacctgtctgatccattcacaaaattgctacaagaaaaatcttttatgggtcatataactaataggggattatggaagatgctcaattttcttttaggaaaagtggtagaatgttaggatttatgccttgaaaatcctgtaaagatatttctgattataaattagagtttaacatttcgatacatgcatgaatattaagttattaatatttaatattgaataagttatatataaatatcaaaaaattccttattcatacatgaggttgtgacttgtattgtatagaaaattaagatcacttatccatgaataaaatagtcaacaacatattaaagtttaagaatatttaatcaatggttgttagtgcagtttattgatgcctgttatttggtgcaagtaatcttgatttagattactgatatagaatgacatctaagtgaaggtgttgtatataatnnagattatatatgacaaggatcaatacgtaattaaagctatctttatcaaatatttcattcactataaagacctaattcatatcataatgatgatcaatagtggattggcctaaatcttgagtaatcatgagctcctattcatgttattagtttctttgattcgctcgttagagtttctcaaagaagatgattattacaacttctattttgagaatttaataacgtggatggttggaaacatgatctacaattatggaatcctaactttcttaacaaattaaatattggttccctttatgttaattctggaactgaaaatttttatgtaaatttagattggatctagattatacttttactagtgaactaacagaactaaaaaataacgaagtaattagaagagtaaaaacataatttgaccaaaactaattacgaagtgatacaaggacggctaatcactagaattaataaataagattatttggctgatgagattcaataaaaatttaatattaatttgttatatttaaaattaaattattaata

SEQ ID NO: 54720 - DNA, 552 bp, Cannabis sativa
tatgcaactatgttttcttttatgcatttcagggttacaagtctggcatatcccgtatgctaccgacccccaggccaccatttgaaagctttctaaatagttttggacaagaaaactcacctgccccaacaattcaaaactcttttgcatccaattcaaacagagctgattggaatggaccaacatcatcgcttgaggatgtggattcgggtgataattctggagcttctctcactcaaactgcttttggttccatatcacataacacatcactgctttcagatggagttgcgggtaatgtggataacaatgtgtttatacattcttttaaaataaaaataaattataaatggcttttgtcaggatggacccgggggccatttgttaagttgttactgcaaattatcagtgttgggcttcgagttccctatctctcatgcctttcgagttacacttattggtttccattatgcaacaataattttaagggaaaaaaaatgtgccgtatccaacatggttctttgctgtatttcaggaatcggagagtcatcc

SEQ ID NO: 54721 - DNA, 1579 bp, Cannabis sativa
tcgtgcttcttttgtttctttttgccttttgacgaccccttagaatcgtcttttctctttgagccaaaggcctttgagttatcaactctagttgagacagtccttgttgaaacattgctgggtttgcctctcgagccagtttttatcaagttcatctcttttggagcttcttcttttcggacgaacacctgagccctctcattgaactcagtgatgttcttcactggatgaccctgtaatttgtcccacaattcgcccccgacagtggatagatcagtagtgatccctgcatggagggcagaaagttgtgtactatcatccaaatttttaactcttgcagcagccgtgctaaaacgacttaaataatccttaagtgtttcgcctggctgttgctttacattggttatcgaggacgtcttgggttgcctatcccttgcggcctagaactagtatttgaagtccttggacagctgttcccaagatgtaattaatggaatgatgagtaaatttgttgaaccagctgcttgttgctccaactagcgaggtaggaaacaaaatacaccataaattatttgtaacattactggatcgcattatagtgttgaaattattcaaatgcgagaccggatcggtggtcccatcatacgatgagacatgagggtttttaaattcctggggaaaaggagtattcatgatgtttggatggtacgactcgagtttctcatctaagtcgtatctagattgttttcctaattcctccacttgatatctcctgaacttatcttccaactcgtctatttgcaattggataggatcctcttgctttggaccgagttattggcaaagatcagattttttctgattcaagtgctctcgcagatccagttgggaataattactagcaaacctcgttctactcacagattatgtcctacttacggacctcgtcttgctcatggactttgtccaactttactcatggacctcgtccttgattgacttgcagttttagtggtgttcccgtgctttctcaatcattagcacgacgagtagtttctccttttcgagttgatcgactgtgggtccttgagcgccccgaggtcacacttacttcttcgcgccccgttcttccccctgggcgtggttcgtcgtggttcccctggtgaggcttgtacgatccctctccctatgggttcgggaagaacgcttgcgatttcgtgctggtgacctacgttcgtgtccgagggtcttcctcctttccacgaggaatttcctgttcgttagtttctagttaccccctattctcatttctctgagatggttcgggctgatcatttggattttcagggggaacttcattttcctcaggttgtttttcatgagcagtttcctgtcttctggttcgtgagccacgaggtctgcctcatggtcttctcattctagggtcaagttgattttgagtgttattcccctatgtcgccctagctgcggctgcatcatgctttaattcagtgttctgctggtttgcctcctctaggtggcacctaagatgtcggttttccatttctacgataagtat

SEQ ID NO: 54722 - DNA, 1097 bp, Cannabis sativa
actcactataaatagggcctttgatgtcattgtaaggggacttcttggagaaaatatcaatgagacaatagttttaataggaaagtttaagagtctaaaatttttccttgaatgttcttctattaagatctttgaatgtcaattttggctcttaatgtttaattgaagagttcttaccgtcaataatttggtgccatctatgggaatgacaagctctagctatgttagttcctaaatcattcactataatctacaagatatcaaaaaatttccattgtctctaagaaaatggaattcactcaggtgaaaactaatcgaccattgatcgaaaaagatgttgttgcaaacaagattaggattgatgaaggtgaaggtctcaaaatccaagccgaacattttaagtattccaacacaattgtcaccactttgtactacatatattccttcgcataccagctcaccattctccttacaagcaaaatcacttgtaataataagtaaaagaaaaaaaaaataaacttataatttataatgcaattaccaaattatttaactatatgatttgatttttcttatttaaataaatctctaattatctaataaaacttttaagtcctttacatcagcctaaggtttttttagaaaactaaataagataagattaaaaacctaataaaaggactattctacacttaattctacaaataaccaagtttataacttaggattattttggtcaaagttatctaccccaaataacctgacaactcaagcatactaaaatatttctatacaatccataacttaatctattactgtcgtgacatccttggccaatccatcgagtttccacggttgctaaactcaaaaatattttatttcaaaaaaatagtatatataatacccacatgttccaataaatctcagtaattaataaattacactcatttaatcattttcccaaaagtcactaattatctcataattaacattagtaggattatagccttactcaaagacttatataactggatatttaataaaataagtccaattaaacataattacacttcttaggatattacaactatcccctc

SEQ ID NO: 54723 - DNA, 862 bp, Cannabis sativa
  modified_base (61)..(63): a, c, t, g, unknown or other
gtgatgtcaacacagtggaatgttgatatgtgtgttatatgattgaggtatcacttgatgnnngtgggcactactctatcactcaaattaaggtattcgagattggaagaggaaaagagagagagagggagaggggtcgactatagaaggatagtgagtggctcgattctcctccctattatctcatcatgatcaactttcacttgtgttatttaagttttctgaattactttcattctttttcaatcataaaaactattgatttgccaaatagaatcttaagtctaatttagtagtaattaatccaattccccgtagttcgacctcacttgcgtgagtttactacttgattgcgtgcacttgcatagtagttattaattttcgaacaacctctctctacagataaatttttgtacctcaaaggcaaactaaaaatggctgccaccccttttcgtttgaggggggatattaactaattttttaactgtcttttgtattctgtagtcagttagttattttcaattagtttctttaactaacttcagtttttccttgtaatctttgagtataaataaagtgcttactgcttattttagagctaagctttcagctaaattttctctctttgttttcttttctctttgagttttactctgatttttaccatctggttttagcttgataagcttctacaaaggacatgaatccatcccataaatgtaggaattgtatcgtgacttgcaagtattgagatgtacgagatacacctcagaaattactaagttggattgctgggaacacaacgtaaactaaagaatcaacattgaccattaatgaggatgagaagagagagagagagaga

SEQ ID NO: 54724 - DNA, 982 bp, Cannabis sativa
  modified_base (736)..(737): a, c, t, g, unknown or other
tttaagtaaaagttatcccattttacaaattatgtatagttttagattaggataccaattttaatccctaatatgcatataatttcaaatttcccatattatatgttatgtatttaggggaaaaatattaagtatttgtaagcataaaaagtcaaatttctcatttaaatttaaatttatttaaaaataataatctaataattttcttgataactttaagttaaatttaaatatttaaaactaattttttttttttcaaaaatcattatttttttcttttgtaagataaaaagaagacaaatttagagattcaactacacaaaattaggatgccattttctttaaaaaaaaactacacaaaattaggggttttttatttttattttttgtgcttaggtcataattattgtttttacttgcaaataaaagaaaattaagaatgtgtcatttttttagattttcatagaaagttcaattataatagagttttttgcagttaaattttctcaactttcattttacttgcatttaattttttacttaaattttagtggtaaaactcccaaactacttagcaaatttagagtgtcatctattattcacaactacatgcctacatggaaaaattatgtgtatacttttgtacactgacacatttatattagtacaaatattattatttaaaaattataaaaattatttcaaaatttataatattttttattttttaaatatnntattttttatttttataattttaaaatgaattttgaaataaaaatattaggtgtactaatataaacatgccacgtatataaaagagtgtacacataatccgttaataatgacaattaattgaatgatatcttaaatttactaacagtgtaataatttaaaaaattttaccattaaaatttaaacttaaaaaattaaatactaataaaatgataattaaaaaatttagccataataaaattcatta

SEQ ID NO: 54725 - DNA, 1772 bp, Cannabis sativa
cttgcaaacaggtttttttctttcaaaaaaaaaaaagcaattccaatacatatatattaaacttttgaatctagctttgggtttacctaggtttttcagttctttgtttgtatggttctgtttcatttcaaagtttagtatcgctggtggatcatttgaaaattttcccatttaatctcttagggtcacattcaatctcttttatgttaaaactgactgtggatagctggatttttgtgattatttcctgctcagcctggaaactgtgattcttgctattaaaatttcaacatgacatgattatcatcctaaagtattctgtatatactgaaaagagaaaaaaaaaaaaaaagcttttcttcaatttcctttttaagctccaacatgagaatatatagaattgtgttctatgtataagtagataccataatcataatcaactatttttttcctaatgggattactattggaatagaaagctttcattgcatttttcatactaagatatataggggcttttaaaagctgtttttgtttgggcttatgaatcttgaaaagcatttttgttgctagttggaagctaagttcaaccaaacattaccatagtaagaaaatgtcatttttaatgtttgagtaatgaaatggtatgagacagttgagaagtgggataggcctacttgttggagaagagagagtcaactcatgtagtgaccatgtgcctttcatgtgtgagtgggaactggttactaaaacatatgatctgtacaaaagcaaatttaaatcaacttctattttttttttttttgtatgtatagctgctatcagtatcaggtacgtgtctcctttgtgtaatttgtcccaatagtaaataattgaaacatacataattattggacttgttaatttctgttgacgatggtgatgatgaaaatgatcaaaataatagggcttgtgattagattttttattgtgaccgagtttgtatattatttaataggtcaaactgtagaaatatattatgattattattctgtgaaataatctctggtttatgagtcaactaagaacagagcaagtagagtaacttttgctagcacctttttagttttcacctttggataatatcatttatattattattattatgaaattttcatttggtttctattataatttattacctgtatacataaagaataatgagaaatttgttttcaaaccaaccatcggtttcctatatttcaaataaaattacaaactctctagttcattttcttttttgaacaatggattatctagttcttaaataagtgttcataataattttattcattaatttacttaaaaggtggataaacatttacaatccatgcattcatgtgaagcacactataattcaaaacatttatatggctgtaatttctccattactttatttatttagtatttaccctttattttcagcattttcctagtcaatttattccagaaacaaactctcgatcccaaaaaaaacaaaaaactctctcaatgaattgggaccctccaatcgatatgatttttagtcatatatgttgtcataagtcaaaacaatgttggtctttgtgtgctctctgcatctaaaacattttgagataatctagacatgcatatacagtttgtatactacacacattctatcattttctctgcagccatgaagattatataggtttaggtaatcaaatcatacatgattttgtcatactacttttcatgcccttgacaatgag

SEQ ID NO: 54726 - DNA, 1199 bp, Cannabis sativa
aagccaaggacaatgatcctatttttactccacactctaatttctgacaagtgattacaagtatgtaagtctctctactcgaataaaattaaaaattatcctgattcacattatttgtaacttgtctattttctctcaacatctgttcagtgtggttggtatttgagatactaattaattatcatcttttgaaagcataacgtgtgtgtttgtctctttttattgaatttgattagttacttgctctagagtaacttgtttttcttatcatttttattgtttattcaaatttttatatataaaaaaaatcataaaaacgaggagggaggcgcttgtggcttgacttgtgggcgaaggaaatttagttcttgatttgtttggtaagtatcaatatttactctaatttattatgatgagtttccttttaaagattgatatcttattcattgtattttgattatttgttgatcttgaaggatttttttttttatcttaattggttttgttttggaaagtttcatggtttattcttgtttcattttctatattttttgttttttaaaaagagtggggtggttttctctttgttagtgggcatggcagtttatttttgtttccttttaaattggtttcctttttgctcatatatcacatctttatttaaaccaattcctttatcatttgatctcaccatcttctcttctacccgatccctctttgttggtttcttgtctctttgttcttcattttctttttcagaatttcatggctaagacaaaaaacttagggcatccaagcaaaatggtggattcagaatctgctccctcaaacgcacccgtgccttcaaaatcacctcctgctgctgcaattgctccaactccaggggattcatcgcctcctcggcgtgaatcaaagaatgtgtctgtcaagaaagcttcttcttccgttcccagaaaaagggctcccaaaatagtggctcaaaaatcagtaagacccatcttatttcccaaatcgtctaggtctgattcgaagtcttcatcttcgactgataaggcatctcctctcatggcactgagtctcctcttactgcaactggtgttgcttctgcagcatcaaccccaaagggcccttcctctcggacccgtgcccaacaagcttctcttgagaaggaagcgcacaccaaaaggcgccatgacaga

SEQ ID NO: 54727 - DNA, 1278 bp, Cannabis sativa
caaaagttcctagattcatggagtatctatacattcaaattattttagttctggttgctaactcaatggtagagtactcggctatatagatgcttatgggccccatagagcttgatcaaagaggacagttgcttggacatctcttgctgaacctcctccatggcagcaagacaattgttcacctgttgaacctcatgcttaacctcatggacatctgcaggagcagaactcgaacttgcaccagcagcagcaccagcaccagctttaggacacttgggaaaagatccatcaaaatgctctgagggttggaagatggtgccagtgaggggaggctcaagtgtctcatgagaatatgccacatccttcagagaggaaagaaacttgaagattaaattaggaaaaataagcttatgagtatgctttttacctcttcaaaatgacacaatctgatctaagatataggaagccaaattgatggatgttcccgatgtgatacgaaagagaaaagaagccacatcttgatacaccacggttttgttggaattgggaatccaattgctaagtacaaacctcatgagttatgcatgagcataagtgagatgtgtaatacgaagactctgtccagatctccattcaactcgtgcaccagtgagttcaatgagcatcagatggcaatccatagccattatagtatttgtcacatcttctggcagttgtaaagccttggaaatgtctttttcagcaaaggaaaaccaatgtcctttaacatacactttacgaaagaattcagaattctcatcaagaaaatcatcaaacaagttagcataaaattctttgacaattccatcaatatatccctcaaaaccagtaagagtatttttccaatgatgatattgcccaaactttacaataccatagacacgatgagcatgcaagtcataattccttttactttcaaactttcgggtagcataaaattccaatcacgctaattatcatgatagtaaaatctggaatttacagcttgagatggagaaatattaccaggagatgaactcggcataggttgcttgcctttggcagcagcagtggcattggctgcagaagaagcacgaggaggtgctggagcagatttggtcaatggatgctctggttcaagatcagtttccacactgtcagaggagactccaaaatcttctggaagctctttttcagaagggattgacatagatttggtctcggaatcattagagaagacctccattggttcttcttctt

SEQ ID NO: 54728 - DNA, 2015 bp, Cannabis sativa
ttgctaccttgtgtaggtaaaggtaaagctaagctgaaggaacagtgagatgagcttggcaaggattgtcatattgcggcagtgcaaccttgaaggttttggtctttcaacattttgaactgtgtttcatggttgctctgggattttgtagtttgtaaaaaaatgttatgtaattttatttacgatacatgtatttttagcaagtagttttaaactcgggatcccgatttacaaggttttataaatagaataaataaattttatttcaaaatagtaaatttttgagtacgggcattacggtttggtatcagagccaccaaagttgttcactgaagatctcatataaattaaactataaagatctctattatgatgtagcaccaataattattcattataaaaattcttatttttagttacaacaaaatttttcattaaaagtaaaaaacaaaaaattataattaattatagatcattattctatgttgtgactaaaaaatccgttgcttaaaatttttgtcacaaaaattataatttattgtgactaaatctatttttagtcaaaatacttattgtgactaaaactaaattagtgacaacttatatttaaatactgtgttttaattataaattaaatcaagtttataatagcttcataaatattgaagcatcatattcaattaagtttgattatcttggataatatattataaattcaacctatcattttggaaacatgttaattcaattatttattcttactacaaacaaattctcttaataaaaaaaatatataaaaaatacaattaaaaaaataaaaaacttttgcaaaaatatacatacctttttatatatatatatatattttaaattaccatatttcctttgataaacagccataatttttaatattaggaaaattataacttaatttttatatgatagtgtacattataattataagtaaattttttgttttgaaaattttaaataatttaatttataaaagtagaattcaaaatgtgtattattttattatacacgtacaatcaattatttaaaatttattttcaatatactaaataatccataattttttaaaaataaacaaaaccattactataaattataatatatacaccaataatatatattataactagtcaataatttttagaagagtgctaattacaattttttatcacaatctcttaatcaatttttacgttcaaaatcacatgctaaaatatttttttaaatattttatcgttatagttacagtatcatccatataaattttgaaaaattataaattatttacagtaccgaaaacaaaaattcttgatttttcagtttaccacgcatgtttaataaacttcaaacgtaattttgatattgtaaattattcaaaattttacaaaaatttaaagggatggtattgtaagctgtaagcataccgaacactattatgaaaaaataattaaaaatatttgacatatattttgaatacaaaaattaattaaaagttgtaataattattttgtattggcacattctggagggagaccctgggaaaatctcttcttatcagtacaataattatagattctataattcttttggacccattccagtttctttttgtcggtaccgtcgagattctgattgagccaatttttgggcctagattttgaacccaatgggccacatgaagaatggcctgaggcccataaacaagcctgagtagcattgaaattcctgtaagaagcagtaaatggggcctgagtccaatctgtcttcactaaaccacctcttgtggcccaatcatctgcattccaaagacttgaatggattttcattgattgattctttgggaatggtattccacttgattccatgtttttgaactctcttattggaactttatctacataaaatctacaatcataaataaaatatataattagtacatatatatatatataaggatatgattttgtctcgtgatgtacttt

SEQ ID NO: 54729 - DNA, 2220 bp, Cannabis sativa
  modified_base (1044)..(1046): a, c, t, g, unknown or other
aagcggggcattaaaatggttggatgcatggcagccggcgtggaccaaagtgggtgcaggggttgtgggccggcacacttcccaatgctcaaactctcccaagaagccccacatccattccaacacctgggaggattacaatggcctgcgggctgactaattcaaagacacctgggagaggattacaatggccttcggggctggactaatccaataccacttggtgttgacccaggctgtgccgtttgtctgttggagtcgagatatgtgtcttattgaagaaaggagtattcattgcctcactttggttcagatctaacatgcacacaaccattttttggtattcattctacaactattttttattgactaaaatccatttaaactaaaacttacatatataaacagcatactttttgtaaagaaaaaccattaccatttatttagacacatacacaaaaatagttagacatttcaacaaaatacaccgaaaatgtaaactaatttcttctctggattctaccatacgattttgacgagcactccgctttgatctttttaccaaacaacgccattgttctccttttattatttcaactaggggtgttcaataaaatttacaaacggtccaacccgaataaaccgcctaaacccaaactgaataaaccgataaaaaatacaacccgaaataatagaatgaaaatccgaactgcccaataaatatattgaattaacccgaataaaccgatttatatatgttttaataaaagtgtatatactatattacaaaatattttgtatttaaagtttagacattttagtgtttaacttaaaacgtagactttatacttaataatttttattgtatatttggatattgaagttgaagtttaaattattgggatacttaataagttttactcaattatatttatcttatattaaaatttttaaaattaatttaaactatagtattttttagcttaaaatataaataataaattttattttttaaatctaattatttaaatactagaaactaannntaataattataaaaaaaaaaaaagaaacaagtaaagaacgatttggacgggttaaccagactaaaccgatgaaatcattggacgggttgaatttttttaaatttttaattgggcgggtcacaattaaatatttacaacatgatatttatattcggttagtaaaaatatgctataagctgaccaaaccgaccggcgtacacccctagtttcgaccagcccattaataatttaccctagtgaaaaaccaataacaattattccacttccatatcccatcaacacaattttcccatcaaatccgtttgcatgttcctccttctcttcttcttgagaggttggtgatgatgtttgcatgatttaagtggaaatccacataagctcgaattgaaacttttacaagtgtcgaacaagagctaaggacactaactgtcataactgtcaaaacagttatattcttataactaactaacctaatacttgtatcgagtacaagtaagtgtgtgtatgtgtatattacaagggcaatcaaacacaacatgtgttttcaagatgtaaaagcccatcttgggtggaatgtgaatcgtaaagggattttcaatttagtctggtggattagaagagctcacatttccaaatttaggaacatggttttctcagcatatttggcagccatggtgtacttaatttggacagttcggaataccgctttgcggcatgatcaagtgaggagcccggtttcacttatacaggatataaactatatgtggttaaacatagaatatagtatcatgcccaaaaaaaaagtaaatagtatagataaaaattgctttgacactttgtaaatgggtatatagttgcttaaatagttttacaatcaggccttgatgagaaaaaaaaaaaaggtgttgtatacttgtaatggaacaaaaacaattacatgcgaatggagtcgactaacgaaatttgtaaaaaaaataatttttttttttcttttttcactcagctatagtttctagttccatagttgtgataaatctctgtggcatcttggtattttgtttggatgggtctgtggatgaaaacggatttggtggtatacttaactcttcacttccttccaacatttgaactacaactttcatggtcggacggacgatctattggatgccattga

SEQ ID NO: 54730 - DNA, 1670 bp, Cannabis sativa
tttaaaaatcacgtaatacgccgaagatagttagggtgttacagtcgtgctataaaaattagaagcatgtcaaccctacgcaaaaaaataagattttgaaagatatacaggtaagtggttatttgtgagaattttaatctgtgcttgattcattcagatgttaactctaatcatgtttgttttccttaaaactagacgagttttatagtacaagatgatttcaaacataattgtctgatccttgttgggaagttattaaaagacttcaagaacagaaagacaaaagacgtcattatgcctgcattagaagaaaatgatttacaatggttggtatatgtccctgaaaagcatcctaaaattgaccttacggattggttcaaatttgttcaaggtagactaacttctcaattttaggtactaattatatttgtactaagataaacttttgaatacatgtactggtagctaacgtatttttttggcattgtaggaattaagtaaggtgcaaagggaacgttcagcaaaaatccaatccagtcatcgaagtagtcggagtggaatggtgaacgtaagggggagatatcgtaagtaattaaaaatttctaacaatctgcataaaaatgtaattgtactaatttaatttttataaaaaaatgtagaagcaggacctcgaagttcaagatcccctacgccaccgtgtttggatcaaatctcgaacgaagagaacaaaacttgtcactgattatgacaagaaaattctcaaaaagatagtaagtatttattaatcgttgattaagtactaatatttagttaatttatataaatcatatactaattacttgaatatgtgcattaggctcaactagaggagcaagttactcagagacaagtttaagtcgatgaccaaaatgacattccgacgcaggcgctcgggaaacctgagcatcctggatgtgtcagggttgttgggtatgctaatacatgaaacatattattttcttagttatacaaaataaattatagctaattttatttattggtttccagggtccttgccaaggcatctaaactgtttggcagaaagaaaagggaatttttgacactgtagctctaaaacagagggagattgagaaattaaaagccgaaatcaaatcccataaatagaagaaaaatattattgaggatgagaaagaaggagaggtggctcatcaggcgtatgttccataacaatatgctcatgaggatgagggttgaccacaaaattatgctcaggagtttgtttccctaaatgagccacctctcatgtacaatttcgatgaacagagggccctttatcagctagtatatctctgctccgacaatatcaacaacattgtggcccgagcttatatgtatgaacataaaggtccaatcaatgttcactgcaaagactacgatgattcacatgcccaggttctgattttagaaatgctgcaagaggatgctgaaatctcaatctcaattgacgggtgcaaatatgttaaggaagtagcaaacatgttccatccttggcctaaatacctaattataacacccgaggtaacttttgttataaattaattatcaatgattagtggagttttaatagtttagatattcaaccatagtgatatattatatagtgttttgta

SEQ ID NO: 54731 - DNA, 690 bp, Cannabis sativa
atttgtagcagagtattttgtttaatgcgctgtctatcctaaataaaaggttctacttaaaggatcccatttgccttatttgtagagttgagaaagaatcaatggagcatctttccttcgatgcaatttagtttatcatttatagaagtttttttttgtggagtatttttcctgttctcgacattggtattcgtatataaaattgggtaaagtttttttggaagctaaaagataacgacattaatgggaatgaggtttttctgtatgcgtccattgtggtggacaccatttgacggcacgaaatgataagattcataacaataatgtgggtagcattaagttttatattgattttatctatttttgctaaatagagtatcgagcttcttttttagttgcccaacctgtagtgtgtagagattcttggcgcccccctctaatggactagatcaactaaattgtgatgtcagagtaagtttggagcatatgtgtattgcggtgatcgctagaaatcatctgggtgcagtctgttgggtgactacatcaaggcttgatttttcaaatgctctttgtagagaagctactgcctgttgtttggctttagatttgtcagttaagaaggggtgtaattttgtaattgttgaaagtaggggtattcatcaaaccgcccgcaccgcaccgcaccgcaaa

SEQ ID NO: 54732 - DNA, 5247 bp, Cannabis sativa
gttctgtggttttgttaaagagaaaaaaactaaagaaatatctgctcaaagtttgtctagtgtgcaactgtgcgtaaatattagagtaatcaacatgcaaaaggaaaacagaaaaccttgaaattgtatgttaaaattatcttaaaaaaaaagaaatggcctagcattcaacatttttccgccagatattgtgtaaatgaacaacaaacctttttctttgctgcttggaataaagatctcacacgcctagcaccaactccgacaaacctgtgataaaagtagtaacagtggaccattatcactggaccattgatagtataaaataccaaacagatctgataaattaattttgttgaaatttgaaaagtaaatctgaattttaaaggacagtcttggttgcagtgtcactagcttcagttttaggcaatcacaataaattctttgatcgaaccagttcttgttgtatatagataaaatatgaacagcgacattaaatttgtacaagcataaatcgttatgaccaattacagttaaatagatgtcacttcaaataagcacaaaagaatatctaaagtatatgaatctacagtaacaatcaacaaaactataagttttattatcaatccaccaaaacaaagcataatttgaagctgcttattccattgtaacgcaagatcacaggtcttaaagtatatatataacatttttatttatgaacttaaaagtttgacttacatttcctcaaattcagacccggccctatagaaaaaaggcactccagcttctccagctattgccttcataatccaacataaataaaaccaatatcagggtaaactctaaattctttaattttattcaccagatataatttgcaataaaatctgaaacatgaagcaggaaagacttgggttcaaatagaatgcctgaagtaaaaggcaaaataagaaagatggagaaattaccttggcaagtagagtctttccagttcccggtgctcctgttaaaagaattccctgaaatttatacacgtattaggcttagatgcaatacaagaagaaacaaaaacttaaaaagaaaaataaaatagaaattaattaaacaacataaagcacctttggcaacttgcccccaaggcgagtaaattttgttgggttcttgagatactccaccacctcctccagctcttgctttgcatcgtcacaacctttaacatccttaaatgtttttacattctggaaaaacaatgcaatgttttacagttgcagaacacatgttcaaattaagatgaatattatttatttaacaaaaaaagaaattgtttcaaattttctttttataagaaatgagaaactacaacaaaggttcaaggagaatatgttcgcaaaaaattaaattgcaagcagattttttttcaactgtgattcccacctaaccctgcaatatttggggaccaagaaaacctatagcaattgctatgtatgtaggtacccaggaaggactcgaacttcggatcttgtggaggcaaacacatgcctgaccatttgagcttacctctcttgagtaatgcaagcaaattctaaatccttaagaagttagaaaccaacaaattcttaattttttcaacaccaactaactaatacaaagccatctgacactaacactttaccaaatactataaaatatccttcttcacattatctaattattcagttattcccacaaatagttgcataattttgaaaggattaactgttcaattgatactttgattaacattagctgctaagctttcagcagtatatatttcataaatcagttactcttcaattgttttgttaatcaatactccccaaatctaaatttaagacataattttgagcacataactcaaaccctaccaaatttagtacaacccaaataaataaggaaatttattaaaaaaacaagaaaaaaattaagctattttgagaatacaaactgccacaaaatcattaataatcccaatgtattccagataaaattaaatatttctaccttttctggaataatttccttgtttaattcttttggggcataggaggagcttgagccaacacctgaggttccaataccacctaagctccctatgtacttttgaagtgcagaagcacccataaacctaaagacaatcaacagaagttaataaaagaaagattttcaaaagatctctaattagaactaaccatagtttgtgtgtgtgtgtgtgcaagcgcctctgcatgtgtgagagagaatgtgagggggaaaagatagagatgttacagaaagaaaaaaaatattcccataccatactaatccgacagcaacagtgaataaaattgttgagattagttcttgagcaaaacgtgatttgtttgaaacttttggttcaacctaacagataaaccaacaaacaatgaaatcagaaaataaaaaggtaactgaaaccaagcaacaatgcaaatgagacaatagtaatacatgaagggaaacatagacagcaccaaaatcacacattgtgggtcaaattttaccatcactacatgcaagggctgcttgtcatttattccaggattgacaaaagactcgtctacattgcctgaagcccgctgcttcagctcttgcaactgcatgtataagtaataattagacaaataaaatcagtagatgaagatcataaaacaaagtatatgagatcacaggaccacagagtgcagaatattaattcgacggaataatacagcataacaaaatcatcaacaacattctttcgtgtcctaacatgattccaaaactgagtaaggtcttttgatgtcttgtgtacaagctgaatgtttacaaagaattagtattccggtaccatctttgtattaaatatatagtgatgaaaatattttacctttctttcttttattctatttttaaagaaaaatcagaataagataatttttttttaaaaaaaaaaaaaaaacagtctattcaagactcaagttaaaaacaattgagcaaaaatacagcttttaaaatttaaaaatacaaggcaaattatgagttctgtgacttttacaacaatcttagttggtagaattttcacatttttttcctcaacaaataatcaggaaatgattcagtgtaaagaaagaaaaaagaaaaatagctttattctagtacttctacagtctattcaattccaacatatttccaatatcatgatcaataaagagttacaacgaaacataagaagagcataatttttaaaaaatagtaagcttgacataactcaaaggacacaaacataacttttttatgcacccaaaaacaaagttttatatttgcatcaaatatatacaaaaataaagctaccttctatgctccacatgatgaattttcatattcttactgcattatttccattcgtgtatcatattcttaattgctatggtatatgtcactggttatcttgaaccaacaacaccaaaacgaggaaatgaagaagggcaaacaatcttaagattgtataaataacattaacatataacctataaaaatttaaaaccaaaaagacaggattatgtgcaaatacaacaagcaatgtcatcttacagtgaatatcaagaattccactaatgcttttccaagaaagagaaggataaagataagtagataaaataacaagtgcaataaaatggaacagctggattaaagaaaaggaaacagaaatgaaaaggacagtccattaccaatgaaggaagactagaaggttttcctgattcttcatctccaagatattcagcaatggcatttgtaaccacaagagctcgaagatactcagctactcccctactgtctacagcatgatccctttgttcgaaccgcttgataacagactcgggactagagataaaagatagaagaaacaaatgattgcctagttacagaacccaagaatcaagaacagtaaaaacagaaaaacaagtaattagtttaactacctctgcttgttgagctcagctaatagtgcactctgctttgctgcgtccttaggattagcatctgcctccgcaatcaaacgctccaaccgcttctcctgtcgcaaaaaaggccaccaactaaaccaatcccacaccatcaccttctcaaaccactttcttacactcgcccataagcccaccaaaaacaccactaatggaaaccgactcttctctccctcttttcccaccaaaatctcagactttccctcacttgcgaccacattgtcgctactttcaccccaacccgattccccattctccaaacccaatccagaaacctcgctctccagctcaatccccgaacttttgccaatttcttcagttttcgattctaaaatggaaccctccccatttaaactcgaacacttggattcttccatctccgaaaccgaagacaaatcgcgggcactcgcttcttgactcaaatttgtattctccggttgcaatgtgcaagaaaccgaccaagtccgggccgaaaatctaaattttcgaaagtccgggggtgaaaagtgaaaagaatgggaaaggaaaattgggttttgactgaaataagcaacataacaagaatgtaactgaaaacgtttcagtgaagaggaagaaaaagaaaccggagaaagtaagggaggcttataaagaagagaagtttgcaaagtggccattgtttttgggatttattagaatcgtttcgcttcctccctctctctccctcaacagggaactggtatatgagtactgaagaagagagaaagggagtttctttgagagccacaagcttttgagttgagagaaagacagaaaggaagaaccttatccaggattgaaattggcgcctgcttccaatctaattgggtcctctttttcctttgtggtttcttttttgtgctcttcctgactcggtcattcacgcactcactcagtttagagacttgtctgaactcgggtattgtcgttctgtactaatgtgaaaaaacgacaccatttctttttccttttgaccgaaacgacactattttttaacacgccagctacagagagttttgacagtttaattgaagattgatttgagatttttgctttgcccctaattgtttttctaatcttagtgaggagtttttgatttggtgtttattatgatgtcatgactttaaattcataaccctacattttgatctcctcataaaatagataaaacaat

SEQ ID NO: 54733 - DNA, 995 bp, Cannabis sativa
cttctattgggaatctgaacatacgtgtcctttaaatgggagtcttgtctcgagtttctaggtgagagaaatctcactataacattgtgattcccatcttgattgtaatcagctctttaagtgctgaatgataatagagctgggaatctttaaagtgtactcttatatccacatatttgtttttcccctactcatcttgctctagaaggacaacaccctaatgttggttattagtgtctgattgaagaacatgctttccgtcagagggaatctataaaggtggtagattctgcatgatttccttcagctatctgattgccacaatttggtcatgtgaccattctggagtattcttcttgagcatattcctgagtggccttggcagtatagacaattggggaacaaagtctcacaaataattgatgatgcctaagaattattacacctgaactttcgtgagatttttatatgggaatttgagtagtttatgggctgtatgtggttggacttcatattgtcctttggataatttcatcctaagaaattctatctgcgtctgtccaataatcattttctttacaaacaacatgataccatgggctttagtgatagaagcaaactgggccaataacgattgataggcttttgcattagaagaaaaaagcaaaatatcatcaatatagattccaatatcaggccatatatcttggtcatagccttttggaataaggaaggggtagttttgagcctaaaaggtaggacggtccattagaaatgatttagaatgcaaaaggttattttgggccggtcatctggtttgatgcctaattgccaaaatcccacttttaggtcgaatttcaaaaaaaatataggctttggataatttagcaaacaatgatttcttatttggtattgggaatttatcatctgctaagaactcatttaggagcttatagttgatgaccaacttttgcttttcttgagcttgctctgat

SEQ ID NO: 54734 - DNA, 1083 bp, Cannabis sativa
tattatggaagtggcacccacgtaagtacatacaaggcataggcttagttgagaggacgctcgtttttgcgagtagttggagaaagagaaagctaagcttagggaactccaactcaggatgaaaagttgcattgccataagcggtaaagcacaaggaatttggttcaacagccaacacactgctttaagccatcatatgaaagaataataataaaaaaaaacatcgacatttgaaggagtctctaatcctttagaggggaaggaacaaccaaggattgtagcacccatattgggatatatagaactcaataaaagacaactaaagaatgacttgatagagctggaaataaaggatcatgacgctacactcgatatggattggctatccattcatctattgttgaaagtatttggtcgcttttaacaacaaaggccggagaccagattactttcaaagaagttaagctagccttatcaacttctttaatatcatccttataaactagccagctgaggaaggtatgatgtcaagcattgttgactaatgtagtgcaccaaatagtggagacacaacaaacaatgaaaaacatgcacatagtctgtgaattccaaaaggtctttctaaaagatctaccaggaataccttcagacagtgatgtagagttcataatcaagttagctccaagagtgctataattgtgaaggctccatacaaaatggaaatttacgagctgtagaaactcaaagtatagctacaagagctcctagacaaagggatcattagaccaagttgctcaccttagggtactctagtactctttgttaagaagaaagatggaagcatgaggatgtgcatagactagcatgagctcaacaaggtaagcatcaagaataagtaccatttcccaaggattgacgatctctttgatcaattgcaaggctcgactgtgttctcgaaaatagatctaagatctgggtatcaccagctgaaggtttggaaggaggacatacccaagacaatactcaaaacacgatatggacactatgagtttttggtaatgtctttcggactaactaattccc

SEQ ID NO: 54735 - DNA, 1755 bp, Cannabis sativa
tataattaattaaatctaaaaaaggaaagtctacctattagtaacctgctattacaggttaaaggaaaaatgtaacatatggttacaataaaaatgtaaccattgaatagtcacccatattggaagaggtttcccataaatttagcttttttctttattttttttttacatatttttatcatattttcttgaaataaacaaaaaaacaactataaaactgacccaaattgacataaaatattcgaaaacatgttctaaagtaccctaataaacgagtataactaaacctaatttgacctactaaaacatgatctatgtataacaagtatatactcaactcaaacatgacctgtttaataattgtttaagaaaatgaaaatacgacgtacctgtttataaatggccggttgacacggcacaaccgtgtatgccaaccaataacatatttatgacccatttataacatgttaaagtattaaaataacttcaaataagtcattaatgagtcactttcgtataagtcgtgtcaaccggaaacgtttattaaacgagttatagacgagtcaacaaaaatacgacccaaacccatttaattaaggaaaattcaaacccgctaactctcatgtaagtttcaagtcgtgttatcgtgtctgacttattttactggccttttttctttttttcgaatttgtccatgctcataaagaaaaatctgtctagctccaagcccaatacatgtatcaagactaaataacatcatttgaagacgtacgactatagactctatcaaaaggaaactcaataagggtacatgttcaaattgaccaaattgttaatttggaggctccacacctagctcgaagacttgtaatatgtttgtcaagaaagaaattaagaatgttggaaggatgaatagtttaagaagagattttggaggagagaaactttactctattataaaaaaaatattaaaggcattcatggtacttaatataccatcgcatgcataaaatgttatatttttattaatagtatttgacatattttaatttaataaataataattataaaaaacctttaattatttatagattaacacctaataatgatattgaaatcactagtacctaataattacagctcttctatatatctttcctctgcctcaaacatatatctttagtaacatgttttactaaagactatatatttgagtttgtaatgagcttcgaagacaatactatctaaaaaaaaataataatatatgtaatgtacctgaggaagacatttacaactgaataatagagttgagtatttatcaattctaccaattacatcaaaatcattacataaatcgtacaaagagtatttttataaaattttgatgtaatgatttgatgtaattggtagaggtagagacaaatgatcatgtaaaatattgaagaggaagcaaaatattaagaaagattaatttcctttgtgcatgaaaaatatgtatatataaggaaaaatatttaattataagtaaattataggtaagttttacattatctaactaacttgactaaattaggttactagctcactaaagtaaatggcaagttttacattgtttacctaatatggctattagctcaaagcatgtttggtacgtcgtattgtattgtatgttattgtgtgtgtataatattattagagattttataacaatggaagaaaatcaagatttattacaactctattgtaaaataatac

SEQ ID NO: 54736 - DNA, 704 bp, Cannabis sativa
aacatacaaggtagtaaatctagatcctggtaaaatatttccaacagttatctcatgttagtttattgcatatacacacattcaacatctattattaaaaaaaaatttaatatatgataattttctcccatattgacatctttttaaattacatatttttttaaatatgtttatcatttataggtacctatatagaaccacttcagagattcaattatgattaaatatgttatgatcaaagcttaaataatccttagattaggttaaattatgctagaaattgaagaatttgatgaagaaatctttcttgtagctactggctctagggttcgaaagggatgaaggaaatgagagagtgatattttgtgatttcttagtttctaggttaatctttcaatttctataattatataaaataatataaaccttttattaattttattttagcctaaatcaataccatataagaaaaaatccaaccgcacaaaagactattttacccctcttttaacaattaaagttaaaattaagtaaggatattttggtcatttctaatttttcagaataaactagtaaatcaactttcttaactagtctggcataattccaatataactcaacttttatcgccgtgacatttctgaccacttcgtcgagtttccacgactgccaaacctgaaaatattttatttcgaaaatagtat

SEQ ID NO: 54737 - DNA, 954 bp, Cannabis sativa
  modified_base (339)..(341): a, c, t, g, unknown or other
atttatttttcagatttaatatttgtacatatgtgatccctagggctatggtacaatgataataagattacaattcttccactgtgtacctgatttagtatcataaaaccaacacagaacttgacctagaaatcagtgggaggccaataataagaattatggtcttaagcatatcgaagcgagaatgacatcttcccaccaaaggcatgagtgatgcaaatataatattgttcaaggactcgatgtctcctacgccttattaaggtaaagggatgccaaaatcaatgcctcttaatgtttgagagaggttatgtagagtcctttttttttttttttttnnngtcaaaatattttttatttaatatgtgatttttgtatgtaattaaactattttatttactttgattttgtgtctttattcctcttttctttcaaatgaaagaattcgtttttagctgtccattttcttggcaagtttcctttctggtctgatttgttgttgcagaaacccgattctactgctgcaaatcaggatttttttaggaaagtatgtatagatgtggaattgattttgtggctatctctagggttgctatgttctataaattgaacctagagagtagccaatcggttcaactcttttagctttcattttttgcatatttttcttttatgaagggagagttcattttgtgagaacccagttgtttagctaggttttagtacttatgtatttgttcttatactggtcttagggtcagtttgaacaacttgattgaacaagagaaaggtctttagaagaagacttgttcaagccttactttcggaggaagtaagcactcacacatcaaagaaaatggagttcaatgtttgatggtggttcagaaatcagattcatgaagtgaattacaaaggattgcagcaaagttttagagggagtctaaacttgtttaa

SEQ ID NO: 54738 - DNA, 828 bp, Cannabis sativa
gaaattgcccctacacccaacaccccaacagtcaaaaaccaggggtaaaaaagtctttctccctctgtgcggatcacaagggaatattcccttttcaaaacctgatctcctttttcaaagccctactacatttctggcattataaaagcaatctttattgctgaaaaccctagcaacaacaaacccttctcttctctaaccctagcatccgacccttccctttctccttccttttctctttaaaactttgctttcctgctagaaaaccctagtcgcacctccttcaagttttgtgttgcagcagtcaccttcgactcatcctcctcttcttttttctgcagaataacaccagccgaaaacaccttgttttctccttcttcttcgagctacaacagtagcttttatggacgagtccttgtttcccttcaaacctacaacacacatacaaaaccgagatacaaaatagtagcaacaaagatctaaaatgatctttgttggtttagtagaggaaagccgaaaaccacaacagaaaaataatgaagaacactacggattggattttggagttccccttaaaatcaagggtacatctccgtcaagcttccctcaaagacgcttgaatctccactataaatgtcaaaaccggttacaagttcatggagatttcatgctacaaaccagcaggtaatctcaaccttttcctcttttttcttcactttatttctcttggtttatgttacattatctctcactaactctctctatttttctctcttgtttctgaggtgactttacaaagaaaatactgctgccattttctctctgctg

SEQ ID NO: 54739 - DNA, 657 bp, Cannabis sativa
attcaatacattaaagtttacattaaaaaattaaattatattataattgacactaataattttcatatgctttttttttggaatggatatgcttttttagtgtgcatatgttaaatttgataacaatacaaagaccataaatgctatcatgtaatcttaaaattaatataagcatacttataactcttatgaaaaataatttatataatatattttttttaaaatagaaaataaataactttgtcaaaaataccatagataaataattatcaaagaaaaatggacaatctaattatatgcagactcgacagaataaatagtgtaaaattcaaacattacactatgttcttcgctgaagaaaaagaagattagaaaatatcaattatgataaataaaaactaaatacttttttggaggaatatttcaactttgtcaaaaataccagacaaaataaaaagtgtaaaatccaaacattatactatagtcttcgttgaagcaaaagaaaattagaaaccatcatttatgataatttttatttttcttttctaaaatatttattcaaaagttttcttcaattatcaacactttagaaataatatttttttttttgtcttttttcacaattttacaccgtgtttgctttatgattttaacatt

SEQ ID NO: 54740 - DNA, 1362 bp, Cannabis sativa
  modified_base (86)..(88): a, c, t, g, unknown or other
aacatacaaataaaataaatgaaaaataatacttatgtttctttattgatattgaataaaatgaattacattgaaatagagttttnnntagggcataaaacccaataattatgatgtttttttttaacaaatgatattatgatgtttgaattattaaaaaaaatgcaattttagaaataaattttgatattttttaaattatatagaaaatgtggtattatttatatatacttttgtttttaaatatataatatatatatataaataatatatatataaataatatatgattcacaataaacattattgtgtatatattggtaaaaatattgaggtaataaagttgtttaaaatctataattcaaaaaagagttaggtggcatttaggtaggaggaatgaaaacataagaataggaatgattgttaaatagtctcacattgttaatgtgtggaaagataattgaatatataagaggaatgggctactcctcccattatcaattagttttgagatggaacctcattaatcttattccgaaattctaacatggtattagagcaaaaagttaaaaaaatgagccaccgaaaaaattgatctaagagccaaagtcaaaaaagtcacttgtgatttagaaataatgagccaaaaaacataaaaagagccaccaaaaaaaattaatgatctaaaaagtaaagtaaaaagagccacttgtgatcagggatagtgaaccataaaaaaagatctgcttatgatcgagttgtccaagatggtgagcaaataaaataactaccatcttggggggatgttagtaataggaatttttctatcagaattagtcaaatgcagaaaatagataaagagcagtagtgtttagataacaatggcggaatgactttcattaaaacccaggattcgaaccaaattcttcacacacttttccttcactattaagtcctatatatataataacaatacccctattacaattacacttatgccttttttatttgatatgccaatgtttttttatttaatatgccaatgcctattagttaaatagtctcacatcgttaatgtgtggaaagataatagaatatataagaggaatgagctactctttccattgtcatttggttttgagatggaacctcattcatcttatcccaaaattataacaatgagaatggaaatagaattagaaaaagaatagaataaaatttaaaatgcatcaaaaaattaataaaaaataattaatttttttctcataaatttgaatgatattttcttctattttaaaatggaatagtcattccaccaaaattgtggaaagatcatttcattagaatattattccaatactt

SEQ ID NO: 54741 - DNA, 1608 bp, Cannabis sativa
atgtatcttaaaaaattcatttagatattaaaataaatgttaaaaattaattttgtaaaaataaatttttgtacgttagcaaacttgagtatattttttttttacgaaaaatgtagatttgtttaagtaaagatagtattttttagttcaatttataacttttttttccaaaataattttatattttattgaattattaattatttttctttatttattaagatatgagtttataaatataaataagtttaattttttttagtttatttaaattatttattagattctcaataattatagtttgaatttttattatacgtgtttataaaaaaaaaaataaaaattgaaaaaaaacaattaggaataatttaagattatttaagtaaaattaatatttcttaattaatttaatatttttatcaaatttattaataatttttttttattttctcaaaattaatagagtattataattgtttgaaaaaatagaatattataatttttaaaataatttttttaaataaaaatgggaaaatttttgtattggtcaaagttcagggtgtaaaaatataaatttttaaaggtataagaaacagaacctaataaaaggagcataattatgtaactattatattttagggggcaaaattaaatagtgctgaaagtttagagagacgaaaaatgctaattattcaaaataaaattatataaaaagaatattttttacttattatataatgacacttataatatgataggaattcggtattttacctatggatacgtataataatttataaccattgatataatcaaatggtttagattcaactttgaacactacaacctaattattattttatttatttagaattgattttaaatcctatttaattattatgttcaagtatcgaaaattttaaacctaatttttattttatttacttatttaattttatgactggttgaaattattactactataaatttggactttagaggcggtttttaagacctttcaacgtcaattttggtgaaattcgctattgatgttgatctaagcgacgtcatagagataaaaacaactaacactaaagtgtactctatggcgtcaattattattattaaataaccaatagcatatatacactatggcgtcatttatatacaaataattgactttaaaggcttagtaaccgacgccaaatccttaataattaatttattttttcagtttaaaacttatcattaattcaaaattttaatttatttaaattatatatttattaatttataatatatattatttaacttaaattaaatatttattttttgaaagctaaattaaatattattcaaattaattttatgattatctagtatacttaaattaaattcatagaagcaattaaaaaaattacaattatattacacaaatattttaaaattagtccatgtgttaacaagtaaataaatctaattacaagttaacctaaaaaaaataatctagggaacaaaagttcttatacattttagcatcaatcgtccaagtcttcgtgaatctccgccagcaatcgttttatccactgtaatggtaacaactcagtt

SEQ ID NO: 54742 - DNA, 824 bp, Cannabis sativa
gctcgctcctgcctggcatttgcattcatgcgaaaagactctggtacatcatgttgttcattcctttagtttgcaactccatgggaagttcttggattgttacattgagtctcttgatttcttatgtttccagtcttttgtgggttttctccatccattgggatatctttcacattctcaagttgttcttcctgggtgtttgagggattcccttggatattcttttgtctcctggttctagaacctcggggcctcccccatggtcgtcttatagatgggttaggttgattttgaggggccactccttgtgcagtccttgcaaccgctacttcgcactctaactcgacattcctcttgtttgattcagtcaggcattgtcagagttgtctattttccagttctactagttgaacgtatctggttggatcataagcatctttgcttcgccttgggatctgttcaccagttggattgaaatctccatcgtttcttcaagaacggggagttttagcagtgttagttctttgcaaagcctgaggctcctttccaggatgatgcgttatctcctctggttgattctcttcattacgccaagtatcgtccgccaagagtacaaattttgagttgtatttttgaagagggtattattatgagttttactacaaaggctctcaataaaagcaccaaactactaacgcaaattttcgtaaactaaaatattagccttttataataaatacagaattgattatacaataattaattactaaatatgtaaagcccgcttagttaatttagaaattagcagttatttatgttaatca

SEQ ID NO: 54743 - DNA, 844 bp, Cannabis sativa
tacacggtggttcatgggggaagaaaaatgggtccgattattcctactagatgtattcgtcagggagatcctctctcgccatacttgttcatcctatgtgcagaggggctgtcgactttgttatgtcagtatgaaagaaggggctggttacatgggtgcaaagtcgctaatggtgcgcctaggataactcatatgctctttgcagacgattcttatttgtattgtaaagccaatttggaagaagctcacagagtgcaagaagttctgcaaaagtttgagatggcgtcagggcaaaaagttaattttaataagtcctctattttcttcagtaacaatattggagaagacttaagaggaagaattactgatcagcttcatatgcaaccagctacggaatctagtatgtatctgggacttccaagcacgttgggaaggaacaaaactgcagccatgggatttcttcttgagaagcttagaaagcggcttcaaggatgggaagggaaattgttgtcaaaggccgggaaagaggtgttggtcaaatcagtggctcaggctcttcctagttatgctatgagtgttttcctcttacctattgaaatcacaagagacattgtgaagatgataacaaggttctggtggcaatcttcaaacaaatcaagtaaggggattcactggctctcacgggatcggttgagcaagcacaaagacttgggaggtatgggctttcgaaatttcagaaattttaaccttgctttactggggaaacaagggtggagactactcactcgccctaactcgttggtatcaagagttttcaaggctagatacttcccaaatggctcgt

SEQ ID NO: 54744 - DNA, 1158 bp, Cannabis sativa
ttgtctctccatctcaccttcccacctccttccttttctttggttttggtaagttgctgcgtcatcttcttccacgcgactgcaactaggcggtgcggcgtggggtgcgaagacgagtttccagcagtagaggacccggcgattcgcactagcggcgtggtcgtgtatctctctactgctccacaacacaggcgtcttggggctgggtttatgtgctttctcttggcgactctgaagacctcgagcatcatcttcttggtatggtttcttttgctgaatcaatattcaattcacaggtctttctatattctgttttcaaatagatttctgcttcaatttggatttagaagtatcattgatttttttgaaaaaaacatcggagtaccatatgggtcagttttatatctttgagtttagatttagggaacatgaatttttctatgcaatttcgtggtgttcaatttcttgtctgttttattactcaaatgagtaattttctgtgcatatatacatatataaatatccaaacctatgtaataaggagatgatgcatacgttggtaagggtgtgtaactgccactagcactgtttttcatggttggaatcaacttgcttaatatatatacatgtatatatagttatatgtatttgattcttagtgattgagtcgtgcactccagtgttatggcgaaaaattttccccacttgttgacttgctaactgaaaaataaaataaaataattaaattgatttattttcctggttggaacaatgtgttgacgatttattctggtttttatacatattcaaataaaatttcacagtttctgttcttggcttcacttatttattaaataacttttcgtcttaatcctcaaacattttatatcatccgggtattgcctttttcggtagtttttttttcatgtatttttgtatacgatatctacttttgagttttctacccagatgaggaaaaactgaaatatttgatcctaaaatatattatgtaattatatgatagtacccaaagatgcatttacatatgatctgatgataaatttatcttttcttttcttgcagcttgaagattttgaattcggtgaataataggaagtaaaagctaataatactcttaacatgggttcattgggtgag

SEQ ID NO: 54745 - DNA, 793 bp, Cannabis sativa
gttcaaatagacctaccaaacaccattggaacaataacggacggaatcgaaatcgaaaaatcaaaaaatcaaaaaccgaaaaaatcgctaaaggtttaaactgccaatgaatgatctatttttttttgggtaataaattgaccgaaaaaactaaaaccgaccgttatacatatatattaatttattaattttttttttgctttatgtattgtagtcattaataatatatcataacgatatattattattttattaatattaaagttaaaaaaataagataattagtttttgaacaattaatttatatgtttgtagttgtaaaatgtagaataatgtgtttgtagaataaattggatcatttttttttttgaaaaaagaagttcggtttgggcggtttaagccgaccaaactgaggttcaaaatggtgggttttaagataggttctatattggtcagttggttttcagattgcaccaatccagaccaaaaactgaattctatatttttatatagaaaagaactgattgatgctcaaccctattagaatagtccaagtgggttctggtcacataatacaaaactcataatctatacattaacatgcagttcggatccattattagaagatggatattaacaactcaagaaactcatattgtagtgtctaatgtattcttggaaattgaaatttaaatttctagtcgaaatctaaaatttaaagtaaaagactcaaatttataccaaatattccttgagtagttattctttcttgggatataatatctggaatata

SEQ ID NO: 54746 - DNA, 1057 bp, Cannabis sativa
gagaaggagatttaggctcagatcttgttattactctatgacagaaaggaacaagggttagagatctgaacgaaatgagacatattattctgctgccatctatataatattttttgaactttatatgtatttattttattgtattagagaattcatatttagggtgttaatcaagatatatgttagtaaatttagatcttggtaaaataagttccaacattaacttgacgctggatgttaacttgggcgctggtcctagaatagccttcagtaaaacgaccacaattcactcactattgatccgattaatgcgattcaacttgtcttttgaagttattttaatgatatattaagtcatgtctcacactccaattgtaaaattaaagttataaactccaaaattttgtgcttaagagagttgcaaatttaagctacaacttacccgaagtgggtcccacagacgcaatccaagttccaaaaattaacgactgacctccagagtcaatttcactgttacatcatcatcaacggtcaaaaatagcctaaatatattttttcatatttttggaatattttttttattattattattttaataggacctcattctctataataaggagagctcttctagcttatttttcatattcaaaaaatacctataaagtcagagtatctctctttaaaaattaaagtttgcagacttagctatttttatcaagctcatgagaataaaaacttaaagtaaacgtaactctattactgtcgcagcacagagagtaaactacaataaattcttgtgtgtgctctttactttacataattacttacaactttcatctcgtctatacaagttggccaaatttccgtgtcaacacaagagctaggcaaataagttgcaagagatgcacactcaagaatcacatccaaccaacaacaaatagctagaatcaaattacaaaaattagactatgaggtgaccatggtccccctaattttaaatggggatggaatttcgtgagagagagagaggataaatagagaaagagaaaaattg

SEQ ID NO: 54747 - DNA, 709 bp, Cannabis sativa
  modified_base (477)..(477): a, c, t, g, unknown or other
gaaatgataacatacattaacacagtgttataatttagggctatttactataattttcctatgaattaactcaatgataatgtacacaataattgtttggtggatatctttaaatgtattgactctgttcgtttctcctttgcaaatcatcatgcttacttgctcccttgccccacccagtgcctgacggaatcttggagtccccccttcctccacatgattggttgaagctcaactacgacgtcagagtggggttggatagcatgtgcgctgctgtgcaagggatcacgtcggcaaggtgatttgggtttctacatcaaggctggatttttctaatgctctctatggggaagcggcagcttgctgtttggctatagagaaggctaaagctcgtggtattgagtttctcatggtggagagtgattcgagggtggtgatcaacgttcttaatgggaaggagtcctgttgggagcttgntaactatgtctctttttgtaaaaacacctccccctcttttattggttgtacgtttcaatttattcgtagacaatgtaattttatgacccataatgtggttaagtgggctttttccatcaaaagtttggctctgtgctactttcctctatgcccgatattatattttgtaatgaccgcgaggtctaactgattttaatttaatatatgtatgcttttcttaaaaaaaaaaaaa

SEQ ID NO: 54748 - DNA, 2713 bp, Cannabis sativa
tgcacagaaagacaagtgattcattcctagggatcaccccagaaaaaaaaaaacactataaataccccacaaacatactaagaaaggggttgaggattctggattaaaaggaatcaaagagagaaaataggagagaaattcaccgagaacatgctcagtaataaatactctaattgataacaaagactcgtggattaagtctcgttaatgccccaaccacgtaaaaatcttatacattaaacttcctacaacttttcttatattatttaggttgctgaaaacttcggtcaacagtgagtgttgattatgttatagtggaatagacatatatttcgatataggacgagagtacctatatggtttatgtatcatttaggatttttatgcttaatgctcctatgtgtttaaatttacacaagcatagaaaatttgcatatagtttgagatttatatgacctagcccgaatgtaagtttatttagtaaattcgctatcacatgaaaattaaaattgagaattaaattatgttaaaccataaaaagtagatgcaatcgaaattaatcaccctaaactttaatcattgttaatttcaccttaattatttgttttctttgtttttttagtagaaattaaatatattttcttattttttattgtcactaaatagaattaggaatttagttgttttgtaattaattatagtcattgtggatcaatcttaatcttgtaagtctattacgtgtaaatgatatgcatacttgtgtgttggaaaatcaataacatatttttttttagttttataacttagtgttatgttgttttattttatgtaatattagtatttctgttattattattttgtacttctaaatatattagtattttaaattatttattattttttataataaattttaatttaaagactaaaataacagactattttataatttaatgtgccttttgagtgaaacactgtgaaaattccacaccaatttagtaaaataatgtaccattagagatgctctgatacatggtttaaaaacatataggtattgtatcatttatgtatgtaagtgactatacttataaaaatatataactatctctctcatatatatatgtgttaatatatgattgaatgaattaaattcttcattagcaaattctgtgggttttgatctaaaaccagcatatgaagatttgtacgtcttgtactctatttcattttataatatacaatttagaataataaaaaaatacttttataagtacctaaaaatgagtgtacctgaatgttattattttagagattttatattataactaaagaaaattaagatattacaattttattacaatataaaatttaaggcccaataaataaattaaataaatattacaatactaatatatactacactatgtaagaaaggtagaagatggagattacaacaatatatcatataacacatatatataatataagagaagaatatatatatatatatatatatatatataagaagaaaaaaacactcattcgcaacttttagtggagattagtggagatcattataacttgaacaaggtatatacacttttgtccccctatctctaagcactaaaggaactctcataaaaataactttgagaattatcaagccttgaagttttttagtaaagtaaacttttttatagaaaattaagtcgcgcaaataaacactctagactcctttatatagtgttttgcataacactttttaaaattctaacacataatattccataaatgttatggtctcaattaaataagtaaaaaacttattctctaacaactataactcttatagcttttaagaattttaatttaagatgtgtaacatctttttacactcttaatacaagtgataattgtggatgttactcatatcaacaagtaacttcttatatattacaaaaggaatactagcggctaagctacccaaatcacacattttgttacacttaacctcacaaatccaatttttggtggcaaaactctctgaactcgcattctgttatggtctttacctttccgttaaattttcacaattaagtgccaaggtagtaggtctatgtatgtacacaattgtacgcgtgaaatattttcaatagtaattttaataatttaaatattataaaaataattttaaaataaaatatattttttattttttctttttcctttttctttttgcttttcttctttttcttttccattttcgtgtaaccctaatcttctaagtcgcgagacccaaccctaacacctaacaccatccaacggccccaacctgtgaaccctaatcgcagctaccacctgcgagctccaaccccaaccaccatcgttaaattgcaaaaagagagagagagacaaaaaatggtaagagatgtagatacagatttggagaaacaaaagaagaagatagcaataccttgatgtttatgggaaacaccaatatcgaacaacattagatcaaaggaaggatcatttatagatatgccattgacgggaagctatagaaatagctcttcttgagaaagaaccccaagcccttcgaaggtaaggttggctctaacgatactttcatagtacacccttgtctcgaatttttagaggcaaggttgttcgaggtgcacctccaaaggacccaagttgtaaagaccgcttagtt

SEQ ID NO: 54749 - DNA, 2940 bp, Cannabis sativa
ggagtcctatttataagataggcagcagtagagacacatttattccaatatactaaaggtatacaagattggaataagagtgcacgagcaacatttaacaaatgttgaggctttctctcaactaaaaaaattttgtcggggcctatgtatgcaagaatggtggtgaatgatgccaagactactaaacaattcaacaaactgcaattccttagcattatcagacctcacaactttaatagtattttaatattgagttttaatgagttgaataaaagtagggatagcagtttgtgcctcagccttatttttaatgaaatgaacccaagtatacctagaatggtcatcaacaatagtgatgaagtatttatgccccccaatagtcaaagtattaaaaggtccccaaatatctatgtgtataagatcaaaacactctttagcaatgttgtgattagaaacaaaaggaagctttctttatttagcataatgacaattggaacaagattgaccttgaaattaaaaatctttatttaaaaaatgagtttttatataagagggatgccccaatctaaaatgccgaacagtatcattatttatgttggaatcagaaatcaaggaaaaaacatgggggctgattttcacagcagactcctcaaggtaaaacaacttcccaagtctcctagccatcccaatctgttgtgtaaaaagtgaagccataggttttggtttcaagcatggaagagacagataacaaattaaggtggaaatcagggacatacaagacatctttaagaacaagattagctgagataaaaatagttcctaagcaaaagaccttgacagtattaccattaggcaaattgacacaagaaaacttagaattagcataagtattttgaaaaagagagattatgacacacatggtgagtatcaccagtgtcgagaatccagcaagactttttagcaaggattttacaagagaattgagatattgaaggctgatttgtctgctcactgttttttgttctccacttttctgagacaacatactcatcagtctttgacattgagcaaaggtggccatgaaatcttgctcaacgttcttgccatttccattagcctcaccattcttttgagctttagtcaaatttgcagcaggggtgtttttcagggccttgagcattcctgtttgggaatttcccatgcagtttgtgccctgggggatatccatacaaacaatagcacttggtcataatatgtgcttagacacaacagtgatgtccttgaccattgttggatgatgtgggaggagcattatcactttcattgacagtaattcctctctgcctttcttcttgaacaatagaagcaaaaaccttgttgatattagagaaaggatcttgcatcacgatctgggatcgagctccactataggactcatttagaccgattaacaactcaagaacacgatcctcatcttggtattcttgaatagtcttcatagcaccaaaagtgcagacgggttgtggcctatattcttgtatcaaatcctaaaaagacttcagacgagtgaagaaagtggtaacagaattcgaaccttgaatcaatgcatacatagattgtttggcttcgaaaactcttggcgcattttttctggtggtttctctcctgagttctgtccaaatctttgcagcattatcaaggtacatcacactattagcaatctcactcgaaatggcatgtaaaatacaagaaatcaccaggctgtggcatcgaaaccacacatcataaatgtcgtcatcaacctctagttcaggtaatcgcccatcgacaaacttgattttgtttcttgctgcaagagctacaatcatggatcgcctccatgaactgtaattttcacagccagtcaaaacctttggaacaagattcacagctaattgatcttcacttgaaatgaagtagggacttctaagatcttctctaggtggtcgatcattggtttccagggcatagaatctgttagcagtccgagattcatctccctgattcgatgtgcatcgagtattggctccttcacgagccatgagccacaaccacaattaacaaagaaaccagaaaagaagctcacaaaagtcgtggctctgataccatattacaaacaagaaaatataaaacgagagaagaaagagaaaaggaacaacagagtatatttctcattaataaattaaagaagggagtgagccttacatagctcaagctcaagaggagtatagtacatagttagttacaaagaacaactaacataacagaatacaacagaacataaccactaaaccaatggcactaaaagaaaaataacaagcctattttaataaatatacaataatattttgagacataaaatattgaaataattattaatcaaataaatatttaaaagatatttacactacttataatattgtaattaaaaagtgtgtattgaattctataattaatacttaatgccaagaatgtaattaaaaaaattgcatcagaatgtgtcaaattatgcacaagatatgacacacccatgaataactatttttttttaaaaacaatgtaaaaatacaacactatactaatattttagcattttattaaacatgccctaatatatataagaatgcgatcactataagaaatgcctcttttactgatgttatcgcccttctcaatggtcaccctagttctaagctttttgtgctaatttttgcccgcagttttcgtgagatttgccgcaaaaaaatggcttatgatactattcaaatcgataaaagtctatatctttacggacgagttttgccaccggtaaagaacattgcttccgacacaatacaaaagcagcaaaaaaagtgtgcctgtcaacattttggttttttttttttagtattttgtcgaggc

SEQ ID NO: 54750 - DNA, 623 bp, Cannabis sativa
ataatgacatgggtaatctaaaatttctcaaaaattatttatatatttttatattaaattttcaaaaaaagacaaaaaagacaaaaaaatgtttttcagctaaacttaattctgttatgcatttaatatctcatttaaaaaaaaatgaagttatgatttcaaatataatacagtagtaccattataaatttaatatctcatttcaaacaaaagaagaaaaaaaacaaaacaaagttacatgattttcatttcaaaaaatgcttgatttttttgtttctgctcaaaatttaattcatacaatttaatatattaaaaaattgatatattcacaataattttgtatttaatttaaatgaaaaataatttatttatttttctttcaaacgattatttatttattttaattgtatatttttaaaaagcaacgttcattcattcataatatattagacctcgtggtcattacagcaaatgttcttaggaataatagtagtgtcaatacaaccatataaattatggataaaagcccagttggcctgggccataaagttacaagatctagccgaaaaataaaataagcaagaagcaaagaaagaagtgaatcttttacaaaataagcgaat

SEQ ID NO: 54751 - DNA, 1392 bp, Cannabis sativa
  modified_base (1329)..(1330): a, c, t, g, unknown or other
cattttggggttcccatgacaaaataggcatatttacacaatgtgtaattttttgggtcaaaataacaccatgtgttattttgaagcatgaaagatcaaatttccctatcaaaaacgcatttgaataagcatcaataaaattctaaaaaaataaagacaaaaaaaaactattaagcatacagaatcaaaatcatattaaaattcaaaaacaaatacagatacaaaaatatactccaacaatttttttttcaaaaaatactaaaaatgaaaatatatcttaatcatatgaaaaatgcacatatataacagtcctatgtaatatacaaacacatttttttaaaaaaataaaaaataaaaaaccctaaagtatactgtatcaaaataacaaccgctcaaataaaattttcaaaaataaaaaaaaataaagaaaaaattacatctaacaaccaaaatttgaaattaattgccacaatattgttattcaattaattggcacatataccttttttcttttaattttattgtaataggtatacctataaaaatgcatatgttttctttaatattacactgacgcacattctttactttttttttttcattttttttttggacactaattttctccttctcatgtgtattgaccattttttttctctctcaatatatgacatatcatcatatatataattatactcttattttctcttcttttctcatgccatcaaattattattttttttttccacacatatgttaaaaaaaaataatattattaaaaaataatttatttttaaagatttctctttttattttatttttttaatttaaaaagttttttttactacatatctaattttttggtctaaaaaattacatcactgcaatttactctttaatgtgaccatttgaatatgcgagaagcatatattttttaccattatcgaagaagatgaccaaaatcaaaagtaatattttactttcttaatatttagttaacctttaatatttagttaactaataagtaataatttttgaattagtatatatcaactaacttcataagttactaaaagtattttgttttttatattttattgataaatgaataaacaatatttaaatttaaataaaatctaatgtatcaaacaatttaataagttactaaaaaaatatatatatttttttatttttatatttaaacattacaaaataatttttttttacaaaactattttaataaagaaacaaaaaagtttcttttaatattagtcgtcttttttagtgatagaaaaatgtatgtttctcacatattaaaataattatttnnttatttatatatgtgtaaaattctaaaataatttttttaataaaaaagtaactaattgatat

SEQ ID NO: 54752 - DNA, 997 bp, Cannabis sativa
tcatgagtccctgaatctcctctcaagcatttagaaggtccttttgagtagaggcaatggtcttctccttggccttcttagtctctagatctcgctccctgagtgcctttatgccaaagtgtctacctgaagagtttccatttggctctcatgcacacaatctcctttttaaaaaagaaattaactacaatccattacacttcgcttaatcatacaaaatagctaagagaaagaagaacttgcacgatgaaggcaatgtagaggtggaagtcaccgtacgacagtagtagttttcctagcaacgtcagaggaaaagtaggaggaaatcaagatagtctagaattttgtcgaaaagggttatagagcctagaaatcgaaatgcagtatgtgaaaaacctagtcataagaggtataagtttttatacgcccttcaggataagtgccagaacaaatcaagtgccatcagatggtgagggttcaaactaattcgaattctagtgatccaacggttaggataaaattgcaagatgaagagaaaagggcagttgaattgcttgagtacctctctgacaactccatcaatgaaggggtctaataaacaggcgggaatcgaatcgttgcctgccaaaaataaggcagaatgattaaaaatattaaatggcctacgtacacgcaagatattttccatgtcactcttaaacactagaagcaagatacaagtctcatttataaaattttaaataagacttggggagtaaatgttgctctatttttctctgaacatacatgactactccatgtcgcgacacgtggtagataaaaattaaggatctggaggtgtttaaacaaatcttaattaggcaacatttccttcgacaatctaccggttcctcctggagctatgactaggtccggagggaccaaccttttgttcatctctgggagctaggtagcatccagctcgaccagaccctctaatggatgacaatccattagg

SEQ ID NO: 54753 - DNA, 1131 bp, Cannabis sativa
aaattactctaatgactagcccctcgcccttcgcggtgtgggggatagatctcattgggtcctaaccaacgggaaagggaggggtaaagtatgccatagtgctcgtagactacttcacaaagtgtacggaggtagagcctatgaagaccataactgctaagaaagcattagactttgttatcaaaaatatcgtgtgtcgatatggttgcctcgtaaaatagtctcagacaacggaaagcagtttaactacgaagaattcacatatttctgcaaccaccacggagtcgtcaaaagcttctccccagttgcaagacctcaaacaaatggacaggcagaggttgtcaacaaaatactaaaagtcaccctaaagaaaaagctactggcttgcaaaaataactggcccgaagaactgccacgattattatgggcctaccggaccactccaagaaccacaactggacactccccattctcgatggtgtacgaatgcgaagctatggtaccagtggaaaccttgttcccatcccacagaagggcaacatatgatccggcaacaaacaaagccttactacaagaagcgctggatcaaatatacgagctccgggatgagtctcaggtacgaatggcagcttaccaaagaaaggtggctaaatacatcaatcaaggtcaaagatagaaaattcaccattggcgaattagtcctacaacgggtctttccagccactcaagaacccggagtgggggtacttaggccaaattgggaaggactgtatgaaattgaggatgaaatcagctctgagacctataagctaaagagaatggacagatccagagtgtctagggcctggaatgctgaccacctccgaaaatactatcaatagttaaaagaaaagtttatattctgtaaaagaacctgtgccggacaaatgtatgcaacctcttatgtgatttttaaagactaagtgacctaaattttttttttcatgtcacttagaggggtattaaggcatatcatatgggcaagaaagaggataaatataatcaggatgagcataagaaaagtaaaaactaaataatccaaagatataccaattgttcagaagacagataaatccaaaaaagaaaagggcc

SEQ ID NO: 54754 - DNA, 929 bp, Cannabis sativa
gatctggttcaataccattgtctaacttctcaagatagatcacacacttatcaaaaggatgtccgatgcgcccacattccatacaatattcgggtaaatgctcatatctgaattccacccaaaaatcatcttttggttgctgcagggtaatcattcttcctcgtagaagtggcttggtaatatcaattttgactctcactcgcaaaaaaggcccccatcctttatttagcgagtcttcaaacacatccacaaattcgccaataatgttaccaagagcaacagccagcccttttgtcttactaagaaatagaagcctgtaaatttgaacccaaaagggtgtaaatttgagtgattcagattgtacactttgtccaggtgtgggggagtgcaagataatgtggtgattctgaaagtgaaaaggttcacgaagtaggactctagctttgtcccctgcacaaccgaaacttagagagaacatgtctgaagattcagttatggtaactggacatctcccattccaatattgagccatctggttcttgaaagtggagagccaaacttttttgttagtaagaaccttcgcatacaacaagtgatcagatgaaatatgaagatcaggaacaactatatcagagagatcaaatatagatccttccttcgatgtcaattttaaaggctctttcatcttttgcctaaaaggatccatgaaaatagatgaacagagtaaaacaatagccaatccaggaaagatggaagagaagttaacaacaagaaagaagaaaccccatgaaaaccagagaaaaccagttgagaaccaaacaaaaattgtggaaaaccgttactgaaaacttaactgccgcagagcactagaagggcagacgctctattgtggtataatcactttgacatacttaatttattttctttat

SEQ ID NO: 54755 - DNA, 1126 bp, Cannabis sativa
catatattgtaaccttaagagagcgactatagattccacaacacttgagtagtattatctctagtattaatacaactgaaaggggagtaagtcattacccgttaactcatggggtcgaacctctgtaaagtcttgtgtcttattttttttttttttattcttattgggtaacacgtggcaagtatcagtaataaatacgactgcgttgtcagttggccgaatctgaggtcaatagtttggtgctttcattgagagcgagttgtcaatttgtttgatcaaacactattcttaacacaaggagaactccggctataacttctacctcatcgagtcttcctcaagaccctatggctgcaaatcctgatgttcgtgttccagtcacaactggaatgtccacgaacccgatggatgtggccaactttgctatctcagcaagcatcacaaacctggccaccgcgactggtcacgaggacactaccaacctagttggtcttaatggccaacctctgccgcccacggaggaccctccactagcacctcatactgaaggaatggccaacatggagcaacccccaagcgccacgatgggatctggtccccagtattatgttggagagacggggctaataattggtgaggcagccattggcgagcctcatatagacttgggacaagatctcgagttagccagatttagagaggttgtttgtcaagtcggccaaactgaagaaccacacgttgttggctacgatacattcgcacaaaaaagacgcaaatttttgagatggatggatgaccaagagtaccattctccgatctcaccaggcagaattaaactgccgtaataaagaagctagtgacctgataagatggctcaatgaaagaactaccaaaagaggtcaggatcttatcaaagatcctctccaaggaaaactaatcgatagataaaggaggatctatagacagacagtcaaaccaggttcctctggaaccaggacaaactttccccaacctgaaggaggacaagtcttgccatgaagatctggtggcgagaacagccaaaatttggcaactagaggcctggggatggacagggattactggcataataacacccccgcttggc

SEQ ID NO: 54756 - DNA, 3315 bp, Cannabis sativa
  modified_base (28)..(49): a, c, t, g, unknown or other
ttcatttttagggtgttaatcaacatannnnnnnnnnnnnnnnnnnnnntggtaaaataatttccaacatccagccgctttaggtttacagatattatcccgggctattttccttgcaccagtcatcatgtgttgtcccttccataaaaaaagctatgcaaatagccttaattctgttatgatcttcttaggtagaagcataatctgactccaataaatatgtatagtgagaagcacaaagttacctaatgttgcaatctttagaagagatccttttgggattgattggaatacctaggtaggtaagtggtacttcactcctctagaaccccgaggcatcaagtatacgctggggctctttgttagacatcccactgcaataaatggtagatttagtagcattaggatgcaatccagaagtttgggagaatagcttgaatccctatatgagatagtatatgcttttataatccccattgcaaaatagtagtacgtcatctgcaaaaatgagatggttcagcttcagatctttgcacctgtcatggaagataaaatctgccttctgtctgattctccccataattctagtaagatactccattccaaggataaagatcaatggtgacatcggatctccttgttgtagacctctctttgcttcaaaataaccatggagtgagccattaatcatgagtgagaatctaggtgttcggatacaagtgatgatcatgaggtgtataaattgttcaaggaattgaaatccatgtagcatttcttctatgaagctccattcaattgtgataagctttttacaaattaagtttgatcatgcaactagcttttgtcaacttcctcccataatggcaaactagatcatggaatatcattatattatgcgctatgaaattcccttgaacaaagaccccttggttttgagccaccaaattaggtaaaagatgcttgagtctcgaacatattaatttagtggctgctttgtaaatcacattacaacacgctattggcctataatgtttcactgtattaggacacttccttttaggaataagtgttaggacaatattatttatctccttcagtaactgccctgtctgcagaaaggagatgatggcttctgctacttcttctccaattagatcccagttttcatgaaagaaaaaacttccatatccatctgggtctggcgctttgatcccagggatgtcaaaaaacacttttttttatctcttttttttgtatactttgccagcaacaatgctacttgagcatctatcaccatattactacttcaacaattcttacttgagcatctgccaccaacagttgtaatgttttttatatgtataattttgtatattataattatttaagacatttaataaattaacttttaaaatgttcagaataatttacaataataataaatccagaccatcgaatttattggaactcttggtttgggtgtatcaaaattgacggacgactatcatctctgataaattataatgatgtatgtaattaattatttaatagttttaaataagaaaactgaataaataaataaaatttgagaaaaatatataaaatcaagtttttgagtcttttcaaaattatattgacaaaattataattaacgaatttcttttcactatttctataattagagggttttgttaaatatttatgagaacaaatggtgcaaaatagtattcaactaaattacagagaaccaaaaatagtattttaataattagaaagtctttttaaatatttataaaaatgaatagtccaaaataatatttaattaaattatcgagaacccaaatagtattaaaatttcaattgtgcttaattaaaacatccaaactttcctaaaaagaggaagatggagaagtcatacaattttcttctaattcctctatatcactatattggaaattgatcaggaagatggtgtgaggatggagagtgtagggagattgttgcaacaatacttattttcttatgttattttttattttttaatctcactaatgtataatttgtttatgtgcagttaaaacactcttggccctaatgtgctatacatttctacaaaactttagtctagaaacttctacacatttgtattaaaaaaattctctaagaactttaataatttctagaatagattaatgtagaatatactagctaagtgaagtctagaaacaattagatgtgtatatatgtaatttcttctagtaaaagaaggacctagaagaaattattttaaccacaaagtgtaagggataaaaaacaataaataccccatcaagaattctaaattgtggaaccaacatccaaactatcaataaagcttactactttctcatataattctcttctaagaaaaccattctctactatatacacaaccaactatcaagttattatcatactacactagtcactaaacacattacaaaactatcacctaaaacaaatcacaattatttactctatctaatttaacaaaccgacagtggtatcaaagctctgttcgatcaacaagagtttggaatccaactggtctcctctacctcttccaattttctatggagaaaactatgatttttggttcctcaaaatgaggacctattttcgatcacaaaatctatggaaaattgttgaagagggagtaactactccggaacacattacatctctttcagaagatcaaaagaaggcactggaggataatcaacaaaagaattctcatgcattatactgcttgtagcaagctatggcagacaattttttttttttcacaaattatgggcagcacaacgaaaaaagaagcatgggacacactgcaagaggagttctaaggaacaattaaggtacgcatagttggactacaaatgcttagaagagattttgaggatcttagaatgaaggataatgagactgcaaaagattactattctagaattaaagaaatagtaaattaaatgggagcctagtacaaaagatactaatttcttgtatagaaaaatatgattcaatagtttctgtgatagaggaaactaaaaatttagaaactctatcaccaactgaactaatgggtctcttgaagcatatgaaagtagacgagaaaggcataaagaaagtgaaggtgaaaatgcctttcagtctataatcaatcagtggtctcgaaaatcaaaagctaatgggaaaaagacacaagaaaaacaaaaagaaaataacgacaagtatcctccatgtggcatttgtaaaagaaaaagtcacttggagaaa

SEQ ID NO: 54757 - DNA, 608 bp, Cannabis sativa
ttaaagtactaaataactttaaatatgttattaatgggttagtttcgtgttagctgtgtcaacccggacacaacctgtttattaatcgtgttagacatgcgtgtcacatcacttatcatgtgtcgtatcaaatttactattgttttgattccaatactttcaattattttagtataaatgtaagtaagaatcgatcctacaatgactatgttaattcaattattcaaaaattatagcgtgaaaaattagaaaaagacggtttagatgatgagaataaaataacataaataaaaataaaaacgaattaaatgtgatactttgatatgagataaatagttcaaggttattctccactctcaacagttattcttaacttctattaatgaagtaattttaatttttcaatcaaactattgattttgcagataaagctgaaagagtcaaattattctaatctccctattacatgtatttaaggtgaaatgctcaataactaactcttttacttaagtattaaattcacgaagcatgcaatttatttaatttagataaagctttaagatttatgaagatagactaatctaagcaataaattaatgaagcatata

SEQ ID NO: 54758 - DNA, 965 bp, Cannabis sativa
tcttttgcagatcaagcttatgtaagattgaagctcaaaatcaatggctggaggtatttcgatccttattcatatagtgtatatgttcatttattccgcattttatacatacacatttatgtttcagattatacatataaatgtctaacattcaatggttgtatttttattgtaatcatattacatatttttgacctgtaatagaaggttacgaataggtaaaaattttatttttagaatttattaattataattaactattttttaagttattaaataaatttaacaaaatcttttttagcaattaaaatttataaataatttttttatttataaataaatccattctataattatttgaacagttaagtcatttaattataatatttacaatttttttacaaaaattaaacttatttttatataaattaaaattctatgtttataataaatttttaaataattaattttttttttaataattagatgatgaggcctcaagcagcctcaagcttataataaatttttaaataattattttttttatagtaaaatggctcttgagctattttctaaaaaggcatttagacatgagtttaatggttgttgccctgaagagttagtgaaattatcttatgagattctcaaaaaatgtcgaagcttaattgccacttgccatatagctggtttactatctagaaaaaagaaggtccaatctgaatggaaaaaaattcttaatgatattgattttgagttcaaaacaaatcctcttgtaagaattttttaaattctctctctcacctatgttgatttgcctttccacctcaaatcttgtttattgtattttagaacttttccggagctattcacttgtgaaaggaagactgtgtcagctatggatttctgagggttttgttcaagtaagggaaagaaaatcattaaaggaagaagctgaaggaaaatga

SEQ ID NO: 54759 - DNA, 832 bp, Cannabis sativa
caggtcgaagaaccaggcgacctcgtggggggaaggagcatcccatccttgggaagcatagaggacgaagagagcagacaaatacttaatgccctttggagtaatttcgggtgggcagaggccaaagaagtctgtcacatccctgaagtacttgtgcaagggcatcaacgccccttgctggccgtgagcccccaaccaggcgcatattcccttatcaggatttgtggcgcgattgtcgtgggcgggaatgtagcagtccagcttgcccaggtacccgtcctggtcgagacttcggaggcgtgcctccgaaaatcttagacggaggacttacccacctggcgcccagggcaccctgcctcctatgaggaaccgcctcagcaagctcctcactgacgtagtccacgccctaaactaggacctctctgtcagcatcgactggttgccttgcctcattgtactccccgaagttggggggttcaacctcttcctctccctccgcctcggaaggactgcccggacgcacctcgtccagcttctcaacctcctggacgtcagcgtccccctcacggtcctcttccatcgggacggccgaacccagttcgacgttgggcagagtggcaagtcgagccacttaaggatcagaagcgtcggttagacgcgtggttttatttgtacgagtgatcatcctatggctgggtacaaggtcagaagagtttccttcgctagaaggaggactagcacgaagacgatgatgaacctcgtccagaagttgaagccaatcctggtcgatctgatgcccgagttcccaagactcacctgggttcatctacaa

SEQ ID NO: 54760 - DNA, 968 bp, Cannabis sativa
tttttgaaagttgcgtttccttcacaaaatttttttatgcttcctttatgctttgagaacttgaatgttttaaacttgtttttgttctttggtttttggcaagaacacgaagattcagaagggcatttgatgagtaaatctcgtatgctacaaactttttctagttttttggattgcttcatgaattccttgagaaattctttttagggagcatattttttcaaaggcctttaagactagcgaaaaaatttctctaattgtaggatcgttagactttttcccagtccagagagtagcctgaaggtttcttcagaaagtggctctgcaacagaggaaatgaaggcttggtttaggttaggatcatcaatgctacctatttggtagtcatcttcttatagtgttttgaaagttctcttttttttttttccattgaacaacacttaagcttgaaaatttttgctcgaagcctctcgattacttgtgcatcttgaccacagaactcgacatagagatagcttaaggcatttatgacagatggaagttgcaagaatgtcatatgtctatattcgcctaagcttgtccaccaatcttctgaagttttagtatatgaagttctatctcaaaactaattaacaatgagaagattaactctatatctcatatatatatatatatatatatattcaactaaaaatttatatttatatttatatatatatatatatcaatactcacgtatcctagaaggccccaagcttcctgtgattggtaaaattcagtgtttctttttccgcttatgatttctaaaagcataacaccaaaactgaaaacgtcggacttgattgagaaaagtccatttaatgcatattctggagacatataaccactgcgtatcaaaatgattaattagttatatatttggagataaatattattttaaaatttttattttgcaaaagttattaatt

SEQ ID NO: 54761 - DNA, 702 bp, Cannabis sativa
ctctttttttctcttcctttgagtcattctctcttctctatgattgttcgagaccaccacgtgaagtttccattaattttcaaaatgaaatcgaagtcgcaactgatattgcaaccctaatcatcattaaaccatgtaataatctcaaccacacccaatcgcaatctaaatcacaagaccactacatgaagcttcaattgatttcctaaacaaaacaaaaatagtcgcaactgatattccaacacaaatcgcaactgctattgcaactcaaatcgcaaccctaaatctccattaaaccatattacaatcttagtcatgctcaatcataatcgatattgtaacccaaatcgcaaccctaaatcttcattaaaccatattgcaatctcagtcatgacgatattgtaacccaaatcaaaatcctaaattacctttaaatcatattgtaatctctgtcatgctcagtcgcaacgtaaattacaatcctaaatcaccattaaaccatattgtaatctctactcaattacaatccaaatcgcaaccctgaataaccattaaaccatattgcaatctcaactatgtcctattcgcaacctaaatcgtaattcttctttttcctcccagtaattctcctgagccaaaggtcaataactccgatcataattgtcaaaaatttgttagagtcaaaagagatgattccatagg

SEQ ID NO: 54762 - DNA, 603 bp, Cannabis sativa
gactggtgctttgtgaatgacaaatggacaacaacatttgaacccttggttacaactcacttggactttttcagatcagaccatcgggctattgcagtcactgttcaaccacttaatcagcttcctcaacaagtgaggagaaagtctcgcttcaggtttgagaaactttggcttacagatgctgaagctgctgccattatcaagcaaaactggtgtacatcttctacagccactgctgttgagtcattcttaaataatttggaatcatgctcttcatcgcttcaaacatggcacaccaggaagtatgggaacatgaagcaagaaattaccacaatgcagcaaaaaatttctgccttaaatcacagtaccaatcgatcaaccgaatcaatggaggagcttacaaattcagaaactattcttgatgatttattggcacaagaggagacttattggcaacaacgatctagggtggattggatgcaaaatggagaccaaaatacaaagttttttcatgctcatgctacatcgagacgcaacaataattctatcaaatcgttgaaaaatgctgctggtgtaatagattattcgaagcaaggaatgaca

SEQ ID NO: 54763 - DNA, 1404 bp, Cannabis sativa
  modified_base (258)..(258): a, c, t, g, unknown or other
atggcccatcagcaatcagcaaaaagtagctcggtatttcaacaaacaagtgcagctcagaaatctttgtgggagatatggtcctaagaagagcatttctaaacaccaaagacagtacagcaggtgtactcagacctaactgggaaggaccatatcataaggtcgaagttctcgaatcgggagcatacaaattgggcaagtatgatgaaaaaatgcaactcattctggtacctaggtattggaatggggaacatttangaaaatactaccaatagaagtacccggtcggatgaccatatcaagtactaaactatagaacatgaagtgaatggccttttcggcggaccacgcccaaaggttcgaataaaatcacaaagtactaaggtaagatgacgaccatctaaagtaaaatttttaatttttgtaatttgttttatttcatgttaagcttaagatcagattagatcaaattagtagctttgatgtaagtgaccacagtaacagacactttttcgatcaataaatgaataaagatgtttgtttcaatattcaaattgagtcaaaattactaacatgttgctaatttaccatccaatgcgtacaaaaggtttggtcgagcccaaaaccctgaatagacaaaagagcatgcttgcaaaaaaaatgataagtgaccaagagtcataagtctactcggtcactggggggcacctatacctgtataaagcatttggtaaaaataaaacaaacacagttgcatgatgataataaacagagaatgaaattcattaaagataacaaagcatgcaaaactgggattaaaggctgcttggtcagcccgttgtttgaaaaatgaaaaataattccaagtttaaagaccgcttggccggtcactttgtcttaaaaaaaatgccttatggccagacaaaaaaaagatagaaagaagaagtattcaaacggctggagtcccaagctctttgtacgggtcttctaggccggtcagagctggaggatcagttgtttgagtggggggcatgtctacattcttaccggaggtagaagtggtcgcctcggattctccataagccacctgagaagtgcaatactcgagaaagatatctttggaattgcccaagtaatcaaagtttgccttgggattagccttctagaagccataaaaaatctcgagacccactgtctctaaggcatttaccttctctctgagccttgccactttagttctttcgctgctcggcttctgacttgtacttttcaacctcagtttcatgctcctcctccttagacttcttctctgcttccaacctgcagaaaacagctcgaagagcctccctttcttcttggaggctggtcacttccttggacaaggaggcaatggcagcttcaagt

SEQ ID NO: 54764 - DNA, 600 bp, Cannabis sativa
  modified_base (77)..(79): a, c, t, g, unknown or other
tcccacttgcacctctatgttcttcatgaaggttttctattttttattagatttgtaagtttatggtgtgaaactannntaaatgacattcttatctaccatttacttaagcctaacgttacatgcctataaagtcattttgatctacacgactttggtttacattagtggagataaattggttatgcaattctatggttatcttgaatgttttgtggtaagggaagtctttatgcaatcatagatatggagtttgtagccattacctacaaccaatttctctttgcctttgtaggaggatgaagaattgagattggctgtgtcgaaggagacgtggtgagaggctccactatccacataccaatttggatcggaaacggaagctagtgtagaaatcaaagcttgaggagatttcttagtagaaatggtttctggtccaggatttttgtgcttcaccttaataactgggattgaaatggtgataacacttaagagaaacatggctaggttttccacatacttgaaaaattggatgattagaattatgatagccacgaccatcataaccacgattgtcactccctcgggactgattgtagc

SEQ ID NO: 54765 - DNA, 1058 bp, Cannabis sativa
atatgagtaccaagcgtaggtacaggctcacctaattaggtgatgcgatatgccgagtgtcctaccttattaggtacgagcggcagggacatatgagtaccgggagtaggtacgggcttgtttgattagatgatgcgatatattggtgccaggttgtggcatgggctcacctgattaggtgatgcaattatgtactgggcttaggtacgggctcatctgattaggcaatgcgatatattggtgccaggttgtggcacgggctcacctgattaggttataatgtaattatgtgatatatgggtctaggtttttggcatgggctaacctgattaggtgatgtggttatgcaatatatgggtgcaggctatgtcacgggcttgcctaattaggcaatgcaatacaggattatcagattaagcatcgacttgcttgcttgattaggcatgattaggcaatattaggcaatgtaatgtgatataatgaagatggttactttatgaggtaccatacatatataatttatatttttaaattaatatgattcctattattggtataatagttttgtattaccagatttctatatattgatgcttattcatggtagataccagtagtgatttggatttcatcttatgaacaatgcgtaatggtttgattctgactatgtataaatgataatattcgaataataaactatatgattattattatttcttttcttgctgagtccttgtgactcaagggtgctatgtggtgcaggtaagggcaaggaaaagttagagctgccatgaggtgactaccttctccagcaatgtacatattgacctcaccggcctgtgttccgagtttccaagagttgttttgggctggttgtatctgttgtgtattttgattttgtgtttaaatagttgttgtatatatttctttagtaaaacttttataacaggcattctcgaaacatgctttttatgtcgttataatgtttatttttagtgttttattttaattaaatttgttaatattatcacgtttttttttataattaattattctat

SEQ ID NO: 54766 - DNA, 1573 bp, Cannabis sativa
caaaatgttgttgttgaaagaaaataccagcatatactcaatgtagcaagagcacttacctttcaatccaacttatcttttatcatattggaattacatggtcaaaactgttgtctaccttatcaatagaacaccatctgttctactaaaagataaaactccttatgaactgctccagaaaaaaaccaccaaattacaaccatctcagaaactttggatgcttggactatgcttcccctattcatactaaccataaatttgctccttgagcaaaatcatgtgttttcataggctaccctgaccatatgaaagcctatacacttattgacatacaaacaaacaacatatttcagtcaagagatgttctattttatgaggagatctatcctttccaaagcaacactccaaatgcttccatagatcagtttttccctactgatcatctcaatacactagcaaccaacaccgcttgatcaaacaaaactagcagccccaaaattgtccataaaatcaggctgaataatctccacacctgcccatctcaaggatttcagctgcaatagcaccaatcacacaagcaattctctctatcccatgacaaattacatttcatatcataaactatctcatgctttcagggcagcagtcctagccacatatgacctacttgagccaacttcttatgcccaagcatgcaaagaaaaggtatggaaccaagtcatggatacagaaattgatgcactagaatccataatacttggatagttgtcccattacctcttagacaacacataataagcaatacatgggtatatataatcaaatataacctagatggctgtgttgaaagatgcaaagcccgtttagtagccaaaggctacacacagcaacaaggcattggttactttgaaacctatgctcccgtggaaaaatttaacacactaaaactcctctttgccttagctgcaataaaacagtggcatcttcaccacatggacatcagcaatacatttttgcatatggtcatctatatgaggacatatacttgaaattacctcaaggatacaaaccaaaaggccccatccccaacaatgcaatatgcaaattaaagaagagtctatatggactaaaacaatcttcacgacagtggtatgccaaactcagcaccactcttctccaacaaaatttcattcaatccaaaaatgaccattcactcttcattaaacactccaacaatgtatttttagcaatcttaatatacgttgatgacattattgtcgccacaaataacatctatgctctaaataaatttgtcaataatcttgattcacatttcaaacttaatgatcttggcctacttcattttttctaggccttgaaatagctcaaaacaacaatagcatctctgtcacaccacgaccttttactctttaattgctacaagaaatagggaactaaggagccaaaccattcactgttggaaatatattttaccaagaacttagatctactcacaagtatgttgatttaacaacctaaaattgaacttctaaaacgatgaactaaacacata

SEQ ID NO: 54767 - DNA, 912 bp, Cannabis sativa
taattccagtgacatcacctgagaagaagagtactctaatcaatccaactatttaacagttactaattgatgcaaaattttgcaaaaaaaaaaaaaatactgtttgaaataaaaattcaaatgtgaattataattcaaattctagaaaattaattctcctaatttcatttttcagaatcataaaatgtagatctgttaaaatagatctggagttcccgatcaatccaaatcaggtataaactgaaaaaatatatatatcaagtacactagctaatgtttattacgttgcattaacactgttttctaaatttttaatggtagatttattcatatcaaatcacgaataacaaaaaaaaaaatgaatttatctagagtcacgtacatagaaatattgttttgatttttaagtttttacgtagttgcatttacattttactaatgcctgaaacttgacatataaatgattacaaactgataacgagataatagtttttacaatatttgcaggtgtttcatatcgacaattcagcacaaatctctttaaaaaaattataacatgattagtaatttattaacatacattcatttggttgatatacagttgatttacagaattttaataattatttctccacataagattattaaggtataattgattgttaatcagtgacaaaaaaaaatactaacaaattttttcatgacgatgcccattgaaattttctatttctagttctaattaagttgtatattagttgagcaatagtgtgctacactacaagaaatatcacttttaccagcacaattcgctactgcgctggtaaaagtaacttttagcaacgcattttgcaaactgcgctggaaaaacgatcaaagttttaccagcgcacatttgtagtggccaaaatctaa

SEQ ID NO: 54768 - DNA, 925 bp, Cannabis sativa
  modified_base (56)..(59): a, c, t, g, unknown or other
atcctgagttattatgaactcctgatcatgttattattagtttctttgattcactnnnnaaagtttctcagagaagatgattattgaaacttctattttgggaatctaataacatagatggctggaaacatgatgtacaattatagaatcctgactttcctaacggattgaatgttggtttcctttaagtgttaattctagaactggaatattgtacacaaatttagatgggatcttgaattatacttctactagtgaattaatggaactaaaggtaaagaagtaattagaaaaagtaaaatagtattttgaccaaatatgaaccaacacatggagggctattctgtaacgccctaataataggaacgccacaaacagtgactaccacatgttgaccccgctaaaccaggattactaaagctaagagcggaaatttaaactttaaagcaaatacaaagtaaaattataacttgtaactatttaactttacaaacattcaaaagatcacattttgtttcggaatctcgtaaaaacttttcaaaatattacaagttatcattatacgccgacctaagcagcaaaagttcagattacaaaatatttcatctggtagaccttactcgcgtggtctagtatggcctgctcatgtacaatacactgccaagccctcaaactcatggctaattaataacatatttaccctttcctgcacagtagaacacccgtgagtcaaagcccagcaagacagtataaataacaatatgcataataaatcagaaatcacataattaatgatgccactacatctatcgtatatttaacatagacctatgtgttacgctcacacatctatttacaataagggcttagaacgatttatctcggttctaattactgagtttaacctaattatgtcttacgcgca

SEQ ID NO: 54769 - DNA, 773 bp, Cannabis sativa
agactcacccatagacccgattttaatttttttaatttttttaaattttttattacacttaaatactaactattaaaaaccctaaaatctaacattcgaagacaaacagatccgactccccctctccctctctcttcttccccttcgattcccatcggatctcgtccccttcgatttccaccaacccctccctctccctctctcttctttcacattcgattcccaccagaacggatcccctctccccctctctttccctttggttcgcccctcacctacaattttcgccagtggttactcgtgagtcacacccactggacgttggatgctagtcaccaccccatcgatttaggcatgtgaaaaagatccatttagttggagcgggttggagctccgatctgacggatcacctctgatccgaaacattcagatacttattggatcttggatcagatccgcttcgccccgcctaattttttttggatcggatctcatttgatccgacccgattttaatttatttaaaaaaaaaaacttaattcaaaactcggacccagactcggatcccttgggatttggactcggacccagaactggacccatacccgaatcgggacccagacccgaacctggacctgcgacccgcgacccggaccaggaccccgacccaagaccccgactcgacccggccccgaacccggactaggactagggatcggacccaggtgccaagaccaaaaccgaacccaggacccaagaacaggaccgggacta

SEQ ID NO: 54770 - DNA, 1506 bp, Cannabis sativa
aaattttggaaattgacataaaaattatcaataataataagttgttagtcctttaaaaagtttggttcattagaaaatatatattaggtcctttattttttttttgggcccttattttttcaggccatgtgcaatagcccaacttgcacacagtaagggctggccctgtgtaaaataaacttgtgagcataacatgtgggtctatgttatatagacattagatgcaatgacatcactatatatgaaataatatgataaacagtgtggtgggacagtaatatacgtatatgcgtaatgtatgaaaagtaattgttataattatttatactgcattattattcttttttgttggatcttagctcacgggtgctctaatgtgcatgcattagtaaagcagtgtcggttcagccatgagttcgagagttttgaagatgaattgtacacgttcgttccagcaagctagctagaccacgagggttgggtccaacaggggaattgtgtagaaactctaaattttgctgcttaggttagcctgtatgaaatgacttgtaatttttttttaataaattatacgggatcacgaatatgtaatgttaaatattttaatttaaaataaagtctgtaaaattacaaattatttatttaaattaagtttattattacttttaaattacttggtttatggaccccgattaacagaattaattaattgtaattacgacatgtggcgttcctctgagtaggacatacagaaacttaggctcattatctttattctcttaagacatgaatctatcccatgaatataagaattgttgtgtgacttgcaagcttggagatatattggatatatatatctaaaattgctaagtcgcatcccttaattggtcggtgcatgcgaacaacctgtgtgatgaaagctagtcggatatatatatgcatactctgtttggatgttacaacttctatctgtaaccttgagaatcaatcctttaagtacggcttgctaagagtaaaatcatctacccaatttataaaatgtactccacatgtcacttagtttgatgaaccatcattgtctaaaaatttagataacaattgaagaatatgaggcataaatattttggggatgtaatttcgacaaagaaaccgcttttagataaggataaaaacggttactaaaaattaatttattcatcccacatcttgtaaatacgaaacgtaagaattgtctatatttcgtaaaccattatctagataagaccaaaataaaataactctattactaaaaattagggacaaaacctgatataggggtgaatcttttcgaagatatcacccaaaaagaataagtgtagaaactcattatttcttacatttattattaaatattttgtattttgtaaatattcaaaactcaaaaataatataaatttttggactatgtagatttaactataaagtcatgtaaaaattatattgccttatttattattatttattgta

SEQ ID NO: 54771 - DNA, 906 bp, Cannabis sativa
caactatctgattgaacaagaggttatcctaattttcttatcttctctaatcaaaagatttttcagtctattccttattttgatttatttatatattattttttttttttgaaagagtaacttttcaatagataggcaaataaacacaagttatacattacaaagaaactaaaataacactattctagatcaactcctcatcaagctctaaagccttcttagccaaattatgaacactaacattacattgcctagatacatatctaatacaagctttcaaagaatacagataaagagctattaatattctcaattacatcagatacaaccgaaagatctttttccttacttctaactaggtaatatagccgctcttcgcgcggctatttaattttatttttgtataataataaaaaaataagtaattatcaatataataaataataacttaaaaagaatagtctaatagaatactattaaagttatattatctaatttttttattaataataataattttatttattagaaaatattttttttttattaagagaattggaaagttctattatttattgattaaaagtttaaaatttatacaattattgtatatatagaattttaaattattttattataaattattaatataaaataaataaatagggtggtatagagaaaattaaaatattattattcactacaacatttttcttaattagcagcgaattatttaatcaatattaattttacatctcgatcattcaaactcgttgttattattgtatcttaaccgttatgagtactgtatccaacttgtagttgatactattgttattcccaaaaattttatcaattaatgagttatgactatgtattttcatacataataatttgaattattta

SEQ ID NO: 54772 - DNA, 569 bp, Cannabis sativa
ggtatggggaccaaaaagggattctttcacaattctctagagatgttgggatcaatgggagtctttcactgtacaatattacagtattacacagtagaacttaagaaaaagtattcctatcttaataaaatatatagtgaaattaataattttattttaaattataatatatgtataaataatatttatttaaaaataattggagtttttttatttatatactttaattttttttttatttttatgaaattccacttaaaattttttatagcaattaacggaacaacctaaatcgtaaataaaattcgtatcacaactcacgtagaaattactgaaaaattcaccaaagcaacttaaacagtaaatttaaaaataatatataaaataattttccaaaataatcttattataatatatagtattaataattatagtatttattattataaactatcagttaaaatataatttaattaatcctaagtatactctcatattaaaattctactatatatacatacacaatagtttatccaaaaataatattaataatttattattattattat

SEQ ID NO: 54773 - DNA, 941 bp, Cannabis sativa
tagtaaatagtacatattatttatcggaataattatataaaacactatttttttagtaaaattttgatgtttttatatttaaaaattctttttatatttttacgatattttataaaaataacgtatgaaaacaataaaaaattacataaaagtaacataaaaataacatacaaacaatatcaaaacaacaacaaatagtaacatacaaataataaaaaaattaacaacaaattaacagaagaacaacaaaaaaaatcaaaaaactgtattttctttaaataaaattataaaaatcataaaaatatataatatttcgtacaactatatttttgtaatttattaggcgatagaagtcttcacatatggcccaacaaaggttgtcattgttgaaaatatatggtccttgtattttttttatagtgtggtggatgattaaattaaccactaattagaatagattagttgactatataaattaaatagttgactagatatttatggcttaagagtgttagaatatatttttttcatgataatatttttcgttatagttatagagttattttataaattttaaaattttttaaataatttacagtattgacagcaaatttttaatattcaactttaccaaacatgttcaaaaaactataaatttattttcgatattgtaaactatttgaaaattttaaaaaatttacagaaataatcataactataacgaatactattataaaaaataaacagtgacgatattataattaattatgtcactgttttctcttgaccgtcgaaatttagtagattttctcaataggaagagttttatttgccaatataaaaggaggtatagtatagttagatttacatattatatattatcacataatactaataaattatatttctctcactttaaattctcaatatgatgaccaaag

SEQ ID NO: 54774 - DNA, 2060 bp, Cannabis sativa
gggagaagagaagaaggggacgagtggagttgagcggctatgagcggttcagtgttcagacaattagttttagggttttgttttttctttttaatttagatataattttttttaaaaaaaaaatagcaagtacgggttggacccgccccttttaggctaactcgtacctgcctgccaaatagcgagttaaaactcaatccaacccaatttttgcgagtttttaatgggcggtttctatgtgggcagattctaataggtttggcggtttccacggtttagcagtttttatgttctggcctactctctattataaagagtcatttttagtatggttggagcttattttttaaagtctcactccatattttaactatggcgtgtgtttagaaaacatggttgaagatactctaaggtgatgtttggtttactataatagtaattaataggttaattatattgtttgattttttttttctgtttttcatattaaaaaataaaaaaaaaataataaaacaaaataattaatttatagattaaatgactgaaaagggtagtttattacttttttttaattgtaaatttcatttaactagactaactcggcctcaactatatcagcaacattaaaagagattaaactctgaaaaatacgatcagcatataaacaaagtgctctagccataagatgaacaacccgattagtagatagttttacaaaacgtaaagaaacgtccttaaaagaagataaaaattgtttacaatcctcaacgacaccacaaaaagtagatgacaaaacattcaaatttctacctgcttgtaccaatactagacaatcagattcgataatattaacattctgaaaatcacgcttcaaccatgataacacttccttgagagtcacagcttcaacaatctttagaagaacttgccaatccgcagtcccaaaatcccagccacaacctacccttgtgatcccaaacaaccccaccaaaatcattccttccctcctcgtcaaacaatgcatcattaatattcaccttaagtttttcataacttagtttagaccatagatcaaccatatccaaaagataccatgtatcaaatgcaggaaacaaacttttttcttgattttttctccactactcaagagtgacacgagtcaaactgacaacgaactccacccaacttttcttacccttctacaagagttgatttcgtgcgaaccaaattgcccaaaccaacatcactgcctgaacactttgttcttcacccagttgtcagaacaaaagaagaaaccaatccacaaacgaccttgcatcaactggaatcataggtaaacccgctatccgccaacaattctgcgcaaaattacaagcaactaaacagtgcaaaatttattcacctgccccatgacaaatcagacataacaaagagacatccacatgtttagtcaactgaactctcgtaggaagaccccccacaccctccatacacaattttttgcctttggaggaagttttaattgccaaaacttcttccaaaacgccacaaccttcccgaccacactaccctcacggttttcgtgtaataatttgaatgcacacttaactgtatactcgccaaaagagtcaaaacccccaataccagtaatctttagaaaccaaaatagaaaggagaataccaagaatattgactatcacttcctcatctaacaaatcttttacaatatcaacatcccaagctttctcacccaccacaaaaaaactactaaccttttcattagccaaaccaggatctaaactacatgttgacctcgcttttagccaacgacagtgagtcaattaataagcgttatgaaatgtaattaagacatagcaaaaatcagtaagcaataaagaacacaagattttaaagaggttcaacccctttagttcgataatagcctaccccccttagattgtattgacttgaaaacaaagaatacagtgtttcctctctcaaagctctcacaatgaaatctctaagtattttctctcagatctctctaaagtaattctttc

SEQ ID NO: 54775 - DNA, 1445 bp, Cannabis sativa
tgtacatagtcgacagtaaatgggtttatagaattaagttgaatgcagatggaagctttcaaggatttaaagctaggcttattgcaaaagggttcagacaaagacctagagtcgattatggagaaactttcagccctgtggtgaaagcctgtacaatcaaagttgttctaactattgctgttgcaaagtcctgggaagttagacaacttgacatcaataatgcactccataatgggactctgaatgaggatgtttacatgaaccaaccacctagttttgaggacaaaatacatcctgattatgtgttcaaattgactaaaagcttatatgggttgagataaccaccaagagcttggtttgacaagctaaaacaaactctgttaagctagaaatttgtaagttctagagctgattcctcactattcttctacaaaacagcaagtgaattattgctagttcttatctatgtagatgacataatcgtcactggaaataattctgaaaagctgagacaatttatcgaaaagctgaatctggagtttgccttaaaagttctcggctccttaaactattttcttggcattgaagtgtatagggatgacacaggaatgtacttatcccaaaccaagtacataacagagttgttgaaaaagaacaatatgacacatctgaagccctgtcatactccaacgacagtaggaaaaactttgtcaatcacagatggaactccactcaagaacccaacagagtacaggagtctaattggtgatcttcaatatttgactcacaccagacccaaacttagttttgttgtgaataaattgagtcagtttttgaaagctccaactgatcaacattggtctgcaaccaagagaattctcaagtacttgaagggtaccattaatcatggactacatatcaagtacaatgaaatactagcattaacaggattctcagatgccgattgggcatgttgccttgacgatagaagatctgtggctggctactgtgtttattttagtgatactttggtttcatggtcctccaagaaataatttgtcgtctctgctcaaatactgaatccgagtacagggctcttgcccaagtgtctactgaattaacatggattcaatctcttcttcaagaacttcagtttccactcaaagacattccagtgacatggtgtgacaacatgggagcaagtgctgttgcctcgaatccagtataccatgtttgaacaaaacacatagagttggatgttcactttgttagagacaaggttttggctaaatctctcgacatcagatatgttccctcacacgatcaggttgcaaactgtctcaccaagagcttatcaagttcaaggtttcattttcttgttgacaaactaggtgtggtttccaccccacttagtttgagaggaggtattaaaaaataaattttac

SEQ ID NO: 54776 - DNA, 1239 bp, Cannabis sativa
gatttttacaacttttattttggaagcttaataacataattggctgtgaacatgttatacaataatagaattcaagctttccgaaaggatcaaatattagttttcttaaagtgttaattctaggagtgctaacaattggatccaaatctataattagattatagttttaactgttcacattgaattaatattgtacataaggaatcaagagataattagaaaggtaaaacgataattttaaccaactctaattatgaactaataattagagagcgaactacttatattgattatatcaatgaactacaagtaagaattctgtaaatataattctatattgtcaaatagtgcaattccatatccatagtgtagtaataatagaattaataaatcagattattctattgaagagtttaaaaataatcaagtatttactggagcatcgaaatataggtctatgatccctaaatcacatttatacaacattgtacggggaaaagtttaacttgatgaataaattgagaaaaattcttaaaggcaaaatagtaattttgtataaattattattttaaataattgtatcaattatgaattgaataattaaagtgatatttaactatttagttgatgaaattatactaattagttaaatataagattattcttaaaaaatatcaaagagagagagagagaaaacattattttagtgtaaaataatatttattttaattttaataaaataagagatgaatgagaattaatcaattattatctattggtaaaataaataataaatattatttgtggtaaaattgagaaatcaattttagactttaaaatataacccatttagtttttgtttgattaatttatgtataaaataaatcaaattaaaaattaataatcatcttttattatttgaattaaatatattataagataatgtattttaaattaaaaaataataattgctcaatagcaatattctttaaactcttatgcgaagtaacctgtttattttattattttttagtgagagatgttcattgtttcgagagataaaaagatcaagaaatgcttatcccgaaataaatgtgcgatattatacgatttcactttatttaatcaatctcgttgttgatttaaaattttaaataaagatattagatatttattacgtaaacctctaataaaaatagtgtataataaataaataatcacacgaaaaaggtgtggcaa

SEQ ID NO: 54777 - DNA, 679 bp, Cannabis sativa
  modified_base (552)..(560): a, c, t, g, unknown or other
agaaaatactatggtaaagatatttctggctgaccatgatgaaagatgcaagggcctatgtaaaggaatgttataaatgccaaagattttcatagataccccgtgcacgtcccaatgacctaactcagatgcaaagtccttggccttttgctatttggggaattgacctaatcggacaattgcctaaagttaaaggaggagtacaatgtgcagtggtcgcagtggattatttcataaactggaaattctaagaaagtatatctaagaaagtattggacttcgtggtgaaaaatataatatgttggttcaaactcttgcacaaaatagtctcggacaatggcatgcagtttgacagccaattgttcactgatttctacatgaaccatggaatagtaaaaagtttctctgcagttgcacattctgaagcaaatggtcaagttaaagcagtaaataagacacttaaacatacttcgaaaaaatgagttgaagaagctaaggggaactggccggaggaacaacatgaagtactatgtgttggaattattttaccannnnnnnnntttactaacaagtatgttattaaactcctaaacatgaacttccaaaacgatattaaataaacacatataaagtatcaaaaaccttacagtggttgtagcggaatataatgtctccttcc

SEQ ID NO: 54778 - DNA, 872 bp, Cannabis sativa
aatattttagactccgactagacctggacccgaatcccctcccacagccctggtgctaaacccggcttctgacccgaatctgatcccgaacttagacccgacttaaataaaatcaaaaaataaaaatggaaatgaactttacagaacacacttttgttttctgtttttaaaattaaaaagtggttacataacgtattttagtttttcaaaaacaaaaattttaaaaacaaaaattttactttcattttgtggttaaaaaattaaaaagcaaaagtactaccaaacagtaccataatatatttgctgtcaaccactaatttttaaaaagttataaataattgattgtgttgaaatatgattagttctaaacattttatacatatatacacatgtaaaataaattattttgatcatatttttagtataataatctattcataacttgaaaatgtattgaataatgataaaagaagaaatgttttgagtataagatcctatatattacaattttttttcttctatcataaaaatatatcctcatttgttatagttataacattatccttataaatttttcaaaactttgaatgagccaaaaatatgtttaatttttagccctaaactttaacatgtaataaattatgtcccctaaatttttctggccattaaaaatttctcctgaactattgagatggttagatttaaagacttttgtccaatttcatttaattttctatttcaatatcaattttagatttgatacatgttaaaatttggggtcaaaaattctaataattaatcattctataatgtattttcaaacactaaatctaaaattgatgttgaagtagaaaattaatagtaattcatat

SEQ ID NO: 54779 - DNA, 1324 bp, Cannabis sativa
ttggattcgagttcgaatcccagccatgaccaatcaccaatgcatgcagcttgagttcacggtggaaccttggccatgcacgaactcaattagctcggatccatgcctcacgtccctggttcacatcaaagcatacatggacctttggtctagtcgcgcgatcgagagaatagacccaattgggtgttttgggtcctttgtgacccactcgagtgtccgcctagtttgcttggctccgtcatgatcaaggtcgtttatggccaccgtggccatggtggctcgtgtagccaccgtccacagtgggcctaggtggctagaccccatacccgaatataatataaatatatatgtgtatatgcatacatatatttatagtatatataatgtatataaagtatataatatatggtgcatatatacactgtatatgtaatatagattattatcattattttgttgattaaaattaatattttgagggatattattttttcaaattaatttaaaatataaataaatattacttagttttagatttgaaatttaaattcaaaatccataaccaacttaagacaaatgttgtcttaatcctattaaaataattatttaagacaaaatataaatgataattaaaattgtcattctaaaaatttattttagaataaattaattaaaattattttaattaatttaaaggtttaagaattatcttaaataaatagtttatttaagaataattaattattttttttaattaatttgaggcttacggtaattctataaaattacaaaatacccttgcagcgatgaacattagtttggtaatttattttctaatttttttcaagagttgtaaaattagaaatatctaatattttactcagttcatcatcattgtttatttattatttttaaataaatgatcattaataattcattaataacatgatcatgcattagtgaataacatgtcatacatagaaatcccacacagttttattatcatgcatttcatagtagaaatatgatatattatgattgtcctatgtgtttatatatttattgttttagaaaccgaaagcatgtatgactaagattaatttagaataaacttaataatttaaaatcaacctatttaatttaatatagttttaaattataaagctaaaaagtgatttaattttaatttaataattgtgacgtgaaatttttataatttgttgaggaggtttataataaatataaattaatcataataattattaaagggattaatatgtatttattttgagaattaatatataaaatacattaacctaaaata

SEQ ID NO: 54780 - DNA, 1836 bp, Cannabis sativa
agttcagggggcattttcatacatgtcaaagttcagaggagtttttagtgggttttattttttcaagttcagaagtttctagagtgggagtttttcagagagagttttgaaatttaaattttctctttatttagagtgatagtttcatagagggttattaatttgaaattttctcaagaaaaatcttattgtaaatgattaaaactcgtttttcgctttctacatctggttcctcgaagcttcttcttgacaagatgaaaatgaagaaaataatttctgaagatgagaacgaagatctttctggtggttccgacggctctggtgatgtttatgttaaggaagtgaagaggaagcaatataatcgtggaaacaagaaggttactgacgatcggcctttgaaaaagttgaaacaagttgttgaatatgatgaagatttgtacgacagtgatgatctagaagttgagaacaatgaatcgatgaaggtatgtgttcttcttttttttttttgtttatttttcaattttttattatttttttgtgattctttggattaggtattcttttcaatttttctatttatattttgtcaatttagttttggttgttatttttaattttttattgatttttgtttttcattttggtagttgttctctgttttttcagtagtcgaagatatatattttgtttacattagggtttgtttcttgggattcccttgtttcttttacatatacatttatgttagcattagggtttgtttatttaagttttagctttttcgtttttatttttgtatatttagttttttttattttgaattcttttaggtgtttaatatgtttatatatatttttttatatgatttagtttagtttatttttttttgttattttgttcttgtatactttactattcccacagttttttaatacacacacttagaaagcaagcacaatacatacaaatacttgttgtagttgttcgggacattggttccgttgtttttgtttttgtttctttttacatttacatttatgttaataaaccaaacacaattcatacaaatgcttgttgttgttgttaggtggttaacatgtttaaatatatttttgtatatgatttagtttactttttttattaatgtcttattatatactttactatttttacaaataaacagtgatgttttgtttttttcaatattgttggcatggtaactggtttgtttacatattttgtttatttgtaattttgatttaatttttgtatgttaatattgtttctcattttttaggagtgggagttgtatttcaagcatgatgatatggttggtggaagaataattttttttcctaatcatgaaaacaattttattgccaatatcaatagtaaattgactccttctcaagcaaaactgtttcgtgagagatgttttggacattttttggacatgaatccaattgcaatgaaaactcagttgattcacaatgctttgcttagggaggtacaccagaaaaatccttctgaaatgtggttcaaatttggttctcaaaatttcaggtttagtttggttgagtttgttgttgtgactgatttattatgtgttggtgaatctgatatgagtgcttatgaaaagaaggagaatgcatttatggataagtattttagtgatcagcaagttacagtcagtgctgtggaagagaggtttaggtatagtgattttaagttggatgaatatgttgttaagatggcggtgttgtattttatttctaattgcttatttaccagccctaattctaagaaggttcttaatgaaatactcaatattgttgg

SEQ ID NO: 54781 - DNA, 1598 bp, Cannabis sativa
gtgaatagagaagagttagcatcttcacataagacaaaataaagtgaattagtggttcaacacttattaaataataaccaatatatttttaacttcaaaagcataaaacaaactactcttttttcttaataaaaaataataactatacatacactgtaatttattttttttaacagaaagagccttatcttgtttaccatatactttaaacccaaaaacaaaaccacttattagagacgtcaattcaccatacaattcaaatacaaacacacaaaaccttgccttcaattagttaatataattcttaatcgacaaaacgtgtggctaacactttatagcctcaccataaatttttattaaaaatttcatgtcaacatatataacaagtcctatattatatatgtacatcaataaaactagaaaaatactgtttgtttcattcagtaccctcaagactaacaaaattataccccacaaatacatattctaattttcactattttcccatgtgatacggtcaaacaaaatgacaaaacaaatgcctaaaaagcattcacataatgccaaatattctcagtacaaaacaattaaagcctttaaaatggagctcttggtacaagtgtatttacacatataaacaaaatcatcatccacaaagaaaaatttatccatggtgttagacatacataaatagtataagaataattgatgataaaagtcataccataagatggaattatttcactcatggtgtccccaaatccaaaataagaacccactttgtgaggtctgaaactttcaagtgaagcttctccaatgactatcttccttccacgttcatttgaaaatgtcgaagctttgttatgctctgaaatttcaaagggtatggttggctatactctgaaaattttggaacttagggcttgttattcactgagtttctctctgcaaattataagtttgtttttattttatttttctttaattttaattttaattatttctagaaaagaataaaaaaatcaaaaattctcattgttttggtgttccatttttacccctcattaactttttcacatgtacataacgttaatattttagacagaaccagacggaaggatgacttttcattgtttatcatagatcgggagggatttttgccaatcaacaaagttcggaggtatgagtctacacacgtaataagcattttgtccttattaaaattcctcaatttctagtatgtaccacctatcaataaaatataagtatttaagtgataaaaagaatatattcattaaaattaaattaccaacaagttatgcagtacacttggcggtggtttgtgaattcttggggcggcgaattcgtatgcacacgacgtcggaagcgacgggcgtgggtgatcgtgttggcgacagagtgagaatgtcggagaagatgcgaatgagaaaatggcagtgatagctgaattattgattgatgagtgattttaggttttggtttctagaaggaaaatttacatacattactaacttttcccattttattacttttatactgtgacacggttattattacatttatactgtttttttttt

SEQ ID NO: 54782 - DNA, 1507 bp, Cannabis sativa
attcaattaataaaacatgttcttgttcatcattaccgcattgaccctggtccttgactggagtaacagctcctttcttcctccaatccatactggatggaattgcggtcacactttcatacttgaatgaagtggatctaggaacactagaggaatttctgtaaccattacgagaggctttgaattcttcattggtaaggtccacaaactcattgattcctagtttgtacaacttgttccctgctttattaaacgactcaataaactccacatttttcttaaatatttggaaacgaatttgcttttcagcatcatctttgtaggtgcgaccataccgagccatccactgctcatgttgttctgacattgaagcatcgttcaatgttcgacattgagactgagagagccatatggctaaaactaagattaagactagagttgttggtgcaaattcaaatctggaagccattactcttttatggttatgaaactttatataaacttgtattagaaatgagaaggttgcatattttgatatagagaaactttgatatatataagaaaataaagttgtatgttaattagcatatacaaacaattaacatttcaattggaatgatccctggtttgtacggcaaattggggtaatatgtcctaacaaaataagttactagtatatttgaagcatcttttgtcttatcctttcttttttgtatatatgctactatttattattaattaaataagaacagattaagggaggagattctgtcaaattcgattgcttttaagagttattatattttctagtgttatatatgttcttataaatattctttgaagttgtgaaaaaacccacccatagtaaatgtgggagtattataaattattcttaattcacaaattataattatttcatttacgtaagtaaatgtttatctctcaatcatacaacaataaaacttgtccagaacatgtccaagttagaagaacttcacttggacgatgtgaatctttcttcaacattacctaaatccatgcaaaatctatcttccttgatatcactatctctaagtggttgcaggttgtatggggaatttccacaatgatcatagatattggatatgatcattttacaccctctgaccatcctaagtgtctcattctcatcccaattggaggatcttcgtttggatgggaacaagctaacacaacaaattccaaaatcaatttcgaaaatgacaaaactggaagatctcaaccttagtgaaaataagttgagtggcataattgagatgggcatgttttcaaagaggagtcaacttcaaagactttctctttatcataatagcctatatgtaatcacaaacatatcaaaaaaattcaatctaatatcttcaaacttaattctttgggtttggcttcatgcaacattacgaaatttccccatttcctaaaatcccaaaatgagctagaagagtacttagattttccatcaacaatattg

SEQ ID NO: 54783 - DNA, 933 bp, Cannabis sativa
ttgttcatattaaatcataaagagacatgtagatagagttacatacgtggaaaaaaattctgatttttaatatttcataacagttgcataaacattttgctaacagttattttgtcttattgaaaccttcgtctactacaaccttcggtcaacaaccttcgtggacacgtggacagtccaccatggtacttaactgtgatttttggacggaggtgtacagagcaaaacggaatgggagtttaggtagttttgccgccaaaatttcggtttttgtggttaagtgttacaaaccgtaaagttcaggtagtttagccgtaaatatcccttattattattattaaaagtactattaatttttgttgtattagcttattatgttagtttttaaattttcatgctaaactgtattaattattaattatatatgaggtatattttattatgactattagtggtattagttattagagaattttatttcttggttattagtagaattgtaaagttattgagttattaagttattaaattattaaattgtttgaagtagtctgtaatatcgaggatctaatgtttgtatttgataagataagttttctctttttatatagaacgaatatggttaatttatcttttcttagtttttgggaattgatattatttttgttggtatttttttgcaggttgtttttcagctatttaggcagaatgtttggctttacttgtagcattactgtgagactttctttacattttgttgaatctgattgtttaacggttgtaattgcgttttctaaacgcacttctttccttaatgaacttggcttcttgttaaaggatttagttaatctgtgttcgttggacagccattggggctggacttggattagcttggcatgctcttcgagcggatagagaactagtatggtttga

SEQ ID NO: 54784 - DNA, 2563 bp, Cannabis sativa
ttgcacaaaactagctttatacaatcatgcgcacccaagaaaagggccgaaatctatgtacataaatatatcaatctagaatcaatattgattttatgatttacaaagcaataaaccactctctatcattgttcttaatctttttaggcatcaccctatcaatccgaatcttgagattccactttgtttcttcaacaatacgggtcgggtttactctagccttttgccacacagcttcatttcaggctctccatatgttgtacaccagtcctacaacagcagccgagaggactcctttcctaaactttgacaatttggacttcccaatccacttgaggagctgctgtaggctgctggtttgggcatgccagtccatccaagtcttcaattcctgtagacatttctcaacaacaatacactcaaaaaataagtgattacaagtttccaattgcagctcacacaagctacaggtcccctgcacctgaataccaaatcgcatcagcctatcttgtgtcttcagcctattaagcattgccaaccgagctataacactatgtttaggagtgttaagccttgaccatgtttctttgatccaatatagccgaaataatggggggaaaatagtttattaccagctgaaacactatatttctgcttctgaaaagcattaaaatctaccaaatctctaagttgttctttaagggcaaccatcttcttccaataccagctagaatgtatggacggagagtactcccaccaagttttggttcttaatatatacactatggacccatctgagccataagctctcttgtttatttgaaatagcccatatgtacttacttattgcagccttgttccatgcttccaagttcttgattcctagttctccacctgccttaggttgacaaatgctattccaagcaacagaccctgcaccttggaacatagcttgacctttccagagaaaggctctacaaatggcttcaatggatctcaataccttctttatttgactccagtacgcctatatagcaatgagaactgagttgattagggtgattctcccagcaaacgagagattccttgaactccaacttctaattctagcagtcattctctcagctaatatatcacattctttccctgtgatctttttcccacagattggtatacccagataggtgaatggcatctcctgtctgatgaaacctgataactgcataatgtggttgacttcatcaggctgcatgttactacagtatatggcggttttgctggcatttggatataatccagatgtgagtgagaatatttttagagcctacaatatatataagatactcatgaagtccccttgacaaaataataatacatcatcagcaaaagcaaggtggttcaacttcaaactagcacatatgtcatggaatttaaaaccctctttttcccccactttcttcatcaatctcgataagtattccatacccagcacaaaaagtaagggagaaatcggatcaccttgtctaattcccctttttgcttcaaagaaaccatggagagttccattgaacatcaatgagaatctaggagttgtaatacagttcatgactagttgaatgaattttagacgaaaattcaaaccagctagcatctcttcaagaaaactccactcaattgtgtcatacgccttttggagatccagtttaatcatgcaactaggcttatttgcccttctaccatagtgcctcaccaaatcttgacatatcaagatattatgcccctatgaacctctctttgataaaaccaccttgagactgtgatattattgaaggaaggatgttattgattctagaactcaaaagcttggttgcaatcttataaatcacattgcaacaagctataggtctaaaatctttaacagagttaggacatttaaccttaggcaccaaagtaattatggtagagtttatttctttcaaaatgttacctgaattcagaaaagaatgcacaacaccacatatgtcctctccaatgggatcccaattatcttgatagaagctattagaaaagccatctggacccggggatttatttcaaggtatgttgaaaacaaccttttttatctcatcctttgtgaattcctgtagtaaacaatcagcctgagttgaagttaatacagggccattgttgagaatacttctttccactaccttcctctgatctcttttggttccaaggagacttttatagaagtttaggaaagctgctgtaatgagttctaaatctgtaactctgctgcgctcttggttttcaatggaaaggattcggttttgcctcattctatgcttaatgcaagcatgaaataaggcagaattagtgtcaccatcttgaatccactccattttagctctctcttttaaaaacaaagagtaatcctgctacttttgaagtaaattctcacgggctaatctttcctgctggtgtaggctgtcttcaaggggctattgttccagctggttttggagtctgtcgaaagtttccttggcctcatgaacctgctgtt

SEQ ID NO: 54785 - DNA, 1002 bp, Cannabis sativa
  modified_base (150)..(153): a, c, t, g, unknown or other
atctccagatacaacagctaaagacgtgtttaatacacgattgttttgacccagtaaaagtgggaaaatcacagctatatgattttcaaattataaactacatttacattacgtaatatgtaatcaaatcccacgattttagggataatnnnngtaaacatattccggtcaactttgtaattaactgtccactatataattataaatagtaacaaacaagatcaaaaaagggacggaaaaactcatacaagagagttcctaaaaaaaataatcagaaatctgaataagattgacttgtggactatgcagaattttaactacaaaaccacgtaaaaaaatctgtgttcatatctttatttctatagcttttatttttctgtgcaaaattactactgtgagactcaaatttagttaacaaaaatctgcgttaacatggaggtttacatcgatgatatgttggtaaaattgataaaaagtaaagatcatacctcagacatggtagaatgctttaagatattaaagaagtataacatgaagctaaacccgaaaaaatgttcctttagaatttcctcaggaaattttttgggattcatagttaacgcgaggggtattgaagcaaatcctgaaaaaatcaggcattaatagagatgctgtcaccgacaaaaatggtaatgtggtgatgtttaaggcatgtcttgtagcaaaaggctatactcagaaataagacattgattataaagagactttctctccagtttcatcgaaagactcttttaggataataatggcacttgttgctcactttgatcttgagtaacatcagatggatgtttaaacaacgtttctcaatggcgacattgatgagacaatttatatggagcaactagaaaactttgtttatggtgacccaaagaaaatggtttgcaaattaaaaaaatacatctatggactcaagcaagcttcccgtcaatggtaccacaaatttcatcaagtggttctctt

SEQ ID NO: 54786 - DNA, 1001 bp, Cannabis sativa
  modified_base (109)..(112): a, c, t, g, unknown or other
aagtttgaggggcatgatttggtagatatcagagtcttgagagcatagtttagaacacaaacaatcactaaaacagtaaaatttaatgaaattagacaaaagtccttannnntaacaatctcaataattcatgaggaatttttaacggccaaaaaaatttaaggggtatgatttggtacatattaaaatttgggaaaaaaaatcttaattagcctaaaataaaataaaatatgatgaaataattatttcactgtaaaaatattatattttgaataatattattaacgaagcttatactatagcagatacaatttagtagtgtaaaaaattgatggatgctaattattcaaaaaataataaaaggatggacacgtttttattttttgacctcaaataattctaaggtcttgtaaattcctcatgatatcttgaccaattgattgccaacccaagaacagtacacaacaaacgacactcctctttttgttggaaagtaaaatggcctaacatatgctatactaaaaacaataaagatttaaggattctttaaagttaataaataaaatggtttattcacacgtcgccataaactttcgagtcatcgcatgaagtagagtcctgttttctatatatttgtagacaagttctagtggtgcaataatttagtaaagttttcttaaaattatgtttccttttttttttcttaaagagatagagagtgagttaaagtacctataaagaccgcacataagagcatattataatgcgtggttatttttcaattcagttttgatattgtttgcttggaggttattaaacaatatttacaaggaggtaccaaactaaactaaatatattttgcaaatatttttcttttctgctgtatatttgtactagtaaatatatcgcatttcgtgtgtgattgtatttttattaaattctgttaagaagttaattattttacaattatacagttaggttggttggttttttttttccca

SEQ ID NO: 54787 - DNA, 1077 bp, Cannabis sativa
gtatgagtatcaagagctagatctttatagctggtgacagggatatgagtttgagcatggaaggcttccatcatagattcagaacaagccatatttgtggaagcagctaccaaaacagagtcagtagagaaagatgtgaaagcagaattattggaggaggaaccaagaccaaacctactaaaagatggtggcattcctccaatattgggattaataggtgtagggatcataatagctgcagattgttgggaatgggtaaaagtgaaaccaaaagtgacatgataaatgaggaatgaggggaatcgaatggttggctccgaagaatccctagcagggatgctaagatcaacaggagggatgttaagcaatgtcatagttggtgagtgtgggtattggaaaggtgcactcttatcagatgttttttcttttcccctcaataagatagtaaaaggacagagaggctcagagtgagtttcatcacatttctggataaaaacatgccaatatattttggtatgatcaagacaaccacaatagaaacaaaagtcaggagggctctcatatttaaagttaagccaattaataaactccctccccatacgaataaaactaacattcataccccttctaataggcaaattgacatctaagagtatcctgagcctcaaataaggcccagtaccttccctaaccgtgtctctatccacttcaatgaggtacccaatttcagatgcaataaacttagctaattcatgggacctacacataaaagggatgccatacacttgcagccagaaagagacatagtggaggttattaggagtaatagggaaagaactctcaggaacagcaaagatagtgatgctctaagcaaagtgccaaggctggccctcaagaattctacccttatccccttcacatccaaatgtaaccatgaacagactattggcatgttcaggctcattttgtgcatatattaaatatgtatattaaaccataaacatgtagaatacgtgtaagcataaataacttcaaaattctaaattgataacaaatcagattgtaatgagttttatt

SEQ ID NO: 54788 - DNA, 984 bp, Cannabis sativa
ttgggtaggagactcgcaatcattacaaaaccttcctctatgcatgatcatcatgaattgctgtccccaaaaaattaaattattaacttcgtccatagagcgggatatatattagcatggtagttattatactatgtaaatgaagaagttatatatgatcactacattagtgggaacaatacgtgctttaattggtttcagttttaataaatatcaatataaaattatattaatgtcaattattaattaaaacattttcaaattttacaaaaatatatgaaaacaaattaatttgtcattattattagaaacactttaataaaaaccgttgctattttcaatgtggaaatagatattgcaacattttattaataagtgttatgttttcatattctaattagttattaaaataaaatgatatgggcttttgcaacactttttttctaagtgtttttattttaaaaatctaaaaatattgtaacacttataattaaagtattgctaataaagtgttgttaaatataatatttgtagtagtgtttagacctatagatgcatgtgttctttgtgttcttaaacctgctctttccagaatggatcttggatctctacattacagcagaaaaaaagagagagagaaaaaaaatgagaatttgattagaagttgggttcattgaaggaggtgatggttggattcatcgatggaggtggtggttgaatttttcaatggtttgtgaaacgaaaagggcgcataaaattatagagagagaaaaagagaactgaaaaaatcagaaataattaaaaataaagatgctcaataattcggtatttctcgctcaaacattacacaacttcactaaatgacatggcgcattttgaatggctctgagatacccctatcgatgggatcttttctggagcccctataaaagaagttctctataaaattatatcaaatgtaatataatatcatatgaaaatata

SEQ ID NO: 54789 - DNA, 914 bp, Cannabis sativa
attcaagcatatatcaaaatgttcaactctttattaatagtttgaaatatctttataggctttttagggcataaaccataacatagagtcccacgcctgagactacaactcagataaactctggttcttcctggaagctttatgtaaatggctccttaaatgagcattcctctagcgcagggcttatcctcataactttggaagaatatcgcactcagtgtgccttatggttcgaattcactgcaatgaacaatgaaacgtagtataaggcactcttagcaagacttcgattggccctagccatcaaagttgagacactcaagattttcaatgattcttagctcatggtcaatgaagtcctaagcgaatacaaagctcgagggcttaaaatgactgcatacttgagcaaagctaagaatctattagctcagctaaagcagtactccatttggcaagtttcgtgagaacaaaataatgccacaaccaagtttcgaactttggagatgagtctataagaaacgacacccgaacactttgaagccctaatgggcgccaaggttgacatctagtcgatctgagcacacagtgaatagggtttaggtttccatgaacttctttggaccttgattcctcaaatagatcaaggaacaatgttaggacatgatatttcatcaacaacaacccgaaggatcctaactcaacttatgggttcccaggttggaatgtcaacctcagcattgatttcatttcaccaagtaatgcctgtaaaagtttaaaaaatgaacacttgggtgccgatactgccccgaggccattatgggcgcctatgttgacataattcaacctagcgcactccgatgaatctttccagagaagtcttctggattttccttatttttgtcaacaatgaagat

SEQ ID NO: 54790 - DNA, 1593 bp, Cannabis sativa
attataattttatacaaaggatttggtctttaattagtctagtttatcaatattaatgttgcaggggtcgaacatgtgggtggagacatgtttgaaagtgttccaagtggcgatgccatttttatgaaggtcagcattaaaagcttcccaattaattattttagtagctaatataataggctctgtttctttttatagtgtatagtagtagtactttaactaattaacgttacatacatatattttagtggatacttcatgattggagtgatgagcagtgtgtgaaagtattgaagaattgctacaaagctataccagagaatggaaaggttatagtgatggaagggcttcttccaatgttgcctgaagctagttatggtgataacataatgtccaaaacagatgtgttaatgatgactcaaaatccaggaggaaaagagaggagcaaacaagagttccaagccttggcaagtggtgctggattcagtggcatcagatttgaatgttgtgttagcggcttttggatcatggaatttttcaagtagagaatatatatggctttttccaattatgaataaaaattaccatgcatatggctttgattgaagatattagtagagggattatttactcataataatatgtgtacaattaatataaggaattttgctgtactgtatatcaatttaagagcgtacgctgttatcatattcttatcatatattttagtgatattttaactactattctacgacattattaatcgaaataatataaattatgttatcatgattacctgatcatgtaagttcttttactaataatttataggataatcaattatgttggaattaggataatcaataactatttgatcactagtttattattattatatatcaaagttgttaaaagaccttaatagaaaaataataaaatagagttgaacaatctaataaccaataaactaagtatccgaaaaataataaagaaaattatcttacgaaacaagttgttcatccatttgcatgcatagctaatctatgtctagtcattggtcgtccaacgaatatgaattaaggatgttgttaaaaatttagataacaaatttgctgaaacatctaataataatacaagattatttaaaaatgattgcctttattaaaactagacgtagctactagacacaccgtttcaattacatgataagttgtaaagcctaaagaaataaaccactctaatattatcataacagccatacactttgcttaaaccacagagaagcaacatgtaaaagaaaagaaaaaacaagaaaatatactaactttagttacaaacataatatgaagtataagtacacaaataaccactaatatttttatagtactgaagtaaaatataacaaaaattaatatttttattaataacaatctaataattaattaaatttgtacagtcaaataaaggcctaattaggatatttaccttcctgaatttttaacatgtactaaatgatgtccctaaatttttccggccgttaaatttaatgtttaatttcatttaattttactatttcagtgattgtttatgtac

SEQ ID NO: 54791 - DNA, 7937 bp, Cannabis sativa
  modified_base (423)..(425): a, c, t, g, unknown or other
catcttcaccgttgaaaaccacaatggggggcttagtgtggacttttctcattggaagatggcatcgctcctttgcttttagtttgcttgttttgggtcgtcgtgttgcctcctttgcgttaggggatgacttttgaagttgtttttctttatgtttttgtttggcttgcttattttagtttttttagttctttcggtgttgtgcacctcatattcttagtggcattgacattaggtttttttcggagagtttgtccctctatatgctcttacgtgggtcttgagcttattgctccttttgaatcaacgcagttggccaacaattatcatctcctagtgagattgcagtttttctgttggacttgtagggctcttacccttttattaactttgaatgaagtttaaccacttgaggctagctcnnntggccataggtgggtgtgtgtgtgttggaggtcctgtgttcgaattctaggtaaaacatggttgtaatatataaacgcttaaataaaaaaaataataaaaaaaaaaactttgaatgaagttttcatttaaaaagaaaagaaaaagagattaaaaattaagttgaaatcaatttcaataagtcttcaaaagtaatgatatgtataaaggaagaggaagacgagagacataataaatttgtaacaaaaaataatatttatagacatattattagttttgatgtaataattaaattagatcgtgatagatgttaaagatttaaattttactaacaatatatttttaggaaattatctcatatactgttttttttatttttttttttcaaatttatccattgggtttttaaagtggtttctccagtaatttttatgtaggttgctatacgattttttgttgctatttagattgtaatggtaattgcagtaggaatttttatgtaaaattatgtaaaaatacaaaaaaaaaaaattgttttaaagtgtaaaaatagaaaggctaaaaactactatatttgtttataaatttacttttatctttatgtaaaaaaaattacatccctccacattaaatcttggattccgctgcgatagatatgtaccaaatttcaatcctgccaaacatagtgtaaaggaagagaaagaaaatgatttctttttttaaatagaaaaatactagtggtatgttcttcggtctcagtctcttctcagacataattattcttacaaatattaaatacattttttccttataaaaaaataaaagaattaatttttaagtcaaaaaaacaaagtgaattacaataagaaaaaccagacccactaccccacaaagattctcattttagggaagcacaggagtggactccaccagtttctacgaaatccttgcgaaacaagttttcgatttttgattttcaactccccaatttctattttttggctactctaaactaaaacgtcgtcgtttcaaagctagtccattcctattggtccaacaagaaaaaaaatactctacattgaccactttttcaaagctagtctaccgaatttacgtggaaacgaccatatgtgaatattgcccaaggagggagactggagtgaaggccattctgttttcctccatttctcactttcttaggagccaaacaaagaaaatcaactagagactgttactcgtttagttaccggtcaaggagaacgacgagagtgggcttaggttttcgacaatggcgtcgccgtcgtctccgagttcttcaacttgcagctcttcatactcttcgtcgtcctcgattccccaccatttctcgtctctccctgtaatggcttaccgagagaaaatcatcgagaaagttactgagaatcgtgttactttgattgtcggagacactggctgtggtactgataaacatgctttatttttgcttgtttgctatatttttttcctccgtttttgcgtttgtgggagtcactatggtgaactgtgcctttgactgctgtttggtttctgtaaaaaacggaagagaaaaaatggagtttctaacagtataggaactatgaaagaaaaatgcgtatacgaagcggttgctttttctgatgatttagtagtttcacttttaactatttcggtgtgagattatgggtttccggtttgcggtttgctgatatgttgctaatacattctccttgatcgttttagttgagttttgttttccaatggcttggaatttggattcgtgattattgttaacgttttggttgttctatgtcagagtattactgattatgggtttgtttcatgaaagcggaaataatggattattatatcacccctgaagaaagtattgcatgttagtctatctaagaatcctgtattttgagtgtaatgttgttggacatttttttcctatttagggaagagctctcaagttccacagtttctagtggatgcgaatatgaagcctgttttgtgcacacagcctcggagatttgctgttgttgctgttgctcaaacggttgcaaagtcacgtaattgtgaagttggaggagaggttggatatcacattggtcactcaaagaacttatcaccaaggtaccagtaattgatgttctaaaatatatgttagctaacattgttgcaggaaggttttgcttttttactttgtagagaattgggatactagttagtttagagattgctttttcgctatgtttctgtagcttccattcatgtggcattcaatctgataatgtctaacaaaataaatataatatttatgttgtctaattatgatctctcttttgtttttaattaatttttgacagctcggatattattttcaaaactgctggagtattgttggaggaaatccgagacaagggggtgattgcacttaactacaaggttattattctcgatgaagtgcatgaaagatctgttgagtctgatcttgttcttgtctgtgtgaagcagtttctgatgaagaacaaagacttgaggttgagataaatttctaacccttttagattttgagatatcaagtcatttttggtatatttacttttactgtatgtgacctaattgtcacattagaatttatgggacaatggttgctttgtatctaaaatattacaaaatttgcagggtagtgctgatgtcagcaactgctgatatcgcaagatatagagattacttcagggatcttggtaggggtgaacgggtagaagtgctagctatccctaactctcaccacaaaaccttttatgatcgaagggtcttttatcttgaacaggtttgtatcactctgactgttctaattttcctgcttgtgagaagcgggaaatataaggttactatggtgaaaagtataaaaagttagtgttgatcatcttttaacaacttaaaatttaagaaacactggcttctaacataccatcccagtagatgatctagagtgcaaactctgaataggaaattgaaattagtttttacaagcaggagctttaaagggtaaagtgagtataactgatataaatattagaaaaggaaccaggaattttatgatagaattggtaatatgagagtatcatttaattaaaagctcatcttttattaatacaaaatatgggtagttaaagtgttctgtaattttaattgtaattgcaactcttatattctatgtcacaggtagctaaattactaggacaaacttcagagtcatcctctttgagttggagatattgttctggtcaacttccttccatatcaaaagctgatatcaaacctgaagtgcatagacttattcatgatctggtgctgcacattcatgagaatgaaccagacattgaaaagagcattttggttttccttccaacatactattctctggagcagcaatggtttcttctgaagcaacttagctcatcttttaaagtacacattctacacagtagtgttgacactaaacaagctctcatggctatgaagatttggaaatcgcatcgtaaggtgtgcacttagataccttgctttgtcaaataaattttttatgcaattttattctaaagcttctcatatggaatataacattttagaagtgttgtttagttggtttgaaacttaagttgcatgtaatagtcttttcccttttaacatgctgatgttttatcaaatagtcccttttcttttcattgtggctgctatgaaaataataggtaatactggccacgaatcttgctgaatcatctgtgacaatacctaaggtggcctttgtcattgattcatgccgatctttacaagtattttgggataataccaggaaaaatgaatctgcagagctaacctgggtttccaagtctcaggtattgcagaaaatatactggtttgataaatttaaatctatttattttttcttaaattcaaattattttgtaggctgaccagcgtagaggtagaactggaagaacttgtgatggccaggtttatcggttggtaactggatcatttttcagccagtttgaggactatgagcctccctctatactgaggctgtctttgaggcagcaagtgcttcaaatttgctgtgctacctctaaagcaatcaatgacccgaagggtatatgcactaaatctggatcattttatttttcactatgtcatgcatactgggaagtgcttgaattgaacattcacatggataaaactgcactaattcgctaaatatgtgtttgctcaaagtgtttcaatttctaattgtcaaactttgattccagttttgctgcagagggctctagatcctccacgcccagaggttgttgaggatgcgttaaatttgttagttcacatgcgtacattggagaaaacatctccaaggggtcggtatgaacctacattttatggacgaatgcttgcaagcttttctctgtcctttgatgcttctgttttaatacttaagtttggacacatcgggatgctgagggaaggcattgttttgggtgtattgatggatacacaacccctacccattctgcgtccttttggtgatgaacttttggtaatttctcaacaaacaaatgaaatttgtagtgtttgggaaccctgatttaatatatatatatattgatagagacagttgtgcaatgcagagtacagagtatatggactgctatttcgcggaagatagtaataacactggcctaactggcaagaaggagataatactcatgggaaatttatgtgcatttcagttttggcaacgggtgttcaaggtaatattagacaactttttttttaatgtccttacaatggatttgtcttacatgattcaaacaattttcattattatgaaggataagctacatgttgagcatttgaagcaaattttacaatttgagccaaccaaagcttctacttcacttgctaccaagcttgaagaagaatggtgctaccttcataatcttgtacaatcatctctggatcatatttctgaaatatgtatgtatacgtcatcttactctgattaaactcctaactttgtgaagtaatcttgtacatttttagtttaatgcctttgatttagtgtgtgtatgatcatcttcaacgacggtgtatactagagtatttcttttacatctttaaagttcctttctgatttatgttgctttccagatgaagatgtattaagctcagtccaccagtttcggcccaagtttttgggtagctccgaaggcttgccttgctactatgatcctaatgattttgaccatagctgccttctcatgagttgtcatccaaaggtagattcagatgcacttgaggtggatgatgagaactctcaaagaaatgttttgcaatataccctttgttaattctaataacttcaaaagaattgatgtggctaaggagttcgcagctattatcaaagaggtgcattcactatctgagttggttatcatcaatgtcatgaaaactgattgttttttattgccttgtatttaatagataaaagtttagtggacagaaggtattgctggttatcagaatacaaattatgactctttacaatggtgaaactttaactaataattctttttctctattttaagatgatattttttcattcattttcgttacacaatattttctttaaattttccgaaacaaatatattgatccttttaatttttccgaaactaagagtaaatgttaaagtcatatgttgttatgacttatcttaaattatttcaacatagtaagaataattactatatgagtaaataaattgagataaacttactgtttattattaataacaatgtgtatatcatagatttatatacacaattatgacatttttaacaagtttatttttataaaacaaatcgtttaaaaattacaattagttaccgaattcttaaacaaaaaccactagaacttaaataaaattaatactttcatctagtatatgtataaatatatagatagatagatatagatatagattatagtgatatttatttaattaataaatcactaaataatatatattattgaaaaaaaaatattaatccacttttaaaaattatgaatataaatttattaaacagggatataatttgatttgatgataaactcttaataaggcatgacttaagttatcaattgattgataatttaaaagtatattattcatgttgtaagaaaaaaaattaagtcatatttcttaatatatacacacaaatttataaaataaaataaattatgctaaaaaactaaaatcattacctttctataaaattatgaagtagaagaaaaagattataaagtgtataatttataaataagttaataatatagatatattattaaaaaataatattaatttacttttcaaatttataaatatattagacatttacaaaatttaatttgatgataaatttaacaataaaaattataactaattcggtaagattaatttattaatcacttatataattttggacaaatcaaagaataggtaaaaacatactattatagtttagaagtatactattcatgtaattattaatccatgtggatttttacaaaggggaaaaaactaactaaaatgtcatatttctcatataaatctataaaataaactaaattttaaaaattctaataaaacagatgaaaaagattgtaagataccgcctcatatgcttttatgctttcgtttatataatgtagattgtaattttaaataatacatatgtattaaataatgatagtggtacaattgtaaataaaaaaaaaacaagtttatatgacaatcaaactaccaattaaatatttaataataacaagtaaaactgtttttaaaaaaaattgtataaaaaaatactttataaataagcaaagctgtttataaaataattaattacaaaattgttaaatatacaaatcattataaataaacaaataagtttatgacaataaatttactaattaaaatatttaataaaaaaaactatttataaataaaaatcaaattgtgtaaaaattaaaaactctttataaataaataaaaaattgtgtagaaaaaaacttttacaaaaaaacaaatatgtttataaataaaaaaaaatgtgtaaaagaaaagaaacatctttataactacacaaaattgttaataaataccaaattgtgtaatttgtttcatgaataaagcaataacgtttattattgttgaataaatatcatatcaatttttaaatatttcttttaattttttagataaatatatatgttttttcaataggagaatttttatttttatggtttttaaagtataagtttgtaaaaaatattactattttctcaaaaagttattttatgagaaaattttagaaaaaaattaaaaaaaatatatagagcaatttgtggcgaaatccccttatgttttaatttttata

SEQ ID NO: 54792 - DNA, 1365 bp, Cannabis sativa
  modified_base (256)..(265): a, c, t, g, unknown or other
  modified_base (1132)..(1135): a, c, t, g, unknown or other
cacatgcactcagtactctagtcgtactagtgttggtagcatcaatccatactataagtacaactagccataataccatatgcactcagtattttggtgtactagtgttagtagcagtagttcatgctttcgaagtataaccaaccataataccacatgcactcagttttttagcgtactagtattggtagcattggttcatactttttgaattgccaatcacatacattcacgatatcaagatgcaatcatatannnnnnnnnnatcgttctaacggatatgtcatacatgtggcaaacatatacataaacatgtacacatatatgtagattatactagttttacctcaattttgatttcaggtgtgccggtcaaccttagtagaaatagctgctcgtaatcgaaggccctaagtcacatttctagaaaaaccaataagtgttgccctaacactttcggggacttaaattgacaactaaaagtttccttattgatatatatcatgaaagtaccctaagtattgagaaaacactcacttgggatcttgagaaatatcttaaaatggaccccaaaattctacctaaattggatggcccgaaactccactatcccattttaaaacttacataactcttgaaattctaagacaaaccttacaaaattttttagggtatctaaaaacatcacaatgaacatttttcatggagaaacctcaatcaaattctcaacagaaataaaactaaatggccgtcctaaaactgcttaaatcggatggctcgaaacctccctgtccaagtttggaaatcttataactcatccaatactgatccaaacattaccaaattttgttaggaacctaaaaacatcataattaacatattttatgcagaaacctcaatcaaattctcaacaaaaatcaaactaaatggccgtcctaaaactgcataaatcggatggcccgaaactccctgtccgagtttggaaatctcataactcatccaatgcggatccaaaaattaccaattttttcagagaatctaaacgcattataatgaatatatttcatgaagaaaccttaacccagtttgcaacagaattcaagttatcacaaccaagttaagtttgagttcnnnnaactcaaacttgcataacttttgctacaaccacccaaaacaattcaaaccacttctaaatagtccttgataaccttaataataatttcataatattcccaaacttattcaacatattctactataaacaaccactgagaactaacaaaaatcctagaaaactaataaatttcaggttaggttttaccttagaagtttggaggagctaggggttgaactccttgatgaatt

SEQ ID NO: 54793 - DNA, 633 bp, Cannabis sativa
aaagggaggaaacactggaagcttccagaccgctagtcatcccggaagtttgggggtaaatgttgtccaaatttttgtaagcttgacacgtggaacctaaccgatgaagttgagataataatcagctggatcatgctttaggccctagctctcgcaaggggcttttgtgaaggatacttccgtgcaaggcgaggacacgtgcagcatccgcattccatgatatctcccaatccaaggagcagaagccaagcatccaacaaaggctgtgagcttccacgagtaaacctatgcaagtaatagaaggacttagaatgagatgtatccccatttagtgtcacaagaaagctccgttcgtatctgtcaagctacaaaggtgacaaccatgcttttgctagtatgacacaaggttttctcccccacgttaagacacagtatagagtatgtacgccattgtacctcccaaaatgatccacagtccatttataatgccatcgactcaaacatttaacatccattatggcatgcttcaagtaaagtgattgttatgtgaaggattcgttcactcgattcgctgtcatttcaatgtctccctagacatgcgcctagcacgcgcgcaaatagtaagagtcgaca

SEQ ID NO: 54794 - DNA, 770 bp, Cannabis sativa
acaatttaaatataagattcaaatagttaagtccaacattaggataaggcgggctataaccatactaagagctcacccaacccaatgactaaaaaggaaaatatgtatacacacctataaaaactagaaagtataggaaaagaaaataataataataaaattattattatgcacaatagtttactcatggctacaagtgcagaattgtttttgtttttgtttttgctagtgaaagcaaaagaaaataataataatataaattatgcaatgcatttatttttttttttcacttttatgatttttttttttttacgtttttttttatatgctttcaattgtttttctatttttcttttttagaaaaatgtcactattttgtagcaacaacttaaaaaataatgttaatttcaaaataacaaaaaaccaactatcagtaattttatagaaaaaaaaaaagttaaaattcgtaaaatatatataaactataaattcataaaaatatgaattatttgtcatttataaaataatcaaaaaaaattgaaagggcccatttttttcaaaatacccttaggcccattattttataaggtcgattttgagtctagccagtcagcagcaaaataaattctataacttttttatattgttctcttctattttcatcattttttttaaaagtctattatttttacctctttttttaaacactttactaattttacccctatcactttaatatactatcatcccttatgtcagggcattttggg

SEQ ID NO: 54795 - DNA, 639 bp, Cannabis sativa
acttgacacaacaaactcgaatctttgggaccatctaaaccaaaggagatagcctgatttgagagaccacgtgaacaaggggcatggacaaagagagtatccttatcaggcgccatatgacattctgccacaacaaggagtatatgcgcctcagtttaacgcaaatgctcttccaccaaccagtcctaatgttcttgctcccgtgataaacgacctaagaatcacatcactggaataaaaaattcagcagatgttgaacgccaacgggaaagttgggggatacaagtttaacgaagagcctgagccttttgctccacacatcttggcattaccataaaccctaagggttcaagatgccaactatgacaaagtatgacgaaagtactaacccaggagtccacattagtgatttcaatacattaatgaggacaagccaagtaagtgcaaatctgaagtgcatgttgttcttagtgactttgataggatcagcaaaaacatggttcaataaattcaagaagcaatcaatcacttcttgggacaaactgtcaagtgattttaaaaaaaagaatttcgtgctgccaagtcttaaaaacttgaatgctcttccttggccagtgtaaaacaacaaccaggtgagag

SEQ ID NO: 54796 - DNA, 1467 bp, Cannabis sativa
tttgtgatagaaatatagtgtgtggtctatttctcttaatgtcaattccaagaatcttcttggcagatcctaggtctttcatttcaaactcagttttgagtttgcttttgagtttgtcgatttcagatctgctttttccaatcaaaagcatgtcatcaacatacaatagcagataaatatgttgattaaagtagacacaggggtcatacttgctttgacagaactcaatgctcttcatgaactcatcaaaccttagattccattgtctaggtgcttgtcttaatccatagagagatttgagcaagagacatacctggttgggatttccattgtcaaatccttcaggttgagtcatgtagatcttttcatcaagagtaccatgtaagaaggctgttctaacatccatttgatcaatttcaagatcatactttgctgcctttgccattaagaccctgatggatgtttgtttgacaactggtgcaaagatttcagtgaaatcagtgccttccttttgagtaaagcctttggcaacaagcctggctttgtacctgacttcaccagttccagtttcatcttctttatgtctgaacaaccatttgcatccaacaagcttctgcccctcaggtttgttgaccactatccatgtcttatttttcttaagtgaaagcatttcatcatcaatggctttgttccatttcttgctatccttgcaagttatagcttcttgaaatgtctctggttcagagttaactaactcttcagcagcagctagagcaaatgctgtgaaatcagcaaaaccaaatctaacaggtgccttgtgcactctccttcccctatctctagtgagctgatagtcatcagtttcaatacctgtttctgcactagtaggatcatcttcatgaacctgatcagccccattctctgtctgatctgcagtgtcaggttccatctcaacctcaacaggtttgacactagagttctcatctggttttggttcatccttagatttcatagccatttcttcctctctgaagataacatctctactcaaaagacatttcttgtggcctggttctaagcaccacagcttgtaacctttcactccttcagggtaaccaaggaataagcatttcagagccctaggttggagtttgtcttgtctaatgtgggcatatgcagtgcatccaaacaccctaaggtgatcatagctaggttggtgtccagtccatttttcttgtggggttttgaaaccaatagcagcagaggggcatctattaattaagtagcttgcagtcttaacagcctctccccagaatggtctttccagaccagcactatgcaacatgcatctaactctctcaatgagagttctgttcattctctcagctaatccattctgttgtggatttttgggaacagttttatgtctatcaatgccctctcttctgcagaaatcattgaattgat

SEQ ID NO: 54797 - DNA, 1238 bp, Cannabis sativa
ttccttcgaatccttcttttttatctcagctgcatcctttttctctgcagcagcacccctcttccgtttatacaccattgtaaaaatctattacataagaaaaaatatcttaaattaactaacattcaaaacactaaaatgttggaagacaaatgctttgaataattcattgcaatcgtctaaaatttcagcgtattcacgacatcccaacacttattttcctgtatgtttccaataacaggtaagcatctcttcttatataacatcatttcattatatgtactatagtctaattgttaaatgtactatagtgtaattgttaaatacaatggagcaatttgcctaaaaaaaggattcggaaccactaacatgtttcttttaagagtaccaaaacatatattcatttttaattcttattgcatgttacacaatcaagtactttaaaatgatgacaatctcatttacttttgaaataattccaatatataaaaatgaaacaaaacaaaaaccactcctacaatacaaattatgttcatggaatacttgttcacatcacattcgaatttcaaattttgaatactataacagactccggatatcatcatgaacgaaaactacatgaataaatatgacaataaagtggaacaatattcaaaaataaatagatcagccatataggtcacaaactttattttgatttcatgaatggggacttcttagggagctaggaccacctattccaataatttgtgttctcttcacattttattgggtcatagaatgaaaacacattttactatgtaattaaaaaatctaaataaattgccaaactattgaagctaaatctaatagaaaactttaaaactattaaagtggttatgttaaatcccttaactttgggttcaaggtggacacgttttatcttcgacttttcttctactgtatttctaaataaatgaatgttcatcccctcaaactatgcaaccatgaaccaatgtctctcctttcactgtgataatttaccatgatatttctaaattacaattattcaacaatataccaagtcggcaagtccacatagatatatatatcataaaatttacacttaaacaacaaatgtagcaacaaattgttgtcaatttgtttggagcttttttaaaaaactatcttaaaaaaataagaggaaattacactctataccatttttatattattctcttttatttttactctctttt

SEQ ID NO: 54798 - DNA, 759 bp, Cannabis sativa
  modified_base (568)..(570): a, c, t, g, unknown or other
ctattataggtaaaaaaaaaatgtaaccatatggttacaataaaaatgtatccattgaatagtcacccaattctatattgtcaaagaatagaatttcatatttatagtggagtaatgatggaattaatcaaccaaattactctgttgatgagattgatggtaatcttgggtttattggaactttagaatataggtccatggtcccctagtcacctctatacaacattgtacaaaggaagattttatttgatgaatgaatttcgagtgagaattaatttctatgggaaataaattttaagggcaaaatagtaatttatgaaattattattttgattaattatggcaattatgaattgtataattaataatatttaactatttagttttattgaataaaactatattaattagttaaatataacattagtattaaataatatcaaagagaaaaatatattaatttagagaaaataatatttattttaattcttgtgaaataagagattaatgagaattaatcaattattatttatttgtagaataaataaataataaatcttattcatgnnnaaattgagaaatcaattttggaccttaaaatatgacccacacgtgtaggtccattctacatgtgtagggtgacatataaaggcccatgattaatttggtttaattattttattggataattatttaattaaaaatattatcccgattttttcacacttgtcatggcatgcttacgtggacaatattagc

SEQ ID NO: 54799 - DNA, 1156 bp, Cannabis sativa
aataattaatactaataacaatagtaattaatttgttgaaaataataatactaatattgtacctgctaattaatgaaattatttatataatagagaaaagttttgtgtaactcttgtttaacttgactattgggctcttgggttttaataaatgggtaagttgaaaaatacttcttttattaatcaattaactaaatttatctctaatttatatttaattgaaacatacctctttttagatgtattgtacctaaaatactctaacataagaaagtcacatggaggatatcttgaagtgacaaggacaaaattgatacaatactttaaaaaagaggtaaatataataaactttaaaaaataaggtaaaaataaaaaagaacaatgtaaaatgggtatagagtctaatttcttcttcaataaataaacttctgtcattggccttttaatattgagctattggtaacatatcccaaatacaattaccttaactctttctcttttggagacaaatttcaaagacatgaaagaaaaaagatcataacttaaataaacatatttgcattatttttcatatccagaaaagaaagaaatttataagaatgaacttattattttataactaatacatttatatagtttatagtttatagtatatttgatgttgtatataagaatgaacttaaagaacatgacatatatatatgttccaatcgtatcctgacattttataatttattattttatataaaaaagataaatatgaatattgaattataagcatacatgactaatgaggattagttttcatttccggataatatcgagattgcaattttttacctgaatattttttagttggagaaaataataaatttttaggtaaaaattgtttcatatatttacaagaatttaaaataagaataaaaggtgtaaaaatgcccacatgtatatatttatttcatgacgattgtattgccaattaacttggtacgaatccacttttttctgtttgttgatctaagttattttatttaatttgattgcaacttgttagtgtagatatcacttaacgacttttctgttaaatctgtttcaaagttgttattctgtttgttgtagtttcttgcttttatacaataactgggatataaataaa

SEQ ID NO: 54800 - DNA, 644 bp, Cannabis sativa
cgcaacaacaaggaatagattattttgaaacatatgctcctgtggcaaaattcaacacactcaaacttttatttgctttagcagcaataaaaaagtggcatctccaccacatggacctcaacaatgcattcttgcatggtgaacttcatgaagacacctacatgaaattaccacaaggatacaaacccaaagaacctattcctaaaagtgcagtttgcaaactcaagaagagtctctatggacttaaacaatcatcacgacaatggtatgctaaacttagtaccacacttcttcaacaaaatttcacacagtccaaaaatgacaattcactcttcattaaaaactcaaacagtgtcttcttagcaattttaatctatgttgatgacattattgttggcacaaacaacatccctgctttaaacaaattcatcaacaatcttgactcccatttcaagcttaaagaccttggcccgcttcattttttcttaggccttgaaatcgctcgcaacaataatggaatctctcttacacagagaccttttactttacaattattaaaagaaacaggccaattaggagcaaagtcggtcaccacacctatggagtccaacatcaaactaagcaatgacactggaccattactt

SEQ ID NO: 54801 - DNA, 1528 bp, Cannabis sativa
ggtatacagcgccggctgccaatgtttcattttcaaacagactgtatgcaagcagttcgtctttttcatggtgaggatatgggttgtcgagaggaggatggtcttattatggagattcaaaggttgcttcaacatcgttctgttagtggtttgcggtttgtatttcgggaagctaatgtggtagctcatgtattagccaattatgctttgacaaacaaagttagtgctatgtggatcgggatttctcccccttgtgctcgtcacgcaattgagcgtgacttgccatttccttgtaatcggtagtgttgtttaatgaaatcttttattctcaaaaaaaaaaaaaaaataatattaaatttgttaatctaatttatgttttaaataattattataagaattacaaaacttaaatatttatctatagtaattgctaactattaatttttttggatatttaaaatgttataaaatatactccatattaaataataataaaaaaaaattaataatcatcaaaacaattctaaccttttttttttaacatagaaatttagataaaaaaaaattgttaacatagaaatttaacaaaccttttttttttaaaaaaaaaaaaccgtatgcatcgatatagaaatttaaaccaacctttaaaaaaaatctacaacaatattaaataataataataataaataagtatgtattgtaacaaaaaaaaaaaaatagttctattcctctgctttaagtaatgataattgtagggttcaattatcaaaactaaaagtgataatttattaatatattatgaaaattatacagcaaaaaaatatgctctttttattttatatatataaaaaaaaaaacaaaatatctaacattataccatacatttgacatttataatttattaattaataactaaaaaatgaaaaagatcaaaatattttataatataacaaatttattgttagaaaacactaaaagtataagaaatttttagcgactacttcggtattgaatgtagtgactactaacagtagctttaaaattataagaagaattttctataaatttattaattattttttttgttagatctttattttattttattttttaaagattgttcaatttcaaatatttttttttcattataatgttattataaagtgagtacttaactcatttttaattaatttgttttatgtataacaaacctattgagaatgatagtaaagtgagatgcaatgatgtgactacaagtgaaatataatgataatttctatagatttattaattgtttttttaatcttttctataatattctactcgatatatgacttataaaaaaaattaaaaattaaagaagttaattaaaaatatccacaacataccgtcatttgaatttaattttgattagatacatctctgtctctatttttattattaattagttgattttttttcttttttttttggtgcatttccttttaaaataatattaaattttgatttaatataattttatttt

SEQ ID NO: 54802 - DNA, 1105 bp, Cannabis sativa
tttctcttgtatttaatatttgtaacctgtattctgactttgttactttctttttacagatatggcttccgggctaagagatcttacttgatagccctcaggcgtggcttctgttcatcttagggccaaggttgcctggaccacccaatttggtgatgctccagggtcttcactacatcctcctcctttgaggcctgcaccagctggtcagttgatgattattaatcctccatcaaggaggaccccacccctacactagctttatggcaagggtgcctatatatccaaccatagggtaggcacgaccacctagtagtgagttacagaggttgcccataaatgtattgataggatcctacccattcttgatggtgagctccaagaacttgacgtatgagtcagagaggctatcatctagcggtctccaagacctaacctcaataagttgtacatctaattttgctcaaattattgtactgtcaaaggctgaccgaccaagtatggagcttttcaaagcttagcgatcaatgttgcagttttgagaagctggctggccatggaagcaccatagaggggttggtcgactaggtttttaatttggcagtaactctgtttttttttatttcaggccttgttgaagttcagcctctctcattgcaagaccaaggggtcctagggcgctgtctaggagaagcttaaggcctaggagacatggcttctggcaaagggggatactgtcaccaaggtagatgctcttgctgaacagagacagagcatgattactggtttggagcacatgcatgttatgagaaaccaatagaatagcacacttgatgctaaggcctttaggttagagctggaacttaggaagatggacaagcactaaagcttgcccttgatggctaacaagccattagggacgattatgttggcttgtctttagaggtcttatacgaggttacgctatgtaaccccaatgttgacctctcctacatgggagcttctttacttgaaagaaaactggcccaggggagagaattgtatgagagcaggatgcaaactaacctaaccattgtccagcctgaggagttttcatcaggcctct

SEQ ID NO: 54803 - DNA, 1012 bp, Cannabis sativa
gtttcaataaatggatttaattatgaaaaaaaaaaaagtacatagaatagaaatataaaaaaccaccacaataagcaaaagaaaatgactggaatctgaaattttgatatatatgccgctaataagccctttgtcaatcacattgcagcttagcatgactgtctattgattatccaagcaactttttttttatctttcaataaacgaacaaaacttttcaaatattcttaatggaaaggacctttctaacctttgaatttcaacttgtactaacagttagatataaatcaaatgaaaaaaaaaagaaaaaaaatctgacataataaaattatataaattcatatataattacaattataaatataaaaatatattttgtttgatagaaaaatagttgtaatatataagaatttatagactattataataataagaactttcataagctataaaagaaaacaattagtgatacaattttatatggattatgaagccaataaatttatattgatcaatacaatttttacaggtacaaattagcagcttgaatcatgaaaatctaaaaataatgaatagaaaactcaaccattactgcttgtattttacacacatgtaaatcaccacataaataaatatttttcaaactattttagccatagcttaattaaaacaaaattgtatcaccatagtcaaaaaagtttaggttgagtaatattataaataaaaatagtagtgatatatattagaaaaaatgatagaaaacttacttgataagttcttgagagattgattgaggctgttttggaaaaaaaaaaaaaaagagaaactgagaatagcgaagagggatgcggctgtgaaggttaaaacaaatgaattattagggtaaaggatagatggttttatatgatggcaatattgtcttttaatttttaataataaaaaataaaataaatttttaaaatcctcattacccgtaatggtatacctaaacaaaataagaggaaaagtattc

SEQ ID NO: 54804 - DNA, 2714 bp, Cannabis sativa
gtattgcccaatgatgaattgttggagaagacatgaactgattaatgacactaaccgggaatgcaatatctggacgagtcacagtttgataattcaatttttcaaccaatctgcgatatttctcaggatcttcaattggttttccatcacatgtaagatgcatagctggattcattggagcattacaaggttttgctcccaatttcctgtctcagttaacaaattaagtacatacttcctttaagacagaaaaataccttgtttactctgagtaatttcaatacccaagaaatacttgagctctcctaaatttttcgtgtgaaactaggtatgaatgaaagacttatgagatgaaatgtcttcagtatcatttccagtaataatgatgtcatcaacatacaccactaacaaaatgataccagcagttgatcttttataaaacacagaatgatttgacttacttttcaacaaactaaatttttcaacagcccaactaaatttaccaaaccaagcacaagggctttgtttcaatccatataaagatttgcgcagaccacaaactcgccttaactccccttgagcaacaaacccaggaggttgctccatatacacttcttcctcaagatcttcatgaaaaaagcatttttaatatcaagctgatgcaaaggccaatgatgagtagttgctatggaaatgaacaatcgaacagatgtgagtttcgcaataggagaaaaagtatcacaatagtccactccataggtttgagcataacccttagcaacaagatgagcctttaagcaaacaattgttccatcttgattgaatttaaccgtaaacacccatttgcactgttttcctgaaggtaaattaaccaagactcaagtaccatttgcaactaaagcattcatctcttctatcattgcagcaagccaaccaggatgagacattgcttcacgaacaattttaggaatagtgatagaatcaagagaagcaataaaagagcaagaagaggagagatgatcataagaaacaaagaagaaataggaaaagtacattgacgtttacctttccgtagtgcaatgggaagatcatctttgatttgtggatctgatgacgaagatgcaagtgcaggacatgaaacaagaggtggaggagggggcgcttggtgtacactataggaggccgagggagtggttgaggtggtggatgtgtagacattgtgggggttatgaccgaggcaggtgaaggaacgagagactcgtcagataatgtatcaggtgcagaggatgtgaagagtatacaaacaaatcatcatcctccccctgatgagtaggagtagttaaagatgaaaaataaggtgtattttctataaaggtaacattaataaaaacaaaatatttgttgagatcaggacaataacacctatactctttttgaagacgagaataactaagaaagacacactttagtggcttagggtctaatttggtgacaaatggacggatatcgcgagcaaaacaaacatgccaaatacccgaagagcaactggaaacaatgacttatgaagaaagagaattttaaatgggatttcaccattaaatacagaagatgatacgattaataagaaagtatgctgtggaaactgcatcggccaaaaaaggtttaggaactttcatttgaaacaagagagcacgtgcagtttcaagaattacattttgggacaccattttgaggtgcagtatcaacacaagaagtttcatgaagcatgtcattagaggtcatgtaagattgaaattgaacagatgtgtactctttggcgttatctcttctcaaagtactaacaaatacattaaattgattttgaatctcagcgcaaaaagcacagattatagaaaacaactcagaacgatttttcattaaatataaccaagttacatgagaataatcatccacaaaagtaacaaaatacttgaatccaagttgagacaaaatagaatgaccacaaacatcaaaataaactaactcaaaaggaacactagcatgtttattgactcgaggattcaaactaacacaatgatgtttgacaaattgacatgactcacaatctaatgaagacaacttattatattggggacaaagtttttgagcaaaggaagggatggatgacccaaacaacaatgagcctcaatagcacaagcaacactcgaacaaacaatagaggttgggagaagtgggtcaagatcatacaagccactagattcatgtcctttaccaataattttcttcgttataagatcccgaaacaaacaatgataaaaaaagaaagagatgcaacaatttagattacgagtgagttgactaacaaaaagcaaattaaagaaaaaattaggtaaatgtaaaactgatgacatagtgatcatatgtgtaggaacaatagtgccagatccaagaacagaagatgttgatccatcagctaaagcaacaatagaagtgggactatgagactgaaaagtggaaaagagactggaattacctatcatatgatctgtgacaccaaaatcaatgacctattttgaggatttggaaagaaggcatgcattagagttacttgaattagcaatggctgtgacagaagaagatgaagacttaagtgtttcctgataccttgagaacttggcaaattcatcagcagaaataaggaccgatttgtcaga

SEQ ID NO: 54805 - DNA, 2720 bp, Cannabis sativa
ttttatggaagagggatgtttatttgaatattctttatatgatctattttatttttgtatgatttcagagtttagtatgagtatattattgtgaccatatgattttatttttttatgattctggatttgaatctaagtgtattaagtattattgtgattgtattattttggttacaaattttgttgatcattaattttctttcttgtttgttttctaagtttttgttctttgcagttatatattttacatatttacagcataacttattgatgatattaataaggcgtatgatcttgttttattttactgaaatattgattaatattttttaatatgtatattatgcatatttcttttccaataagtattattattttaaaatttgaattgtaggtaataaatatgaaggccaagagagtaacaaaggagaagatgaagatgttacattcattattggttattggttaaaactatttttgtttgttatattattttagatagttgtaaaatttggtttataatattttggatgaatgttcattgcaaaaaaatatatattggatgaatgtagtgatttgtctctggaattttggatgactttcactgtgttttaacgttttttttttttgctttaatttaagtttaaatttgattatttacacatctaaattttaagtgtaaaatgacggttgtaaacccgaacccaacccaacccaaaacccgtaaagtattgggttgggttgagttgggttgtacaaaaaatataatcttaatgggttataattctttaggtcgatcttattgggttggcccactaaaatactcccaacccggccaacccaaaccgtgctcagccctaggacacacccaacacggcccacaaggttttacctagctcccagagaggaataaaacatttccttctccagacacagctacagctcccggagggacctctcgaacatgtccattcatttcgaataagtttacttgagacaccctaaaccctccttgattttaagaccattttgtcacatggctaattgtgaggttgccacgtatattaggaaaatagaagggtaacattgttaattttgatactttgtgggtaaattaataaatatatttaaattatattttaacttataattattaaattaaaaatagtatttaaaataaatttaaattgaattaataaatgaattgaaaaaataaataaatttattaagtcattatattttggtttaaaataagatgaaaaaattatgtgtgaggttcacaagcatatttcgataagttataaaattgcttaattttttttactttatttgattaattaatttaaaggtttaaattaaaaaataataaaatattgttttaattagttattttctaataaaaataagatttatattttttatattatttaataagatttaaataataaaatcaattaaaatattattatttttatttaacctaagtctattgaatatctatataaaaaaacatatatgttgttagaattatgttaatgactttattcactctagctgtcaaaaaataagataaccaagtctcttctctttctttatagattttgaatttttcacctctctttctcaaatatttcagtcatactagtcatctgtgatactcaggacacttaaagagtatgtgaacatcaaccacatattaggaaaaaaaaaaaattgattttagtacttggtgatactctgctacagaaagaaattaaggattggagtactaaacggaaggaatcattaattttgatatgtcactgatgtaagtatactcaaatttaaggtgtttaatttctattttataaagcatgttgtaaataattcaataattaaattaattattaaaataaatattagtaaataaaatcttcataaaatatgttccaaatatactgtttatataatctttttattttagtaaaaaagtttaaaacgaattaacgtatttattatatataatatattattaccaattgtcatttttttccgatggaaaattatatgtataagaaattattacaaaacgcacctcatttactgtacccaaattttaattattttatttattttgattaattgaaaatttgatgtgtgaatgaagagtttgtttacacgggagtacatatccactaaaatgaaaaaattaggacaaaaaaaaaacaaagtatcgtttcactcgtcctaacccacaataatccgtatgaattagtgttattgtgttctgacctgaatggccaccaactcatttcgtcctgacttgaattgccacctaccaaacctcacgacatattatcgtttatacatttgttaattttatcgttcttacaaaatacaaattcatacaatttatcgttcttatatatttgttaatttgaggcatctagtgaggatgcaatttttaattatactaggaattgaagaaagactggattcttgatagccacaaaattcaaacatcggagaacttataaaattttaacgacagcctacatatatttaagaattaaagcaaaacatcgttgaggtaaaaatgaaacaaaaatattaatacattctctcaaatcaaaaagccacatttctcgaagttggccatctaaagaaccataacactttttttttggggtggcgaggtcaattgaacttgtcttctacagggatagcatgaaaatggacaa

SEQ ID NO: 54806 - DNA, 1676 bp, Cannabis sativa
  modified_base (347)..(352): a, c, t, g, unknown or other
  modified_base (504)..(504): a, c, t, g, unknown or other
accattttagaaaatatagggtatgttttgtcatttaacaaaacagaggatccaattggtaacttttgcaaaacacagggtctaaaatagtatttacccattaaaaaaaaaaccaaccaaatagtatctttatatatataaaatgtagttatcttacagtttttgttagtttaatagaatgttttaagaatatttcgttaaatttaggataaataccattttggaccctgtatttaacaaaagttaccaattaagcctttgttttgttaaataacaaaatggaccatgtattttctaaaattgtacaaataggatcctaaacttattttttatcaaaataaaacttnnnnnnaatttgatctagagatgttatgacaaaactgatgacaaaactgattacattttctgttttaaagttagttatatcgaaaaatgaaattattgaaaattgagctcagagtcccatttttaccattttggaaaatatagggtccattttgtcanttaacaaaacagatggtcaaattggtaacttttacaaaacacatggtccaaaatggtatttacccttaaatttaatagtgttagtaggattaattttaaatattaatattatttattttaagctaattgaatttatattaagtttaaattaagttaaatatatataaatattactatattatttttaatattgagagtatgtataattttaaaatacttaaatgttatattcatttttttaaaatttttaaaactttaaatattatttttttaaaaaaattaataagggatttcttttaattttaaaaattttaaaaatacacataaaaaaaataaaattaataatataattaaatatacatgcaatgcacgtaataataacacttttttttaaaagctacgctaatagatatgaaaattagacatcatggtcattacaaataatgtattccggaatagtagaatctctaccatagcagttaagttatgagcaaaagcccaattagccacattatgccccgcaaaattacacagactcgaaatgaaagaaaaattacaacccacaacaaagaagaaagcctattacaatggtgtacgtaattatcaattcactagtcaaaggaagtcccctttaaggaattaataacaatctcagagtatctctcaataatcacataatgatacttcaaaaggtctgtcgtagtaagcacgctgtaactttaccgataaggggatcagtgaattctaaaatatcagtagtaatccacaaaacttttcccagaaagtctctagccaaagccaccacacacatagtctcagtccctacattaacatcacagttaatctttaactagtcttcatgaggaggagaccaagcgagcgtaacagtagcaaacgggggaggaaataaacaagatccataatctgcataacagtgagtaatagagtcaatataatgtgtgatgctattcagattattgttatgtatcttatcgttttgggcccaccaatcgtatccaccactaccaaagcatagaggaaaatctcatccacattaacaccctttgcttttagaccccacagaaatttaacccaatcccattacaaccaccaaaaccaaaaattagccaaatctcccacggggaagatctccacaaatgaaaagctaagtt

SEQ ID NO: 54807 - DNA, 1282 bp, Cannabis sativa
tagaaatggaagatgttaaagtgttaacgagtaataaaactcttaatttgagttaaattgaatgttactaaaagaaggtatgttatagtcaatcttttattttaatatctctctcaatatttgtgttaaaaaaatatgtgttaaattcaatcggcattataaattaattaaaaaatttatagagataatattttaactattacaaacaataacacgataaagaaattaaaaaaaaaatatatattttagcatattattttgaaacaaaaaaattattaaaaaaagttaaaataaaaaattttaattatcaccctttaaaaaaattgcaagagtctatgcaaattagccaaatggatcataatacttaatactagtgccccattcattttggatgccctatttatttttccatgctattttcccttttaaattaaaacctcccaatttctcatgataagtgttgatgaccccttcattcacccatcccatgtgatctcccataattattcacaaggtcacctttatagtcaaaattgatttagagtgttcaaaacttgtttctttttagttaggaaaatcaatttagagtgtttcataagtactttatttattatctaaagtttaattaattatgtactcatggcatgtttataaaataaatttagaatgttttatgtatacgggtggagtctatttatgtccaaaaacaactttttattacaattgataatcaaattataattcatataataattagtatttctctttccaattaattatcaagttgtaattaaaagtattttaatttttacttgagaaatgttaaaaagtacagtagtgtttagtattttttatgtattaatattgctattgatctaattaagcattgtgtcttatatattttaatataataacttttaagcagtatcgttatctaattataaagtgatatgtctaaaggtcctagacactaccaatcacgaccaataacaatttaatttttacttacatccaagtaataattaagcacccaatctactcattttcactttgaagttacatagtattcacttctatattttattatataattgaaagtaaagacaaagtccttatttactttcatagacaatgcatgtgctacaaattattattgtttaataaaaaatataataaaaacaataaaagttgaaagaaaagggcaatcttattgcaacctacttaaattggtacaaacaaacctttatatactatattgaaaataaatcacttcccatttata

SEQ ID NO: 54808 - DNA, 1319 bp, Cannabis sativa
  modified_base (898)..(902): a, c, t, g, unknown or other
ccgccgctaatggtgttgaatgttgtagtgacaactcaaaataattttgaccaagcaaatcaaataaacaaacaagtaactccgccaaaggcccattactacatcgatataaaagactccaaacccaaagcctagaccatattggaagcaatgaagaacaaaatactaacgcatgctctggagtctctgtaaatttccctaaatatcattgttgtttatgattggaatactttttatatctaatttagaattggttaataataattattttcttactaatttttttttttgtttaataaattatattacttgaaagtttcactattttattttgttaatcattttaaatgtttttttaaaaataggtattaattgatttttttttttatgaaaatgtaagattattttaaattattttcataatagaagggacacaatttgacaataatataccgaaggaggaggaatgcattagaagtcatagttaagaagataaaattactaattatttaatagtaaatataccaacgttcaaagttaaggtaaaatatttaacatgactaataatactttcatatgtctttgagtaaaaatcaaaaaatgcaaaaattactcactaagattatatatatttttaagggataaatacacaagatatcatttttcgttaaaaaaaaaaaaatccttttttacgtttaaagaatttttttttttttacatttttacagtttttcatgaaaacaacacgaaaacaacaagaaaactgcataaaaataacataaataatatctaaataacataaaaacaacaacaaaaaataacatacagataataaaaaatcaacaataaattaataagagtacaacataaaaagattgtattttctataaataaaatnnnnnaaattgtaaaaatatttaaaatttaataaaactgtatttttgtattttttttatttttgtgtatttgtgaaataatccctatttgtaaatatataaacttaattgtgaataatatttatattattacaaaaaagtatatatgactccatatttttttaaaaaatatgctgattgataatttatttttatttttttttacatcgagaataggtctgaattcgaatttatgaactccacagaagtatcaccaaactgtgcttatatgaccactcataatttaggtcaatagtcatatattaatgtcaaagattgtagttcagtgatagggcagaatagtctttttttttttagggaaagggagcccactagagagaaagaaaatctcgaagatcacaggggtcatcgccaatccaaatt

SEQ ID NO: 54809 - DNA, 682 bp, Cannabis sativa
ctttactgatttcattctccttggttcaaattgtttggattttgttatgttttaaaagttacttattttattgaatttggaattaattgtttttgggatataaacttgttcattagttcgacatctatttgagatgattttattaatttatttatttcgtttctgtgcatttctatgctctgtcatcaactggttttgaatttaggacaaaatattattaatttgtttatgtttgtgagatttcatgacttggtagctaatatttgattgttcaagcctttcgtagctaacctatgtatacacatatatatagggcaagactatggtaggactcaacaaaagtttcctaccagtagggtactcttttcaaccatcgattttaaatcgtgtggttattatagtttaagatatattcttatcatacatttaatgtatacaatagaaattttataatttttataataatatttatttttaaaaataaaaaatattaatacttaaaaaacaaataaaacttcattttctcactctccattacaacattcttctagttcttccaaacccacgccatctctgcagccagcccagacgaccccacggaaacccctcggcgacacctcggctaaccaacggcgacccctcggcgacggcttactggaaattcgaatccctaaatccatgg

SEQ ID NO: 54810 - DNA, 1103 bp, Cannabis sativa
atatattattttataattattttagaaacttgcaaaaatattgggttttggacaaatattgggttttacatttgtattgccctgtcctatttttttttcttttatattattaacaccggaaaaagaggcctttatctttcacaccatggacagaactatcacagcaacaccagagcagccacaaaacaaccattaattctagcgagatgaagcaaaaaccttaaaaccattaatacatgggctgtcatggttttgtaaatgttgtttttgggttgtttcactgttgtttcgtatgtttaacaaatgttggtttcaaattacacaggttaaaccacccactagaatgaaagagtcgtggacagtaatagccttacctcccattgaaagggtgaaatctgaaagacaaaaaaaaaaagagaatggaagttggctgggaaaagaaataacataacggatgcagcaaaatgtgggagctgagtcacaacaagataacatacaggagaaggcataaaaattgaaaagaagcggaacaactaaaaattaacagtggaacaacacggaggaaaactgaacatatattaaagcatagaatactgaagaaaataacttacagacaaatttattattttttatttactataaaaatacaagcaatacaataatatttagaaaaatgtaataaagaaatgaaagaaacaacaattaataacattaaaatagtaacaggaaagggtaatttagagaaagagggtgaacttgaaagtaccgtggagatggagccaacactttgaaaccaaagaaactgaagaacatgaacttagttcgagtttctgaaagatttctacaaaaagctcatcatacagcaaactctccatctctcccactcacacacaaccacactctagtctttcccaaattttcttcttcttccaacttcaattacacacaaaaggagagggttagctattatttggttaatgttgtagacatggaaaaaaataaataaataggatgatgaacaaggaagatagagctcaaaaacaataaaaaataaaataaagagtgggcttaattatttgcttaagactaatatatatatatat

SEQ ID NO: 54811 - DNA, 1619 bp, Cannabis sativa
cagcatgccaccaacatgcgccacaacaggcgccactacttgaccaccacttggccaacttgtgggcatcacttagcttgtaacgtgccatcttggaatgcatgttacactctcccccacttcaacatgtcgatgccctgatcgacggaccacaggcaaatcttcctgatctcgactcctaagcttaccccaagcttctcttgaatcctaagtctgcacttgtccctctacctccgtagaaccaccctcttggtgacgatctcgctcgcccactcttggactcgatcaaagaacttgtgccactgtcgctatttagaaacacccatggagtagtaccaccgcactagaatactttccccaacatgaactcctctgagtccatcacaacgtccctccagtcaaccaagtagcccttgcaacattgaccttgaagctaccacatcctctgatagtagctcactcgccaatcgtctaatgcatactccttctgacaagtactaagtatggtacaccccttggggtgaggttcgcaaaccaaccgttcccaacgacacctacagaagacgcttccactgaagttaagtccctctggacatgtccctccaaaaacttcacacgcaaactctattgcgcaccatcctcctgatgtcaatcgagcaagacactctcatgcaggataaagtttagtgtgtcccacctggacgaggctcgcaagccaactgcacccaatgcagcaccaagtgcactcttgcacagattctcttcataatgttcataacattggccctccaaccctaccttacacccacggcttcatgcaaaaggccccactgaaccactgcatatgctcctctgagctcctgcttgtgtcggctctccaaactgtgtcacaagtccatctcccaaaattaaccctgcatcctctgatgactcgctaacttttgaaaatcttaataacacgaagtcttactcttaagacttgaaatcatcccaatcccttatctcccatcagcatatgctctctgaaccattcggcttacagtgtctcatacaacaccagtgtccccataaacacaaaacatgcccataatatgctgcagactagctcagtcttgatcttagtctacgcccttgcatattgtctatctgcagcttgcagcaatcatgcaagtcttcgcactaaacaaaccatctgttgtagtgtttccctctggattcacacaccaaaattgaacaagtaccctgattcttcaaacacatgaattagtgggctcccccacttcaacttgggaaagacttctctcttagagaaataccccttaagatatagctcacaagctaaccgcatactctcatacggttcctccattctgcatttcactttaaagaagatgctgaactaatgcctcggtcattttgactctttgcccctcgacatttcaatgttgccttagtaccacagtcctgctgactttcaccttaggccaacattgccacgatgttatcttagtacctgagtcctggagactttcaccctatataactggcactgcctgtgtcccgagtcttctttactttacatcctgaacaacaatcgatctccatgatacccatcttga

SEQ ID NO: 54812 - DNA, 1715 bp, Cannabis sativa
  modified_base (1663)..(1671): a, c, t, g, unknown or other
gtattggtatttagtgtttttgatatatttacatttagctattaattttcctattcttgtatattctaatgtttgattttaaatttgtgtaggcttttatatcactgaacaaggtgaggacgatgagtggagtgtgtggttggattatgatggtgatggtggtccatctgtgccagaaggatcaagtgttgatcctgaacaaccatccatggaagaaggtagtggtgcttttgaacaacgaacagacaaaaatgctcacgggaaaagcaaatgaaacgatataacaaaaatggttagcgagggaaaaaagttagtagattctcgttgacactcctgatgcaaaaagacttagtagattcatctaatagtcatgcttcttagatctacgtgtcgttgtcatattggtccacgtattttgggcgaaattaagggcaacaactttcttacacctgttggaaaacatttggtatgtttcaatttatttacttaacttattgtgtttattcgttaaagacattgctaactttatttactttttcatatatgtagacacaaccatccaccaagaaacttagaagcaacctgtgaagagaagcacaaaaggctctgaagatttacttggtcctccaacatagcctctaaaacacccttagttgccaagtaaggcaaaagtttatggtcgttatgtccaaccacgccaaacttcctccattattgccttttggaacttcagtagaaggtggtccaattcatccattatcctattcaaagttgataatgagctatttggggtcgcagatgactctatttggcttgctaagagtgacattcaggaattgtgaaccatgcaatacttaggagcccaacaaataggagttttgtcgaagtatgatttctaactcttaaaaataaaattgataatgttcttttgacagcaatggttattaattgtggctttttatcaggtacctagaagaaatattgttggacatgggtgggctgaattgagtatatgaatttttgaatccgggtgtgattgccaccgatgtaggagctgatagtaatcgttgccaagcactagtcactggaatgactagggtgactaattcagacaaatggcatattgccccatataataataggtatatgtagatgtaaaatatatcatttcggtatttataactcttcataaaatttattatttatgttaacagttttacacatacttgtccgagcaggaagatgtttcactggatgcttgtagtcatccagccaagtacacagatggtggcgtacttagtttcaggcaacgacgacatctcgcatgatctaaacttcatcatatccacgtaagttctatattaaacatcccaatatgcaagcgtgttctttatttataaattcatatatgctaattaaatttactttttgtgtagatcgttcaccatgtataacccaatcataggacgagctgatcgacctaccaagtagatgactccaatctgtcctcaacaactcgacgacaaacaatgtggatactacgtcatgagattaattgaaagtttcatgatcgtagaagatccaatacaactgttgactcgacatgataggttctccacttcgtacactaataatgagataaatgttgggaattattttaccnnnnnnnnngatctactcacaagtatgttgatgaacaccctaaatatgaactt

SEQ ID NO: 54813 - DNA, 1462 bp, Cannabis sativa
aaatgatggaaagatcaagctaagcaaggtgtcaactgaagaaaatgctgctgatatgctaacaaagaatcttgctacaacaaagtttcagcattgccttcagttactcatgatcagtgatgtttgtaattagtgtcttgtaatgttccctctattttacattgtattttccccttgtaattctcagtgtaaagtgtattagtagtcaaggtggagaattgttaactttagtgtgcctactaatacccttccctatatcttagacactaactgtcataactgttttgacagttatgttagttagtgtcatacttgttttctatgtgtataaatagccatttggttttctagtttacatcatcacattgtaaaacattaagtatcaataagacatgttattttctcaattctagtcttagtgcactcgagttctttaaacataggttcagttattgaacctgtgagtgttctggtgtgaagaaacccacacctgctggtgtgatcgaattggtgtttgctcaacaatttcattacctcccaccaataaacgctacctaacagttgttagattttaagatggaggtgtttgggatttcaatctcaaaattaattggtaataaaataaatagcctatccatcttatatttgatattatgaattccacacattaataatgttagactatttctaatatatccctcctcactataatgaacaacatttaagattcaacatggtcgaacattatatttaaaagaattctacaataccaaatcgagaatttgtctgtgtaaatttcaaaaattttgtaaattttttgaaaaatgtcaaagatccaacatcactaataaaaaagctgtacgcattggccaaaaaaatatcaaatgagagtcaaataaagtaagtaatacatacatgttatatatagtattatcattcacacgataccaatactctttataattgtaaacctaactgtaatctaatagaagatgttaaaattattcaataaagtgtgagttttaccatgcatataatggcaacaattaatcttggaaattgtttctcctaatcgatgaaaaaaaaaaaacaaaaaattgaaccgatttgcaaaggtttaaaccggctgcagtatatagtgtagtttgaggagagataattgtaaaaatggactttatgattcaaaattttattagggaattaatcttaaaagattaaattgcaaaacaaacatattattcgaacgatcttaaaatcacactaattaaacgatcttaaaactaccttaatatgcttgcaaaaattttacacttccattgacgttaatattagtctggcaaattctgctgtgagaatgttttggctgaaccggtcgttcctcccacgtgtgtcgattagagttgcgatagttgttgtagattactgagttgaaaagttttgctgtagcaaattaagtaaggtt

SEQ ID NO: 54814 - DNA, 2185 bp, Cannabis sativa
aattgaaccctattatgtgaactcttattttacagcttttaattgtaatcattaggcaatattattaatttgtccttctgtcttctttcaattagtgttgttaaagtatattcctttattgtttgtttctctctctctctctcattagtgagatatccttgttctagtaccttttgtaattttgtttgttgacctcaaaaagtgatcaaccgatagcggggccgtatggatctgatacttgccatgtatttgcacaactaagaataaaaagcaataaacaacaagatttgttttaaagatttggcgcccttgtgatagcgggtaattctgtttgttgacctcaaaaagtgatcaaccgatagcgtgatcgtatggatctgatgcttgccatgtgtttgcaccactaagaataaaaagaaataaacaacaagatttgttatacagatttggcccccttgtgatagcaggtaatgacctaatcctcttttacttgtatttatacctagagaaatactattcatatcactataggtgggatctgctatagcacccttaggaatacaaggtatgaatcggtaatgacaaaactcaagtgttgagaggttgctagggtaggcgtgtgagagagaggatgtgaggaagagagggagttcataacacacttagagtttggaggcaggtttcagaattagagggaacttaggtttctaggctaaggctaaggcctttatgtaggaggcataaaaccctaggtttacagttcaaatccattaatacttccatagtttgttagatatttacaaaagaccaaggttccattgattctagatatattgagcttttagggcctaatttgcaacccataacttgttctccacgtgtagaagtgtccaagaaagcctccagtgcacctcttggtcagtcaggcccctgtagaggctaggctggccgaccatggcatagtcccaaggctggctgaccctaggggtggtcggccaggtcctgagaaggagctagtctatcactatctgcccgtttgagtgctaagatatttgcttgtttaggtgctgacttggccatctttttggtgatttgtactgccatgtggcactgatttttgtccacgtaagcatgccacgttataaggataaaagttgggataacattcacccccaagtctctgtgcgaaagtctatacagatagggactttaccaactatattgatgttgtcgagactgttgtaggctttgctgaataaaagttagtgcacttttaaaacactttgtccttattgtctgatctcattgcagtagagttataattactttagttgcctttatgatgtgtaggtgcggtaagtgaaaaaaatggcccacatgtactacataagtgactttttttggggggggggggaatccttttttcacttctcatttttaaatttttactttctctcactagaaacttgctctagaaaaagctcctccttctctctaggccaaaccctcaagcaccattcttctcgggatttttgtgctatttcagcgatccaagcttccgaccttcttctccaatgaaatcttgtagtgagtaagcttccgaccttcttctccaaaatattgaccttacttttagccaacgacattgagtcaataaaagtgattagaaactaataataataataattaagtaacgatgaaacgaatttgctatataagttcgacccgtgatagtggtaatagcctacttcccttttacttttattaacttgtgagagaagaagcaataagttcttgatcttcctcgaaaactcttacaaatattttagcagcgtgagtgctctattgaatgaaaaattttggatttctaagtagtgaaataattttactatttatagggagtaataacatcaatttagtttcccaaatcagataagaaataaaaagggaaactaattacttttcataatacaacaattgcgtgcaaaagtcccatgaaaataaagatttaattgataaataaaaaaaaagtaatgttaaggctttcactgctgcatttattttgggtggcatatacatattagttatgaaaacaaatctggttggaggatatcattaaccatgcacgataccatcgtcatatctcgaaataagcaacatctgatggataattcaactctagacg

SEQ ID NO: 54815 - DNA, 1590 bp, Cannabis sativa
tgatcctgagctctatcagctgttgcagctgtgtggttcgtcttctaccgcccacgttggcttggtttcccccagttaagttaacaatgggatactctatacttgggcaaacgatcacctcactaataataaaactaaaatggaagtttcagtttgatccctatttataaatatttttcattttggtacttaaattaataaattaaaatggttcgtgaatgttaataaaagataatatattctgtaattaccctagataattaaaattctacttcattatgtatagaggtagttacacttaatatatattaaaagttttttacattttcttacaacaaaaaatatggtatatttaactttgtccattaatatacaatttttactgcaaacgtacagtgttgttataacaaaattttaatactaaaaaaagttgtcgaaccaagggggtttattattaaattttactaattattatactttttaattttatacttgaaatagataatacaaagtaaattataattaaaaattaaataataaaataaatgaaaaaataatcagacaaacaacgattttaaatcagaaagtaaaaacttagagcattgatttctctatttcaaattaaatctcaatttatcttataatttgtagtttcaagaatcctaatgtaatctattaacctctttcgagtgatgatagatttaactttaattaactaataagatatctctattcaatgttaatcaattaagcactcataaagcaatataattttctttaaatgaaactcaaagaattagtggaatctctccatctcacactttttttatgtcatgtaattctaagttcgactttagattacctctctcaagtgtaaaacttagaatatctatactaattaatggtaatcaagcattaaaaagataataattaacacaaaattacataaataaatagcaagaataaatatgagaataatctaaaaatttaaattcataatctaaaatagttacatcaacactctagaatgagtgtttagttcttaataaccacaataatcatgttcataattaaataactaaacaaaagaataaaaaaagaagaagaaaagaactctaatgatgatagatgatgatgattgcattgaatctcttctctctcgctcttcaatgtgttttccaatctcaaagttgcttgtttttatctcttcagtcgttcttaaatttgatttacattcttgtttatataggccaaaaaagatagatgaatccccctcagattaggattttttataaaaagataagtacaacgctatagcacctaaggcctgacactatagcgccaagagatatatcttgaaataattacgtgctgaaattatttttattttccttggcattatcttttttttttctaaatctacactatagcaccataaacacagcgctatagcgccaagcaccaattctacgtacttttgcttgtttcttaactcgattgctccttgatttcagcacttcgctcaaatatgtacggttcacttctaatttgtcataattccatctttttatgcttaatactgcacactat

SEQ ID NO: 54816 - DNA, 698 bp, Cannabis sativa
tatttatattgtatattggattaataaaataaaaatatgctataacccgactaaaccgaccgatgtacacccctattgaatacaaccaaaaagcttcaaagatgaatagtctagttattttccaaacaagaattaatatggattaatattgtcaagaatcctagttagaaatctgtttatggagtacactccacattgaaaggcatggcactaataagataagtacaaaccagaatgtgcaagaagtgttaaaaaaaagtttatgttatgtacttatattttcttttggtccttccattgtgctcatgagagtgagggcaaggatgttggaactgaataccttgagcctgcagaaacggagtaaacactctatactctcctccccagtcagattgcacagttttgataggtaaagaaaattgtttctcaactaggcacttgaattttaagagcacagaataggattcagacttgaggtgtaaaggaaaaatccaagtgaacctactaaagtcatctataaaatgaatgtagtacctaaagtaatctattgagggtggagagggtccccacacatctatgtgaagaagttgtaagggttgagtaaaatgactggttgagagtggaaaaggttgtttatggcttttccctttttaacaagcattaaaaaaatttaatttctttatagaacatggaatagg

SEQ ID NO: 54817 - DNA, 703 bp, Cannabis sativa
ttggcatgaatcacaaccataaaatggatctcctgtaatggtagaacgtgtacacaattcacatttaatagacataatgttacttgtggtcatgccatccttaactaatagcaaaggatgcacatgcccccaatgtgtcaagtgttggatcatctccatttatttttaacttgtattttcctgtaaaaaacaaaaacacaaacaaacaacaattaatgtggtgaaatgactcctgttctgatgtcaattgaatttatacttatgtttttcacgtaattaaaaaatatgatcaatggaacatcctaataacaaataaaaagataatcttattgtaagcatcaaaagattataagataacaaaactatagcttccagaaagtatatataagaaataattgaaggtgtagtcatacacaaaattaaagtacaactaaatattgaaatagacttacgggctaagatataagaaagaaggttgagagattgatcaacaattaggagaaatgttttagaagatgtctagtgaagtttgatatagaaaaatgttgaaggagatatatgtatatttatataaagatagggagtgacaatgataatatattaatatatgtatgaataagttgaatatatatatataaagaaaaaagaagagggagaagaaaattggaaggtgatcaaaaagaacaaaaaagcatatagaaaa

SEQ ID NO: 54818 - DNA, 1658 bp, Cannabis sativa
aacttttagtttctatttttgtttattttctctatgtaggtcataaatgtaaatttttttcattttcagtttattatagaaaaaattccttaatattttctaaaatattttattattattaatagaattaaatattatataccatcctaattacaagaagtttatcaaattttaaatatatacatatttttaagtaggaataaatactactacaaatattaaaattcgtgacgctcttaaaaacaaatatttttgggaattgtcgctaaaaaatttaagtaactatttaaaactgtcgagaaaaatttagtatttctgacgattttaaatcgtagtaaacaaaatagacgatatttttaaataaaatgagatttttttaatggacttttatacccgacggtttaaaatcgttgggtataagggttcattaaaaaatcatcacctatttttgtcacatttcctacgtgcccacctacttttttctatttcccacatgcccacctattttttctcacctatttcttttctatttttcacaccctaaaacgaaaatcttaactctctaaaaccccacccacgcttccgcaccatcgccctcctctctccccttcttcctcgctctccctttcttctcgtctctctagtccatcgatcttcacctacccctcctctcgtcggtctcactctcctctctgtcgcatatgccggaccaccaccacctcccgtcggtgtccctctcatctccgtctcacacgttagatcaccaccacctctcgtccgtcttcctctctctttttctctctatctgagctcggtataaatacatttatttatttatatactttttttatttattctgttattgtataaatttaatgtgttttaaagttaattgttattgtaacaaaattaattagttattttattacaatttaagtagaattataaaactaatacaggaaaaaaaaatgaggaaaaatacagatttttttataccattctgtatttttttctctttttttttttacatttccgaaggttttaaaccgggttctatactataggtgacattttaaaatcgtcgcctatagtatagggcacgatttaaaaccgtagcctatgccctgttataggcaactgttttaaaccgtcaggaagtccacattagcgacgacgcctattatattttatccgttttgcgatggttatagaaactgatacaaatactttaaacgactgtttagaaaaatcacttttgtagtagtaaaagttacactagttataacaatattacaaactaaaagagtgataattattttatatttttcatattaattacttagcttgcaagatgttaaagttaatgtcatcaatgaagtttgcattttaaagcttttttagtaaactgtataaaggttgtattgtatttaaataacaagaaaatctatatttagataaaattttatattgtattaattattacgactataaattttaatacaatgtgaatcgtattatttaatacataataaataatttgtattaacttatattataatatttataaaggatctgggttaaggacttagaccccaaccccaaatccggaccttagaccccacccacaccaggtgtcgcaccataaccaaaaccaaact

SEQ ID NO: 54819 - DNA, 1220 bp, Cannabis sativa
tgtttattatattagttaatttataattgcttgccttcaaattatattcatatcattaaaatattttaatgtttatagttaaatcaagaaaaaaatgttattatcgcaagatctaaaatacaagaaaggattcaaatacgatcatgagtagcccattcttaaagattgtgagaaatttacaaataacaatgccaatggagcaactagatttcaacaacaaggtggtaactttattgtatcccaatcaggttctcttggttttgagtcatcgacattggcattcactggtatgaattcatttgatctcaatatgactgatgaacaaatcgatgttaacttaacagaaagatctattggcatgaagaaagcaaaagaaaaagtcaaaagtgaagaacaatataaaaaaaaaaactaatggagcaaattgaacgacttgttaaagcattaagaaagagtaaccctgacaataatgaaattcaaagagaaaataaagattcaaaagtaagaaaatgatgtggctacaacgagagaagcaaataaaattatattcatagatttaaactctatacccgatctacagagtcgtgagtatattcaaaatgatataaaaaaaaaaaaaaagagcacaaacatctcaacatgaagaacaaagagaaggatctgaatataaaggttctcaataccgagcatctcaacatcaagaaactgaagatgcaagatcttaggtgaaggatctaaaaattcatcaaaagattatagtcaatattataattatcggcggaattggaaatgactttccgtatttttagatttagttgattttttttttctaagtatagagtttttttttttttttttaatttttgacataagtgttgcaaataatatgtttttatgaatttaactatctcagtttaatgttatttttagcacttaaaaatataaaaatacaaataaatacatatttaaaaattttgattaatatatatgttgaccgaggttttcggcaaccaatataataataatatttaggaaagctgtaagaagttaatgcacgagatttttacgtggttggagcattaatgggccttagtccacgagtctgtatatttatgagagtattaattgcagagaatgttcttggtgagttttcctctctagttcttatggaacccagaattctcgacccctgccttaatgagtttgggggtatttatagt

SEQ ID NO: 54820 - DNA, 1220 bp, Cannabis sativa
gtgatttattgtaggagtaatgaattttagtaaaatatataattaaatattccagcttttatttgcaacctatgaatgatttcaaaatataattgttcaatatttaagtgtcttttataatatttggaaattattatttgtcaaaattagttccttcaatttatttatttaaaaatttgctacaaaaatttctatgtaattcattttgttgcacttataaatacgtatataaattttttggtagcaaaaattcttatgtaattcattttgttatacttaaatttctatacgtagtttcactcaaaaaaaaaaaaaaattatatacgtagtcattttgttacaatattaatctcttattgttaccaattcaaggactaatattgtattaaatgtgtaatggtagatatttttgctgtcaaatatgaattatataaaaaagtttgcctctaaaattatataatgatttaagtgcaacaaaatgaactataagaattttctccaaaaaaaaaaaatttaaataaatatttaagtagaacaaagtgaactaaataagaatttgtgctacagcaaatacatttatttcttccaaacattattacctgtgttcatctcattctattatttttacattcattatgtatatcatcattattccatccttctatgtaacatgtataattagggacgaactcacgtattgggctatataagcaaaaataaattatatatatacttcaaaaatttgatttgattttaattgtttagataattaaaaaaaaaggcctcatcacaatattatatttcatattaattaagtcattgtcaaattaaataaaatttttaaatgtatttgtaatttttgtttgatgtaggtacgtacgtacataaaaatatgatttttacaacaattaaacccacatattctgttattgaaagtcgacaataatcatgcatctcattcattttgcattatttttttttatccaaataagtaataaaattattctccattaaaataaaataatatatttaatatctacttaatttatataaattagtaagtattcacatagtttatttatttttgaaaaaaagtcttaagtattcacatagttagtttttgttttgttttttccgaaaaaacattagtgtagaattatagatatataatattatatagggaaattctacaatgtaccccttaaaatagatacattgat

SEQ ID NO: 54821 - DNA, 1897 bp, Cannabis sativa
  modified_base (1677)..(1687): a, c, t, g, unknown or other
atagtgtttagtgggatgggaatgactggtgaagattttgtgaccatgaactattcaaagctagttttgtaagtattttaagactttagtgaaaaaataaaataaaaagcaaccttggaagaaaacaaatattatgatttatggctttatgttctctaaactcttggatgtaataatttctaacaagaaccttaaaattgcatcttaggctatcaatattatttatatttaaaatacaaaaagtaatttataaactccttttacgtacgtacttcattcatagagagattttatttgttttttttttttctaaataaaatatgaaaataattacaactaaataatataaaatatagggtaagtctagcaccttgaaaggatattttggtagaccttatctattttggcagcatataagagatgtttttagtttatttcttttaattgtatatgttataattatctaagacaacatataaattttcacaaaattatgagtagtttacaatgtcgaaaataagatttatatattttattgcatgtttgactgtttttctttatacacgtgataagtaattgtgtaaaccttatttttgatattataaactgttcgggattttttaaaaatttataaataatcttaaatagctacaacgtatacgataaaaaaaattaaaataaaacctataaagaacaaagaataaagaatctagccgaacgactctttaagatgtgtactatataaatttcctaaaatatattattatcattatgaatttgcatatttgagtaaataacaactaccgtaaaatgtctatatagtcatagtgtttagagatattttaattaacttaaacaagaagattttaatgttgaacttacaaactcaagagttttttactttttttttttagatctttactgaaaggcaaaattgccaaataaacacactgaaattacaaccaagaggttaaggccagatttcaatgatttattaataacaactttttataataaattattttgtctaaaacaatttttttaaaagagtgtttgtttaaattcaaaagattttccggttgaaaaagtctgtgagtgagagaatagtaggcaagtagctccaaattaaggtgttgaacataatattgtagctcttctaattaatgagtttgtttggtatagaagttgacttggttatttgctagattgagtcaatgagatttgagattgatgctcaaaggtgaatctcaaccgtgatcaatcatctcttttaggtgaagttttggagtctatttattatttgtttgacttgattgatattggtaatctcttttaattttattcctagattaggtaacaaaattgtatgatcaatcttgacctaattagatgagatacctttgtatttacaaccacaagtccaaaaatgttttgaaattattcaaactttttttttcttcaatatgttaaaatataagtttaaagttttgtcttattgcttatcgtaaacttgtttaaatatattaatgaatttgtatctttagtatggtctaacatttctttttatttaaataatgaagtgccgtttggtaacacttttattttctaattttttaatcacaaaatgaaactaaaatttttgtttttgaaaaacaaaaatacgttttgtaaccactnnnnnnnnnnnattttaaaaacagaatataaaagtttgttctctaaaattcattttcatttttatttttgaattttttttgagtctggtctaggtccaggattagattcgggttcaggtcagaggttgggttcagtgccagggccgtaggggggcggggattttggtctgggtctcgtcagaatctaaaatattgagtaagaaaaaaaaaactgtttaaaa

SEQ ID NO: 54822 - DNA, 1812 bp, Cannabis sativa
  modified_base (1697)..(1697): a, c, t, g, unknown or other
cctatataccttcaacattattattgtaaataatacctaaaagaaatgaattaaacaaaaaacgtgtaaatttcccttttatttaggaaaatttttattagtatacgtaatatacatactaataacaaaaaaaaaaaatattgattaatttaataatcttttagtaatgtaacacgtcatcaattttaccgtaatactaaaaaaatcacatactagaatccaaaatgaagacttgccatcttgctccataaaagcactacattattcctctaattacgagattgatgggtcctttgaacaacccatgaaacacaatacgaaaaataaaacctttaaatttacttcctattttatagaattaaaatcacaactagaatcattctcacaaaaaaaaaaaaaaacctccattaacgaacaaaaaagctttgttcataaacaacataacatcaatcatcaatcaatcattcatatccaaaattgtttctcaaactaccgacaagatctgcaaaatcgttttactgtgattatatataagattaaagtcactaattgaaaacattctcaccaacaaaaactccattaacaaacaaaaaatcttcggttacaatcgccacaagatcgatcatgagtacagtaccgaaatcgttcctcaaactaccaaaaatacttaaaaattaaagataaaatcgttgctagataaacaaacaactcaatcgacactttaaaaaaattgatccaaaaattgctctgttctgctgtatgatttttattatttttttaattttttttttttgtgtttcaaaagtaattttttgtttacttataatattgataataaactaattagttacttttatctaaaaaaaatattgttgttattactattcaatcttttctaacaatatactataaataatatcaatcaactaatatttgcaatataatcagcttcttcatcacgaaattattttttttaattttcctgcattttcaaaaggaacaatttggttacttatagtgccgataaaaaattatttgttacttttacagaaaaaaaattatatttatatcatataattttagatacaatttgatgacctttaaaatttatttataaacatcttataatcaaatagttatttttaaatttatattactgtatataatttaaaatatatttgggtaattttattgagttgtcatgtattataataagctaccacttttatgtactaattgttttatatacttttgttactttgaaaccaatatatcttttttagattatgttacattatttgcttaaaaatatttttacgttactttaatattttccttttataacaatatttatgttataataagttacaataaacgaaaagaaaaactcacataactaataaactaataagatttgtaaataaactaataagttacaataaaataatagaaaaaaacccacataacttattagtaaaatttatgaatatttaaattgctaattagttatttagtatactttataataatattcaaataaaattatttaatatacattaacgccttctttattcttctcattagagttgtttcacaaaaacttgccatgatacggaagaagggaggaacaagcacatttggagagcgctgtacaacggagagtcgtatgctacgttcaggaaggatgaatcgctccngaaaagaaatctattgattgtctcccaattgattggaccatagatgcgataatttactagtcaaacatactttttgttatataagtattctaaattttaaaaataaacttgactt

SEQ ID NO: 54823 - DNA, 768 bp, Cannabis sativa
cccagtacccaagcaattcaagctggggcagtaaaaggtctaacagcaacaacttgcaaggcaatgggaaaaagggaaagtttgctggaaaagccgaacaggcccctacaaaaaatccttccaaattcactgatttctctgtcttgactgacaatttggagaccatctacatggttactcagtccgtagccccgtacaagaaaccggctcccatgaaaaaggacataagtaagagggacatgtacaagttttgtcgttttcatggagactatggccatgacaccaatgaatgcaccaatttgaagcgagaaattgaattttggataagaaaaaataactcgcacgtgcaaaaatatgtcaagaccgatcaaaatcaaagggccgcccatgcagacaataaccaagatttactgccaccaccagtagatgggcatttgcaagttatcatttggggcccacacatagctggagattcaggaaaagcccgagaaaggtatgcccgaatcttacaacacgagcaaaaataagtggtcttggccatcgaagaaaggaaaccaaaaataccacgggtaggggaactcaccataacattcaattaagacgatgctgtcaaggctaacttcctgcacaacggtctatttgtcatggaagtacagatagctaacaaaacagttgcctgaacaatgatagataatggagcctccacaaatatcttgttcaaaacacaataagaaataatgaggctccaactcaaagatttaaccccct

SEQ ID NO: 54824 - DNA, 1179 bp, Cannabis sativa
  modified_base (157)..(160): a, c, t, g, unknown or other
tcgataccagaaagaggttgacgcaaaggttttcaggtgcaggtttgggtcttgggttggctggattctctgatagaaaccaggccaacttccctcccggattcatctaaaaccatgccaaatttcttcaggaattccttgtcagcctgaggaggannnntaagatcgttcacaagatctatgtccattcctgtggagacaaagaaaaaaaaaagggtcagtggagaaaaaaaataatatataataatccgactcaaaccaccattcacaaggaataacacttaccatcaaggatcacatgtgaggatcgcccataacgggctacagggttcccctggtttggattggtcaaaagctcctcagccttggaatccatcgtttccggttccaattgaggtttgaagttcttgggaacgaatggaaaatggttggtgcatcctggtattatgagcttgggagggtaaacttctaaactcagaggggacattcaagcaagaaagagatgatccatttcaagatggatctcaccaagaagccagaagtttgtgaaaaatgacaagcttgacccgcccttttatacacaaattccagtgacaagaaagctaaggattgggaaatctaacggttgggagtagggcagaatatgaagagacgattcataatgaccctcgaaaccgtacaactgccataatcaaaggatgaatttttccaagaagggattttaatgaaaatgccctctttaattattaaaaagcactttttactaaaaaagaactttttaaggggcaattgttatactcgaaattcggctgccatctcaatggaggacacgtgtcaagataaagggaatatggatcgatgcaatcactttttatgaaataactcattaattacgtaagcatcagaggatatttgtaacctgctgactgtaaggtcttaggagaggaatcaatatacaaactggtgcttagtatattagcgagaaactatatgtcactgaatgcgaatagcgaggcatcaaggacagtacacataggaagacgaaagtgacacatatcaattgtgaaagcccttagtgtataatgtacaaactaagtgtaacagtcagattggctcgatactaagtaagcgaggtgcctgtctcgctattggaatgcttcctgtaacttcatctagtta

SEQ ID NO: 54825 - DNA, 2900 bp, Cannabis sativa
  modified_base (2860)..(2863): a, c, t, g, unknown or other
tgaggttcgtttttcttcaatcttgtcaggtgattctgccaggagggcgtgattggtttcttgattgtaggttaatctcctgtgggacggaggttctaacactacatgcagcattgcttcataaccataagccataacaaatggtgtttgcccagttgctgttatccaaactagtgaccaacttcgtcagaacaacttcgtcagaacagataaacagactaagtgatgtcaaaatattacttaggcatcaaaaaatacatcgccaggatgttttcccactcactcagcgtccagattgatgtcatatgttaacctaggcgctgggatgtcaacatgggcgctaggcccaaaacagccttcattaaaatagtcataactcgctcaatatttatccgactgacacgattcaattttcgtttcgaaactaattcagtgttctgtcaagttatgtctcatacttcaattagaattagaattatggtctttaaattttatatcaatagaattacaaaaataaactttcggcttacttagaggagatcatgccatcgtgaccgagaccccaaaatagaaaaatggatacatttttagttttataaagacaaaaaaattccttgctttattttttattttttatcatcatcaggtaattaagacatcgctatctttttgtcgtgattgtccgatctttcggagaaccaaagcgcgcatttaaacaaattttaatagtaaaatggtacgtataccacacgaaaatccagtcaaatttatgtaatcaaacggctcttataatttaatattgttacagccacaccaactatcaatatcagcctttcatttatgctatccgaaatttcgatataagatactaagacaaaacgatatgtattggaacgagaggagagatagagagagagttgggttgactttgagtgaattgacgtcaaagtcttgcatcatattatagcgtaggcctctttgctctaaccgcgttgcttccttaaccattcctcgaaacatctaatttacattagtatatgtttcaatcaaatcttaacatatatagcctaagcctatttttcataatattatttcatccacttcttactcctctccattacaaaaaaaaaaaaaaaaaatccaattatggctgggaaacggttcattaacggttccaaatccgaccaagatcttccgcctgagattcggaacaaaagacctaagttttctctagcttcgtatgtcctagaagtttattttattatttctttgaacttctccttcgtaattattagcttcgtaataaatgttgtttaaaacattttattttatttttaaacatatacatttagatcttagaataatgcaccccttaccttatcattgatgaaatatttattcttttgacagtgtggtggaagaagtagtactggtgaactcctttcacaatcttttctcctctttggagcctctgcttagaagagtggtatgttggttaaaaagtgacaaaaataaatcttttgtttgtccacacacacacatatatataaattatatgtatcactattcgttacacacgtctccataatataattagcacatcatcatgtaactaggaattatatactttcctttcaatacatatatctatgtacatatcacgtattcacgtaatatatatacacaaatgtatatacgtcaaattaatatgtaccaaaaagttaagtgtagtgatatttcaaatgcatttataccgtaataactaatttattgatattaattaattaataatttggagattttatccgattaatgaataggtgaacgaagaggtcgaagacgttctgagaagaaccactcgctctttcactcgctcaccatcacttcgaatccaagccttggaaccatcaagtctacaactggtgttcaccaagaacccattaggaaaacttttcaccggaagcaagatacaagacgtggacggaaaccccctcgagattcaagtggtggataaaaatggggatcaaatggtgcctttctcactccctcacccggctaaagttgagattattgttcttgatggggacttccctgcaagagatgactcctggactagggatcaatttgataagaatattgtcaaggagagggccggtaaaaggcctttgcttcatggagacttgaccgtcaccttaagagacggtaaggctaccattggagagatcgagttcaccgataattccagctggattcgtggtcggaagttccggattggagcccggatcctgaccggtaaaaattctcagggtttgagagttcgagaggcgttgactgagcctttcgttgtcaaagatcatcggggagaatgtaagtctttctttattatcaactatatgttaattttttaaataattgcttctctctctctctacttttatatacgactgtattagcttatgcttaattttttttgttaaagaaaatctttcatattttatattatatggattgtgtgaaaaaaaaaatattaacaaaaagaaattcattaaaaaaagataaaaaaaaaattaaatttgatttaaatattttatatataaatatatttttgatataatttaaaaaaaaataaatttttttaagtaagtagttaaattaaatatataaattcaattttttttttattatttagtactcaatcaaaattgaataatttaatatttttaaaattaaatttgtttagtaactgttaatataataccattgaaaagtattttattgagtattaactatttagcaccttccaaatgatttttttttatcgattagtagtactttttaaattattatattaaattatatnnnntttaatacttaattatatatataaaataaaataagat

SEQ ID NO: 54826 - DNA, 1454 bp, Cannabis sativa
  modified_base (617)..(617): a, c, t, g, unknown or other
tcaaaacctaatctactccaaacaaccctgaaattttaaaccctaaccccaaaattagctttaaaacttgaaaattcttatttcacacggacttaccttaatgcttccagataaaatatgaatggaaaaaaatctgctagaaaccacagagaattgatgaagaattccttgtttttgttagctcttaggttgctcgacaaggagaggagtaaaacatccgtttttttattatatttcttaatttaaaatattaaagataataaccaacattattcaaccatatactaatattaaataaaaaattctagacttattaaacactaaaaggcaaaataaactaacgcaagaaaaatgaccattttacccttcttgacaaaacttaaactatgttaaatctaggtgtaatgactgcatttcataaatggattagtaaaggcaattagtactaattattggcatttttattattatctgtgaatttaaattatttgtgggttccatggttagaaatggacagtagagttatgacttatcaatttaggagattttattaaacactaggagttttatttgtattatatgtgaattatgtgatttttataatttttgctcggcgncaacgaaaaatgcgatggatggctagtttgattatatgggtgagattagaaccttatttcttagtgggatgtatattggaggaaatagagtactgggggttgagcggggtatggactttgaccattttaccccatgccttgaaaaatgcctaagttatatgagaaagggcattttagtaattagccaaatgagcgatttggtggctgcctaggaacttgacacctaacaactaatatttcagcaaagattaatttagaaattctttttcatttagagaaaaatcaagaaaaagcaaaaattcaagaacaacatctctttcccttctctctctcttcgaaccagccaaaagtaagggggtttgctgctgatctttggtattttctgcaaggaattcaagtggaattcaagttgaggtaattcctaagtcaattgttcttagcttttcaagctttagtgttggtttgaatttgtaattttgagttttagggactgttagggtttgatttgtgtttagtttgaagtgtgagctttatttatgttgattttaagctctggatgttagttttgatgtatggtgatgaattgcacaagtttgagctttgaaacccaaacttaggtctttagtggcatattttaattcagtgagtttttttgagttttattggttggaatatcttgtgtatgccctgtttaagtactctgaaaggtttggtggcatttggataagttttgagcaagttggaggttgtttggggaaacttggtgcaaaccagttaattgattttctacatcctctaaaactgattaaccgcttttgacagattccctgaacaact

SEQ ID NO: 54827 - DNA, 1159 bp, Cannabis sativa
tctttattaataatccatattacacatatatgttaatgaatagaatatataacaaaaaaaaaaaaaaatacatgaaaaagaaaaaagaaaaaaaaaagtctttaaatagcttatttccattatcgatatatatcaccaattaaaaacaaccatcttattgaaaataattaatttttaagtattttctattttgaaaatgatttttaggtaacaagatgagacaagagaaaatagaaaactaaaggaattgaggaaaaaattgatacaacctcaatcaaattggattgatgaaattagtaactaattaatattataatttattatttaatatagcatgcatgtaaatactttttacttggaatcttcatttttatttacttcatcaaataatgttcaaattaataaaattcctttttagtaaatattgggttgactgatttttttcaccgtcaacccaaaatcgtaattaatgagaaataaatcaaaaacttataatcaatacaaataaagatcactaaaatttaaaaaagttcaactccaagtagtgttaataatagcctattttctttatattttattaatctttgttgcactttaagaataggatcctgagtacgaaaaaaaggcagtatttttgctctttgaatgataaattttggatcctcctctaaatttagtttgacctcttatataaggaaataatttgtgcatctaggagacacaacataagtgcttaaaattttaaccgttcccttaatttttgagagtagttgagatctaattcttgtaagatcagatactaatgttaggagagtgtgtcaaatgcattgggttatgtgccaatacccctaaggtacagtttaactgattgaccctatggtgggtagcaattactccatggtcgtatcctcgacatatccccttcttccttattatattgttcttagagcttgtatatagtcttgatacttttagatttacagggtttgaataatgatcatggacgaatatagggcacatgagatgacaccctagagtggatgacccaccctcgagggtatgatatatcaataccacatgagtgtattgggtaaagactaaagagttaatcacttgaactaagctagcaccctagagtggatgacccaccctcgagggt

SEQ ID NO: 54828 - DNA, 779 bp, Cannabis sativa
  modified_base (299)..(301): a, c, t, g, unknown or other
  modified_base (540)..(542): a, c, t, g, unknown or other
tcacctgtgcctataaatacccctatttttcatatgtaaagggtgaacattttttacttacagaatctctgctgaaattcctaattcttcttctccaagagaaacaaaaagaatacagagctaatattcatactttaacacttgtaatacgtaaacactcactagtaaatggaccttcgatggaagtaatggccgaaaaatatgctcacaaataaatagaagctgaaaccttgaatccacgaaaggataaaggtaaaggaaaggtgggtgagtgttgagatttatgccctaaataaaannnatttcaatataatcagatttaccaattaataaaatatcagaaatcattttatgttgtatggttcacatgatttctttcatgattataggtttaatgtataaattctattaaatctagaacatatagttattcatgattatagtgttctcaacacagtggaatataatcataattatatgtttcaaagattaagtctcatgatttgtcagtacagtggatttacactgacatgataatcnnngataaagtttacttacaccatggataagtgttatgtcatttctaaggtattggcaaagtatgctaggatagaatgtatggagtatccatcagactgggatgatattgacattagataagatatcataaacttactgttatatctatcgaagtcaatatcactttgtttatcttaggtcaatagatcttaatcctgagatggttaggttctgacttaaatatattatttgtgttcttt

SEQ ID NO: 54829 - DNA, 1572 bp, Cannabis sativa
gtagctagaaagataaaccttgaagttagtgccttgaataacatcaaataattaccaatggaaaccttgaacaacttcatcaagaagttcaaagaggaggcttccaaagccaagaatgtaaatgacggacaaaatttggttttattgtaagatagaatccggaggggaactcccttcgagaatgagttgcaataagaaggtgcagctagcgttaaagatttccaaaagagagcctagaagtatattaacttggaagaagcccaaataatagttttcaggggatattatcatgctggaggccctaggtatgcttctgaagtgcaatttccaagtatcacgcttcttgccactccccaaacgagtggcatgcctagtgtgcaattccaagcaacactgggtactcaccaaattctattatggcaccagcccattctgattatgggctgccgacaggtgatcccactcccaaagcaagcacgcaatatcttactcaatctacttcacttgtagtgagtgcaaccgcagctcccaaagcttcctggagtaaacggtcatccaatggaagcacccagagtgaaagcaagaagccaaaaaggaccgagtataatccctagtatactcagtatactaacatggtggatacacaagaacgcatatatttggccacaaggaaaaatattcactaccaaaggccactgcctctataccgagataactcgcagaaggaccccaacagaagatgtgagtaccataatgacattcgacatacaaccaattaatgtaagattctataggatgaaattgagaacctgatacagctaggccatttgtacgtgtggataaggaatcgtttgccgcatatgagggaaggaaaagtaggagctcaagtactttggggtgtagtgcaagccccatatctagaggcccctaagggagctctttcccaaaatcaaggggctctaccaggacagcaacctagaccaaaagggagagtggttatgatttccgaaggctctcatatagggggttcaacccacaagaagtatgggaagtaggccagctattagcttagagacattgtctcatggactagccaataacatttagtgaggaagatgcccagacggtgcattttccacaccattaccactgtaattgaaactcccattaccaacaagatagtggcttaaatttttatggataacaagagtttagtaaacatcctattcaaagaagccttcctcaccattggccttaagaacaaagatttatcacaagtgattctcagcttacgagattaaatgggaattctcttatccttatggggaaaattaggcttttaatgactctgtgccctgacacttcttaaagcacatttaactactgcaccattgtcatggtagattgtttgataatatacaagactataatggttgcctgacattggtggattttggagctgttgttggaatatattttgccaggttctagatttactaacaagtatgtttttaacatcctaaatataaatttttgaaacaatgaaacttaaacacatatagagtatgagaa

SEQ ID NO: 54830 - DNA, 1134 bp, Cannabis sativa
ggtactgaaacgcacccaccattttgagaatataatgaattctatcaataagtaagtgacaaagtaaaaactaactgtgtacctcaagaaatggctgggggtatcccagtatcccaaggggcatgcgttccttgcatgaacattgaggtaatgggacacacccaccatttcgaagaacctagttagtcccaataagcgactacaaagcaagaaaaataaaaactaaccatgtctcaaatggctgggtgtttcacagtgacccaaggaacatgcgaaggttgcatgagcattaaattgctgtgacacacccactattttgaagactcagatagtttttataacaaaagtatatacagcctgaaagctaaaaaaaccctaagaattaattattaaattctagcaaaatagagggtcgaaaaacttgatattggtttgattaagttatttctgagtattcgaatgttcaagaaaatacgcaaacattcgaaatacttatcaaaaactcaagagtacttgaagtactcatcaggaaatatgagagcactcgaagtgttcttcctgaaacccgtgataactcaagtttcaagtacatatttcccaaaaaacagagtattttgtcgaaagacaaataacaaatcttattatctcatacattttctacccataaaagcatagaatacgtacaaattctcaaagatagaaaaacatttacagaagttttaatccactaaccttgaagtgcagtatctcttcgagagattctgtggatatcaagaactgaacttcaaaatccttctctgatgtgatggagaaaactcagaaaaatgaaaagagattttttgagaattcaaaatttagaagggagaaagaaggggaaaatgaaaatgagagggaaatgaataaaggatcatttcgtatcagaaagtttaaattctaatatccctcatttattgggatgaagacacgtggcaaaggaatgcctaaggtctttccatccaacgatttccaataaccacgcctgtgtagactccaaagagttttggtgatgtggcaccttaaatgaattaaaagtaataattacagccgtcttttcaaaaccctcgataagataaccaaaagtcaccatctcgtgat

SEQ ID NO: 54831 - DNA, 1147 bp, Cannabis sativa
tagggaaattttcagtcattcaagcagataacagttattttgatggaagggctagattggtctctcttatttgttagagctttctattcatttctagagtgtgattgttaagttttgatctcagttttttctaagcgtttcgtttgatgtaatgatttggacactttcttagctgatttggctagtttactttccagttttcgtgaggcatccctagttcatgtctccgttcataaattagttgtccatgtacttagggtggattgtgaacgagcttggtttgatagtttttatcatttgctagtattgaactctgattattgttaataagagtttaatttaaaaaaaaaaaaaaacattactctttgtgatattactcttagctagagtgtgtaaatttcgattataacatttgagtgtcatatttgaaatgatgacacataaaaaatggtgtggtgttataacacatttatatagtttgtttgaattactaatcacataccttagtttaattaacagtattttgcaacgtaaatattttaatttagctcctagtattaaataaatatataagtttaattttttatagttatattttttgaacttccgtaggttatcgatcgttaagtgttaagttattatccacatgtcattttcttattgatatatttaaattaaatttttaataaaatttaaaatatttaacaatctagactaattagggaatgcacataaatattgacttgacacttaatgattaagtatccacggaagttttaaaaatataacttagatattattaccgtaaaaaattaaacttagatatttatttgtaactgagagttaaactttcctatttgactacaaattactctgtaattaaactaaacatacatattttaattgccaattttcaactttataagtggctaacattttctaaatgttatacattgtgaggaattgaaacaaagcttatgaattccttggaatgtaatttttctatatgtattattaaatataaaaccataatgtgtaatatttaggtggcgtttggtaacacttttttaattaattttttgtttttaaaattgaaaaaatgaaaatatttttcaaaaacatgttctttaaaactatttttactttt

SEQ ID NO: 54832 - DNA, 1308 bp, Cannabis sativa
tttaaaacttttggctacattacacttgtaagaatagtatgtttatgaagtattaaacttaaataaaaggtgatacttaatttttacatatttttcttcataactatttttatatatataactttattattttcttttctgcttttgtagtgaattgaaaaacaaattaccttttttattatatatataataatgggagtaattaaatttattacctataaatagttaattaacaatcaaaatttgatgagtaattttaaattatattattagttcacactccctataaatattatttgtttctactaaaacacaccttttggtggtgtgctatatagacttatccattagtttttggctatttatttttagtttatgattaattactttgaatatattttgtaaaaataatatttatagtatgtcaaatatatgtacttatttgcgtatgcattttctgtattggcattactatgaatgcagattgatagaatgactatatatgaattaaagtgggacaataatctgatatcaacatttggaggatgcgttagccattgccaatcaccagtgtctgtttgttcaataattaatatttcggaatgtaatgtgtaatattcgaattgtgttgttgtgttttaattcttaaattagtgactgttttaaaatttaatatttcatatgttattatgtaatatatgtttggattgttgtctcatgaataatgctgtattctgtaatagacaagagctcatgtgcagagtgttatcttttgttgttcttcttcttgttgtattttttgttcttcttctaatcatagtcttagtattaaattggatttgatcagagtgttgtatgcaatgcaagtaaaatagtccaatcaacccaacaaccaagtgaaactaagtcttccatatattgatttgttgggctcaaattatattcttccaaagaaatttctacaaagagttaactcggtttgtaggaatttgttgtgagatgaaatgtgtaaaacaaagaaagaagcagcaatagagaaatatgtatggacagttgaaactaaacaagatacattgtgggtcaattggagggactacaagtagacatgattaaagataaattcaacaatcttcgctctggtatcgttttaacaagtccttaccggatcaatgagcattgtgtcctcctcaacgaaaggcttcttggcaaggtgtcacgggccgcctatttgggcacccccaagtaggtgggacgtgcggcacttgctggcacaccgagctagcaagtcagcctaaacgcgcctgcagg

SEQ ID NO: 54833 - DNA, 547 bp, Cannabis sativa
taggagcaaccttgcaaacctgtgataaaataaaacataaataagttaaccaattaagaaataaactacataaatcacaatcccatgactatcgaaaatcagaagaaaaatatatataaaggaaaaaaaaagtttaaagaggcaaccgagtataatacttcgaagtacagtcaaagcattacaaatatattatttacaaggttgaatatgtgcatcaaaacatccgaactcaatgtcaacactactcaacatctctcaaacaaaatatcatacatgtttttttaacatcaaaagtaaagcctaaaatctataattagaaaaagcatggacatacaccttaacaccttaaaagatgaatttccttaattgcaaggaaaggaactgatacatcgtttgataacaaaaataaccatgaaatattttccaagaccacaataaatgttttcattttatatatttttaaaaataagaagtaataaatgttattatataaagaacacaagaaccatatatggtccaacatatttagttcttttaggacactatt

SEQ ID NO: 54834 - DNA, 934 bp, Cannabis sativa
agaggaagaaagtgtgaataaacaagtattggggctgaaactgtgattttgtttaggttggctgtgcaaaacctacatgatgaaatgatcttcaaaataaaaatcaagagtggatggatgagcagatagaaacttatcaggtgagccaaatcaagatcatttttttttgtttttctaggggctaagacatacttttctgattactttatacctagttggagttggactgagtttgatacaacatggtttgcttcatcatttctaaaatgctgaactttgttcttgcaggggaaaaatgcagcaacttaggaacaagctctgttaaaagtaatatattggcttgaaaatgtaatatctttttgttttgtacatacaaaaagcttgacaatcatatacaacaataaataaaggaattatttcagaaatgcccaaaaacaataaaaatttaagttttttaaggatactgttttttttaatatttttacgggtttttttttataggttgtttttaggttgttataaaaatgaccgctttttacacgtggagatatagtataacattgcgacaacatcaaattttttctctaaaaaatcataaattcgtaaaaatgtgaaaaataaaaaagtaaaagtacgtaaaattataaaaaaaaaagtataattttagttattttgtgtaaattttttaaaaataaatgaagaccaatatgtagggatggcaaaatcgggccttagggtgggtgggtcaatgcaatgacccgccccgcctttaaatggtgggttcaagacaatctaatgtaaacaattttgaacaattcatcaatccaaattccatttgtttcatataaaaaatagggtaaattgcggcataaatacttaatatttccgattttatacacttaaatacttaatgtttatttttggtggcaaaaat

SEQ ID NO: 54835 - DNA, 1403 bp, Cannabis sativa
aattaatatttatagttaaatttgcttagtaaccattcatgtgtaatacgcattaagaaatgttctatatatataaatatatttatacacttactcataatcttaagtgtagaatagtggggatgaccataacttgaacaaggtattacacttttatctaaaagcttatttctctatctctaagcactaattaaggaactctcatggagatagctctaggaattattaagtcttttagggttttctaacaaagtgcttttttgatagaaaacttgttctccaaatgagcaccaaagacttctttttatactgtttaggtgatcacacttagaattcaaacacaccacctcatttctctcccataaatgagtattaatctattttgtaataactatatcatcataattttgaaatccttaaaccaaattgtgtaacaacccttttattacactaataatgtgtgattaacacaagaattacaaatgacaacaaattgtaattcctctccaagttacaacatgtaggttaatacacttaataaatattatttatataataatatattacatttaatctattatcatattataaaataatataacacaatatttttattaggatttgaatattaaagctttataacatatgtcgaatctattattatatttatatttataacttttaattataaatatatgctgtaattaattaaaatatcatttcaaaacaaaaaaaaactaaaatatatacacatttttttttcgatttttttagagatgactaccccctctccctctatgtgagttcgcccatatatataatatgtcactaatttttttttattatttattttttatttatggaaccactagattattgttcttctaatagcttaatcttaaaagtaaatttagtaagcgaatgatcttatgaatgaaaggtaaactggacaataatgttacaatttatggaattaagtaaaaataaataacaaagatatataaattatcaatagtccaataataatattaataaagttataggttggattgcacgccgaaaataattaactatttatagttagctaatgaaacataatatcattattaacgttaaataattaataatttaagattattattatttgtgatttagttcttcttcaccaacttaattttcgggcccgtgatcataataatcaaaataaatattaattagtatgccttttgcttttaagaagctgatctagtgatctaattatgacttttttttcattaagatcttagaatattatgattaattaattaactaagcggtattgctatagtgatgattaagatttggagtaatttattataattaattatataataatctatgtgtgagggtggaaaagagtcaac

SEQ ID NO: 54836 - DNA, 758 bp, Cannabis sativa
  modified_base (35)..(48): a, c, t, g, unknown or other
aaaccgtaaaaatgtaaaaaaaacattctttgaannnnnnnnnnnnnntattttacaaaaaatggtaccttatgtaattattcctttaaattaagtaaaatttatcttttttatttattccatttaaattctaaacctaaccctaaagcagacccgaccctgggcataggtcggcaaggcctgtgcctaggcccatctagccgaggggcccaaaaaaatttttccttttaaaattatatttttttttactgattttaaaaaataccacattttttttaaataagggtctaaaaatatttttttcccataccccactattcaaggctggccctgttctaaagttaccatataaatagaatatgatagctcttatttcataatgttattgactcactttgtcagaccaaatagaaaataaccagagctctcataatttcgaaatctcttcttcttcttcttgtcaattttgaaccccttaagtgattgagtgattgcccacacttttcaagatatactcaagataatgtagaagactatgcaatctttttgttacttaaaggagaattcaagttcagatcttgatcatactttgcaacagaaaggatcaagggttagagatctgaacggaaggagttaaattattttgctgccatgaatgtacgattttttatacctttatgtgtttaattcattattttttaagaaattcatattttggatgttagattgtagaattataatccaacatacatgttagt

SEQ ID NO: 54837 - DNA, 877 bp, Cannabis sativa
taattattaaaaagctctttttaccgaaaaagaactttttcaggggcaattgttatacccgaaattcgactaccatcttagtggaggacacgtgtcacgataaggggaatatagatcgatgcaatcgccttatatgaaataactcattaattatgtgagtatcagagtatatttgtaacctgtagactgtaaggtcttaggcgaggaactaatatacaaactggtacttaacatattagcgagaaactatatgtcactgaatgtaaattgcgaggcattaaagacagtacacattggaagatgaaaacgacatatatcaattgtgaaagttcttagaatacaaactaagtgttacagacgaattgactcaagaacaagtaagcgaggtgcctgtctcgttatgggaagacctcatataacttcatcccgttagcatcagtgaggctcacaaccctcgcaagtgagaagctaacattcaaatgagtaccaaagaattctttgtaaataagaaccgtgatcaacaccagacatgcatcgtcgacctcggaaggaagaatgaccccaactcgctattgagatcactggaaccaagtttctgttgagacaactccagaaacaacaattaaagacgtgatttaaaacacgatcattttgatccagttaagtggaaaaatcacagctatacgattttcaaatcataaaccgcatttacactacgtgatatgtaaccaaatccaatgattttagggatgattgttgtagacatattattgtcaactttgtaattaactgtccactatgtaattataaatagtgacaaagaagatcaaaaaggagacgaaaaaactcatacaagagaggccctgaaaaacaatca

SEQ ID NO: 54838 - DNA, 1029 bp, Cannabis sativa
agaggcaattctcccttccgcttattttgtgctccacgtctggaagatttagatgagcttgatcaggaaggttttaacccatacttcttgaagctagatcaccatagatacctcatgattgattttttatgatagagtagatgaaatagtcaaaactcaactcattttcttctacctacctaatgtgttagagtagattcattcattttgatgaagtatttaggattcattctatacagtagcttcttagacaaggaagattttcctgtatgctaatgggaatccaaaatatagtattattaatgggcaaagttggtatacaaatgagataaaaataaatgaaaatagcccacatttgagaatttaacaagtgagtcgcgtgctaaaattgagtacccaacgagttaaagtccttgccaacaacttgccgaaaaagcaaaatgcaaccaccattgacaacaaaaagtaatgtaatctctaaaaccacgtgttacaaaggtaataagcattggaacaaaataagctaaaaaaaaaataaaaacttggactccaaaatctccaagataaagaataaactaagttatatatatttaaaataattccaaaaacgcgaaaaagtcttgttaataagcaactccacaacaagtaagtctcaacacaaatagataaacccacatgtgagaccaagtgtcaatgcacaactaaaaagtactctctcaacaaccaaagaataacactaagttcctaaaaaacaagtgttaggagaacactgtctttcctaacatggcattgctcacataactcatatgaaggagatcactgccacaacaagcatggtacagatcataaaaaaaaacactgcaacaccaagcacgacagagctccctaaaaaagagagcattgacacactcaaagtggcatagctcaaatatagctcctctcctcaagaatcaagatggcgtggacaggagagaagtagatttcatggctactattcattgtttggaatcgtattgtttatgaatcaat

SEQ ID NO: 54839 - DNA, 1261 bp, Cannabis sativa
taatcaagtggctgccttagttgcttagaagaatacatcaactgtagaaaatgttgctgctacatccacatcacaagtgcctgagatgagtatcaaacaagcacaatgtatggccaacagactttacaataacaactaccgaggaaatccaatgcctaactactaccattcggggttgagaaaccatgagaatcttcttatggtaacactaaaaatgtcttgcaaccaccttctaggtttaatgaacaacaataagaagagaagaagtcattagaagacattctgggtactttcatgatagacaccaacaagagatttaacaagaatgaaacaaggttggataacatggagactcacttgtttaatattactgtttccatgaagagcatataggtggaagtgggacaactggccaatgttgtgagtgctttgcagaaaaactatagtttccctagtgatacagttgtcaatccgaaagacaatgtaatgccatctcactgaggagtggtaaagtacttgatgggggtgtagaagataagtcaattggtcttgaggttgaagacatagtagaagccaaacaagagactcatgaagagaagcctactgacaagtctatgaagaaggaagatcttccaatgtataaaccgccaattccttatcctcaaagatttatgaagaaaaaacttgatgaggacttcgctgagttcttggaaattttcaaaaaaaatcaacatcaacattcctttcgttgatgaattagagcagatgcccaattatgttaagtttatgaaggaggtgttgacaaagaagaagaaatttagggattattcgtgagcttaactgaggaatgtagtgccataattaagaagaagctacctcaaaagcttaaagatctaggtagtttttcaattccttatgagattggtgctttgagatttgaaaattctttatgtgatcttggggctagtataaatttaataccgcttttggtatttaaaaagttgggtaatggtgaagtgaagcccacaacaatttcgttacaattggaggatcactcattcacttatccaaggggaataatagaagatgtgctaattaaagtgggtgagttagtatttccaactgattttgtggtactagacatggaagaggacaaggaattgccattgattcttgacgtcctttcttaacaactggtggtgcacatagatgatcgaagaggtcatctaaccttgagtgctaatgatgaagaaatcaagtt

SEQ ID NO: 54840 - DNA, 773 bp, Cannabis sativa
ttggggtttcctccaaatttggaggtcagttatttttatgtcctcaatgatggactaatttaatgttggatgttaagctaacatacatactggaagataatttctggctaaggtatagtgtttaaaattaagcattttgtgccttactcatgctttatttgcttatcttgaatgtggtcaatttggagtggggctaaatcggttcctttttgtatacatattgcagttgtatataagttcgaatttcttctgtttctgaatataacagatataatggatcattgtatgattcactgtaggcttttcatcttcttcctcttcctttgtttgctacagctcccagtttcctctacatcttcgtgcttcctatattatccattcccatagaggttcattctctctctctctctctctacacccaatttatggtcaccttcaatagcttattgcttttgtttgtttttttttttttgaaagaagaagcaagaaacgagatgaagtatttgttattgttattttgtatttccctatttttgtgataaatttttatttgaggactaaaatgtaagattatttttaaaaataaattaaaataaggattagaatgtaaaaaaaaatctaacaccaaattggtgtagattcaaaatccaacaccattaatggtgtagaatttgatgtacaccaattttatacacaatttggtgtaccattagagtgaaatagtgtaaagattctacaccaatttggtaaaatagtgtaccattagagatgct

SEQ ID NO: 54841 - DNA, 1548 bp, Cannabis sativa
gtaaatttgattatattgaaaagagttttatttagggcataaaacccaacagttgtatctccagcggtgccagcaaaacaacatgttgctgacaaccgtatgaagccattatatgagaggttccgtaagcaggcacctccagtgtttcttggaggtctagatgtgatgaaggctgagcagtggctcactgcgactaagcgaattttgaattttatggaggtggtttgtaatgatcgggtgacctgcgccacatttcagttccaggaagatgctcttgtgtggtgggagttggtgtccctcactcgggacattcctgttatgacctgggaagagtttcgggagttattcaacgcaaagtattataatgaagcagtctgcagtgctaagcaaaaagaattcattgagttagtgcaaattgaggggatgtttgttactgaatataccacaaagtttcaccgtttggccaagcttgcctcgggtatcgtgcctattgatttcagtaagaaataaaaatatctcgccagtttgaatgtgaagattagacatgatttagtgatcactaccaatgaagcaacatcatatgcataaatggttgagaaggccctgcgagccgagggtgcggtaaaattccttcaagggccccgagtgactccgagtgttggtggaacccccactctccctactcctgtctatggtagagatggtggtgattccaccactgatcagaagagaaaagttacctggcatctggtggctcggggcagagcaagcggttccgtgggaaccaaggcagaggtgggcgccagggttactcttaccttgagtgcccacattgtaagaaacatcatcccaaagagtgaaaccgaaagacatgctttcagtatggcatggtagggtatttcaagaaagatttccctcaggcaaagaaaaaaaagcagaagccagaggcaaaacccgcacctgctcgggtgtttaccatcactcaagctgatgctgcagccagtccttctatggtgagaggtcagattcctgtcaacaaactccttttatactgtgttatttgattcgggagctacacactcttatgtggctacacggggaattgatcttttgggtaggccttatgattttctggaaagagggtttggaaccctaatgcctaacggagagttggttatctctattaggcgcattaggtctatgccaattaggatcgaagatagtgagttgagtgctgaccttacagagctgaaattaacaaagtttaatatcatacttgggatggactttctgtccaagtattcggccagtatagattgtaagcgaaaaatggtgacttttcagcgagaaggtgaagatccatttgtttatgttggattggttcaggggtgtcggatcccagttatttcagtattaagggctagggatctactacacagtggatgtgcgggatttttagcagttgtgattgactccagctgacccaaaatatttgggcctgaggtagtcagagttgttaaagattttctcaacgtatttcccgaggag

SEQ ID NO: 54842 - DNA, 799 bp, Cannabis sativa
taattaattaacctcatccatttaattaaatatctaattaaattaactttgcttaattaatcatgtaataataataataattataatcctacaattgggagggtagttgtgaaggttaagaagccaacatctcacaaaaactatattgatagaaacaaaaacattcatagtcacacacacatacatatacactctcaaatacatataattaatattttttatattgatgaagaatattaatttcaataaatattattattattgttgttgttaatatatgattctaggaacacaccaggtgtactatttgtaattataatgattattattatttcaatccatgtctttaaagttcaaaatatcttattggaatatatataagctagctgttttaattaatttggcaattaatatacattgaagaacttctattctacatgaacattatcatcatcttagtcactactactaatagggttaagtgtatcataataaaaaaatagcaacaaacataaattttgacttgtagaataaatattattcttctgaattatgatctttgtagaattttaattttttaattttttttagaaaatatatctccaaactatataaattattgcaaatgtacccatttaattacattctatttatttttttatagcaatttagtgatgttaatgtgatattaatccgacaaagatcaagagtttcaagcaaaaaatatatacataaatagcagtataataataaattctggaaatatgtatttacattcttagaattaataatttgtatg

SEQ ID NO: 54843 - DNA, 1615 bp, Cannabis sativa
ggtctacgccacgtagatttaaatgtgagcgcaacacataggtctacactacgtagacataaatgggcatgtcagtgcgatatgcagttctgtgtcatacaaacatatgtgaatggcatatttgattaaataatatgataagcatattattaatattgtaatgttttatatatactgtcttgctgggcttggctcatgggtgctctactgtgcaggaaagggtaaggctttagctgatcagccatgagtcccgtagctaggcaaagaatgtacatgtccgagccatatcagaccaaccaggttaagggtctaccagtgatgtattttgaaattcagttttgccgcttagggcagctaaaagacaaagacttgtaataaagctgtaaatatttttgggatcccaactgtttaaaagtttaaactattacaagttttattttcattctgtttaatataaaagtttaaattctgtgctatttttgattagtaatcccatctagggattagggtttcttaagtattttgggtagcgtgcctaattattagggcgttacacgcatcgtcattttcatccttgtcatctgctaggggatgaccttcctcatttttcttgtgcttgccaaatttcccttgcctgatcagttcctcgatctcatcatggaaaaaccaacattccagagtagtatggccaatatccttgtgatacttgcagaatttttttgggtctctcttgtcacggtttcccctgattgggggaggctttctgaagacccccttattttcttcgattgagtagatatggtcccatgggactgctaattctgtatagttcacaaaacgtggacctcccttcctcttaggagacgactctttctttggaggggatttggccaatttcggactttgctatctttggggactgcgtcttctagggcttcttcctctggaatttttccctctgggactgcgggatcgtgatcgcagtactggcgactcgcgtttatcctttcctttttttagctcgacaagagaattttcaatccttttatgcagtttttccatagcgaaaaactcgaccaacgattcaggccttcgagcctacaactccttcaaaaagtcgattcatggtaggacacctattattaacatgcaaaccaacgaagactcagggaccttctctacttttgttactgcagcattaaaacgtttaaagtaatcttgcagggactcactgacctcttgtttaatattagtcagagtggtataggttggcctatacgtcattgtggcctgaaagtgtgtgagaaaaaggtcgacaaaggtttcccacgtcgatatagattcttcaggcaattggctgaaccaatgtgagcattatcctctagggttgccgcaagaatgcgacatttcgcaagttggggtccctggtccacttccataatagtattaaaaatttctagatagtctatcgggttagtagtacctttatatttcagagactcagacaaacaaaatcccttaggcaattgagcatgtcgcactttcgtggaaaaatgagaagttgttggaattattttaacaggatgttagatttactaacaagtatgttatttaa

SEQ ID NO: 54844 - DNA, 1514 bp, Cannabis sativa
cttcaaattttcttattttggtatcgcattaaaagagattattttacaaatatataaaaacaacgaaaaaaaattataaaaatacggtggtataaaattttaaatatttttataattttatttacagaaaatacagtcttttgatgtatttttgtgttgtattcttgttaattttttattatttgtatattactttttgttattgtttagatattatttttttgtaacttttatgtagttttcttattgtttttgtgttatttttatataacaccgtaaaaatgtaaaaaaaaaatctttaaacgtaaaaatataaaaattacaaaaaatagtgctttatgtaattatttcttttttttagaatttttatttttatggtttttaaagtgcaagtttgcaaaaatataatttttttcttaaaaaaagttattttatgagcaaaattttagaaaaacgttaaaaaaaaaatatatatgaaaaaaatagtataagatacttggtttctctcttatggtaaccggttacccctctggttctcacaagggtatttattacccttacttgattatttcatattttttaatttttttctataaaaaaccttttgaaaaaagaagatcatattttttcatagaaaatataaaactcataaaatttgtaattttttttttaagattatactacatactcttgttattggttaaattattttgtcacataagtatgcaagattttagtattgaaaagagataattgcggcaaaagtccccaaaaacttagggttgatacagattaatccccaacttcgaaaattggcggtaatagtccctaaggtcgccatttttgtaagtccgttggtcctcaatttaacagatctgttaaagacggacaagaatgccacgtgtttaaatattattggaccaactcataattttaattaaaaaataatttaaaatgatttaaataatgaataaattattaaaaaataaaaaataaaaaactttaatgtttttttatttccttttttctttccatttattttatcttggacttagtcttcttcatcaagcacgcacagtccacagacctttcttcatcaaccaacaattttttcttgcaagttgtatttcaaatcttctttctttcttgccttccaccaccacttatttaaactccatactggaggttggctctccggacttcgaaattgcccaggtcgaagccatggcgggtgaggcttcgacaacggggatagctacacacaagggccaaacatcacgggcagagagaagcggtagatctgttcagatcttgtcgacggcgagtggcggtagtccaccttttctggtcagatctcgccgacagagactgccatggatgatgacagtgacgaccactctctgaatctcactcctacgccatcatcgacgcccaccgcaagaagagggatgacgaaattgaggctgggtagtgggtaccaaatcttttaatgtcagtttttttttttttttttt

SEQ ID NO: 54845 - DNA, 1519 bp, Cannabis sativa
aattttgggatgaagcttaccggtatgcagtgtttctaatcaataggatgcctactcccactctcaaatacttctctcctatagaaacactcttccaaaccaaaccagactactcctccttaagagtgtttggttgcttatgctatcctaatcttcggccatacaacaaagctaaaatggagtacaggtctcaaccttgcacattcctaggctatagtctctctcacaagggctataagtgcctttccaaagagggtagattatatatctctagggatgttctctttgatgagaacatttttccctatgctcaatcatcactgtccacaacagctgctcctcatactatgttttcacctcacacacctgctactcctcctgttgtcccacggtcaactcctccttctcccaatcaccaagtctatcctgatcttattgcagcccaacccatcactcctagtgtgtcatcccaatcggactctagaccaataattactaatgatgctcctacttctactattcctactgttactaatactttcaatgcaggctctattcctatgacatctataagatgccaacaaacagatgctgcaccaggtacatctcagccaactgaagttccatcagttccaagcgatgtggttaatattcaccccatgaaaaccagggcaaaatctgggataagaaaacccaaagttctcatggctgctctcaccccgtcctctctcaaacttgctttgcaagatcccaagtggtttgctgccatgcaaactgaaaatgttgcacttaagaaaaacaagacttggtctcttgttaagcttcctcctgatcgaactccaatcgggtgtaaatgggtttaccgagtaaaagaggatgctgaaggtaatgttatcactctcaaagccagacttgtagctaaaggttttcatcaacaggccggttttgacttcaatgaaacctttagcccggttgtcaagccaatcaccattcgagtcattctcacacttgctgttacaaaaggatggccaattcgatagctagatgtcaacaatgcttttctcaatggtgatcttcaagaagagatttacatggttcaacctactggcttcatcgatcccaatgaacctgataaagtatgcaaacttcataaggctctctatggtcttaaacaagcacctagagcctggtttcaaaagctctcttcagccttgactagtcttggattcctctcggccaaaacagatcactctctgtttatcaagctatcatctcactcttgcatctatgttttagtttatgtggatgatatcttgatcactgggagtgacaacacccaagtttctcaccttatttctgctcttagcaaccagtttgccttgaaagaccttgggacagtcaacctttttctcggaattcaggtcattcctactgctactggtatcttactttctcaacaaaagtacattcaagaccttttgtgcaaagttgaaatgcagggagtcaagacacaaagcac

SEQ ID NO: 54846 - DNA, 707 bp, Cannabis sativa
atttaatgctctattcaaaatgtggatgtgaaagatcaccaaaaaaaattattaaaatgattagaacaacacatctacgttgttctttcataggacttgtaatattaaaatagaaaaatttataaaattgtattttaatactaaaaatctaaaaattatataaattaattaattaaaattaaatcctagattaattgaataaataataaaataatatttttattgatcattctccaaatggtcatctctaaatataaattaaataacgtagaaaaaatcattattatcttctcgcaataattaaggagaaatataatttttttttatgttttatttataattttatggtgtaaaatttttatttataaaaataaatttgtaaaattttaaaattacaaaaatacaatttgcttagtaaaaagtaagaaaaaaacaactaaaaataacgcgaaatcaattttacgaaaactacaaattgaccataagtaaactataaaacaaccaagaacgacaaaaaaaaacctcacaattataatacaacaataaataaaatataaaataacaaaaaaataatttattatttttactgaaaatgtattttcgtaaataaaaaaattcaaaaaataaaaatgaatttttttttcgtgttaacttatttttataattttttttttaatttttgatgtactatgtaatttttttaataa

SEQ ID NO: 54847 - DNA, 836 bp, Cannabis sativa
  modified_base (562)..(565): a, c, t, g, unknown or other
ttttgtaatatataataaataattaaatacatttttagtaaaaaaaataatttattatagaatcttttaatcaaaagagtcttttctaaaagttggattgtaccagctttagctttcaactgtaacttttatataaattcttcaataaattattttttaactgcttactaaacacctttttgtcataaattttttaaaaagtagcttttaactttattaaaagttgtgtcaaatggatgctaagtacatatcatacagtgtacaaattttgtgtatttagccttagtgctctaaatacgggtcagattttttgacacaatatgaaattagcattagcgcgattaagcacgaaaaaattcaaatttgaacacaacatagcacaatgctaaaaattgacacaacacgacacaaaaaattgtgtccttaagcacaacacagcacaagaagcacaaaaggcatgacacctaagcatgaatagactagagaaaaaagtaggacacataacaaattcgaaaaacacaatcaatatattaaaacaccttataatttattattattaatnnnnataataatatataaatttatcaatctattagttataaataagttaaaataataatagaacttaaatataatactaacataaaaaactaagattatatattaatttatttatagagtatgatattaaaatttaagtattataagtaaatattcaaatttaataattttttgtataattatctgtaaaacattattcaaaaattatataaatataattaaagctataaaatatacatatattttagtaattataaatatctattctatataaa

SEQ ID NO: 54848 - DNA, 965 bp, Cannabis sativa
ttataaataagagattgagaaaagaaaaatattaatggctacaattgaaaaagattaaagaagagaagaagaatgagaagatacaataaaaatagttggagtttacctctattggaatgattttcaaatttttttatctatgactgccaccacttgcgatcattcatgaagaatggttggtcttttggactaaccagcaaaaagaaaaaaagaggaggaaaagaagaattgttcacttgcgaccatttgtaaagaatgggttaaatggtatttttgatcttaccagcaagaagaaaaaagaggatgaaaagaagaaggattgttattctctatagttaggatttttattttgttttttttatgaggttttaaacctcacctgtttaatactaatctaattttttaaattaattgggtgctacttgtacaaaataaaataaaaaaaaatgtattttgcaaattttaattcgtcaaaaagttattttgacaaatttttcctttatattgctacataactgtaaaataataaatacgtaatcattgaacttgagattaaagtcagttattgacttttacaattcttggatgtaattttcacttctctttaaagttttttgattttcttaagtcaaatgagaatgaataacattgaagatgaaatacttgattattgttattaagatgaagataataactcagatagtaatgaaaaactaagttgaagaggaaaatgaagagaagtcaggtgagtttctaacttatgagtcgtgtttaggtgatttaattttagggttgattttttttttaaatgataaagaaaagttaatgttaaattgtatttattatattaattattaagtcagatactaaagaaggtcattttgctaattaaaatttttaaaaagtcattttactaataaatttttttataaaggctattatgctaacccacacaatatacaatt

SEQ ID NO: 54849 - DNA, 2476 bp, Cannabis sativa
tcataatatttaataaatttttttttctccatattaagtatttttaacaatcaattattatcgatagaataattaattacttgtatagatcttaatgtaacttttgaagaaaaataaaaaatttaaataaattaatatctaattattcttcatcattaaataatttttcatgtttaatcttaccactcgtaaaaaaaaataaacactaattgttgaaatatataaacaaataaatataaatttatcccacaataaaatccattaccaaaaatatgaatacagtgtagtcttgttttaattatgtggggttgtttaatctatattatcttctagctgttgttttattttgttaataaggtctcttatagtgggtcattactttcttcaatgatgtgatgatttcgttgctttgccatgatttttggatcgaggtccgtttatgatctatgccatttttgaatgattgaagattttgtagattaattagacattcctttcttaaaaaaaacaaaatgaaaaacttattgagaagcttataccaattttaatttttgttatagcaaaaattattgttttttttttaaaaaaaaattatttcttgtaatattgaataatgagactaattaaattttcgtaaatttttattaatgaaataaaatgattttccaaatatattagtataggtagcaaaatagatggctttataaattgagttgaaaatgatgaaaacagataaaatggcaaggtctgtgatggtcgttttattcaaagtttgttgccgttttgacctccccagatcatcaacgtagattgaatggtatatgagtttctggaatatttgattagtggccaattgaagaaaggcacgtgtaatttaattatggaattcaattcaaaatactcatgctgatgtgtgtgtgggtcaagactgaagaccgagggacccaagagaattaaagagagtattgtgtagccggcggagattcatattaatgcctacactctaattttctcccactttccaactaagtctcgttaaaaaacctaacaagaacaataagtgtctagcactctgtattttaaaaatttatgtattttaatgtaataacttttagagagtatttagccaatcgcgaagtgatatatatagaaattgttaaataatactgatccctaataataatattttttatataataaatattgctatgagacactaagtataagtaagatttaatattaagttacacctgagatcacatctcaatctcacgaaagaactagacattctaagtgttagtatttttgttatatattgcaacaaaatgttctcctctactactaccaactctaataaaggcacgtgttaaataccatcataaactattaatttactagtactagtattatataagtataagaaaagtaagagtatttattggatcatatttgatatttttaagaatatttatatctaatttaattatttattggatgttaaattttatcatccgatctgattcattaaatttcagtcatctaattgattcaacatctattggatattgaattagatcggttctatccattagatgtatttttgtatacttatgggtttactttgggttatccaatattttagatttagtatctttagatcagatcgcatccatctaatattttagatccattatttattagattagataatctaatccaataacaaaattcaaattttaatattaattttcatatatacatatatttttttttacatattataacataaaatctaattacccatcaaaacaaatgaaaatattaattagttcgattagatgttgaatgtattagatttttaaacacacacccgacatccaatccgatccaattgaacattccaaataacattcaatctgatctgatcacaaatagatatctaatgtttggtggtcagttgtaattagatcggtcgattatcattggattagattgatttatgcacacctctatgctaaagagcacctatggtattgtgaagtgtaatatcgttataggtataatctaatatcaagtctcctttattttactttaataaaaattataaaaaaccgcaaataaattatatgacatcatcttataatggtactaggcactttgatacctcataataatataacgctttataagtatcaaattctatatatttttatgtaataattattataaaatatcatttgttcgcatggaagtaattgccttgatggtgttggacatcagtgatacttaataattgctcttagaaatttattcatatatagcctttattctttttttttttatttaatgattagtaacattgtttatcaaattaaaatgtgtaatagttgacaaataaatgataaatactattttggaccctatattttgcaaaaattattaattaaactctctctttgttatataatcaaataga

SEQ ID NO: 54850 - DNA, 3075 bp, Cannabis sativa
  modified_base (26)..(63): a, c, t, g, unknown or other
  modified_base (106)..(120): a, c, t, g, unknown or other
catttattccgctgcatcaatgtaannnnnnnnnnnnnnnnnnnnnnnnnnnnnnnnnnnnnnagaaagttcatatttaggatgtgttaataaacatacttgtgannnnnnnnnnnnnnntggtaaaataattcccaacattcttggcatcctggaatcatggggtcgagaatgtctcaagtggtcagtaagttgagaaggttgaaggatgtgttaatgaagttgaataaagagggcttttcggaaattcacaaggaggatatagcagccagttcaacccttgcagatatacaaacaagattatacaaagacccgatgaacatggatttgatagaagaggaacagagagctcatcaacattacacagaggtacataaagccttttccctctttatcactcaaaaagctaatcttaattgggctaagtatggagatgaaaattcagcaatttttcatgcttcattgaaagctagaagaatacaaaataaaatttttccattgaagatgaaactgggatctggagagacaatcctgagggggttcaaaaagcattcttagactattatatgggattgttagggaagtcattgcctaataggagacatgttcatcagtcgattgttaatttgggccctaaacttactgaagttcatcgtggaatcctctctgctccttattctgctgaggaagtaaaagatgctgcattctctatccctgggaacaaggctccaggccccgatttggtagtgccttttaccaggattgttggtaaattgttggtaaggacattgaggaagttgtgttatcttttttgaattctgggaaaatccttaaggagataaatgccactaccattacactcatccccaaatcggtttgtcctaaaagtgtagctgatttcagacctatctcctgttgtaatgtattgtacaagatagctactaaggtgctttgcaatagacttaggaaaattcttcctgatcttattgcagaaaaccaaggtggttttgttcatgggaggtatatagcacataatatcttggtttgccaagacttggtaagactctatggaaggaaaaattgtaagcctagttgtatgatcaagatcgacctaaggaaggcatatgacacagttgattgggatttcttggaggagatgttagttgcttttggtttccctatacagttcattcaactaattatgaactgtattaggacaccaaaattttctcttctcctcaatggctctgtgtatggattttttgaagcaaagagagggctaagacaaggaaaccccatgtcccctcttctttttgttcttggtatggagtatttgtctcgaatttttaagaagattggggaatggcctggattcaagttcgatgacaggtgtacaggcctcaaactgaatcatctttgttttgcagatgacttgttggtattcagcaatggtgactttatttcagctatgttcatgctcaaaggtttgaagcttttctcttccactttatgtttggagcctaatgttcagaagacttcggtgtattattcagggatgccagaattggaggtgaacaggatcttagaagcatcaaaattctctagaagcacattgccttttagatatttggggattcctatttgctctaaaaggctatctagaggagaatgccaagagcttcttgaaaaaatgacaggaaggattcggatgtggagttctaggaacttgtcatatatggggagagcaacattgattaattctgttctattggccattcatacttattgggctcaaatctctattttaccaaagaagttgctgaaagacattgaagctgtttgcagatccttcttatggaaaggcacacaagagacctcaagtccaggcttggtttcttgggacaatatttgtcaaaccaaatctgcaggaggtctaggatttagaaacatcagaaactggaatattgcagccatgggaaggtatgtttgggacatagcaagtaagaaagattgcctatttgttaagtggattcataatgtatatttgaaacatggtagttggtgggattatgacccacctttggattgttgctggtcatggaaaaagattgtaggggtgaagaataagctgaagcaaaaagtggatgttgatggttttgtgcagcagaggcatacaattcaacaacacacctatcaacttctttttaaaaaaagcagggacaagatttcttcttggtccaagatgtttgggatagattcatcattcccaaacacaagtttattctatggcttgtgttttggggaagattaaacactaaagaaaggataggtaaatacaactcaatcatagatttgacatgtctactttgtggacaagaagaggaaacaagcaaccatttattctttgagtgtgagtatagtcaaagttgtttacaggggctcaagtcttggctacaatggagatcgacaacaacaaatgtgcaacaactagcaaaggttttcagcaagaacaaagcagtacctactgctagaagaagtgtattgaagactgctcttgctgggctggtatatcatatctggaaagccaaaaatgatgtattttggcatcaaaaactgtggcatacaagagttaccatacaacgggtacaacaagattgtaaactcaggattttggggttgcctaacaagcttaaggatgaggataagcaatggttgttaggaaactaattagaatggatttgtataaactgattgaagttgtatagattaatagaattgactttagctacagtagagcactaagagatagagaaatgtgaattgaggaaagtttttgtaaaatgtaaatgttttggatgagcaatacaatgattcttattcataaaaaaaaacatatactacactatatatatatgtatttatatgtatatttatatatatatataagaaatgtagaataagaagaatatatatagaaacgctcactctcaattttgagtgtagattagtgggaatcgaacaaggtattacacttttgtgtaaaaacttactttccctatctctaagcactaaggg

SEQ ID NO: 54851 - DNA, 1096 bp, Cannabis sativa
ttttttctctatgtttaggtttatagtacaatgggctttagaaaatgatagtgagcccataaaccaacctttggccgaaaatacaagtgtatcatgtgggtttgatttatgtcattttatttcgttaaataaaactatcttttatcttttctaaaatactatttctcttctctaactatttaaatgctaattttatctacttaataattaaataattattaaacaaaattaccatttaaatctatttattaattagactcttcatagtctcttaattacaaataaaccctctctctttattttcttctcaaataagtcattgcttagtgaaatttataaataagacagagtcatatttagaattctaattgattaaacacaattaattgaggtctacaagataaacattatctcagatagtgtggagactatgggcttatgtaaccaagctctcaataagtagttctagaatatatcgagtaaattttctatcttattaattcctcttaactccactcactactacactactacaattattagtgttcgcatcagtcctaaaaataattcttttgggtgaccatcgctaaaaaattaagcaattgtttaaaactgtcaggaaaaatggatattccagactatttataacaatcactataataataggcaacagtttttatttaaaatgacaaattaaaatacacctatactcgacggttttaaactgttggggtattctggcacatatattttttttggaaaacataaccccatatactatatagatcaaaacctaacaaagaaaatcgtgcctttccatccactctcgaactagcagccacatcaaagcctcccacaacccatgtgggagatgtgtggcacacatgtggctatatgggcacacatgtggctatgtgggcgagtgagggacaaagcattcagacttgcctgacgctcacaaactgtagcgtcagaatgcagcagtggttgtctcgtggcgaattcggacaaaatgaattttaacgtataaggcttcttttctcagtgcaaaacaactaaacaacaacacaaaaacaactagaaaacaacttaacca

SEQ ID NO: 54852 - DNA, 2595 bp, Cannabis sativa
caagttagggtgtgagatatctagcgccaaacacatctcctcctctggccagatattccccgttcaccttacagacaacgatttgggaatcgctaaaggcttgtaaatactcgatcttcatctcaagagcgagtttcaatcctgagatcaaagcctcatactctgcttcattgttagatgcagaaaattcaaatctgagtgcaacatgtaccttaaaattactggggcttatgagtattagaccaccccctgagacttcgctgttgaaggctccatcaaaattcaaagtccatccttcattgtgtggtacgtcaagatcaactctttcttctataagtgccacctcgctacttggaaattcgagcataaaatctgcatgggcttgtccctttatcggggatttaggttaatatttgaagttgaactggcttagctccaccgacaatttcaacaatctacctgagacctctggttttgctaaaacttgcctcagagaatagtttgtcaaaacttcaatactatgagcttggaggtatggtcggaattttctcgatgctattaccagtgcgaatgccaatttctccatctatggataacgagtcttagcgtctaggagacacttgctgacatagtacactgggtactacttcccctggtctttgcgtattagtaccaaactaatcgcatattcagacactgcgaggtagatggacaagatttctccaggcattagcttggaaagaatcgggggttccccaaatgtgatttgagggcttgaaaagcttcttcacacttctcagtccactgaaacttcttattcccttttaaaatttgaaaaaactctttgcacttatcaaaggaacgtgatataaaacgattcaaagcagtgactttacccgtaagggtttggacctctttttgtttggtcggatattccatttccaccatagctttaatttttgcagggttagcctcgattcctcactggtgatccacaaagccaaggaattttcctgatctgactctaaaaacacatttgtgagtgttgagtcgcattttatatcgtcccagtatcttgaacattgcttgtaggtgggtgacatggtccttcgcatgttgagattttacgagcatatcgtcaacatacacttccatggtttcaccaatcagattagcgaacatcatgtttactaacctcttatatgttgctcctgcatttatcaaaccaaaaggcattaccttgtaacaatacaaaccttgatctataataaaagaggtatgttcctggtctggttcatacatcagaatttggttatatcccgagtatgcgtccatgaaattgagaacttcatgaccagtttgggtagaacgactcccttataaagccgcatgctaaaaggcgatctactttctctttcagcatttggtacctcgcggggtccattttgcagtgcttttgttggacacctcgcacttcggggtccatttctaccatatctgaatgtttccaagaaaaaacatataggttttgtttgagaaaactaacaagcttttctcgctcaatggtatcttccgcggcttggccggtagtggtataatccaggacccttggatccaagttggcttttcttcatgcagtatctcctcgattctgaatacttcttgtcgaggaggtggtgcttctaacatgtatatcatgttacccgacttcttctttgcgagctttaatgccgcattgtaacactctcgcgagtctgactggactcctcgcacagatcatattcctgagggagtagggaacttcatggtaagatggtagatggatgtcacgattttcatttcctttaggataggaaaaccaatcaccgcattctatgctgaatactggtccataacggcgaagtcagccatcgacttagccagacaggtgcggttcataaagtaatggggaccttgatcatcccttttaagggaatggtgtctccggtaaaactgtagatactcgaaatcaccggtcgtagatccttctcctgtagccccatcttcttcagagcttgaaagttaaggagattcacagaacttcccttgtccactaatatgcggtggacgttgtctcctccaatgttggcgacgatgaccaacgcatcggcatatgggtggtgaaccccactggcgtcactttccataaatgtgatgtcatcgcactcttttttgaacagtttttcgagcctctcactcaaatcgtttacattagtgagtggcctctctcttgcctccttggcatatcgttcctatgattttctggagtctcctgcgacgtgaggacctccaataattgccaatatattgcgaggagttctcgatccactcgcgtaatcagtttctttcttatcatccgctcggggatgactttcctcatttctcttgtattcgccaaatttacctcgcctgatcagttcgatctcatcctacaaaaaccaacattccagagtagtatggccaatatctttgtgatacttacagaatttcttcgggtctctcttgtcgcgatttcccctgatcggcggaggttccttgaagactccattcttttct

SEQ ID NO: 54853 - DNA, 1123 bp, Cannabis sativa
cctaggcagaacacttaagttagttacaaagtatttaaccactttgtaactaactcttatgttttctctgcattccactacaacagatataaaaggcaaaaaataatctcaatcaaagacaaagagaaaaaccagagaatatacaacagaaaatagaatatttctcaagactagaaatctcacagatcagatccaaaggagagagggttgaaggagactttcattgagtgagtttttgagccctagggttagggctcggatgttcaacaccaaaaccaggaggatcgagtcatgcgaaacaaggagaagaagatgattagagattaaactcagagagggaaaaagagagagaaacacatactgtaattaaaaagggatttctaaattcatacctttgttttggaatccaaaactttgtacacttgatctttgaagaattatagtggaatcgagctatctgaggcgagctcaagaggatgtacccagcaattgttttttggggaacctttataaatctggtgcattctttcctttaattttctgcattttctctatattgtgtttatgtgtgtatatgatttctgggttgggttttaattggtttaaggtgtttattcatctctggttttttttgggtttcattgttgtgttctttgtgttcttcaaagaagaacaatgaagaaagaggctcggtctagaggatttatttttctgggttgtatttggtttttgggctggtgttcttcatgttcttcattgaagaacattgaagaagaaggaggcatttgtttctctgctagggttattttaggaggctgccgtttgaatgtttaggaaggaaatataatatatatatatgatagattagggttgctggtttataaaatgacctgtagcattaatattaaaagtaaagaggggttgtcgtttattaaatgttgagggtcaaaagaaaactttgactggtaaaagggtcagatttgaccaatagaattgatttagtctctgctgtgtgtagggcattaattcctacagtggtatcagagccaaacaaggcacaatctgcagcaaagattaatcaagaaagcataaagaaagcataaagaaatcatcaagaaagcat

SEQ ID NO: 54854 - DNA, 947 bp, Cannabis sativa
gaaaaagtgtggaaccactctgtcatctctataatcacaaaatattttataattattattaatattcaactaaatataattatattttcaatatatatgttttatttgattttattgtaaatggcgcatttgttgtctaattattttaataatatattaggaaagttagacaaatataacatgtatttattgtgataaaatcaaatattttttgagttactccttttcagtcgagtttatctttgaatctgaccattgattaaagattgatcaaattttaaatggagcaaactaagtatttattacataattagtttcaatctagtatttattttgggttgtgcagagttaataatgaatccaaacgtagttaatgcaattaacttgagacgcttgtcgacatcgaaagagagaagtaaacttatgaaaataatagaggatatggataaaattaatcaaggcatgggggtaattatgaggaaagagcgtgtgttgttaatggcacacgagaaatatatagttatgtcacactcactaaggtctgaggaagcaagagctcacctaaatcgaatagggaggcaagtgaacggaatcagttatatttcagaacataacaagtataaagagtcgattgagagattcttcaacactgccaacctcccagagacagcaattggcaattaccaggatgcaaaattttttgattatgagccaatttcaagagacatcttggaggatggttctgacgtggaagatccggatgagcttgaagaagaaatacaactaccagtaaatcttgagttggtggaacagcaaggggaggactcagaatattgtaactagtatgcgtaattaaatatgtttcatcattatttttttaaaaatatatactttagtttacatgaaatattaaaatattcttataatctctttgaatatatttatta

SEQ ID NO: 54855 - DNA, 2383 bp, Cannabis sativa
ctactaccagtgataaaatgattgtaactcacatttctgataaagtgttttgaacttcagctatgaataaagttaatcattttttcttttgaagtaattacaaagtgttactctttaaaattacttgagaggcatatgtgtatgattaaccgaaatttattaggaaatatacatgatatagtgcaaacccaccactttaaaaattttgaaatttttttaaagcttttgatcaaacctttctgacaagaaagggatcaaaccattataactctttgattaaaaacctgtctgatgagaaaaaaaaatcaaaagttataaatgagatataactcataacttgtgtgaaaagttgaatattaatggctcgcactgtaaagaaaagtattaaacgaggcatcaaggtgtcttgataaaagtacttaaacctagtgtatgaatagataatctaactattcatgcaagcaatcaaaaatatactaagtgataagatcattaaaagtatattcaagtttggttgccacagattattactgttatcacgaggcaaattgacaaaaagctcgtgcgtatagtagtctattaactactcaatattaaaggaatatacgagcaatggatatttcctaaagtactttgtatgtgatcaaaatatgattatttaaattgtgaataaaacgcaagcaaacaattatgtattaaagttcaaacgtaaaagtacaaggcattaaataaagataagaaccaggttagacatccaatctggcatatttgtatttacacaaaataaaggtgccacaaggggcaaaccattgtcttggtcctagggccactttcttacataaaagataaataaaaaggaagactacattgtaggtgacttggatggatcttcttcttctacctcctcggcttcttcctcctccttcctggtcttctcgcaataagcaagaaattcctcctcatcttcctccaagaagctcatgtccaggtctggattttccatcaaggctcgataaatggtacaaaggccaacctttttgcattgacctttggtttcagcctctttcccctaaagcacccctttgagctcctcgcatggttttggcctttgttgccttctcagcatcttcaagactcttcttcatcctctcggtttctttggtaaggcgattaatttcttgttgagcatcgttccatctattgactacgacctcacgttagcctagtgagttttggacctcgctctccaagtattttatcctttctataactcaccaccgggaggcaaaagagatgaaagacgcctgaggattcacaaacaatgatgtataaaaaacaagggggaagaagaaaagaaataaaagatgtatagagactaaggaaataaacttactaagagggtatgagacaaaccccttgttagcatttgttcccaatccccatgattgattaaatcccaatcatggggaaggagagccttaagttggcgccagcaagcggccccaaactcttgggcaaactctgagccaatcttccttgcctcggtagatagcatttcgatggcctggctcgaggaggcagaggcatgagttgtgttggggagcggctcgttggtacttgcattgaccagaggaggagtttgatcctgagtctcagtctcagggacctcaaggttaataggcttaaaggctttcttctttttatgagcggtggttttcctttaccttattaaaggctccacctcggcatctgaaggagcccctgagttggtcgctctcttcttccctttcctctgcataacatcctcgaagtacatgtctgggagtcaagacaaaaatgttaacactaattacaaataagtaaaaggggagtttagggtataatttttcgcctaaggaatttacaattgtcactagaagacgaggtatgactagaagatggggtagaaggaccataataccctctaaaatccctacagcccgtaatcttgaatatatcaaagggatcaactggttctaaattccagctcgcatctaggtaacttgccctatccatcatggtaccatattgctcggctataccgtaatacgactcattatagttaatctagacatgaaatctagggtaccaactatcaaaattatgtgttatgagatctacgaggagaaggttccaaatgtaaaaattgaagcgactatctcagaatgcaactagagtggtacgttcagccctcagcagtgtgggtgaccaaccacattgattacctcgggatgctccttcactgacttctcgaggggcagtgtttggaaggtactgtgcccaagccacgcgatcccaggccttatccccgtttgggacaagaacctactgccaagaagaatac

SEQ ID NO: 54856 - DNA, 950 bp, Cannabis sativa
tctcggcattcctgctgacccgctcttccgatctttttttttttttgaatattttgtttgtttaagactagacccagctttttttttattaaaaaaatagttttaaatcaattatgtaattttttatgtatagtttaaaaaaaaaaaaaaaaattcaatagttccaaaacataatcaaaaaccattaaccaaaactaaaaataaactaaatatcaaatttcttagatcgaaactgatggcttagcagaagaaagtctggaccttttcttagccaaattaatataggccaccctcttcttcttatcagcaattctagccctcttcctcctctgcaaagtcaatggagtaacaagcctctgaatcttagttaagtgttaacatatttcctaacatcatcgtccttcgaaagattaaacaacttacggatttttgaagccctctttggacctctcattctagctttttataagtgatttatgaggtgttcttactttatgaatactcatgttaacattgatactttctatttttttaattttcatgttcgtaaaaaaagaaactagttactagttaataatatgttacttctttatacaattttgaatgcaaggaaaagttggtcgatatgcaccagtgttcgagaagtaccagtaaaaagcagagtaataatttcactacgatagttataaaagaaacccaaaaaataacattaacaaagtgttattattgaaaaattagtaatattaaaatgtaatatttcttaatatgtaacataacaataatgtaattaaaaatgttattatatgaatataacataaaagaaatgataacattagaaaatagtgattattaagaaattataacaacataaacatgtaatatatcttcatatataacatgataataatgtaattaaaatctataccattacattttgaaaatgttattaa

SEQ ID NO: 54857 - DNA, 972 bp, Cannabis sativa
attgatatatcaattctagtgattagcccttcatgtgttggtttgtaattagttttggtcaaattagtgtttttacccttctaattacttctttctcctttagtaccattaattcactagtgaaagtataatttagatcccatataaatttgtgcacaactttctagtcctagaattaacacttaaagggaaccaacattcgatttgttaagaaaatcaagattccataattataaatcatgttctcagccatccatattattacattcccaaaataaaaattgtaagaatcatcttctctaagaaactttaacgagtgaatcaaagaaattaataatatgaataggagttcatgaaaaacttaggatttaggtcgatctaccattgatcatcgttatgatatgaattaggtcttttgtagtaaacgacatgttagataaagataactttattcatatcggtccttgtcatatatactctctattatatacaacaccttcacttagatgtcatactatattagtaattcaaaccgagattacttacaccgaaaaatggacatcagtgaactgtactagcaaccattgattaaagattccataactttaatatgttgttgactgttttattcatagctaagtgatcttagttcgctgtacagctacaagtcacagcctcatatatgaataacgaaatttttgatatttatatataaactatttaataataaatattaataatttaacattcatgcatatatcaaaatactcaaccctttattaataatcataaatgtctttataggtttttcaaggtagaaaccccaacaattacaacaaataacaatcggaccccatcaaacacaacataggaccccattagacctggccactaaaaccacattctaattagacattggaccgaccgtcggtcatatattggaccatctaaaccaatcgggcatatatcaga

SEQ ID NO: 54858 - DNA, 931 bp, Cannabis sativa
agtttggttggactattactagtttctgttagttgacaaaataaacaatgcctttgcagcaaaaaatatgggttcgtttaatgtgaagaggattgcaaaagaacaagaatggtcaaaactgttttatgaagacaacttcaaaaaatgcctgatggtacttcatcatatacacaggcttattcttacttgttaattttgatttatgttaatgatgcatattggtatcgatgtgttcaaataattctattaattgtagtgtcaaatatttatatggtctgtaatttgaatgtatttatgactttactatttttcttatcaattgtagatatttgtgcgggttttgacgctagaaggtccaccacattggcttggttccgaagttaatatgaagtcgaaggttgtctcatttttggactccctatacaccacaatggatgagaagtatcgtgttgacgctacgaaagaaattgtaaagttacaaagtgtcattgtttgatgtgaattcattgttgattgaatctaactaattgtatatgtttgcagctgtcaacgttggaccttttttcgatgagaataagtcaaaaaaagtgagttttgtggattttggaattgatactaaagatcgtggccttcctcaacaagaaaatgaccgagattgcggtgtatatgtgatgaagtacatgaaggctgtggctaatgaggaagatgtagttgctcaagtatacccttgtttatttagttcagaatgtattactcaagtttcattgatattagggttgtgtaattaaaatttaatttagtgttctactgtgtgtaatatgatacgtactgtcaacttgatcagagtttattatattttgaatgtttttgtttttgtttatgtctttttccacagtttgacccgattgaggcgcgtttagaaatccctgtg

SEQ ID NO: 54859 - DNA, 594 bp, Cannabis sativa
atagaaattcaaatttcccttttttttttgtggcaaaatctctttatgtttatttttctttgcaaatttgaagcatcagttaaatatcactgttcaataccaattggatgactactatgtacacctacgtatatgtgatttaacgacgatatttaactgatgtctcaaatttgcaaagaaaagtaaacttaagagagttttgccaacaaaaaaaaaaattgagggggttaagtgtatgtatagaaattaaaacatgaggaggtttcgccaccaattactcctatatacatggaaactacaaaatttatgattggaagaattttccatggtaaatgaggtgggtactttgttttgataagcttgcttcattttctttgtatgctcaacatttgcagcttttgagttttgaagaaccttggactctgattttggatgatgcactatctaattctttcattgcaccggtcactgatgatatgaaagatgaccatcagttaacatgtaagtttctctttgctatatcgaaacttctgttttgtttttgtttctgcgttcttttcccctttacccaactttattaggcctcacttatgg

SEQ ID NO: 54860 - DNA, 1649 bp, Cannabis sativa
ttggtttcagcctccatctctttgagtttttttgtcatggttagccgggaggaacttgagagaatcttcaagctccttgatcttcttttggtcagcctaacactgctttttagcctcctcctttgtgcgagaaaccttggcctcggagtcattccactttttggctaaagtgtccttatgctccctagtctagcgaagctcagtctcgagcatttcagcccgctgagacgagcgatgatgagtagcaaaggagaggagagaggcctgcaagaaggaggtaaatcaaatttagtaaaggtgataaaatgaggaaaagtgtgaacaagaagaaaaggaaactaacctgatgcaagagtttgtaactcttctttgcaagatcctcagtgttgcctcgcgtgagaagctcccaatcgctagacccaatggtcaagaagttgtgccacccattagtagaatgcagcgaggagagttgcaagccttcagttccggcctcgaggggtaatggacaggagggctcgagtagaaccatctctggacgagaaccagtgaacttcacctggtgcactgacccagtgggttgttcattggcattcatcacagtaggacctcattctctggagatttgtcttgctcgatggtgagttggcttgataatttctttttgttggttgtggtcttggtcctctcgggttccttagtagaacccgaggcctcaccaacttaggtggctctcttcttagacttcttgtcaactgggggaggactcttgaacatgttctccaaaaccaaatccatatctgaaagacgagggaagtacattagcattaaaggaaaataaataaaagaaaatggggaataaactcccatttgggaaagttaccataatcttcagaagttgatgaaggatgactataatattcactaaactccctagatcctgtgatcataaatatttcataagggtttagtggatctaaatcccaacttgaatctatatgacccgatctatccaacatagtcccatactactcggcaatcccatagtatgaactagtacaacaaatctgaacgtggaattctaggtaccaactatcgaacctatgtgttatgcgatctttgagaaagggattccaagtgtaaaaattgtatcgactatctcggaaagacactagggtgttacgttcggccctaagcactgtgggtggtcacattgattacctcaggatgctccttcttcccgaggggcagttctctcgagataatgtgcgcaagccacgtagtccacgctctcttcatcagccagaactagaaccttttgccacgaataatacttgggtactttgtagtcacaagtaaattcatctgaggcaataaggccaacatttctcagattgatctcgttgtataagaagtgtaccgatctcagaccgaatagaagattcaacaaaattttgtgacgctctgctatttaaggagtgggaactggtcttcgggaaaccgatgtgaatagataaaagtttaataagcaacctcaaaaatacatattagtatatttcaaggttaagtttctatgaaagagaacttacgtataatgcgaaaggcggttgtatttattagagagaggtccgtcgtctagaagaagtcttctt

SEQ ID NO: 54861 - DNA, 580 bp, Cannabis sativa
ctagcttcaacaattgttgtttattctttacttgctatcattgttaaagaaacttcctaaatgaagatttctcttgtgggtgaatgccttaaaagtgaaaaggtatttactttatctagagaagaaaatgagggaaagagcttatgctggtcaatctttagatatggttggtgtgagaataatctgtgcaaattaagtaactacatcatgtttttaggaataagttattttgttagctaattttgcattattatgtgaagatggtgcatgagtgaatggtatttggaatcagcttattttccttttgtgtggtacatggttttttggctggtgcggtttggtacattttctttctaaatttttcataaatgaccaaatttcattgatttgttgctttgcttttgtaattagttcaataaatataccaaacgggcatgcaatattatacttgtaagagtaatgaaatgatatgtgcacacataaattatacatgaacttgacgcacaattatgtggcaagccaattttaaaaagtgggagcgatctatcttaaatagaaatgattagttaagatcacttgc

SEQ ID NO: 54862 - DNA, 1004 bp, Cannabis sativa
taacacagtacacagtataaaatgtacatagtgttttttaaaaaaactctatcccacagtaaaaaaataaaaaagttaaaaatttcagtatgtgatgtaaaaaatccctttaatctaatccaattagactttaaaattcaatctaatccaatccaattataataataattaaattggatagaatttttaattaaatatccaattacacatctaatttttaatattaacttaaaaatataaagaaaaatacccaaaaactaaatatcacaatttatttaggtttaatactccataataatatcatccttataagtttgatacaattaaaagttccaaataactaaaataataacactcacaagaaataaattaaaacaacaaaaaaaaaacatgaaaatataatacaaaacaactaagtgttacaaattcaaaaccaaaaaatcaaatagccacaaaaaatatatatttttaaaatttttaaatatttttattatatataaataatttttttaatatatataaatttaattggattagatggatttttaattgaattttaaaagggagagtttacaaaaatactggatttttggtaaaaatttacaattttactgccacacagaattttttacaaaaaaattgtctttttattaaataactgtaaaacaacaaaatagaacaattaaaaacaacagtggaacaactaaaaatcaatcacagaacaagagtgaaaatttaacatagtacacaatataaaacttatacaatatttctttaaaaaaattttccccataataaaaaagaaaaaaaaattaaaaatttcagtatgtggtgtagaaacttatttgaaatgacattcaataaccgattcaattcaattaattactaacatttaatatctaatctatttaaaatgtaattaaatatataatttttttataattaaattaggttagataatttaattcaattagggctcgtttggtacgtcgtattgtaatgta

SEQ ID NO: 54863 - DNA, 2109 bp, Cannabis sativa
  modified_base (1133)..(1157): a, c, t, g, unknown or other
tcttgatgactattaaggtattctcgtaacttcttgtatgttgtatccattaatctagatgatgaggatgatgcaattggactcacaccagtgtcttccaaatcattcaaccatacacaagaaataatatgagctattagataaagtgtataatggtgttcttgttgagttctcaacacatgagtaagaacaattgagagaaaataatttcttttttttttctctctatatttcgaaaatatgcatgtaaagtgtaagtttgatttctcaaattagacttctatttatagtatttaaaaaccttttaattaaatcatatttaattgtttaaataaataaataaatatatgtaatcgaattcggttactgatatttatgagagaatatctcatccactttgaaaatatctttaaccaatttttaaattcagatatttatctaattgaattaattaaataattaattaacccaaaagacaaactccataaggacacactacatggaaggcgcctaccttgtcttatttaagacaaggttggtatcttttgtcctgacaacttttgtctcaacaaatattatcttgacaaattttgtcttaataatttttgtctttttcctatttaatatttaacaaattatttatttattacaaaaataaataattactattttaccaattcaaaataaatttttccgaacatcattatactactctttatcccaacccttgataatgtttcaaggtggcgatttggggaccatagacctataattctaagctccaataaattaaattatttattgagtctcatcaactaaataatccttgtttattaattccatggttactccactaaaaatataaaattgaactcttagtaattatagaattatatttatagtgttttactgcagtatccattaatataataaattccagtgattagccctacatgcatgtgctagtttgtaattagttttaatcaaattactgttttacccttctcattacttctttatcctttagtactattaattcactagtgaaagtataattcagatggactcgtggactatgaagatttaacttcaaaaccacgtaaaaatcttcttatttattattattattattnnnnnnnnnnnnnnnnnnnnnnnnnttattattattattattagtatctaaattctaaagatcattaattacaaaaaggcgtatttattagttaacgaaaatctacgttaacaatacccaattatagctaacgttttaaacagtcacgtaattttattagtgacggccctcgaaaaaaactgatttgaaaattgacaggaataagcctttttgtagtagtgtagcaaaatacttttttgatagaaacttcatcatctcgatatgagtacattagatttctttatatagattttaggatatcgccatttgaaatttgataggctagttttaggtgtattttttgaagtgttttagaggtggattttagttgattatatgcattttctgtagaattatgattgtttttttacttgtttcaggtttaaatggtaaaattcaaaatacgaattgaaaatgagaagaaacatattaaataagataaaaactatgaaattatcatagaatttggcattctaagatataatgggtgtttaagttttgaatgctcaacacactccatctgtgattaaaaatcaagtctaaagatttaagataatttttgactatgatatgttcactttaagaaaaaacgttgtgaataaaaattctagatcattctttcagcttttcaaaatatattgaatcgtataattccgagaaagattgagagagttatagtcaaattaccatcggccgtttacattaggtatttcagaatgaaaaaaattgtacattgtttgaattagagtcgcggaactaacgtctgcacaagttacgaaaactcaattttaaaggggacaaagatgtcttttcacctaaaatcgctagagttactatctaaatatctttaagtgcgattttcatcagtttttcattctcaaaaacttagacaaacacttggagcaattggagatcaatctttagaattatcatagagt

SEQ ID NO: 54864 - DNA, 1153 bp, Cannabis sativa
  modified_base (490)..(514): a, c, t, g, unknown or other
  modified_base (656)..(665): a, c, t, g, unknown or other
  modified_base (823)..(824): a, c, t, g, unknown or other
tggatgtgattcatgttgatctatttgtttattggtgattgatttatgtttgcaaaaaatttacgtaaaataatttgattttcgttctggaattatttttattggatagtacggaaaaaattaagcaattcacttttacaaaacttaattttgattttatttgaatgagttatgattttttaaaaatttaagaaatcttaggggtggtacacaccccatgcgcgtgcggatgcacatgacacacgggtgtcacccgtgttcaaacacggcctgtccgaagttgcacgcccaggtgctgtctgaaccccatctatgcgcgcagaatgctactggcagcatccgtgtgcgtgaaatcatgcccagcatcccatcttgcgcgcgcggatggtatgtaatgcatatcatccgcaccaaatacaatttttttttccatttttccattttttcactttttcatggaattaatttcgaattttttgtgtagttttgnnnnnnnnnnnnnnnnnnnnnnnnntcaaatctaattatcagaattaaactaattaatattctttttaattaatttaagatattagtgatattttaaccttgaaaataggttaaaatctatcttttcgcttagtttgttatcttctttttaaaatttgattattttnnnnnnnnnntaaatttaaggtcagatattttatttttaaaattatttaattaatttttatgaaatgaccttatttaaaatttaaaataagattattttaatcaagaaattttaaattgtaataagatattttgctaactttcaaaattttgttattttatttaaatnnaattataaaattagataaatgatactttttttatcattttattttattggatattttattctattttttaaaataacattaaatttgaaaagttgttagcatttttttaatagatatttaggtttgttgaaaacctaatttttcaaatttataggtttaattttgaaattaataattcaatttaaatttttttaattttttttcgaaaataataattttttttaattgtttaattaattgagattaaataaatcctatatccaactatccaatttgttgcatgtgtgtgttttatattgtttattattaaaacaagttttataaaacct

SEQ ID NO: 54865 - DNA, 864 bp, Cannabis sativa
cacaccccatccttgaatggcgtaaaggacggacagggcaaacaagtacttaatgccttgggagtgaaccgggtaagacaaaggcaaaaataatcagcaaccctcttgaagtacgggtgcaaaggcagcatcgccccttgcttagtgtgggcacccaaccaagcacagaaccctttctttgggttacttacccagtgatttgaagaagggacgtaacactcaagtccgcccaggtacccagctttatctaggcccctcatgcgcccctcgcttattttggacggagggcacacccatctggcccctaaagcactttgcctcctgtgggggaccacttcagtaaactccttggtgacatagtcttccccctcaaccaagacgtcaccatccgcggatattggctacccggcctcattgtaccctccaagatttggaggtctgatcactcttcttccttagcttcggaagggctattagggcggatgtcgtcctgctcctctatctcttggacctcaatgtcccctttgtgctcctcctcctcaagaatctcgaaaagccctgtaaacctagggcataacttgcccttttttttaatcgtctaatccccttcatctgagatacccgtaggaacacatgatctcctacccgaaattctacatttctgtgcttgggatctgcataactcattttcctactctgagaggcaagcattctggccttgatcttctctatggcttcattagtctgttgcactaattccagacctaggtatttcttttctctcgttttatcccaatgaataagagatctgcacttcctgccatacaacaactcataaggagccatccctatagtactctggta

SEQ ID NO: 54866 - DNA, 1953 bp, Cannabis sativa
aatatttttggagttaaatcaattagtatctccactaatttgctactctgatatgagattacgtaatatagtcatgttcttagaaaattagttttttttttgggagttaagaaaagtagtatttatagaaacaaacactttcttgtcttgttgaccatagaatagttaaccctagtcactttagaatagctaggaaacatgaaaatctcagttagcaatttagcttttctcaaagacatgatcagggcatcaccaaatttagtaaaggtgtaaactaagtatacaaccattgtagtgtttcggggttttgttaggaccagacttagatgggatgacatttaaaatgtcttttgttgtctttaaggcatatctctagaaggactctgacagctgctagtaactaatgatagaccttaccatttccatcaatatgcaattctaatattctgaggaggtaagttgggatacaattaaaagattaacttaatgacttcatatccaaatatttttccactcctagtttgtaggatctttaacgacttacctaataggtttaagccattgttaaaaatttataaaaatttcttaaacattttaaatttctaacgtaaggtaaatatctagagtaattgccaatgaaagtgaagaagtgctcataaccatctctaacctgtacatctatgtggtccaaagacatctgaatacatcatccaagtagttatctagcacgtgcgctctttggggagaatgatcttgtagaaaccaattataaattatacatgtggcactaaagtgccaactggcggtaacaaccatgtcatcattttatttgccacgtatgacaaaacttgacaatatgaccaatttataatattgtgaatagttcaaagaccatttttaacgagttaaaaactttaggggccacgataatgcatagttatagttgggggacaaaaatcttaaatagcctataatatatgaaaaatgctaaggggcaccttaaggtctcaagcaccacaaaagatggcataccactattggtgcaaattaataccaggtgccacacattttaatttaataaataaaataaaaaatctctaaaacatgccacatcagtaaggtgcccaatgctcataatatatcgggttgattttgtttaaataattttatcttattaacatttatttggcattattacaagggatgttcatcaaactgctcacaccgcacaaaccactcataccgcaccacaccacatgaaaaatacggtttgaaatcttttgtggtacaattttggtttgcatttttactaaattgcgctgtacagtgcgatttacggttttgaagttaataattacagttcaaattgtactacactatacattacaaagttaccaatttttacaatataatttttattttttatttttcatatgaaaacaattgtatgtaatataagtgtatattatatcaatttttagagataattcaatctaataacttgatgattagtatatatatttatgatgtttaaactttaataagattttttcttgtaatgttaaaattttattagattgatttttaatttttttattataatatttgataacgattatagtgtgtaccgctcagactgcaccgcacaccacacactgtatttttacacagttttaatatctcgaggtgcgattgcgatttgagaaataataaaaactgcatatgcaatttggtttgaaagaaatgttacaacccccgcgacgcgagcacccataaatactattaggcattatatagtgtcttcaacaccatactgtgacatatgttgcaattagttaatcatttcttatattatttgttaattgtatgaaattcgatattaatttataccaataataatatgttacctcttgtcatgtttggtaccatgaggtgctctaagcatttctcttt

SEQ ID NO: 54867 - DNA, 1127 bp, Cannabis sativa
tctcagaagttggagaaattttctgaggaatagaaactttagatttcttcttcccaggtccatcacgtttcaatacaggaggagcaaagtccgagtcatcatcttctacaactgggcattttcctttggacttatttgctaacacccattttcaattttttttttttggcaatggagaagggacgatgaagaacgagtaatagccatgattatatatagtttcacaccaaggaaaacaaagtacaaaagattatggaaatcggttaggaagttagaaaagaaaatgacaaaaaattaggtagggaaaaatggattttgattatgagtggagacgaagatcaattatggataatttttttttttaagaacaaaattgaaaagaaaacgaaaaaagaagaaaaaaagagagaaaaagcatggagtgattgatatgggtcaagggtctatcacctgacgtgtgtagacacttgtgatgcatgtaatgtgtgtataagtagtaaaattataaataataaaacttgaagtgtaaaaaagtaagtacatacgtgtgtgagtatatattgtaattaaaaagtcattttatatttttggtgtaaaattttcttatttttaggggatattgacatgttttttttttaaaaaaaataaaatatctcatctattattcttatatatttttaaaaaaaattatgacttgagttacctcggtatataagttgttttgtggattttaattgtgatttaagttgctctgttaggtgttatgtgagtttttatgtaaatttccgtaaaacaaaaaaaatgctataaagtataaaaatttaaaactctcatttttaaggataatttgcagccaaactttttgtacttttaagttcagtacgatctaatcctcatacttgaaaaattatagctaaaatcctcaaccaacacaatcattttggtttgcactcattccattaatttttggcagttaactgtcaaatagacatactacacaagtatacatgtagtgaaattttattgaaccacgtaatattaatacttaaaaataaaaataatttaaaaatatggaaattaaataaaaattaaaactttccttcttttgaactgaaaaaaaaaaaaaa

SEQ ID NO: 54868 - DNA, 825 bp, Cannabis sativa
  modified_base (60)..(60): a, c, t, g, unknown or other
aaaaaattaaaaaatcagaaattttttattttttttcttttttactttttttaatttaanaaaaataaaaaaaattaatatttttaacttttttctttttctttatcttcttctttcttcttctttttttttctgcagaaaccctccagggtagacaaaaacctcagttatggcattaaatcgaaaggtcttaccacaaacctttcgcttgaggtaataaataacgagctcttcgtcagtggggtggaacctccaactcaacaccccatttcctagatcctcctagatgggtaaaaacaagttcagattgttagatatgataccaaatgcatggttttacaagttcaaagacatgagcaaaacaattctcgtcccaccacaaagaaaaagctcactccattcaattgtaaaacccagccagcaaaaaccccaactttctcacccaacaacacaccctttctttaccgacaacacatcattctcttcctccaactcaacaccccatttcctagatcctcctataaaatcatccaagaaaatagctagaaggaaagcaatctccataccccacaaacacccgagcccgaaccgatttgtctcaacccgagcccggttcaatctctagactactctgttttcggaacagagagttgttccgagacaaaatttcactgtgatgactatgttaggtccgacccttttgtaggcttagcctcttggtcaagctcctgtaactgtagctagagctagagcttcctccaatcttaacaaagcccataaatttcaacaacaccatctttcaagccactaagtacagaccgaaag

SEQ ID NO: 54869 - DNA, 1397 bp, Cannabis sativa
  modified_base (391)..(398): a, c, t, g, unknown or other
actcactgactaaactagctaatacaacagattctaatactctcagtgtagctctcgtcaaataccttgccaaatagagcattaatgaagactcagaccctatcttgatgatcgacaatagtccatcatggatgaccccgattgcacaatacttaaaacaaggtattcctctaactcactggaacgaagctaagagattgatgagaaaagtagctcgcttcatcaccatggatggagtaatgtacataataagattttcaatgccacttatgaggtgtgtcactgtttaacgtccaaatgtgacttccactagcagtggttgtaatatagattaggcggtcgattccacaaggaggtgattatgaacaaaagcattagtagaaaaataaannnnnnnngttaataaaaagtaacaaataagtaaccaaatgagtttgagtatttttattttcgtaataaatataaaaagaacgcaaataaaatgtgtaatcaatagtaaaagagagaaagacttcaataatcatccatatgcttgtttggttagtttgtacctttgattcacaaagttgacacaaatgatgtaacattcaatctcattatatattgagtatgcaatttcttaaaaataaaaaaaaaaataatcttatgtaaaacatataaatgacattacacatcaaacaataatgtaataaacgattgaacataaaactaaattatattatttttactaattagaaacacataaaaaaaacatgactaatcttatatattataaataaaaatatagtcaagatagagatggtggtggcagtgaaggaagtaaatattaatattacttttattatttttagacacatagggagagcatgactaaatatatatatatatcatttaacaaaaaataaataaacataaacataaaagatagaaatgagcaatactaccattattataatcactaaataaaaatacataagtagagcatgactaaatctatatatatattttatatataataacatatatagtagtacagatggatgaaaaacataaagacaaaattggaaaaaaaaaattgcattactcaaataaatattacaacaagtgaatcaaacatacaaaatactatttctttacatatggaatcatctctgactttctaaggcagattattaaaccattatgctcattattctcataaaaaaatctaaaaacaaatatgagaaaaaaaaaagtgaagagggattttgctatagtatctttattatcaaaattacacaatttactattaaaatgggtttatatttatagagacataaaatgactaaaaataaattaaaaaaagtttagaattataaaaataaatattaatgttaaatttgacatttgaaatcaaa

SEQ ID NO: 54870 - DNA, 581 bp, Cannabis sativa
ataaatagcatggaaataccctaaatacagagaaaatgtaaaaaaaaaaatgagactatggcaaatctgcctagaaaaacggcatgccatttataaaagtgacaaactattttttttggataattttccagtaagaatggtccattcgagctcaaaataactccaaacttcaaaataaactctagaccacctaattaaacatcaaaacatattctaaatagtataatctaaaaaaaaacataatttttaccattgttgagccaagtttgagttcttaaactcaaacttgctcaactccacacacaaccagcaaaaagaccctgaactagcttcaaaaaacttaaagagcacccaaaaaactaaacccaaactcaaaaggtttggacataacctcaaccaaaaaaatgcatgcttaaacttagtttaaagcttccaaaaacaaaagagaaagatctagggttataccttaagtttgatcctccaaattcccttagaattttgttgaaaatgacttgaattgataagaaaatctctgattttttcttggttcgaagagggtcacaagagagagagagagagag

SEQ ID NO: 54871 - DNA, 1172 bp, Cannabis sativa
gaaacatgctatggatgatgagattcttgctctcactagaaacaagacttactctcttgttccattgccccctgggagacaagccataggttgtaagtcggtttacaaggagatagaagacacagaaggtactgttactagaccacaaagcaaggttggtttgctaaaaggctttttcatcaacaacctggatttgattttactgagacattcagtcctgtggtgaaacctattactattcgagttgtttgaacctttgctttgactcaagggtgggaaattagacagttggatgtgaataatgcattcttgaatggtgttctttaagaagaagtccatatgacacaaactcctgcctatgagatcaatacctctcccaacctagtctgcaaactccataaagccctttatggattgaaacagggtccaagagcttggtttgaaaggttgcataagtctctgtctaagtttggctttgtttcatccaagtctgatcattctatgttcattcatcactcacctcagtccacaatagttatcttagtttatgtaaatgacataattataacagccaacaaccttgagattgtttctcaacttgtcagaaacctgaataatgagttttctctcaaggatcttggagaactcaactactttttgggaattgaagttaaatacaccaccaatggcctgcatctatctcaagggaagtacataagagatctgttgaccaaaactcaaatgcaaggagccaaatctgcctctgcccccatgacaagtggactcaaactattagcatatggtagtgatcctgtggacaatacacaactgtacaggtcagttattggagctcttcaatacctcacaataaccagacctaaaatttcttttagtgttagcaaagtctgccagtttatgcataaccctttgcaagttcattgggtagttgtcaagaggatattgagatacctgagtggtactatgaactatggcctgcatctaaccaaggctccacacagggagattgttgccttctgcgatgcagattgggctgcagatgttgatgacagaaggtgtaattctggctatgccatttactttggttctaatcttgtagcatggtcttcaaagaaacaacatactatctcaaggtctagtactgaagctgaatt

SEQ ID NO: 54872 - DNA, 815 bp, Cannabis sativa
agtcagaacacagctctttggttttgtggtctttaattcttcattaaagaaaagctccaaactttgtttttatgatcatctattcctattgaactttatcaccaggcatttgtgtaaagctaattgactttatttaatctagtgtgaatctaatagctttttaattaaattgcaaaagtgatgaggtgtaaggtgaatgatagtgaatcttttgctttgtatttttgtattagagcatttgtgaaattgggaagttgcattttgtatagttgatttcattaatgtgcagaagaaattcaatccaaatagatatagtatgagcagtgtgatgttatgtattaaagagtatgcataaatttatatgttcatcaaattaaatttattttttcttataattgcgccaatttattagagagtgagtctcagagatcatttaatagaacaacgttcataaaaagaaagggaaaatatatgtgaaactttaggaaaaatctataatacattttggtataccatttatttttgagaattttttagtctaatcaagtttatagtattgaaaataaagttaattgttgttaattatttttattgctatcaaccaaattagactggtaaacaaagaatcctaaaattttatttaccttgacaagtatgtaattatgtatggaaaaactattctaaacaaaaagaatagttttacaattctgccaattttatacatagttacaattctaattgttgcactcgctaacatttaaagaagatttcacactttatttgtttttttaaaactaaatttgtattacataaat

SEQ ID NO: 54873 - DNA, 1421 bp, Cannabis sativa
ttataacactgttatagaaccgattttattttaattataactggtctgagttattttatgttttttatttttatttattatgttacagaactaattatatttcaattataataactggtttgagttattagtttttattcatagaaccggttatatttttagttatatctgagacatttacctggtgacttttctggcgacggtgacttttttggtgacgacgacatctccagtgagttttttggcgacttttctggtgccggtgactttttctgcaaaacttattgttgttttacaaatatgagatttctactttttttttttacaaaaatatggcataagaaaccgatataaatgtaattaaaaaaaaaacccataaacttatagtgtcatttattgatataaaaaaataaattataccctcaattctcatatttatgaaaattctccataaatatgtggtatatcaaataccatacaaaatcttataaatactatatttttgtaattttattattaatttccatatttgatgtaattttatcttaattgatttgcttgattcttttataccaaaactcacattacattagtaagaacaggaatataacacaattacacgaatcaccaaccctaatttgcacgtcttacatactgagaaaggattcccacctcctttcaccaagccattgatcttgggttcatcattactcctcttagcataaacatttaactaatgttcttgttgaccaacaaattttttttttacacatcataccatattaagagggaaaaaagatatagagaaaatgagtgaaccatactagccctactatgacctggataagaatataaattaaatatttaagaatttctgttttattatatttgttaaagaggaaaatagtatttagtccattcaatttcgaaacgacctttggagctgtcgaaaagcctaccacagcaacaactggttttttcaacgctatatattataggctatttctttctttctcagtttctctctcatattttcaagaataagattcgtgtcattaatcttccaaaaaagaaaagaaaaaaaaatcaaggaaggaaggtgcgaagtagtggtggatctgagataaatatggttatgcaattgagaattagtagtacctatacaaacccaactcaccatggtattcataaaggccttttaccaccaacaatatcatattgttcactgtcaacgtctttgaaatactccttttctaattccttaccactgttcaagaaaacttcattatctcttgcctccagtcatagtaatacagtccaaaacgatgtcgttagagacctaataacaacatcaacaagaggaaaacgacaatatgggattgtgcaggcttcaacggccaacgttggagcttgggatggtt

SEQ ID NO: 54874 - DNA, 2538 bp, Cannabis sativa
  modified_base (434)..(434): a, c, t, g, unknown or other
  modified_base (624)..(630): a, c, t, g, unknown or other
  modified_base (731)..(731): a, c, t, g, unknown or other
ttttcaagtagagttgcgatttttatttttcttaagtttaaattttaaatctttttagtatcttttaggtaactttgttagcctatataaacagattattattagtgttgttagtaggttttgagagctaaaaaaactcagaaactcttaattagcagagaatcctaaagcaacaaaattgagagagaaacttagagagagagcaaggaagagatgagatcgcagcttctaagtcttcattctagtttttttcttctccttcaactcttactaaatattatgatttttcgttataatatctagttcagggtagttttcttttagttaagggttatttcgaaacccgaaacatgaattcttaattttattattgagtgttaatatctaatttccattatatatcaaattgcttctattcttctatgttcagtgtnatggttattattttaatcttgtttagatggctactaaattaggttttattttaatctaccgtcatcttaggattactattcacctaatagtctaggattctaagtgtttatgacaaattataatttttaattgtgatgaaaaatagaacgtaggttaaataaattatatgcttcattgatttgttgcctnnnnnnntctatctccataaatctcaaagctttatctaagttaaataaattgcatgctccgtgaatttactgcttaggtaaaagagttaattattgagcgcttcgccntgattacatacaatatggagattgggataattgactgcttcaactttatctgtgggattaatagtttgattagaaacttaaattaccttcattaataggaattagaaatgattgttgaggatgtcaaataacatttaactagtttctcatatcgtagtctctctttaaattagtttttttttttttatttttattattgctattttactctaatcataaaaactcttctctaattctagttactaattcgtgaataattgaataaacatacttctgggatcgactcttacttacaattatactaaaataattggaggtattgaaataaaaaaaaatagtaaatttgatacggcatacgacacgcatcccctccctcttcactcatatgaaactcgaacttagaaaaccagaaccagttcggtgatgaacccccaaatcaccctccctctttgtattctctggcttacatcgttgatttcaagtactggagcgctttatcttctccgtcttcctcctcattatcaatgtagttttggttcgtttagaggcatcaaagagagattcacaaatacaagtgggttcgagtgaagagggatgcaatatgagggtttggatttcatacgagaagagggatgtaatttgcagcgttcgagtgatttttgggtttgggtttcatacaagaagagggatacttgggggtattctggatttggatttcatatgaaaagagattgtacaattaagaatggggtcaattgtgttaatagtttaacattgtatttatttttatttttaattcatttcatatatattaggaatagattttagtaattttaatagaagttcttaaataattattatgagtttttaaaatgagatgtgatataaaaagaaatacatgggatttaattttagtcttacacgtgtatcatttggtatttaatttgtaaaaaaaaaatataatatttaagtgtataaaattaaaaatataaattattcttaccacaaatttttgttttaaaaatatcctattaataatttttttttaacataataactaattttattcctgagagttaaacaatacattgatcattatacaaggaggaatatcttccaaccaagaaaccttgtttttcatctatagtgcatatcttgctaacccatgtgttgcagtattactatttcacatcacatgttaaaaaatgcactccaaaaaacagataacaaggacctaataaatataataaatacaatcttattaggagacactctcaaaaagagaattgattgaatttataacaaactttttaatttcacaataattttttatttgagatttcagtattactctctactaaaaaacaaaaaagcctaattgtaaatactattttaaaacatataaaattgccaatgtttcaacttttttagaggagaaaaaactagtcaatgatttagcagaacatctcaatggaaagctatcaaaatcacgaagtaaaccctaaaactaataatactgttttcacaacaaatagtagcatctacatttaactttagtaatttagcaagagatgctaattaatgaataactcgtgaaggaagaaaaatcttagccgtttgcttatatgattttgaacctgaagccaactatcataatattgaaatgaccaacttaaaatcgttgaagttttcttaattgatacggtgaaaagactgaaaaaaaataggggattttttaattatataccaaattaacaaattaatattatagttaccgaataaaataaatataccttatatatgtata

SEQ ID NO: 54875 - DNA, 915 bp, Cannabis sativa
acaaaataggaaaccatattaataaataccagccgaaatatacaataaattataaaatatttttgtcaactaaatatgccaaaaatggaattaacagtatgtatgtatgtgtatatgagattatgtatatatgtgtgtatgtatgtatgtatgtgtatgtgtatgtgggtgtatgtatatatctatgcatgtatttgtatgtgtatgtgggtgtatgtatatatatatatgtgtatgtgagtgtatgtgggtgtatgtatatatatatgtatatgtgtatgtgggtgtatgtatatatatgtctatgtatatatatgtgtatgtgtatacacgtatgtgtgtatgtgtgtgtgtatatatgtgtatgtgtatgtgtatatatgtaagtttaagtttaagtgtacgtatatataattatgtgtgtatatgtatgttcatattttaattaggttttatttttatgaaattaggtccctttcaccggcccgaaagcactgcttgctgcttgttattgttacttttgcactgcttcatgtttatttttttttctttatattagtattgtaaatttaatagttttgttataagttagtatgtctatacatgttagtgaagtaggttctgtgataaaatttactgtagtctgatcggtggatcaattattgtttttcatatgttattgtggaaaatttgtttgtgctatttataggttttaaaaattttgggtttacgatttttaagccgttatgctgccaaaattttggtagatagctaaacaatgtaatttttaattcacataaattaaataaaaaaaaatttaagtaatatatattataaaatgtaaaaggtaagcgaaaaatattttaaatttataaaatttataatctttaatttaaataaataaattagtatata

SEQ ID NO: 54876 - DNA, 1038 bp, Cannabis sativa
aattcattcagggttcttagattccagtcatcttggcactgaaagctagatatttattgcacaatggatgtgtagggtttctagcagctctgattgactccagcaaaatcgaaacattcgggcctgaggatgtcacagttgtaagggagttctttgatgcattttttgaggagttactaggattgtcactaaagggagaaattgatttcattattaagttgacacctggagcagagtctgtttcaaaagcaccttatcggatggctccaactgaatttaaggagttaaaaatacaacttcaggggatgcaggatctagggtttacctgacctagtgtgtcgccctaggggctctggtttttttttttttgtaaaaaagaaagatggatcccttcggatgtgtattgactatcgggagttgaacaagctgacaatcaagaataaatttccattgcgaagaattgatgacttattcggtcagcttcaggataagactattttctccaagatttatttacgttcaggttatcatcagttgagaattcttgaggaagccattccgaagactacattttggactttatatggtcagtatgagttcttggcaatgtcatttggtttgataaatgctctgccagcctttatggaccttataatagggtgttcaaggatttcctcaaaaattttgtcatagtgtttatcgatgatatccttgtatactctcatagaagaaaagcacgagcaatatctccgaatggttttgcaatgacttagagatcacaagctatatgtaaagtttaagaagtgcgagttctggttatcgcaagtatctttcgtaggtcatattgtcaaaaaggatggaattatggttgatccatggaaaattgaatcaattaagaattggccaagaccaaggacagtatctgaagttagaagttttcttagattaactgggtattatcgatgtttctgctggaagttattttacgagaatttagatttactaacatgtatatatgattatattctataatctaac

SEQ ID NO: 54877 - DNA, 2855 bp, Cannabis sativa
  modified_base (340)..(342): a, c, t, g, unknown or other
  modified_base (1349)..(1362): a, c, t, g, unknown or other
taagaccacttagctatgaataaatcagtctacaacatattaaagttatagaatctttaatcaatggttgctagtacattcactaatgccctttctacaatacaagtaatcttggtttggattactgatgtagtgagacatctaagtgaaagtactgtatctaatagagattaaatatgacatagaccgatatgaataaagttgtctttattaacatgtcatttatcataaagacccaattcatatcataacgatagtagatcggcctaaatcttgagttatcacgaactcatgttcatgttattagttcctttgtttcactcgttaaagtttctcagannngatgattcttacaacttctgttttcggaatctaataatatggatggctgggaacatgatgtacaattatggaatcctgactttcttaacagatcgaatgttggtttcctttaagtgttaattctagaattggaatgttgtgcacaaattcagatgagatcttgaattgtacttccactattgaattaattgtactaaaagataaaaaagtaattagaagggtaaaatagtattttgaccaaactaattacgatccaacacattgatggataatcattgaaattgattatatcaatagacactgcagttaaactcactaaatataattatataattactaatagttcaattctgtatttatagtggagtaatcatagaattaataaacaaggaattatttagttgatgagactcaataaataatctagtttattggagcttaaaattataggtcatggtccccaaatcgtcaccttgaaacactatcaagggtaaggataatgagttgtataaatataatctggaaaaattattttgaattggaaaaataataattatttatttttgtaataaataaataattttttttaaattaattaaataggaaaaagacaaaatttatcgagacaagatttgtcaagacaaaagttgttaggacagaagacatcaaccttgtcctaaagacaaaggtatgcgcctagaattgttctaggagtttattgagaatagttgagggattccctcataaatattagtaaccaaaatcggttataggtttttatttatttaaattattaaatatgatttaattaaagagattcaaccactataaataggagcctaatttgagaaattagaatgagacttctcactccttctgaaatgttattttcgagatacataatgttatttttgaaatacatagagagaaaaaataatttttctctcaattgttcttgctcatgtgttgaagccttagcaagaacaaaggttatacactttatcctnnnnnnnnnnnnnnattccttgtgtgtggtggatcattttggaaaacactaatgtgagtccaaattacaattttctcttcatatggattaaagagatacaacttacgagaagttttgaggatactctgatagatttcaagaggtatattctaaacttgtatttttattgttttaatttaatgtacacacatctggagatccattgagatatggtacaatgataatcagataatacaaaactcttccgtaatgtacttgatttagtaccataaaaaccaacaaactcgtctactaaaattgcacactgaaaagaaagaattcaattttcacctgatgtataaaatcctcaaattggtcaatctttgctttgcgaatgacttattcttttttgcaagagaaatgttgcttcagtttagtgcattcagagtgcttttcaagagtttactgactattttgggctttaaaaaaataagaataagactactttctactttgttggaatccaacaaagagagaagcatgctattttagaggtgatgccttttcaagaaagttctttcccgttgaaatatttgggtgtgaagcttcgaccaacgaaatagaatttttttgattgtgaagtcattttgaagaagttgaggatgaaactccacaattgtgagttggtattggagaaagctcataaaacttaggaaggtcttctcccaatgagatatccaggcgcgattgaagtaaataaattcaaagtgagtaaaatgtatgaacaatttttcaaaaaaataaaaacctcttattgtttgagatggttgtttggtgttatctttaagcccgttcattgtgtggcaatccttgtattctcatcttctcactgggacaatcttattaaggcatgtacttattgagtctcctctttgcccagtttgcgaaatggacttggagagtcattcacatttatttttctcttgtccctatccatgacgacttatgtaacttattgggagagatgtgttggcaacaacctttggccgagtacatatgatgattgggttcaatggttgaatagcagttgataaaaaagtttagttgctgatgttttctatgcagctatggctggagcaacctattgcatttggttgaactgaaatttatgtgtttttgaacataactgtatagcttcacattgtatagataccatagttaaggaagagtataactttgttaatgagaggaagttgtctaagagggataaaataacttcaaaatttgtacagaacatgtaattttggcatgtgtgtgttggaagtagcatgcacaattgatgttgcaaatttgtgagtatattaatgaagtttcttttttttttttaataaaaaaactaaatataattgtatattatttaacaaaaaaatatgaatattttttttttgtgtttggtaatgtctaaaattttttattaaaatatagaaaatataaaaaagaaaattatataatttcttttaaaaagcaa

SEQ ID NO: 54878 - DNA, 2212 bp, Cannabis sativa
tactaagtatttccacaataaggccacgggtaggaaaaagaagaacgcaattgtggagattatgactgaggatgggcgtaagttgagttctgaagaagatatagtttgtgagattgagagatactttggtactatattctcgtctacttcccctttgtgcagcaggtagaagagggtattggtaatattgaagccagggtctctcaggatgagcgggagttgcttgaggctcggttcactgctgatgatgtgtttgcggcggtttgggctattggagccacgaaggcgcctgggccggatggtttccacgcaatatttttccacaagttctgggatatcgttggtcctcgggttactgctgtgtgcctggatattttaaatggggagcaatcggtcaagaaatttaataaggcgcatgtggtattgattccgaaagtcagtaggcctgggtttgtgaaggagtatcgtcattagcctttgtagtgtgatgtataagattgtggctaaggctgcggctttgcggttaaaaggtactttgtctccgctgatttcttcgtttcagagtgcttttgtgccagggcgggctattcatgataatgttatggttgggtttgaattgttacattctttgtttaagaagaataatggagtgcgtgggtttatggcgttgaaattggatatgagtaaagcctatgatagagttgagtggtgcttcctttgtgccataatgtctaaaattgggtttccaagccgatgggtggatttgattatggattgtgttacttcagctgagtatgctttcttggtaaatgggaggcctcggggttgtgtggtgccttcgaggggattgagacaagggtgtcctctttctccttatttgtttctattttgtgctgaggcgctttcgatgctccttcaaaaggctgagataaatggggagttactggggtttaggtgctctcggtctggccctcgtgtgtctcacttgttctttgctgatgatagtttgatttttggtagagctaatggtagggaggcggaggcgattcgtcggattcttcagtgttatgagagggcctctgggcaacaagtcaactttgataagtctgcaattacattcagtccgaatgttcagcaagcagaccgtgctagtgtattgggtatattaggcttggggtcagtggctactcatgataagtatttggggttgccgacagtcattgggaagaataagaagcgtacgtttgccagtatttgtgacaaggtccagaagcgggtgcgtggatggaaacggagtttcttttcagctgggggtcgtgagattcttattaaggcggtgttgcaagcggtgccgaattatcttatgagtatgtttcaactaccagtggcgacttgtgataagctgcgttcaatcattctccagttttggtggggcactaagggtgataagaagaagattgcatgggtaaaatgggatgatgtttgtcaaccaaaagtgaaaggggggttaggtttcaaggatttgaccctgtttaatcaagctatggttgctaagcaagtgtggcggttgttcctttcggccgattcgctcccaggtcgggtcttgaagcataagtatttccctgagacatcaattttggaggctaaggatcgtcctggttcttctcatttgtggtctagcttggtttgggggttagagttgttgcgccttgggatgcgaaaggtggttggggatggctatactattgatgcgtttcgtgatccgtggattcctcggccgaggacatttcgtcctatcactgctgttccttcggcccaggtgatggttaatgagttgattgatgttgggggggtttggaatattcgggcgttgtctcaacacttcttgcagttggatgtggatgtcatccttggtcttccgttggggtgtggggctggtgatgatcggtggtgctggcatttcagctctaatggttcttatactgtgaagagtgggtatgcggtggcccttcaactcttgggggaacggttaggctcttcttcttgtaaccaatctcattggtggaatgggttgtggaatttgaaggtccctcagaaggtaaagatcttcctttggcgtatgtattatcgggctctgcctactaattcccaacttattagacgcaaggttcctgttcagccgatttgtaataggtgtggggaggaaactgag

SEQ ID NO: 54879 - DNA, 1259 bp, Cannabis sativa
aaacaacacagataaataagagttgttgaccgagagctgacctgttaccaccgaagggctggcttctgcatcagcctgagttgttgcgaacaccctcgctgtagcgggtttcgttcaagtcttctatacttcaggcttgagctggggacaatcctttttctaatgccctggcataccacactggaagcacccctaccctttacactcccccagatgatgctttttacaactagggcattccaaataagtgtatcgggttttagagctaccctgatgattgcctcgaccctggttccctcggaatctcttattctaagctgagccactggatgcggtagctgcctttcttttctgatcagtggtcgagccactacctcccctactaaagcctgatgtaggaggagtaggagccccacaaacaactgaagtcccttgagactctaaggtgcactacactacaccctcagctcgtagtgccttacccaccatatcagcataggtggtgttttcattggtagtgttaattaagtcatgtcttatcttcacattcaacccgtccaggtatttctctttcttgctgaaatcggttggcacgattcttgaggccaatcttgccaagcgatcaaactgagttgtgtatccagtaacactcatgttttctttttgagtcagttgggtgaattcttttctttttgcacttctgactgcctcgttgtaatactttgcattgaacagttccttgaacttttcccaggtcatcactgtaacatcatgagttagggacaccatgtcccaccaaaccagagcgtcttcttggaattggaatgtggcacaggccactctatcattgtcggtgatgcccataaagttcaaaattctggtaatcacagttagccactgctcggctttcatgacatcaggacctccctggaaaactagaggtgcctgcttacgaaacctttcatacaggggttccatttggttcactgtagctacaggtcctgcctgcacaacaggggtaggagctattggtatttctggagcagggattgtaagagcaacctcctgtctcaaacgctggatctcttcatcttgttcattaatgctggcttgcaaatctgcaaacctgttttcccaatcttgggcagcttgggcggcttgtggcgggttagcatcaccccggccacgaatattaaggggaatctaagctccttgaccaccactagatcaaaccaaattaccttggctcctggtgtttc

SEQ ID NO: 54880 - DNA, 1788 bp, Cannabis sativa
  modified_base (1332)..(1336): a, c, t, g, unknown or other
ttgttgaggttcaatgaactagtttctgataccaagtctagtgtatcactcatttcaactgctacttaaccctttttgctctaaacggtaagtataccccttggatttcgaatcctcaatcttgtcttgtcttacattctctgttcacacacacatgaaaaacagtgaaaaaagttttttttggtaacagagaataatagtggaggagtgacatggccatgctcaattattatcataattattcctaccaaaacattattatcgtaattaacttttacctaggggaattttctttttcatttttttttatattcttctagctaggaggtgaggtttaacttgtttaacttttctcttattattttaaaaaaataaaaaataaaaatgatcttttcatctatcgtaatgatatagtaatttctttcaaaaaaaagtcttaaatttgattcatctatcaaatttgacatggatcgagctgatcaattatataatatcataattaattaatatttcttatctccaaatgttaagcagaacaaaattatgcatgcatggagttcaatattattttttagtattagtagtataccattaattagcatattttaaagacttataatgttatttaaaacaaaagagacccccattctttaatttgttttgcccttgaaataatggactttcattaattacttcaaaatattgatttagtatgaaaacaaactgcaaacttaaagctttgtacaataagttggtattaattgatgattgtagaaaaggggaaaaaacataaaagccaagccaagccaagttgaacttactttagtttatcgaaagagacaagtaaaacgtgaacacccttgtatcccgtgaataataattaaaaactaatacttttacttaatgaaaacaacgacgtaataagactctactcgatcactctaaacaagatatttaacgcaatattaacccaatgttcaagtgctaattaatcctgattaaatttattaacagctctttcaccacacattatattatactttcaaaaataaaaaacataataattatgtattttaacgtatacaatttggatggaggtttgtttatctcctttttacaatgtattgattatttttaataaaaatttgttcattgtaaaaaaaaaaaagaaaaaaacttaaattcttacttctttctttctttcttttttttttttttggttgtaagagaagaagcagagcttatcttctttcagataatgttattttataaaccacacattacaagtttgtgattctcaattatcttcacttaaataataataataataannnnnataataataataataataatgagtctgagacaaccaaccattggctgcaattgtaatataagaaccacatatacataatcatatacacctacatctaccacaaacactttgtacgtgataataataatcaaaactgaaaggtaaaaaaaaatgtaatcttaattaattaaagttacttattgcagatgtggtggtgatgaagaaaaagttgaagtggggactaggcaccttagtaaattgatacacccaatgatttattttagttggtaaagtaatttttaatattaataaaattgtaatcgagtcaaatttcgttaatatagattattttattgtcttaaagctcaaatttcaaattattaggtatgtacaaaatcgtgtaggaccatttattttcaaatctttttttaacaaatgctaaaatcaagtttaattacaattttaaaacattt

SEQ ID NO: 54881 - DNA, 798 bp, Cannabis sativa
  modified_base (670)..(673): a, c, t, g, unknown or other
aaatatatatgtctaagttactctatatttgaagacgccaaacatgtctcaaatatacacattttagttttaggcaccaaatatgtcaatattttcatatatgcacatatccaaatttaatttagaatttaaatttaaatcaaataaattaatcaacaatatatcaataccctttgcttctaatttttggttggtattgtgcttacaggaaaaatcattgtaaattatgactccgccgttgtgaacttggccaccagcacaggatgataccactcatcatcataaaaaaacatcactttgttatgcaaataccaccactgtggtctggattatatgctcaaactaaggaagcttggtctttggcattgaacaattgctagctctagacaacaaatctcatatgctaatttatattttgctagcttatttggaattgtgtaaaggtgagcttttatctttaaatcaatgatagttatcatttgactttattagataactagaagaacaagataatttttgccacaatcaaatcttttaatatgtaaatggtcttatatcaatctaactacaattacgctactttgttacagagtcccacattgttaatgtgtggaaaaataatagaatatataagagaaatgaactactcctcccattgccaattagtttnnnnatggaacctcattcatcttatccctaaattctaacatggtatcagagcaaaaataaacgaaaaaaaattctagctactaaccgaccaaaaaaaaaaccgatcgaagtaaagccaaaaaaaaaaaa

SEQ ID NO: 54882 - DNA, 1990 bp, Cannabis sativa
ggagaaaataaaataccgaggttgggcagggttatggtttttgaccattttacccctaggtttgaaataggctaaaattaggcatcaagggcattttagtcttttcacgggaatgtcagtcggccgagataggctggttgaccgagataggctggctgaccgagatacgttgacaaaccgagataggccggttgaccaagataggccggttgaccgagataggccggttgaccaagatacgctcaccgatcgagatatgcctgccgactgagatatgcccaccgactgagatacgtcagacgatcgagataggcttgtcgaccgagatacgccagctgaccgagataggccagccgaccaagatacgtcagccgaccgagatatgtatctcatccaatataagtcatctcttctgagctatctcattccatttgagatatgtcatctatctagtatctaactctcccacctatacacttattttatctagaatacatcttatatagtatttctttttagaatgggcattttttatattaatttgagcttgttgaattttctcccaaataaaattcatgttcatacatcaacatttagtttaaccattgatatggatatctaaacatatgaaagttaaactcagagtttatgtagtctagaaatttataacgattcagtccttgaccatcactaagacattatcaaactctaaattcatcttgcaaaatgcttaatatcgatttcagaactatcactcaagtatattttcaataaatattaaacagcaatttaagaaggagattcaattcctaaaaattaagaatagtcatcattttatggttataatatctagaataagtcatctgcgctacttattttcttagaagaaaatagagcaatatcataagcagatgattataatcattcttgtctaatgatgtattatttcagcaattttctaatgaaaaagctatagaggaaatctaaggaacaattttaattaaaataagaatctacgatatcccaagagttaaagttattcttattttataaacttattcattatttcaatattgtaaacactaatctaaattatcacctttagaggtgagtcaactagattttatatttataaaatacttactcacgagatctaatactattaatttatctaatggataactatccattagggatgtgtcccattaaagtaattactaagttagaccaacaatgaagattcgaaattaatactacataatcaataacaaaaatcaaagtaatgttcaatataaattatattcacatatatttgaaaaatggtaagcacataatcaagtatgaaaaatatggaaaaaactattaacaaacacatctcaaatttttcaaagttttcaactcaatgatatacaatttttcgtttaggcgagagtcaaagatatcacctagttaaatagagtagtgagctcttctaaaatagacactattttagcaaccttttatataattaaaaaaagaatccaactttgtcccatttaagcgagagtcaaggtcattcctattagatgagattctaccattatttcatacaaataaatctctttctaagtagtcatctttagggatgagtttactagaaaatgaatctacgaaaatacttatctttcgagatcttacggtgttaaattatttaatggtgaccatcaattagggaaagacaagcgccttgaggtcccattagaataataactttgtaagatcacaattgagatcgaatgtcttatcaaataatgctcattatttgaagagagttgtatttttattacactatttattttaatatatttattcaaattactaacttaggaataaaataattataaaagtaattttatatctagtataaattttaatctatatttatgaaaattactaacttaggtagttctgaaaataaataaattattttccaaccttaagtataaatttt

SEQ ID NO: 54883 - DNA, 752 bp, Cannabis sativa
agttctttaagaaccaacaaacattacatatgtatcatatcaacaatgaaccaaaataagtattgacaacataacttgattttttatgagaacccgtatgggtaatatttagttttaaaagaaattacctccttaagaactctatgacaggccaagaaatacaacagacattggtgaagcatcacaggcaataatctcgtcctctctacaatcccaaacccaccacccaaaaaactattcgaacacttattctttattcaagctacaaatcatataaaaatatattaaaagaaaagaaagtacagagacctcagatgtacttttctataactcgacggagacgagaacaggtacaaagaggcaactcacaaactgtttggctgctgtgataaaaaaattgagattactcaatttcaattgcccatgtgaccaaaaaaaaaaggacttacgtaaaactaatttcatgcttcatagatttcatctgagatgagaacataccacaggaaaatgtgagcatttaatctgagaaaaacatgaccttatgcgagatcgagaataaatgacagtgcaggagatgagaaaatatatagacaaatgaaagtcatttacaaaaattacacagaaagtaataaaaacacttacttccctgctcactaatattcgctctggcacccaatgttttcaatctctgaataacctcgtcagctatactctgctgcaaatgttgggggagttcagtaatcatcacttca

SEQ ID NO: 54884 - DNA, 2135 bp, Cannabis sativa
ggtgttggtgcgggtggtcggaggtggtggtgagggtcggaggtcggaggatggaggtcggaggtggtggtgagggtgggcggttgggatgtgagatggagagagatggagagagagagagagatgatgcagagagagagaatgagtgaattgtgagggggtatttttgagttttgaaaaaaatgcatagttctttcagggtttaagtttttagtttaataataaatttttttaattttttaagtatataaaattaacccgccgaatagggttatatttttatcgggtttttcaatttgcatttttcctaagttatttcagttcaatttaggcgagttgtttgaatttgacggtttacaaaattttatgtactgaattatgtacagttctaatggataccccacagtgctactgaattatatctacaaagacttcctacaaattttttcaattgaaatcacaattagaagactattaaaattcagcaccactgtcacactaacactaaagtcttcagtgtcttgaacctcataaaagtgttgacattgccataaacgacatctttcatggcaaaatattcatcaaccaggtaattccaaaacgttcctttccaacttccaagtatttctaaacataatcacattttactgttaagcaatcttataaagatgatcacccctatacaagatagcatttgggctggcagccttcatctatctcaaatgctctcttgtgcaataaatgcaaagttcattgggaagtggtcaataggatacttgtatatttgctcctacttctgacttggattgaactctctaaattacatttagcagtaagataatttgagctttcgagccatattcagtgtttgaatctctaaccagccgttaatgatttgggttactaaaaagtaaaaacatacagctacatatttctttaacaattctttcacaattaagttactagtaaatttccttccacttgtatgtatctttaaaattgtacatttaagtaccaactaaaacgaatgagctacttgttagtcaattcataaaatcaatagtctttgaaagaaagaagagaaaccaaatcttaaaaaactaacataagaacatggcatttgattttgatagtttttttcaaaaaatgagtctaagaaaaattgtttcttatacaaatacccattttattaatatatagtcatactgacccaaaagaaaagaaaaaaaatcttttaatttttagaatgcaagcattcaaaagaagcagaaaaaacaaagagtgaaagaaaataccaatagatatctttagacatattaaaaaaagttaaaccattgatcagataattgtagtctgataatttagggtctacacaaagataattcggaagaaccttatcatcacatcaatggttatacccatcaaattaagttaaaaattatatacatatatattataagaaaagaaaagtaagaaattgattgaaggctcagaaggatccattggtgattttgtaatcagggagagaaatctcctcataaaataggtagaatttcatcatcattgcctaaacacaattcaaaacaaaaaacaaatcaatctacatattacttacttgaatgttggttagcagccaagccaaccgagttggtaataatctaagagaatggtgtagatatatatatagatagagaagagaagggctcccatttagggttagggtttgtcgttccattccatgactaccgtatacgacggcgcaacgagttaaaaatctacataacaccaattttgatgggctttctgtcttatgatttatagcccatttgttatagggttccactttcttttctaatttataccaattttattatttttggggaaattagtttgataaatatgaacttttttaactttgtgaattttaaaattaataataataagtgttgaattattcttttaaataaaattagagaaattacttcatatactattttttttaaaaaaattatagtttgagttgctcagttgctatttggattttagttaccatttaaattgctctattagttattataggaatttttatgttgaatttcataaaaatctattaaaaaaaaataaattattttaaa

SEQ ID NO: 54885 - DNA, 1281 bp, Cannabis sativa
attgggtactagtagtgcttagcatattctatatgtgttattttgtgattatagttagcgatactctttaaaattattaaattaaattatatagaatccgatattctattacaccaatagcgatatgagaattactgaaaggcaccattgatgtctaacaccctcctcggtgtcataccgctattggtgtacttaatcaggtcccatataacttaagaaaacgaatttagggaatatccactacaagaaatattactatgtgctggcaaaagtttgatattgcactggtagaatggaatttacttctaatgcgctggaaaaagtcttattttttgtagtgtgtgttggcaaaattagttgacaaatcaacgttggtattaacactttttccaacacaaaatgaaaagtgctggcaaaaataatttttttctagctcataaatgcgcaggtgaaagttagattttagccactgcaaatgtgtgctggtaaaactttgacctttttgccagcacaaaagttttaccagcacagtttgcgaaatgcgctggtaaaagtagcacatttcgcaaactgtcctggtaaaagtgacatttcttgtagtgatcgctaaccaatcgtggggtgccacctttaaatggtgttgggcaccactagtgcctaataacaatgctctagcgatattaacacgtaggaaggtgctaagcacatactactggtaccttttagcatttctcaaccaaaaaattaacaccacgttttctcaattttccccctctctctttctcttttctcatcttatgatcactcacacaaaaaaaaatatcattattaatttgttgatgtaaaacgaaaagttcaatgatatgacacttatcaatgcatttcaaaagatcatataaaaacaaatgagttggtcctactaatgttataaattaatgctagttgatcttggagggagattgtgaaatcgaagaacaatcttaaaagttaaaactgttttgggcatgcattattcatcacatataccaaaaactcataaatgctaatcaaatgggtttcttaaatctttcattttttttggaacaaagttaatgttcctaaacactcttttattttgtggttagcttctttggattggttgacactgctacaaatttagaggcgatttttaagggcttttagcgtcgactttggcgaaattgctgtaggggtaaaaacaaccgacgccatagggtcttcctatgatttttgttcagctttacaattttgtattttagcata

SEQ ID NO: 54886 - DNA, 1503 bp, Cannabis sativa
gaggggacattggatccctctacctgacatgactactaaagtaaggtatggattttcttacttaaaagtaaggatgaagctcttaatacctttgtgaattggaaaaagctgattgaaaatgagattggaaagaaaattaagaagctcaagacaagtaatggtttggagtattgtttaggcatgttcaaagaattttgtgttaaaaaaggcatatcaaggcatcacacaggtccaaagatccctaaaaatggccttgtagagagaatgaacaaaacactcctcttaagagttaaatgcatgctaagtggagctagtttggaaagacagttctagggtgaagtagttaaaattgattgctattcgatgaataggtgtccctctgctgcaattaatttttttacacctcaagagaagtggaccggtagagctcttagctgtgatcatctgaaggtgtttgggtgttctccctatgtgaacataagcaggacaagctacaacctaaagccataaaatgtttatttcttggctattcagatggagtgaaagcctataagctctggtgtctaaaattaggctttaagaagtgcatcatcaatagagatatcatcttcaatgaaaaggaaatgcctatgaaaatgcagaagaaaattgatactcaagctgaggacaacaacataaggcttcaagtttaacttgacaatggcagagttgattatgagatgagaacagatgaatctgtatccactgaatcttctacatcttagggtggagttgacacatatcaactagccaaagacagggaaagaagagagattcaccctcctgatagattagggtttgctgagctaattggcttcactagtcttgcattatctgtggtagatgtgattgacattgtagaaccaacatctcaccaatatgatataaatagtagagatggtgcaaagtggcttcttgcaattcaagaggaaatagcatcgctaatcaagaacaaaacctagatcattgtaaggaagccaccaggatagaaacttgtaggctgcaaattgataatgaaagtgaatgatggaattctaaggattgaagataaaagattcaaggaaatgttagttgcaaatgggtttacttagagagagggagtaaactacaatgatattttctcacctgtggtcaaacaagcttccataagagctattatagccaaggctacaagttgtgactatgaaatccaatagatggatgtaagaacaaaattcctacatggcaagctagaagaaaaaatttacatgagacaacctaaagatattgaaagtggagatgcaaaagaggtatgcttactgtaaaaatcactatatggcctaaaacaggctccaagataatggaacattcgttttgatgaatttatggcaagaatcaaattcaacaagattatatttgaacccccgtgtctactctaattgcaaagtatatcttctattgtatgtggatgacatacttctgatt

SEQ ID NO: 54887 - DNA, 912 bp, Cannabis sativa
ggaggtcacgaactcactgcttcccaaagaaaaaaaaaaaaaaaaaaaactccctataagcaaaaggcacgcaactatataggttagcttaaattatatgagtataaatgtaaaagaagaccttcatagcttcggcagtacagtcagagacaggccaaccattgtcaggagttgagaaggtccatcctccctttgaaatgtggcgataccactcacttacattgccccaactgttttttcttatcttcatatattatatgttgtatgcaagtgaaattatcaatacgtacgtacgttgtagtatacataaatatatagcaatatgtgtatatatatagaatatttaattacttgtgtttttttgatgaagtagtgagctttcataagcattgaactgtactcgtccttcaagtgggttgccattatggcttgaacagccaaagcacaatcccacagttgagacccattatatccctaaatttgtaaatagattgttgacccaataatgatatatttgtatattaataaattaatcgactactatttttagtaaattaataaagaatagtaacctgcattttcaaaccatcttcagccagccaaaggtaatctttaattcgggaaagatgagatttgtaggcatcagaattttggtcctctgcccaacaacaaatcatgtttagtacctgcattatgaatatgcatatgcattatacatacatatttatatgataacatgatgcatacatattgtgttatattatttgttattcaaataaatattataataaaaataaaatatcatataattatatattacaatgagacactacaaaaaaaatgctatttttaatgataattttttaatcacaacataaatttttggtggctaaatgtgatttttaattacaa

SEQ ID NO: 54888 - DNA, 3066 bp, Cannabis sativa
atagtttttttttaggtcattttatggtatttgatatgtcatatatatgtaaatgaagttttcaaatgtcatatttaatgtttttatttgtttaagtagttttatttgtcactaataccgaaaaaattatcggagtttgctattggtgctggaaaaattaacggagcagttgtcggtgctgaaaaagtcgttagagttgttgttgacgccggaaagttcatcgaaattagcattgtcgccaaaaaaattactgaaaaaatcaataagaaactggtttcttgatgatttttctggtgacaagccaattctgatgaattttctgacactagcagctactccgacgacttttccggcaccgaaaacaaagttcgaaaaggtcatcgaaattggcatagccgaaaaaattaccaagaaactggtttcttgatgaaaaaaccagtttcttagtgatttttccgacgacaatgctaaatttgacgacttttctggcgtcgacagcaacttcgacgacttttctgacaccgtcagctactccagcgactttttctgtatcggtagcaaactccaaaaaattcatcgaaattggcattgtcgctaaaaaaataccaagaaaccaatttcttgatgaggaaactagttttttagtaattttttcaataatttttccagcgataatgccaattttgatgatttttccggcgttggtagcaactccgacaattttttcgacaccgacagtaaactctagtgcctttttcggcactattaacaattccgacgatcaatgtagtttcatttatttttatttttttttaaaaaaaaaatatgaaattttttttaataaaattcaatcacatttattttaaataccatatattttttggggtaattctcttatttttttttttctattttttatataatttatggatgcaaaactcattaatcataatcatattctccccccctaattctaaaaaaaaaaaacttgtaattaaacttttggatcaacaaaacttggaatatacaaaagttgaaaaatgaacaaacaaaaacacatcatcatcgtcatcatcatcatcatcatcatcaactaaataagaaaaacacaattttctttctttctttctttcgagtctcgatcggaagaaagagagaggagaattgataatggtgttgaacagtagagtggtggcaagagtagcaaatgtatcagcaaatctatggcaatacatagcttgtaacccagaaagactccccagtcaccaagtcttagatatcctcttctgcctccctcttcgccacctccgccgtctagccctttctctcttctctcctccccatcatcgccgccaccatctctgactcatccatctaatcttaatttttcatcaaaaaaaattacttctttttcttttctgtaaaaatatataaaatttgtggctataaatatatataaaaaagaaaatatttacttgggttgtaatataaacacaaggagagttgttatatattgtaaaaatctttacttgggcacaaacaaaaaatgggtattcttaaagctgtggctcttatcaatggaggagataatactaccaccattagaggctctcttcaattcacccaagactccaccaatggttgaattcattcttttctttctttctttctttcatcattttctattgagtctcttttgtttgtttttttgatgatttgattgttttttaatagggcttactcatgtgaaaggaaggataactgggctcaatcctggtcttcatggcttccatattcactcccttggtgataccaccaatggttgcaactccacaggtacacttctcttcttttctttcaattctttgttgatttttaagctcaatttctcaagtcatgtaccaactcatgccgatcaagtttttaaggcagataaaaattctcataagactattgagatggttgaatttaaaaacttttgttctattttactaagaaaaataggcacatgatttggtggatattaaactttgggagtacgatttagtacaagaataattaccgaactagtaaaattaaatggaattgtacaaaaatccttcaatctaacaatttcaataaattcttcctattaatattttaatgatcgttgaattgtgtgtatggtatttgaaatcttgataggaccccattttaatccattgaagaaagatcatggaggtccattagataaggagcgtcatgctggggatttgggtaacattgttgcaggcccagatggtatgtatgaagagtcttatattatcataattataagtattattattatctttatgattgaactttgtagagtgatgataagaatgttctatattactttttgttttttaggtgttgctgaggtttcaataaaggattggcaggtattatgaaatgaaatgttttactttgatttttaccttggcattttctttaagttatgattatttggtctttaacttttgttttggttcttcaatttccagattccactcagtggacctgattcaattcttgggagggcagttgttgttcatgctgatcctgatgatcttggtaaaggtaattctcctatttattgataaaactaagctgaatatttatggtgtttttttgcttacatgtttgatccgaatttcggctttaagtacaacactttaaacagatgaaactagaatagaacttgatcaaacagagaattacctttgatctgtaaatcaagcatcatataaaattttggactttctgtattgccaaatggtaggaagctcttaagaaatataatttgctcacaatatacacgagaattcccgatcttttagtctggacaggaagaaacgctcgttttgttgaacctttagttgccacaagtactacaccacagagtagcctttgctttttcttatagtgcatcctctttaggttttgtgacgataagctgaatgaaattttcagcgttaaaccgcctgttttctcctcgtttaactttatacgaaacgaagataatcaatcttgaggcttgctcat

SEQ ID NO: 54889 - DNA, 1041 bp, Cannabis sativa
ataatttaaaaatgttggatgagcaaaaatactaattatttttgcattaattattgattttttattttattcatggaacttgatttttctacattttttttttttttgcacaatttaacttaataagcatcgatggccttataggatgtgggaatgaagaagattcttgatagaccttgttaagcctcctcatcagaccttaatggaccttgatggtgcagtgaggtaagaaattttaatttttgtgtaaatgaatgcacctcaatacgccttgcttgtacatcgatggacctaagcatcactacccctggataaaccatcgaggtccattggtgtaacgagatgcatttgggtaacaaaatcgaatagacaaatgtagcaacaaatctgttccaaatatatatgataataagtgttaagggattcagttaattcagtttgtccaactgtcatctttctgttatgaaggttgttacagtttgttattagtatgttctagctcttatccctttcagttgtattgttcagtttattggttagttgtatatatattgtactcagcttccaatgcaatacaatctttgattccctctttcaatcaatctttctttgttcatttctctctttctctgtttctttccttctttgtttctacttgtttttcatgttcattctttgaacaacaatggcgaggagattcaattctcctgacaataagaaaacaacactcatctcaaattccatgtactatgaattttctctactaagaacgcaataaattcatttcaatatttttggcaattatgtgttcaaagagagaagatctggtccgattcttttgaggagttgtgagagagcgggtaatgtgtaaaaatatacatagagttgcataattaataattatgctaaagatattgtttatgctaatgatatttggtcccaggatagatgaaaaacatatttttattagagttgcatatatggtgccacaataaacaagaaaaagtcaaattttccatgcataattcatttgttggcatt

SEQ ID NO: 54890 - DNA, 2010 bp, Cannabis sativa
tagccgccaataatatccctccctttatttatttatttttaatttttaaattaatcacaaccattcaatagtgatcaaaaggctaaaaatatatgtaaccataatagttacatatttgatgtaaccattgaaacctcttccatatatataaatatatatatatcttctcttgattttttattttcatcatatgtctctctttgtattaatattttctttttgttcatgtctcctaaatatgggtgttatttttaatattttatttgtttattttgttgtttgtaactctatttgtttaatattttcttttgttcatgtctcctaaacaggattgccgacaagtgaaaaacctaataacagcttcaatttatagtcttgacttatcatggttgtctcacaggaataacccgaatacctctcccggtatccatatatcacattgtctaatcaagcaagctcatgtcatagcctatcatccatatattgcaccacctaatcaggtgagcttgtatatcacattgcctaatcagacaatctttaaatcgttgcctaataagacaatatttttatcattgcctactcagaatatctatacatcgttgcctaataagacaacctttttatcatttcctaattaggcaatcttttcattatgtaaccatagtagccgtgtcttaatctcaatatcaaacaattctcaacaatagtaattgctttgcaacataacatactattcagtacaacatacttttcttacctttaatccagaatcatgcatatcggccaacctaagtggagaaacattcctgatgatctcggtcctatgtcgcaacaacggttaaccaataagtgtctatccgaaaatacttctcaatatctacataagacaatctaggtttttctctaaacaccgcggtatagatacagtaaaataaaacttatattttggctctaaaatatacaccatgttgtaaagctcattgcaagctttgaaatggtatatagaacgtctaaaataaatacccgagtgaaaaattatgaccaaaatacgatttttgatcttcccgaaattactagaaatggcaaaccatttggtaaaatagttaaccgtttcttggcacaaaacggttgaccgtttgtaccaaacggtggaccatttcgtagtaggggacgagaatcccaaattttacactctccaaaacaccaccgaagtctatccaaattattccaaacttcaaagaacacacatataccatatatactaccgtctcaacgtaacagaaattaaaaatgagcccttaaatgaaaaatgccattaaaactcgagtttgagttttaaaaccacctcaaattcaacaagtaaacatcgaaactaatctcatagctaccaaaaaacagattcatgaaatcaaaatccctataactactctaaatcacaaagtcaacatataaaatcaattatttttaacttaaaacgaaaccaattcttaccttaagctctccctcttcaatgataaactatcgtgctactaccgaagcttgaatcactaggttttctgattgaaaatcgaagaaagtttgatactaagggtgagagtttcgtcacactgaaggaggaagcttttgttcgtactatttcttaaatttaatttaaaacatatagataatatattaaattgataaaaataaagtttaataataataataatatattaacaataataaaactttattattaataataattattttattattttttaatcattaagaaatctttaactttagggtatttagtcaactctgagtagcccaaattactctgataattctataatcaacttatctcaataatccaatcaatattactaactaaaactattatgaaaatattggccttcgatcgggtctccaaggtcgtcgaacctgaaaatatttttatgtcacaaataacttacattatatccacatattctaaataaatcttcgtattaataaattacgcttatt

SEQ ID NO: 54891 - DNA, 1296 bp, Cannabis sativa
attaagagtgcacacatacacatatacatatatatagaatatttctactataaatattgattttaaaattattatattattagattgtgatccagtgacgaataatgaaagagaaatataaatttttatacttaatttaggtacttaataaaaaaaatattaaaaaatatcactttttacactatatcaaaaatatgtttatatacaaaatacttaagccaaacttaacttttttttttgttgaaaaacttttgttcttaatttttttttttttcaaccgatggaacaaccccaacttatattatataaatattatataaaagtgggagatttttttaattagatagaaaacttaagtataaaaacttaaatttttataatattacccatatccattaagagtgattttacttattaagtccaaaattgtatattgttttttctgttaaatatacaacatattgctcttgcatagcagacccaaaatattaattaacttttctttgactgcatattcttttttttttttttttttgttatttaaaggggagctcatagtaaataaattgaagagaatgagggcattcttttaaatttgtagaatgaggacatctattttttttttttttttttttcagaacgaggacattctttgaatgaagtcatctattttttttttttttggcaaaataagggtattgtttgaatgagagcatttatttttttggttcacgacatttcttagatgagaacatccatttttgacggaataagagcattctttaaatgaaggcatctatttttttgaccgaatgagagcattccttaaatgaaagcatctatttttatttatggaatgagaatattccataaataaatagagagaaaatgagaagaacaatacacatcaaaataaacaaaaaaaaaaaaaaaagacataaggatgagaccattccatgaattacttaccctcaaagcttgttgatccttaccaaaatgtatttctctgtttcttttctctctctcagatttttcaaagtgtatccctttttctgatctcaactcctcttattgtataccctatatttaatttaatttatttattaacttcaccacgtaatgagagaaaaaaaaaataagagtagacagttaaaagagtagagaaagtttcctaattttactctcaatttaacttactatttttttattattatgattattttatcaatttttttctttcaatttttttttttttaaaaaaaaaagtatttgtatttaaataataataattttttt

SEQ ID NO: 54892 - DNA, 1141 bp, Cannabis sativa
ctagtggttttggtaaatttcttacgtgaaaaattacactccacgcttccctttcacttgtatttaaataattttaacactttattttgcctcgcacacatgcattttgaagatgttatggaccgaaaagggaagaaaaggggaaccaattcaggggttcctacagataccgaggtggagccttctaaaaggaaaaagaaaatcactgcccataaaaagaaggtagtgtccgagcccattgaacttgaggtctctgaaatcgagacccatgaacagactcctcctccagtggatcccaacaccaacgcacctcatcctcatacaactcatgcctctgcctcctcgagccaggccattgaaactttgtctgccacagcggggaaggctggttctgaatttgccaaggtgtttgggactgcctgctggtgccaactaaaggctctcctcccctacgattgggatctaatcaatcttgggaatccagaagagacgctttcgaggaacttgcattataccttcatggtatatttgctatattaatccatattattatttctttctttttttctccatgttttttatatttattttctcgtaaattctccagaattctttcctctctttttcctctcatcgacaaatcctggagcgactcaaatacttggaggatgaggtccaaaagtcactagcccaacgcgtggtcgtgattaaataatggaacgacgctcataaaatcacccgtctcaaacaggaagtcgagaggtcgaagaaaagccttgaagaagctgagaaggccataaagaccaagactgatgaattcaatgaacttaataaggtgctcgtagagaaagaggccgaactcaaagggaaagaggccgagcttgaaaggaaagcggctgaaaccacagaacgatgtaacaaggtcggccttcgtaccgtttatcaagctttgatggcgaatcccaacatggacacaagcttcttggagtaggatgaagaggaaattttggcttactgtgaaaaggccaggatggaggaggaagaggctgaggtcgcagaagaagaagatctatccaagtctcccacaatgtaggcttgctttttatttatttttttcttttttttttttgtaaggaaaagg

SEQ ID NO: 54893 - DNA, 3299 bp, Cannabis sativa
ttttcaaaaatttatagggatgaagttttaagcataacgaacacccccgtaaaaaaaattttaaaaaaaatatcctgacatgtattttctgtcgtagaagttgactaagaggctgtaacaggaagttgacggtaacactcctctaaaaatataatccatttaattttcatattaggtaggttgaaaataatatgaatttcatatgaatttcaaacatgtgatcaaactttacatttagtttcttctctttatttcttctataaaattgtgggagaggaaaaccgtaaaaataataaaacttcctttgatgccaatatacctagtcgaaaaacttctttaggactgtccttggctaattgaaaaagaaaagtttatacatggaagtatctaatgatgaatttaaagtcgtgggaacaattgctcttagagtaaagagataggtgaacaatgatcatggtattttaccatgaaagtatgcagcttttgaatctttaaagtgttagtctcccaaactttatcaattgtctgcttaaggactgaagcacatatcagtactttccatccgatcagtaccagtaagtgataatctatcattataaaggtccacatatccaaaggcatctttttctggaggacactcaagggcagcttcaagaactctgtggtgtattccatgagagtcaattgaatgcccacctttgtgattatgaccagcaatgcaaaccttaacacaattgtatttgtgtatcagatccattacttcgtcgaagttccatagaagagctgcaaaagatgttgagccgggatctaaaggtagatgacaacagatcactactttttgcatcatgtttgttgcctcctgaaggatgccatctaaccatttcagttgctctttcccaacagctccattaaacatgaggaaccttctctcgataccaaccagtccctcggggctattcttgtctgaatttggattcttctccttaaggattttcacagcctccaatcttttaggatgatcttgaggccagccaattgcacttatgtcatagccatccaagacgacgaatctaaactcgggacttggggaaaaatcgtagtaagcacaaccatcctcacttggaatcttcaacattggaagtaacttgtccctaggaagattgtagagacagtgattgccaatcatatgatagacagggccatcaaatttctcaaattcttcaacaactttatttactgtacttaaagataggtctttggggcagaaaccatcaacaatatccccaaaattgatcacaaatttatgcttcttgtctgcattccatctctgcactgctctctgtagaacaagaatactatgacgataataccgtggaacgccaagaaaagagcgaccatcaggaatatcagcatgctgaacatcagcgattacgccaaaagacaagacgggacaactcccctgcttactaaatgcattagcagatcccataaagtaagcttgcagctgaccctatcaaacaacattatacatgctttcaagctaagtagttaatctgcttaatattggaatgtcaaagaaacacaacaccaaatgtgtttgtttttgtactaacaatagtatgtggaagtttgaacattgttagtacaaaaacagaaacaaaaacatcaatttcaaatctatattaaatccaaaactttaaaggaaccttttcacatgtaaaacacctgtaaggctgtaaatgaactttcagtattgaatatatagaatgtattatgtatgtgaatcaatgagtaatatgtttacatagacaccttctattacttgcaaacatagcttctcaacgttttttcattgaactttgaataacctaataaatgaattttattaaaagaaagtttgaaactttttcgcaccaaactttacttagacaatcatagagggggattatcaatataagaatcaattctttcaaacatttgataaattaaggttttctcttacacaaaaatactgtgctaagatcacaattaacataaaaccatataacctttaagaattaaccagaacagtttgaaaaaaaaaaaaaaaaaactgtcgagacaaatgaaaacccaggtgaatgaaatgaactcttttgacataaattagaataaagtaataaatacagtaaatttcagattggtaagcaatcaatactatgaaattcgtaccttaaaaaaagtgagcaaaggtgaataggatgtggtgagagtggttagttgaagaatttgaagtagtaggattacaatcctatattcctggtctcggcaacatgggaatattggtgaataagagagtggttgtaattgggtttgggttggtgaatgaatgactgagatatccctcagtgtctcttctaatcacgatctagccttctattagttttctcattcctaatgccgacagttcttatttttctgctacggtaataaagggtcagcgttttatgtagggccaaactgatcttccaccggaaaacaatcactgtattaataatcttaaatgctggaaaaaaaaaaaaaccctaaaattgaggcccttcaaaataaaatttcaagattacatttttttattggcaacaaagatttagaataaattggttaaggacaggtaataaaaatatttaaaaatttcataaaaagccactagaaccatcaaagggctaatttcaaacttttttgatgattgtttcagtctcaatgtgtggatcctgatgctatatctgggatattgatagcagaatttattagaacatttttgttcacttgatgatgtttttactaaagaagttgaagaggcttttttcaaatctatgtgataaagctcatggttttaatggtttaaggattcctttggtagacagtaataaacgtattgcattgtatattattacattgagagtaatttgcagcaaaattctcttaattatcaatttactttcaaaaaatcattcaacctcatattttggtgggaaaaccctccaaagtactgttctgtttatatttttaaagtgttgtctgtctaacctcgttaagtcctaattttgttcatgtgtacaggtcactaaaaaattatcttacgtggccatattttacaaaataaaaattgtagcaaattactcttaatgtttttatttttattttgtaaaatatggttacataggataattttttttagtgacctgtcattgtcacgtgggcaaaattaggacttaacgaggctggacagacgacacatgtaaacggaacagtactttgga

SEQ ID NO: 54894 - DNA, 540 bp, Cannabis sativa
aaattcacaatataataataataagcattttagatgtgttgccttgattaataatattttattatattaaattatatgaaattcaatatttttttttgacgagtaaggcgttataccaaactcatttaattgcatagcaatattgacacaccaataatactttttaatatttctcaatagcaatctatacaatcaacaaatttttcttattaatatttttaaaaatatttatttttttaattgtcttaaaaattttaatattgttgcttacattttaattaaagtcgcttatcttttaatactgtttggtagctgagttctcctaattatattcgaaacttgttagtagcatatgctactcaataatacattcttgcccctacttttattgagtttcattactcttggtgattgagatctttttctaaaaaaaacaaaaacatgtttttttattctttttaaattttaataattttcctcgagttgaagaggatgagtaggtttaaatagcagtcctataattaatttggcgctgggaca

SEQ ID NO: 54895 - DNA, 791 bp, Cannabis sativa
  modified_base (92)..(93): a, c, t, g, unknown or other
ttttctaaactcttatgtgtttagtttcattgttttagatatattcatatttaggatgttaatcaatatacttgtttgtaaatctagatccnngtaaaatattcccaacaatttttcgtcacatttttttataaattcaaaacaacccctgttttgatgtgaagttgacagaattaataatggttctctttctagttggttttcgtttcagttgtgttggattgttgggtggtcgaccgaaggttgcatcagatgaaggtttcaatcccaaaaagtgtggatcgtgggttgaaggtgtgtgtaagaggtatttgtgtaatattttttaggttggttgtatctttgtttatttggtcagctgaaagtatttttttagtattgttactttttttttggttaaaactgaaaaaaaaaagctcaatattaaatttaaaaatattaaattattagatttgatccaatgacgaataataaaagagaaattttaatatatatacatacttagtttagctacttaattaaaaaaaaaaatataaaaaaatatctcttttttacactatatcaaaaatatgtttaaataaaaatattcaagtcaaactcaattttttgtattttttttcagcggatggaacaatcccaatctatataatgtaaaaattagaaattaaactaattagataattaaattaagcttaaaaactaaaatttatccacactcaccttagtagattaaaaattatcaaattaaaaaattccttaatccctagaagaattatttaagataaataaaa

SEQ ID NO: 54896 - DNA, 1483 bp, Cannabis sativa
  modified_base (235)..(240): a, c, t, g, unknown or other
  modified_base (1159)..(1163): a, c, t, g, unknown or other
ttgtcttttcaggtgtgttctgacaggttggcgtggtttagtcataaccgggtgtttcgggccgaactgggttcgggcccgaaatgtaatttgaattgaattatttggcatttaatttaataataagatatctgaattttatttggaattagatatgtgtgatatgacaactatgccattgtatgtgagattatgtgggaattggcccttggggcattttggtcttttgaccttnnnnnntttattctagtaaaagctgaatttgagttaatgagataaaaattctggtatttccttccccatacccgacccctcactctctcaaaccctctccttgttctagctttgatttttgatgggaattgcttgatttggagcttggagtttgtggattattgagcttgaaagtgatggaagttttagctaaacttgaggtagctttttcagattttaattttgacttgctgaattttcttgatgatggaacatgattttttgttgttgaaaagtgtatgttgcatgaggtgttattctctttgtagtttgagtttgttatgtttgaattcttggtaagtgattgtttgagctctaggtaagaattctagggttttctcttattttgaactcaggttgttgttggtaatttatggttgaaaaattgatggagttgttgggtttgaagctcttgtttaagagcttgaatatttgcaagtttggaacttgatttttatgcttttgtgcaatctgaattttgagtttaatataggatattgatgcatgaaatatatttatttgagtatctagtaattgatttcaaccctatttgttaatttgaaagtttgtttatgttttgggttgatttggttgggttttgggagctgaaattcgtgaagcttgctggtttttctgggttttcaacccaggtgccgcggcatggtctgggcatgccgcggcccgtctcctttttggggaacttgggattttatcccaggtgccgcggcatggcttgggcatgccacgacccgccctcgatttccaggacaatttgaatgtaaactttggaaatgcatatcttttgattgtgaagttcgatttgtgagttcgttatactgttgaaaagctcgtttcgagctctgtatgattatctgaattttaaatnnnnngaaaatattttatgagtttgaaatcagggattaaccctacttgtggaatcacggattgtgtgactagtattatcggcacctgaacaggaacactcggggattcagaatctctactattgcgggacaacacgtaagacagtggttagcacgtagagtatgcgtagtggcgcttatattaaaagtgatatgtatgattatttagtaatcgggattagggttattaccctaataggaacagtttggtagcctaaggttattaccctagtgatatatgtgtataaatgtcatgccatgtgaaatgtaatgagattcaaggatta

SEQ ID NO: 54897 - DNA, 893 bp, Cannabis sativa
  modified_base (216)..(221): a, c, t, g, unknown or other
aaaagtaagattttttgtagtggtgattaattagttatttttaagttatattatggtagataataatttaaaatacatttaagtaaccttaaaaattatttcaaaactaataatgtgtcatgtaatatattaacctactatttttatatactaattatttatatattttgttattttaaagcttaattagttatcatataatataatataatatannnnnnataatataatataattcaattaaaaaaaattctaaaatgaatgttaactaaaatttcaaaaaattataaaacactactaatcactatattagtccctaaatagttttttttttttaaaaaaaaacaaaaatagtgaaaaaatttatactttccacatcttaaaatgtccacattgaagagtaaattataatgatatttttattaggctcgtgtaataaagtgaccagaaattattttttaaaatttgagtgaaaagagaaaagtaagaaagagagaaaaaagaaagagagtagctttaaaaagaagaaaaaagggaaaaaaaaatgggagagaaagagaaaaaaaatggtataaatgaattgaaacataaataaataaaaatgttatttatatttgattgagttatttttgataattaaattaaaataaaagtgagaagtataaaatcctttatattttaatatatacatattaataaaaatataaattaaatattattaaattataatagtgcttcgagaaaatagagatagaatttacattttaaaaggaccatttgcatatttgttcttcaaaattttgaagaagctgtaatattatagaggagctattggcagtgcttaattaataacaacaaaacttttttctaagtttatgagaatcaactgaaaa

SEQ ID NO: 54898 - DNA, 910 bp, Cannabis sativa
tttatttaaataaataaacttaaatgttccatttttaaaattattatgatattttaataaacaaattatatttattatataataaacagactagattaataataacatataaatattaataatactaattaaatgcttaataaacatatgtatatgtattgtttataaaatatatataaaatttataaatgtgtttgtatattctttttcttttaatttcatattaaattttagtaaatatattattttagtaatatatcaaaatataaatattaacttttatatttacatatttagctttatacgttttttttagaaaaccaattgaaagtacgtaatcaacaagttaaaattgtaaacatatatgtttatttgtaaatattcataaaattgtatagaattatgtaattatgcttttttgcacattttttttgtaatattatacatttacttgtatataaataaaaattacccttttttatatacatttctctcttctaaaccaaattattctcacatatatactaaactaataactacgcatcaacatcactacttcactactctatcataaaaactattaaatacttactccttcacatcttcctatttaaatctaaactaatataaattaattctcaaatcaagagatagaacactcatatttcatcaaactatatgttttaatttgagcatttttgcatgaaatttatagacacctgtcaaataattaactttcacacaatattaatttctaatccaacaagttttgttttatttataattaataggataggactatgcatggaagaacattgggaatagccgatattataaagcaagtgttttttggtcaaagggagcaaggattcttaagctaaagtaatattttcaaaggcattttgggaga

SEQ ID NO: 54899 - DNA, 555 bp, Cannabis sativa
aagactagctcaagtggtcatatttaaaaagaaaaagttgaactatattttttttatacattaactaaatttattttaaaataaaatttaatttaaatatatttttttaattttatgaatattgtactcaaattattctcacacacacttacataattaagacataaaatgtaatagatttatattttttgtagatgaatgtagatttgtataataggtttgtgagaaaatttgagcaaaattttgattaaagaataataaaaattattgtgaagagatagaggtaaaattggtagaatagaatgattgaaaaaaaagtaaacatgcataatagatttcaaaaaatagaataaaaattaaaaacatcaaattaaaagagatatgtaatataatttcgtttgtgtggatttttataaagacgcatctaataataataataataaaaaaaatatgattttaaaaaataataataatattaaaatataattttactaattattgatttatacagaatacatataatatgggaaaaaaaggaagcatgagaaacattac

SEQ ID NO: 54900 - DNA, 968 bp, Cannabis sativa
ttgattcttgatgagttcaaaaagaaaaagatattgattattgacaaatttccgtaagattaaaaaatatgaaaagaaaaatggaaaaataaaaagaaaaagacagaaaaagttgctctttgtctaattcccatgcatgagattttctctaataagctgcactttggtttgacttttcaatgtaaaagccaagagtttatcattatattattattttgtaggcaaataaaagacttgaattcctcaatttatttgcttcaattaattatgacggaatgtgtgatgcatgcacacatcattaatttttcggccgcatgatcgaacacagatataattgaggacttaactatactatacctgtgtgtgaactcaaatacccaacacttttcttttaccaaacacatatttgggcgtttataaaggtccttgtctttattctttcaagaaattctttttaatcgacttatcgattcacgcatacaacatcttattcaaagatggtttttttttctttgttttccgtatccttttataaaggtacaaaattattgattcatgtatttcaagtgatatatggtgcataaagattcatatggatattttggacactatacagtcttctattctcttaagagaaatatatttacccttacagttgttgttgacaacttttaagccaatatttgaagatgtatttctggagaaatcaaataatataagaatatcactactacaaaagacacttttggtatcagtttcagaatcatttaatttaaaaaactgacaccatagagtagctcaattttaaggtgtcggtttataactgacatttaaaaaaagtaatggtgtcagttaattaaccgagactaaagcctaaactgaaattaaaagagctaaaaaaaaaaccaaatgcctctatggtgttagttaataactgatatttgaaagtttaaaaacccctttagtct

SEQ ID NO: 54901 - DNA, 2317 bp, Cannabis sativa
  modified_base (58)..(81): a, c, t, g, unknown or other
gtgaaccatgcaacataaaagcgaattttgatattatattaattagtaaatctgattnnnnnnnnnnnnnnnnnnnnnnnngcacaaaacccaacacaaactgcacacaccacacaaactgctggtaccgcaccgcaccacatcgcataaaaaatacggtttaaaatattttgcggtgcagttgcggtttgctttttaccaaaccgtgtggtgcggtgcagtttgcgatttttgaatttaataattgcggttcaaattgcacaacactatatattacaaagttactaatttttacaatatgatttttattctttttttatataagaacaaatatatataatatatgtgtatattacatcattttcttagatacaatctaatataatgacttgatgattattatacatgttatgatgttaaaactttaaaaagattttttgttttgtattgttaaagctttattagtttgatttttaaattttcattataatgtttgataatgatgatggtgtaaactgctaaaaccacaccgcatcacaccgtatttttgtagtatggtttttgtagttttaagatctcgtagtatagttttagtttgagaatttacaaaaactgcatatgcggtttggtttgaaaaaataactacaacccgcaccacccgcaccgtgaatacccctataaagtacactactgacattattgagcgtgctctccttactgatactagagttgttgacactccctctgagttgaatgtttagttttctccttctgatggctctcttatgaaagatcctactttgtatcgcatcattgttggcagtctagtttatctcactattactcgtttaaacattgcatatgctgttcatattgttagttagtttgttgcatctcctactactgttcattgggccgttgttcttcgtattctacggtatctttagggtaccatctttcagagcctactactaccttccacctcatctctggagttgcgagcttattgtgatgcagatcatggtcgtgatcccacagaccaaaaatttatcactgacatctgtatctttttggaagattcccttatttcttggaagagcaagaagcagtctgttgtttctcaatcttctatggaagctgagtatcgtgccatggcatctactactaaaaagattatttggttgagatggttacttgcagatatggatgttactcactcttgtcctactcctatgtattgtgacaatcaaaatgccattcagattgctcacaacccagttttcatgagcgcaccaagcatattgagattgattgccattttacttgtcaccatctgacgttgggcaccattactttgccttttattccttctttgttgtagcttgctgacttttttgctatgtcgcatacgatttctcgttttcgctttttttaggcaaactctcaatgcttcttgtagcagcatcgtgagtttgagggagggtgttaaatagttgtttagagttgttttagtcttttatttcattttagtattttattttagtattttatgttagttgtctatataagactttcttattagttaatttttttttaatttttaattttacaatagaatgaaactttaatttctctgtatctcttttattttttacttgttagcttttttttttttcacaaataattattactaaccctccacgctccgctccgtgcaacacaatcgtaagaggcagacaagggcttggtcggagtagggccaactctaagcatagtgaactagactcgcgtttagagcctacttattttaaggacccaaataaaaaaatacttttaaaaaatatacatactttttaaataaattttaaaaatactatttatttttatagtcaaagccaaattttttcttttttgtttatgacctatttcaactcaaagtccgcctgttgaaccacctatatgtctaaaagaaaattcaaaacccaagtgatgctgaggtgttcttgcaacagaacaccctccctcatggacgttattgttaccaagaaatcagatacaattaaagagagagttgaccgagatgtgagtaatgtaatgtggctcacttattttataaattacattatagaaaaaaagtaggtgataatatattagatacgtatataatcacatatatattttttatttccctgtaaatcacataaagaccataaaatagtgttgcttatgcttgagtgactttcctaaaatgcatactctttttttccttttttgaaatatgcaaagttataccttttttttgacaaaaaaaaaaaaa

SEQ ID NO: 54902 - DNA, 2959 bp, Cannabis sativa
  modified_base (54)..(56): a, c, t, g, unknown or other
ctatatcattagtggcaagcaatatgtcgtcgacatatagaaccagaaatatgnnnttactcccattgaacttgtgatatacacaatcaataatgatattcatctaaaaaccaaattagacaattacttaatgaaacttgtgataccattcacgagaagcttgcttgagtccatagatgaattttttttaatttgcaaaccatattctttaggtcaacaaacataaaattttctggttgctccatataaattgtctcatcaatgtcgccattgagaaacactattttaacatccatctaatgtaactcaagatgtgacagtcattcccgtgatctattaggagaaatatcgagtaagttgtgcaatcccacacctcctgggaaatgtcaagtgggatgattctgagactgtgttagtatgggactatacagttgaagacgcatttacagctgctaaacaatcagattcaataaaatgtgaagaaagacctacagtaagagtccaatccaatgctacaagtaaagccaagcactctgcttgaacaactgaaaaacaacctgcaaaatgataccaataaaataacattaactctcaaagaactaaaaaaagataaattaacaagacaaatttattaactcatgctaataataataacaataataatgaagatattaagaatataataaaattatatataaaaataaatatatatatatagtatatatattgaaagggagttccgcttaaaaataaataaattattagcagattttcaagtatgctatataaatactatatatacgggctaggtgatgaagggggagtgtatgtatgtatgctatatacatacgagagcatttatgcaaaattacagatttcttgaggagaaccatatgaaactttttggagaatatgaattcaagaattgagttactagggccaaagaaatttaaggagaatttaggtcagaaggattgatatagatggatgagtggtagagaactttcttttcgataccttatttctaagctttccaactactataatggtagaatgatgttcgtctcttcacgccaagaaatagagaaatgttgacatggaagatcggtgttggtgcaagaaaaagataagggaaaaaaacttctgacattttgcataccaatcgtattccatatcattgtcaaacataaatattaaatctccattgctataccattgccaaaaaagaggatactaatttccatcctttttcgcactagcttgttgctactttccacaaccctttccaaaataaaaccgataatggcacaaaataataccagttgcccgctttattttatattttacccttacttggcaatggtaatttcctaaccattggattctgaaaattcacattttttttttatcatccaatgacccaaaatgttttgaggtgttaaacacttcaaacccatctgaggtactacataattgaccataaatgaatatacatgaaaaggcatagtaataataaaaaacaatgaaaaggaacgatgaccaaaataaactacagaaacatagatatttattcatttgttttccttagatctataatatatggctacaaagactcccctaccatagggacaaaatcagtgtgcttactataaaaataacctataaatatcaatcccatgacaattaaatactaatttaatttaagcatacgaatttgattaaatattatataatcaacctattaattatgtaaatgaaaaaaaacaatcagaaattagtacaaaagggaatatattattttaaatgcagtactcattatagaaactataaacctaaaaaaataattagctatttaagaaacttaaacaacaaacctaatgatactcatccgaaagaagtttaatctttgaaataatcacctctaggtgttgcgatacttttccatgagttatactatttcttttcccccaaacataccatgccgaaaggataaataacttaaaatctgattgaggcaacacatccgatgctcgtaacagaacttgttgaaaacttacatccactaataccttatcaataaaactaaagtgtaagagtttccaaatttgacgaaaagcactacaccaaaatattgcatggctattagtatctttatcaaaaccacaaataggacaattcgaacgaagaatcacatttcgcttttttaaaccccaataggtgggtaaaatttcatgaaaacccctccacgcaaaagtaagaattttatttggcaagtgcaatttccagaaacatttccacctaaaagaaaaagcttctctagagggagagccatgcatagtatcaaaacttgtagccacccaataaccactctttactgaataatttccatcattcgtatagtgccacatccaactatctgttttttagaacttactaagtgggatagagcaaatacactcttgatcaacccggtgaaaaacagtatccaatgttgagaaattccaatacccagtttcttgtgaaataagatctttaacaagcaatctagagttctctcctactggagtaattggtagaaatgaataaggtcgtggtagccaaggatctttaaatacatggatactatctccatttcctactcgatgacgcaacccttttgcaagtagagcatgtccccaaacaataattttccagacataactaggatggtcgccctctggaacgagaaacaagaaaataaaatcaagtgttatagtatctaaaaaaaattaagaccataaactaggattgctcctatatactggagaaacgttataactataaaagaaatatcaccatatattgaaagtgggcttgctatcaacaatcaacatgatatttcaaagcaagacatgacatacgttggtattgattatatcactgctttaagcaaaattgcacgacctccaaaagaaaataa

SEQ ID NO: 54903 - DNA, 1046 bp, Cannabis sativa
gtttcatacgttgctttgattgagcgggaatatattttttttctcaatttctttaattatcttatgttttactgtgactctgtgaccagactataattgtttgctcgacttccttgaaattgcactcaactcaataggggatttcaaacaaatgtttgataaatatgccataattttgtttgtacatttttatggcatttttatttttttatcttttatttatttttatttttttgaaacaaaagaagattttattcaaaggaaccaacaagaataaaaacacgaaacagcaactacaaaactggccgaacccagcaacagctagctataactttacataaatggacatcaaacttgtttttgctagtacctataaaactcatacatgtgtatttgacaactttcttaatatccatgctaatacaagagatagttttgcaactaagatcaaaaatacaattatttttattcatctaaatgttatagataatagccaagcaaacaacatcgagcaatttttcctacaagtttttgaggggtttagaaagccaatcataccaatctttgaagctcttcggccagtctaatctccctaaccaattgctaacttcagacacaaccttcaaagtatacgggcaatccatgaagatgtgagcatgagtctctttgtcaactatacaaattggacaaagatcatctggaatcgacatgatcctgttgatgtgttctcttgtcaagagttgattattgatcgcttgccaaccaatgaatctatgtttcgggatacacatcttatgccagattcggttagcataatcaactttttgcatgggattaactaaaatgtgtaacatatttactttgaacttaccattcttactagcattaacaatatctatcctgttagtagagtttctcaaccgtaataattttttgaaatatcagctcgcatcaagtttaaactcaatttaccaaaattcctttccctttaagtagatggcatttatccacctaacccacaagttatcttgtttgctcgagatggc

SEQ ID NO: 54904 - DNA, 1718 bp, Cannabis sativa
  modified_base (346)..(349): a, c, t, g, unknown or other
gtggccatgcaagcctcaattttccaattttctattgcctatggacttcgtgaatgtcacgaccttatgcacacatgggcgcctatagaccatgcaaaagatttttttctaccaagtttggctttgttttgtgttgttttattgttttcttgagtttaacgttttgttttcatccatacaaatcctatgtggccatgcaagccacggtttttcgttgcttgttaactcggtggatgacacgatcctatgcacacatgggtgccagcgatccatgcaaagatcttttatgaccaagtttggcatttgttttgttttttttttcttgttttcttgagtttaactgttnnnnttcatccaaacaaatcctatgtgtccaggcaagccacaattttccgttgcttgtggactcggtggatgccaccaccctatgcacacatggacgtttgcggtccaagcaaaagatttttttgaccaagtttggctttgttttgttatcttgttttcttgagtttaacttttagttttcatccaaacaaatcctatgtagccatgcaagccccaattttttgttgcctgtggaatcggtagatgccatgacactatgcacacatgggcgccagcggtccctgcagaagatcttttttgaccatgtttggctttgttttgttttgttttctagttttcttgagtttaactttttctttgttttgttaaacttttgactagatgagtttccaatgctttgaaagaagtcacgttcgaacgagttcttcattggggagaaaagacatgatgtgagtgatcagtgcattagtttgttaggtagtccaatatcgctaatgtgtggaatgataatagaatatataagaggaatgagttactccttctattgccaattggttttgagatagaatctcatgcaccttaccatacactcactgcattctaacatattttcgaaattttgtcctcatcagccatggatggtgccatttgaaccctttttttagaacaaatatatatatatatatcaaagaccaattttagtcctacccataaaatgcttactaataaactaaattcctggcaaaacaaaaacaaaataaaaaagttgttaatgaaattttgtcaaaacaaataaatacaaagatattgaaattgtgcatttttggtatggttgagcttttagtaaacatataagtataatcattgccttatagaaaaaagcataatataatactaatttgagcatatctcagaaaatctcagtaatgatgaactttggaataatttgcatttctttcaatactcaaaagaaacctataaattaatagtaataataacataaaggataaatttaagaaatagaaatagaatcttacaaaaatttcgtttcttcaatcattttattcttattttgtttaacactattaacattgttagttttactataatcaaccacgtactaactttaaatatattctaccatcaatttacttatttattttaaacaatgaaatgatataaaatattttctaatcaatacaacttgataattaattactcttaggagtcttattaattattcgattataattcatgtattttattttgtcttttattttagtgcaaaaaaatatttataaaatttaaattaatctaagtgaattatatatatatatatactagcaaagagttacgtgcgaggcacgtatact

SEQ ID NO: 54905 - DNA, 769 bp, Cannabis sativa
  modified_base (466)..(481): a, c, t, g, unknown or other
attgcataaacaacacaaatcttgcttcaacttaacaaaatttcaagttcatgaacatgaactcaaacccaacacaaatctaataaattccagcaacaaccatcaaatttaagcctgtgaataagtaagaaaaaataccctaattatttcatctagggctcaacaataaaaatcacaacaagttcaaggaattaacacttaaatcccatcaaaacattacaattcttccatacatgcattaacaacaagatcaacacataatcatgctctttccatagttaatttcagcaaagaattcaaaaataaaaactgtaaaaaaactacctcaatctccaattcaaagcttagcacaattaattcccaaaaattaagctccaaccaagcttattcctcacaatatcaagttgcaatcaagagagtaagagagggagagagagttgggtttgggagagagagagagagagannnnnnnnnnnnnnnnccagaattttcatttacttttccttaaaaaatctattttgtcaaagtaaatcttataaggtcaaaagactattttgcccctaaggccatataacatgcataaacactctcaagggcatatttatcatttcatacacatttaattcaaataaaattcagattatcacccttatcaattaaatgccaacatttaatcccaaattgcatttcgggcccaacctcgttcggcccaaaatactcagttgtgacgataccgcgccaacctgtcagaacacacctgaaaagacaa

SEQ ID NO: 54906 - DNA, 901 bp, Cannabis sativa
tctttcacatacaagtcagcatattgatctactatatatgttacctttacaggcaagaaatgcgctgactttgtaaagtgatccactacaacccaaactgagtcgtgcattcctgtagtcctgggcaaaccagccacaaaatccatcgcgatatccttccacttccattctggaagggataatggctgaagtaatcctactagtcgatgctgtttcgctttaatttgctggcaggttaggtacttggtcacataattccaccacatcccttttcactccgtaccaccagaaatagggcttcaaatcttgatacatcttggttgttcccggatgtagtgagtaaggggtagtgtgagcttcatccagaatttctttcttaagctcaatgttacctagaacacacactcgaggtttaaacaacaacatcccactgttagaaatcaaaaagtccttagctttgcccgctaagacatcttcttgagttttaagcactttagggtcttctagttgtgcctttttaatcctttccaataagtctgattgcaacgctagattatgcaatttcccagtcacaaactcaatatttgccctagacatatccaaggctaactgaggagaaatcattaccatgttgaaagtctgatcaggtcctttccgactcagggtatctgccacaacatttgccttcccggggtgatacaagatttcacaatcataatatttcaccaattccaaccaccttctttgtctcatgttcagatctttctgagtgaaaaagtacttgagacttttgtggtcggtatagatttcacattgctctctgtataagtagtgtcgccaaattttcaaggcaaacaccattgctacaagttccaaatcattagttggatagcgctgctca

SEQ ID NO: 54907 - DNA, 1183 bp, Cannabis sativa
cagggtcagccctgtaatcggcgatgtaatctacttacacttaggcgagtggaatgtcttattcaggcattagtaaagtagatttgtatcgaatttatagtgtttacattggactggaccgatattaacagtagaaaagatattataaacttactgttatatttattctaagtcaatgtcacttaatttattatatatcaatttgatctcaatcctaagatgattaaactttaggctaattgtattatttgagttccttgacttgttccttaccagcttacccttaaggtctagcccatacttacattttgggaactcggtgctgtaattgagtaggagtgttaataatagatatggacatctttatttataagtgaaatgatggtttcttttgatcttggttgaagacgttgaatgatagagtgctcatttcagtaattatattagtttactgaaatattatttacaagaaactaagtatatagagaataaaatacattgaggggtaaaatggtaattttagtccttactcaatgtagaccatctatagagggcctttgattgttctgatcgaaataatggataatttacagcgtatctatattggttgtatggagcgttctatgaactcaagagtttcattttgagtctatagtggagtcacaaggaattgataacttagttaatgtattcgttaaaattcacatcagcttattaatagcttggtttcatatgttagggtttatgccctgaaaatcctataaagactttttttattataaatagaagttaaacaatttgatatatgtttgaatgttgaatatttattaatagtataaatatcaaaaaattctttattcatatacgaggttgtgacttgtattgtacggagaattatgatcactatctatgaataaaatagtcagcaacataataacattatgaaatctttaatcaacggttgctagtagtggtgtgcataaatcgatctaatccaatgacaaccgatcgatccaattacaaccgaccgccaaacattggatatacaattgtgatcagatcagattggttgttatttttgaatattcaattggatcggatcatatattggatggggtgtccgaaaatccaatacatccaatatccaatcgaactaattatattttcatttagtttgaatgag

SEQ ID NO: 54908 - DNA, 852 bp, Cannabis sativa
tacatagaacaaatggaagaagatggaagtttgaaactgaagtcttggttatattacatatagaactatgacttctttttcttgtcactttcgggtttaataagctgaacaggagcagctggtatccggacccaccattctctagctcttctaaatatcttgtcactgctttctttcctgtaaggcatttccctagtgtaagcctcaaggaaaattaccataatgatgtatttgaaaggtacaaatgcgaagactccagccaagaaaacaagcaatagaaccactccgtccgtcgcctgcacccaaacaaaatatatataacattagaaagtctaaatctgaatctataaacgacagtctaaaatagctttaaatacctctatttattctcaccttaattctttcatttttataatttttttattctacatataaataataattaattgaaatttaaaattacgtacataatattaatattatatacagtaaaaatttaaaaaatttcaaacaaccgagttttttcctagtctaattaaattgtgaggaaaatagttactgaggctagatcagtaatatcactaatacttattactcaaatttacacggagtaatattaaacaaatacctataactcaaatttacaagtaaactaaaccacataaaattattgtagttctactttaataaatttgattggtttaaaatgcatgcaagatcatttataaaatcttaatattttaattactcatttataaaagcttaatctggaaaaatgtcatcgaccaatgtaaagttttgagtggtaattagttgcaagaatttctatacccgtggtagtacggcaaacat

SEQ ID NO: 54909 - DNA, 1061 bp, Cannabis sativa
gtcattatccaaagccttattgttcagaaacttatcatagtgaagattcttatcctaaatataggcgacgaaataacaataaaaaagtcaaaattcatggacattacctagataatggatgggtaatcccatataatttatatttgttatgttagtttgattttcatattaatgttaaaatttattctactattaagctcgtaaaatattcatataaatgtgtatacaaaggtcaagatcagataaatttttctgtaaatagtgacaatgcttcaaacgatgttgatgagattcaacaatttcactctgtggatttctctctcgaagcaacatggagaatatttagatttactttgagtgaaatatatcccttagttgttccattgctattgtatcttggagatagtcaattagttacacataataaattagataatcttgctaaggtaattagctgtgaatttttaaatgtaggtataattttgggtatatatttattttcctagacactaagaaatcttattattagtggtgtggaatgaagaaagatgtagtggaatacatgtctaaatgcttaacatgtcagcaaattaagacataacataagaaaatagcaaggttactacaaccactagcacttccaaaatagaagtgggaggatattacgatagattttgtggtcggtttgcccaaaatcacgggaatatatgactcagtatgggtcatagtggaccgtttcacgaactcaacacattttctattggtaaaaataacttatacagtggatcagtatgcggagctgtatatgaaagagatagttgatcttcatggagctccaaaatccattgttttagatatggatctgaagtttacatcaaagttctagataagtcttcagaaagctatgggtacgaagctgaagtttagtacaacttttcaccctcagactaacagacagttagagagaacaatacagatactagaagacttactgcgagcttgtgtcatggacttcaagggttcatggagcaaatacttacctttgatagaattttcttaca

SEQ ID NO: 54910 - DNA, 864 bp, Cannabis sativa
gtcacctgatgctactttttttttatatgtacaaaaacataaaaaaaaattagtagcatcgggctaccatcgaacccccatcggaccaccattagtatagatggaaatagggagtatggatggtgaagttataagagagaagaagagagaagggtataatgggtataaatataaagtgtgcctattttttttaaaaaaaattttagtaaacttgtgttcaaaaatttaatatacaccaaatgtagcctataaattcaagtttccctattaaaatttattttttttttaaaaaaaaatataattagtatttttactttttaatttttttacactattaatgtcttcgtgatataccatgtttaaataatattcatcgaaatataacttttataatagcatcctccttcaatcacattttatttaattttatagtaaaatgagtgaattaatgaatggtaactcataaatagattgtaaattaaatacacttcacatttttttatgttaatgaataatataataaaataatattttctttttcaagataattcatatttttttttagttttgtaatcattaaagtaaaattgatgaaattaggggtgttgatctaatccaatttgtattattttactcatagtgtattgcatctgcactaagtgtggattttatattttggatcaaatctaattctaatctacataataactcaaatccaatcaaatctgtaaaagtatagattgaatcgattatattttatattggttactttttaatattaaattatttaatatttatcaaaaatatattttttcccataactaacaactaaataaaataaattattattgttttatgtctcca

SEQ ID NO: 54911 - DNA, 1506 bp, Cannabis sativa
tttataaaccaactttccataagagaaaagattctcttacaagaaatttccaaacaaagaaaagttcagcattaaaagcatctttcctaaccaagagaagatcaactaaattcgaatatacaaggtaagaaatcggtaataaatgcaataatatcttaccattaaataaaaaatattttgtcaactaacttgcaaacaaggactttacaatctccccctttgacactttagatgaacaaaatattttttaacacaaagtacctgtaacttaaagttagcacaagcaaataacaactccctcctgagtaacacaatcgaaaaatcaaaaacaacaaaataacatacttttaatccaaaatagttcacaagtaccaaacacaactccccctggaaaaagggtccagagttgttaaaaacaaacagttaaaacaaactaattactccccctttttgtttatctaagggacaaagacaacaagacatgaaaatatagaaatatagaaatatgtccaacaaaaacaaaaaagaaagaaaaacttatgccccataaagcttgatcagtgtggacagctgcttggacatcacttgctgaacctactccatggcagcaagtcgattgttcaccagttgaacctcgttcttgacatcctgaacatctacagaagcagaactcgaacttgcaccagtagcagcaacatctttaggccttttgggaaaagctccatcaaaatactccaagggttggaaaacggttccagtcagggaaggctaaagagtttcatgagattgggccacatctttctgagaggacaaaatcttaaagattaaattgggacacacaagcttaaaagtgcactttttacctcttcgaaatgaaataatctgatttaaaatgtgggaggccaagtcgatggatgtgcccgaggtgatacgaaagaggaatgaggccacatcttgagacaccatggtcttgtttgagttgggaagccaattgctaagagcaaacctcatgagagatgcatgtgcatatgtaagatgtgcaattcgaagactctcccccaatttcctttcaactcgtgaaccagtgagttcagagtgcatcaattggtgatccataaatattattgcattggcgacattttctgccagttgcaaagctttaaaaatatcttttttcagcaaaggaaaaccaatgacctctaacaaaaacttttctaaagagtctagaattctcatcaagaaaatcatcagataagttagcatagaattctttgacaatgttttcaatatatccttcgaaaccagtgagagtgttctcccattgatggtattgaatgaacttaacaataccatataccctatgagcctgcaaatcataattcctttcactctcaaactttcaaatagaatacaaattccaatcacgctcattatcacgaaagtaaaaatgagaactataggagtgagatgtagggatattaccaggagatgaatccttcatgggct

SEQ ID NO: 54912 - DNA, 1625 bp, Cannabis sativa
ttaaaagtccttagcttgcaataaagtgtaaaagtcagatcgactcaaagaacaagtatgcgagatgaccatgtcgctatgggaggacttcctatagcttcatccaactaacaggagcgaggatcacgaacctggagagtcagaagatttctttataaataaccgcgatcgacacaaaacatacatcgttgacctcgaaaggaagaatggccccaactccctattgggatcactataatcaagtttctgtcgagacatctccagattcaacaattaaagacgtgtttaatacatattaattttaacccaataaaagcgggaaaatcacaaatatatgatattttcaaatcataaactgcatttacatttcctgatatgtaatcaaatcccatgattttagggataattgtcgtaaagatattctggtcaattttgtaattaactgcctactatgtaattataaatagtggcaaacaagctcaaaaaagggacaaaaaaactcatatgaaagaggccctcagaaaaatactcagaaatctgaataagattaacttgtggactatgcagaattttaactacaaaaccacgtaaaattttatagcttttattttttctttgtgaaattattatcgtgaggctcaaatttggttaatgaaaatctgcgttaacacccttaatttgacacgtgtcctccactgaaatggtagccaaatttcgggtataacaatttccccttaaaaagttccttttaatgaaaagttccttttaattattacagagggcattttcatcatattcccttttggaaaaacgtgtcctttgattttggcggttgtatatttcgagcgtcattatgaaccgtcttttcatcttctgcctcactcccaaccgttagatctcccaacctttggcctttccgtttaccaggttctggtataaaatggtggcttaagcttgccatattccacaaacttctggttttttggtgagtttcatcttgagattggattgtcatgctcttgctaagatgtcccatccaagttcagaaacttatccctccaaattcgtaacaccagaatacaccaaccactttccctctctacacgttcctaagaaccttaaacctcaatttaaactggaaacaaaggattccaagaatgaggagcttctgatcaatcccaagcaaggagatgcagttgatcattactggcgaggcgatcctcacaatcacaagagatttttgagggtaagtatcatccctcgcgaatggtggtttgatctgaattattacaatgtttttgttgctccattgatctcttatctatgtccctacaggaatggacatggatcttgagaacaagttcagaggtcctcctcaggatgataaggaatccaggaagaaggtaatcccaattggcgtggtcattgattctactgaagaacccaactggcccaagacccaaacttgcacgaggggacctttagaccagtcaatctgtggtgttgaaaaatttcctgaggctgggaatgaggctcgactgtaggaaatgggatcttttgatgtggagaatgaggtctatgcagaggttgagaccttttaagtgtagacggtctttctcgagcta

SEQ ID NO: 54913 - DNA, 663 bp, Cannabis sativa
atttgagatttttgaggtgaatggtatcatttgggatttgatgaagtgaatgacctcatttgaaattttgaagattcgtgattgtacctaattttagcaattaagttgcctgcgtacccaaaatgggatcaaatcaaacatagttcataatgtggtaaacttgtttcatttgtagatatgagtattttattttgaataaaaactcatttttaatctcccttgaataagttgggaaaccacttgaattacaattctattttcatgggaattgtaaaataattcaaattacttgagactttgtgtctttttttgaaagttatttgaattgtataatttagaattggactcaataatatttgagggaatactgctttaaatcccaattttctcacatggattgtgtattcgttttctttacaacacatataaatcttttgacttcatacacactaaaattttctgaagcttgattttggggttcaactttcagatcactgatccaatttgagtacctctacaggatagacctcaacagaaaactgaagagtaacagcagcaagtgattaagttcagtagttcctcatataaaattattgactctagagatatagtaatatggagaagacaaaattgtttcaagcaccgacagaaccaaccagaagc

SEQ ID NO: 54914 - DNA, 631 bp, Cannabis sativa
gggctcttatcctacttttatggactgccttagtcttagtaagttttttaaggtgtttaaggttatgttcaatcctcactcttccaatcgtgtggttgatttcttcgctcggtgggctaggttgaaaaagttgtgtcccatggttttttaatagaagtgtccccctttgtggccactactttgttatagctgtgttttcttgtgtttaataaagtttgttacttacccaaaaaaaaaattaatatgcaatatcgcactatgttgtacaattgtgtatataaaagaatgacattaagtcccattttttaatattattttcatccaaaaataaaaaaagaaaaaaaccataagaagcgtcaacaccaaagccagatcattatccatcataattatttaaaaagtgttaattacaacctcttatttaacctatgcgtttaaaatcactgaatatttgcttttctaatttctttcatattgttactttttatagttacaatatcatctaagtaaatttttaaaaaattccttatagtttactgttgggattaaactcacttaatcagtcaaagtcaataggtccatctatttattgatcagatgaattcgaaaaaaagttgttgttagttgtaat

SEQ ID NO: 54915 - DNA, 1224 bp, Cannabis sativa
tctctggttttctctttggtgctctgcaccagcaaacttgttcttgtttttacagttcaacaggtacaacaataaaatgaatatttttttcttagtttttgtattattgtcatgtatcgtggaggccataaattaatccacattaacgtttccttgcaacataggttatctcatcaaaatgcctctttttttttttttttttttttttttaaatcaaattcattcaaagttaaacgattacatagaaaatgggagtaaacctaccatctctttattataatatatacttcaaagtatttagatttttaatcatacatatactatttatttagtattcagaatcgaaataaattaatagaaaaatataacagaataaataaataataatcgaatcaatatttataatatgttgttttttaaattgtttggaaatagaataatgatttattttgtttactttatcagaaaacctaatcaaaatgtttaaattaactaaattattcttttgagttaaactataatatatgataattattttgtaagacatattttgaaagataaaattatcattataattttaatattaaaaagtaaaataaaaatacataatagttattacctttaatgacattctttagaaaattaaagggaaaattcttcatttttttctcttatttaatctcattttcttaaatttaataaattaaataaacaaatgtaaaaggatgactctcttactattgatttccattgctcaataataaacatgccataaaaattaatgtaatcatgtatttttgaacacaagatctctctcttctttttctttttatttttaagggtgaacggaaaaactctagtcacaatatgtatatataaatttgattatataatatatattttaaataaaaaaaacataaataatttgtacttatgtagtgtagtcatttaaaaaagtgtatttaataatttttcgttatataagtagttcaattttgttaaaatataggaactaagaagaagataaaatatatagattagggttctttcttttcaagtttggcgaaaaggtaaaaataaatggtgcaaggctctatacaatactttgggggtaattttgatagtattctattcaattgctttttacacttttctttttctctctctcattttttttttttttttggattattacatttataaagttttgaaaagagactccat

SEQ ID NO: 54916 - DNA, 2133 bp, Cannabis sativa
tatttaaaaatttctatagtaaactccttaaaagatggtttgggtagatcttttatctgtttcggcattgcgtacgttgtaactattagcattacttgtaaatttttaaaaaatttgaaatagtttaccgtgtcgaaaattagatttaaacaactacttaccacgcttataagaaaaaataatcgtgcatgcaacaaaatatgtaaatcttattttcgatattgtaaactaattgtaatgttttgaaaatttacaagtagtcttaaatcactataatgtacataatcataaaaaaaatcgactaaatttttttttgtatgtcgaaaaagataaaaggtttaccaaaatactaagagggtgtacgttagacttatcctatattatttactatatttgtgtagtaattgtaattgatttatagattaggtatttttttttttccaatttgatagatttaagcttataacatattatacttatatctacaaattataagcatgacaataatactaatgatttaactatgttgtattttattttattttatttatttattttaataattatagtatattttattatatatctgataaaattaaaatgtacccaacaaaaaaataaaattaaattaaaatgtaaaaatgtgagaaaatcaaaaagataaaatgtagaagcactctcttaaaatgggtgcatcgatacacctatctttttcagaatccagaagaactttttagtttatttttttcataatcgtgtatattatagttatttaatatatcttgcaaaattttaagaaattcagaataatttacaatataaaaagtagtgtttaaataatctattttacactcgtataaaataataaaaaaaaaatcacgtgtgcaacaaactttttgaaccttactttcagcgtattaaattttttcgaatttctcaaattttttgcaggacgtcttaaacaactacaacatacacgaccatgaaaaaaattaaactaaacaattctccaagattctgaaataggtaggagtgcatcgatacaccccttttaagaggtgtattgtagaatttttctataatatttaactactaaaacagaccattaagcaaaagaaattactaaaagagacctgcaacactcacattagatgttttataatagataatctcaaaaatatttaaagaactaaactaaaaacatgctacatcattgttagaattatgtcctaaaaagcctataaagatatttcttattattaatgaagagttgaatattttaatatatttttaatttaatattttatattttatatatgagaatgtgacttgtagttgtataaagaactaagatcacttaactatgaataaaatagtcaaatagtcagcaacatatagcaacatattaaagttatagaatctttaatcaatggttgctagtacggttcactgatgtcgattcttcggtgtaagtaatctcagttcggattacagatatagtatgacatcaaagtgaaggtgctttatgtagtagagattatatatgacattgaccgataagaataaagttatatttatctaacatgtcatttgctataaggacctaattcatattataacgatgatcaatagtagaaaggcctaaatcctgagtaatcatgaactcatgttcatgttattagtttctttgatttacttgctaaagtttctcagagaatatgagttttacaacttctgttttaggaatctaataatgtggatgactaggaacatgatttataattatagaatcctgactttcctaacagatagaatgttggctcccttttagtgttaattctagaattggaaattgtacagaaatttaggtgagatttaatttatacttcaactagtgaattaatggcactaaaagataaagaagtaattagaaaggtaaaacgataatttgaccaaaactaattatgagccaacacatggagggctaatcactgaaattaattatatcaatggacactgcagtatagctcaataatataattttataattacctagagttcaattttatatttacagtggagtaatcatagaattaataaacaaagattatttggttgatgagactcaataaa

SEQ ID NO: 54917 - DNA, 697 bp, Cannabis sativa
gaagaaaaaggaaaacattaaagagattttattgaattgaatgaatactaattacagggagaaaagccttttaaataggcaataaaggtaacaagtaacagaactccttaaatcaaggagaaccgatagaccaaggatatgtactgatatgtaacattgaccatctaaaccaaacatatacaaacaggtatatgtatttaacagccacttaacagagtcagacaataaccaccaacaaacagatatacactaactaacagagtaatacagtattcttgttaattaacaagattaaaaatcaattataatcaatacatttatcaattataatatcacacatattcttttataacgttggcatactacaaatgatggatgtgaattatgaagagctcatgaaatcaattaaagtcgattttattcagccaattcgaccaaattggaagttaaatgtaggagtgggcaatatctaatctaatttaattaaattgaacgaattcaatttaatctaatcctaaaaattttattctatataaattggattggtttctggatgccaatctcaaaattcaattaaagatcgatttaatccaattacatttatatatgttaaaagataatttatataataaaaaaataatatatcttaattctatttttattagatttttttttttttttttgtgttaaatttgta

SEQ ID NO: 54918 - DNA, 730 bp, Cannabis sativa
aatgtcgggaatagtcaggattttagaagtgaccaaaatacccctaagtaattttatgattagttagttatgggaagcgcaaaatggtaatttttcctaagttaatgtttttttcctttagtggacattagaaggattagtatgctgaatattagattgtcattagtttaagaaaatcattattcatctcattttataaaaaatatcaaaaattagcaaaaaaaaaaaaaaacaggaattccctctatttcaactctctatcttttttgaacccctagaatcagctagggtttggtgtgttttacatcaattctaggatattcagcatggttcttgtaatctcaagctttaggtaagctcctaacacttttctctttttgtttcttcaactttaagttatggattttggcatgaattgttagtttagggctcagtggttgctgttgtagtttgatattgttttctggagtttgtttatgattaaatatgttgaattaagctggttttgagagctgttatgttgtttgagcaagctttgagttttaaaactcaagcttggctctttaatggtgatttttaattctgagcttgtttaagttgtgttgttgcttggaatatgtctattggggtataatatgcatgtctggaaggtttggtaaggattggaatcgatttagttaggttttggaattttcggggttttctagtgtaaaccggttaaccagtttta

SEQ ID NO: 54919 - DNA, 1521 bp, Cannabis sativa
tcgtgaaaacccactactttttctacaaaataaaatgcaaacaaacaaattaattaaaattcatatgcagattaagcttaacccacaatttaaatttaaaaaatgaatataaacaccttctaagagatccaatatattcttctttagattgaccctccatttccttcatctcttcttcatatgttgataactatacatatatatacacattttcaaaaacacaccatgttataatcaattaattaatttactctttataattctaacccataaaacattaattagaactaaactaataatagtaaattaattaagaatgaataataatatttactggaaaattaagaactgtgtcttgtccccaatacttcaatgctgccaaatcatatgcatgtgctgcagcttcctcatcatcataagctcctaatcaaaaaaaaaaaaaaaaaaaaacccaaattaattaatagaacaagaaatatatatacaaaattaattattttagggtaaattagaaaagtaataacttacctaaatacactgcattcattccgattcagcaattccaccaccaaataataaattaacccaataaaaaaaacagaacaaattatatatacgattaaaaaaaattaagcaaatgttacttaattataataatgataataataaaaataataaccaaccttgtcttcctttcttattttgagaatcattccagcaatttttatcccacaaatgagcttcatatctacctgtccaacgatgtctgaaaaaaaaaaacataattaatataatttcataaacgaaaaataatcgttacaaatatttataaatatatatatatatgtatataatttcataaagaagagaaattaaccttgtgacacctctgtaaatggagctacgacgaggaggagagtctcgaggtatactttttcgagttcttttcttcaccttagatgatgatgatgatttattacctttgtttgtggttttattaatctcagccgttgatggactattcttctgggttttccggcagatcttagccattaattttaacttctttagctatataataacagagggagaaaatgaaaaaacagagtaatataagaaataataattaaaagaatttatatataaaagttatatgttccctaagtaggaagaaaatattttaattaatgaaattaataattacttacttgagtagtactaataataatattagtagtggtactacttcctagctagccggcttaaattggactgtggtttttttctttgccgtctctccaaacggctactaatctctttgcttttgttgtaacttgttattgtgaacaaaaatggtgtatatatatgtatatttatatatgttggctttaattttttaattttatcacttctaatattaagcaacttattggcattgggtataatttattttaattaattaaaggaattatttcacaaatatacaaaaataataaaaaaaattacaaaaatataattgta

SEQ ID NO: 54920 - DNA, 1304 bp, Cannabis sativa
taatacctgaaggaaggtgggttagaaggccattcattaacatagtcctgaagagggtggcaatggagtcttaagaagtctctccaattggatactttttcagtgtttacattgaaactggttgaaagtctagtggttttggtagggtcgtttgagtaaatcttcaacctttcatcctctggcatctgaaaaaactccttcgctatgctcaacattgtttctacaacctcctctgctattccatggttcttaacctgatcataaataataatatgtcatgtatttttcaacatcataattttataaatatatatatatatatatatatacctgaaagaaaccgtcgagttgacaagcttggccaatttgttgatgactttggagtggttggggccatagaggtcctgaagatcaatgagaggaatggagtgagcggcggaagtgtccagtgcggcgaggttagggcggtcggagattggtcggacatagtttgagggaacatgtttggctttggaagctaagtcggtaaggagtaggttacttgtgatagccatatatgattatgaagatgataattaattaattaattaattaaaccgactaatactttaatggagagaaactttgaaacttgtggatgtggtggtggaaaatgttgtagtgtgatgccaatttatagcgtcgtaaaagtgatgagattattatgtgtatatattttattagtactagtgacggtggaaccaacgagttggcaattggcacaaaaatctacaaaatgaaatcagtttattttttcttccttaaatattgattttgaatttgataaacttgtgggctttatattattaattgaatcagacataatgatgtattagttagtatttttactattgaatcttgatatgtaccaaattatattctttgaacttttaaggtcgttcaaaatacccttaaactattaagtttgttagatttaaggatttttgtctaatttcattcaattttattatttcagtaattgtctatgtattatattatgctctccagattttgatatctgtcaaatcatgtccctcgaactttgacatatactaaactatagtccctgaacttccatccatattagatttttttactaaaattagaaaaaagtccttaaatccaacaatctcaataatttaggggtatttttaacgaccttaaaagttcatagcgcatgatttggtatatgtcaaagttcagagaaccaaaatcctaattagcttttttttttttttgttttttttttaattaagtggtgttta

SEQ ID NO: 54921 - DNA, 571 bp, Cannabis sativa
agacatgcctataactaatgttcaaattaatttttttaattctttcatatatatatacatatgtaatttaggtggcgttggtaacacaattttaatccattttctgattttaaaatttaaaaatttttcaaaatcatgttgtacaaaactatttttatttttcaatttttaattaaaaatcaaaattttaaaaacaaaaaaaagtcactttccatattttgttaaacagattttttttcttaatcaatattttggattctgactagatccccagacccaaacctagccttggccctggcgctgaaccaagcccttgacccggacccgactcgaccttgtacctagacccgacttaaataaaataaaaaatttaaaatgaaaataaactttacataacacactttctatattctatttttaaaattaaaaaataaaaatggttatagaacgcatttttatttttcaaaaataaaattttttaaaataaaaattttatttttttttattataaaaaaatattactaaacgacaccttaattaagacccaaaaatttaaaataattaattataa

SEQ ID NO: 54922 - DNA, 1063 bp, Cannabis sativa
  modified_base (969)..(974): a, c, t, g, unknown or other
atatttattcagcaaattacttctttaatttcttgttttgaacatatgagttttgtgttttgtagtagataagcaaacttcgttaattatgtatgtgttcctagcaaaaaaagcaagaataattacttatatctctctttttctttatgttttcatgttaaaatttaattaatagcatacacttaagtagaacttctatataagaatactctattcaagaataacttttaatttgttatgaaaaaattaagttctaatttgggtcagttataaataagaataatctctaaattgtaattagttatacattttctaaatcctttattaacaaaatatacctttatataaaaataattatattttaataaaatatatacatatattttataaatttatttacataaaattaataattttattctaaattataatacatgtataaatattatatttactttaaaataattttattatgatatactaatgattgtttattgttattattgtcacattgatattttttggtattttaattttttttcttagtgtaactctatttagttataactcctcaattacaatataattttcttaatcctaagtgtattcttaaatagaggttctactgtatttgtttaagttgaaataatgttttgatttttttcaaagtctaagaggttgcaaattcaatagtccttttaaaaatgaattaaatattattgttggaatttaaaccaattaccaactatgcataaaatgtaaatgtaaaatgttcataaaaattactttataatcttattttataaattttatgaaaattttaaagtatctacaaaatataaatatttataaattttatgaaaattttaaagtatcaacaaaatataaatatttatcctacttcagttttatttttagattctgaaaaatcgtgtttttgtaattgtcaattatatataaaaaaatatnnnnnngtatgcgtctgcaaaagcagaaaggaattctgctacagcaaaacagaacaggcagaatataaactatttgcagaaaaataaataacttg

SEQ ID NO: 54923 - DNA, 1477 bp, Cannabis sativa
atatatggcatcttacttgttttttatggttcacttgtggcaagtaataggcgttttacttgggatcttttggataagatttattataatgctcctaatcttccttgggttgttataggagattttatagttatttgtttagtagtgataaatatggtggtcgagttagttctaattcttattcctcttcttttgctgagtttcttaataaattttctcttattcctcttccttttattggtaataaattcacctggtataactcaagtgttaaagaaaggttagattgggttgttgtctctgagtcttggtgtgacctttttcctaataattctttacatcatcttggtttttatggctcggatcatagagctcttaaactagttttagataataattcgtatattgtacctagttttgtcaataaaaggtttagatttgaaaatatttggttggaagaccctgatttttattctactgttaaagaggtatggtctgatcactctgttccaatgtctacctctgggttgcatttctttaataagcaacaacattgtgttaatcatctcaagtcttggggtaaaaaacataattctctctttaagactagaatttctcaacttaacttagaaattgatcaacttcaaaataagatggcccttacctttgaggagtcccgtaggcttggttatttgaagtctgctctagactctctgctgtataaagaagagatctattggagacaacgtgcgagggttaaatggttgaatgctggggacaaaatcacaaaattttttcataaacatgcctcttttaggaagaaaatgaatacaatcaaatttcttaaaactgaggatggctctgttgtgaatactcatgaggggattgtaactcttatcactgactattttcaaaacctcttctctacccaaggcagtgatgtggatgctgcttctactatattttcctatcttaattctgggttagaggagtctggtgtcagtttccttgatcaagaatttactccggaagaggttaggagagctgtttttcaaatctctggtgataaagctgtaggtcttgatggcctcaatgcctatttctaccagaaaaactggtcagttttggggtctgattttactaaggctatcttggattgtcttaatcatggtgcggacttttcctcgatcaattcttctctcattgtccttattcgtaaaaagcaacgtgctcattctcttaaggacttcagacctattagtctttgtaccaccttttacaaagttatctcgaaaattcttgcaaatcgactgaaggttgttttggacaaaataatttccccgaaccaaagcgcttttatctcgggtcgtatcatctttgataatatcctccttgctaatgaggtagttcatgccattaacaataggaagaatgggaaagttggttgggcggcccttaagcttgatatgtcaaaagc

SEQ ID NO: 54924 - DNA, 883 bp, Cannabis sativa
agggcataaaacctaacatgaacaagaccacaacccactagaaaatttcctaaaataaaacttcaatcagctaaggaatttccatttctgtacctacagaatcgtgagcagtaagtacgactttcctttcatagaaaaggaaagtttagctccgtttttctcctcaagaaatctgatcaaacaaaatataaaactcacacaagatcagaatataacagctagttaaataaaaaaaaatgagtaaccaaacttaccatttttatcttattttctattaataggaaagctagacaactttacttccaagattaaattaattaatataaaagttaaatacacaaaataagggaaatcaatttaaatactccaatcaaaattaataataaattataaaatatttttatcaattaaaaatgtcaaaaataaaattaacacaactacaactttattgtacagatgtcttagttgaaatagaaaattatcgaacccacctgattgtaaggccatgtatatgctattgttgaactacatctgttcatgctagctcattacgttagaagtcactgcttctggaacttcacggttcgaacataaaaaaatgcatttgtgatgggattaccaactcatgattgtgtacaagttaaatactcatacaatttaattgataataggtattatttaatcgataaaaaaatataataggatcctatatatattctaaaaaaatacaaagtataaaataaaatatattttaaatctcaaaataaagaaaaatgaaataaataaatatctaaaattttattataataaaaaatatataaagtagttaagaaactaatataaattatttaaattaacacaaagaatgtaaaatataaaatat

SEQ ID NO: 54925 - DNA, 911 bp, Cannabis sativa
tataataatttttttatttgaatagagagaacctagaagtaatcagacggagggacccaaatacgaaccataatcttttacataaaaaaaaattccttcgtggtttcataagaaggtgtcaatcttttacaaaaacccagaagactaaaaattcaataccctcccagtgaacttaatgaagaacaatggcgactaatatgtcaattgcttacatctcttgaatttattgctcggtctaggaaaaatgctctcaattaacgaaagatgaaatacacttcaacacaagggtcggtaactatggctgagactattcatcaaaatgtaagctaatatataaaatttttattttatgaagtttactttaaatataatttcctaacaacttatatttatcaacaacgaaagagttacattaagacttagaaagattgtcatacaaagaaaggcacatacacctttctcaatgaggctgccaaaaatacatatgtaagactttataaaataattacttttaaatatattcaaataattgtaagtttggttggtttctaacttattcttagtatagatggttacaacctgagatagtgctcctaaatctacataagtttctgagcttgagatacttcggcagactcttgaagagaggcgtggccatcagtgaggagtgggtggaaaattgaaagggcaatcatcagggtgacgctcacaacttgcaactactgatcaacctgacttacgggaaatagttgttgagatgcagacacaaatacagatgttgacttagaaattgtcacgtgaaggtcggtcacaaatggatgttgagatgaatgatgcagctctaacccaaccgacgcatccacaactatctccctctcatatacctggagatggatctagtccatcttttc

SEQ ID NO: 54926 - DNA, 2066 bp, Cannabis sativa
tttatcaaataataatgtgtggaatgcgatattgaagtgcacccataatgatatgttactttttgtggtgtttagcaccttaaagtacctcttagcatttctcttaactaatatatggatatcattaaaaagtacatatctaaatgaaattattcatttattttcaaaaaagaaaaagtaatattaatatgtaataataatatatattaatttgctttagaatattgaggatgaataaatgatttataactctatgttcaataaaaaaaattagaattttttaatattaaattagtcaaatcacaaagtctatgcaggaaaaaatagattccaagcccctagtccaaaaaaaaaaaaaactataacaaagagtttgagacagctcaagccgctaattggtgagctgccccttagattataaagcatagagtagagaaattgatgggagtgcttcttaggatttctcaaactgaaacatgtagggctcaataattaatcttttcggtagtgaatcacgagtgccgtttgccacttatcattttatatatacatatatatatatataaactagttagagtatgttatggtggcaatttgtgttggcgtgttatgtttgggtcttgttcagtccgaacacgacccgtgacacgaaaaatttgtaaaacacagacacaaacacgacttaaacaaattttgtgtcatgtcgaactcgcaaaatctcgtgtcatgttggcggattgtaaattaaattgttatttttagtgtcattgtttcatgtttttgtcgtgtagagttcttaaatttattttaaatggatgacacgaatacgatccatgatacaaaaaatttataaaatacaaacacgatccaaataatttttattttgtatcgaacccataaaatctcaagtgatatttgtgtcaaatctgcaggtcatgacctgaattgtcacccctaaaagtatagataacttagtttaatcatctacactaaatactaatttagtgttagatataaattcttaataatatttaatactatatgtatataaattcttagcaaaaaaataaatttaaataaaatcgtccaccaaattatttttttttatatattttgtgatgtgatacacttcgattattcatcagaactaaaactaattgatctctgttcttttttttgttaacgtctgaaagtgcagtttgatgtgaccttccctatcttttcttatttcatacttagccttgatgccatggacataagtggagagcaacactattgaacaccacatcacatgaaaacttaattactttattgatacaaaaataattataccacataataatttgaccacaatactcttaaaatatttagacactttatttggattactcacttataatttctatcaaacttatatgtttaactctctaagacaaacttagaataagaaaactcacactacacttggactcctctctttgggacactttttggatgattacactacaaaagacccaatgtcctatttataccatctataatcggttggtatagctgactttaaagtgtaaataactagaaaattctagcttatgttaaacttgggcttaatttcaattactaaaaagatctttaaatatccacatttatcttattatctcttaagattagaaaattctaaaagttggtgttgactttcacactccatctcaacaccaactcttcatattgagttgttctcttagcttctcaaatcttgaagtgttgagccctttagtgaatagatccgctacttgatctttactctttacttggtgcatctttaactcttcgcgtagaactttttatcttagaaaattgtaatgcactttcacatgtgttgttcgagcatgaaacattgtattctctactaaacgaatgaaaaattaattatcacagtggcaccgcataatctatagactggtatagatcctccatcaactgcactaaccatgtactctcttgagcggccattgttgttgctctatattatgcttgctctatattatgcttctatggttgataag

SEQ ID NO: 54927 - DNA, 736 bp, Cannabis sativa
aaagttctagttggccacaagagcaaccaactcctcaagagacagaaaaccaaaataagaaaaattaaatacccacttagcaagcttgtgagcaaactcattctatctacacaacatccacatctattaaaaggtccaacacccataatacattcaatttcatttacacaacacctttcaaaacgccccccaaatatatatatttatattttcttttgaataaaatccccaaaatgttacttgtcactttttttagtttttcaactgtaaatctactaatatttccattaaaaaaaactgtaaatatattaatagaaaacgcctagtgttggcctgtgtaatgtaagtttaggctatatatttgtaaattaaaataatttgtactgggaagcatgtgcgtaggggtgtcttcagacatttacgagtgcaagcttaattaaggcatctactatttattaggcgttagtttttacgttaaccccacgttcggataggtaaggtagaagacaaggtataaatatcggtaaggaggggtgaaagtataataatatatttatataaataagtcaacttaaattgtagattggggctgtggatatttattggatcacattcaataaatttaaactcaatcgatttaatttaattatttattagatattatcaagcgattcaatccgacgaattgaatagtcgatccgattcaatccaatatattcattagattattaggtca

SEQ ID NO: 54928 - DNA, 1343 bp, Cannabis sativa
agccaagtatatgtgaaacggaagacctcgagatgatagacaactctcctaaatggatgactcctattatcacttactcactcgacacacaacttccaaatgacaaaaacgaggcacgaaaactattgtattcagtgtctcgctacacaataatcgaaggaaaactatatagaagaaggtattggatgcccctactttggtgtgttctccctgcagaagtgtaaaaaatcatcagagagattcatgaaggcttctgtcgggatcatgcaggttggaaaagtctgtctaaaaagatcattagacaaggatattactggccaacgatcaataaggacacccacgagtttgtcaagaaatctgataagtgtcaaaggttttcgcatatacctcgcgtgtcgccagtagaactaacaatgatgaccctgtcctacccatttgctatatgggaaattgacttaattggggcattacccactgggcgaggaggagctaagtatgcggtagtagcaatcgacttcttcactaaatggacggaggccgagcctcttgtttccataacctgtaataaagtcctatactttgtcgtcaagaagattgtctgtaggtttaaaattccaatgaagatagtatccgataatagaacccaatttgatgctgacttgttcactgaattcggctagaggaacaaaatagtcaagagcttctcgtcagtatccaggcctcaagtgaatggacaagtggaagtcgttaataaaacattaaaggatactatcaagaagaagttagacgatgccaaaggcatatgggtttacgagctacctcaggtactctgggcccacagaactaccgagaagacagcaacgtgacacactcctttctcgctagcatttggctcggaagcaatggtgcctgttgaggtgaacatattgactctataatcaagaagaaaaccaggaacctctaaaagtgtcatttgatctacttgaggaaaaatgaactgagtcgcaaatcaccaacgtagcaaacaaacaacaggttacaagatacttcaacaaaaaagtcaagaaaagactatccaatgctggagatttggtgctaaggtgagtatttgtaaatacgagagatgcatctgcaggagtgttcaacccgaattgggagggtccatatgtcattgaagcagtagttggagttggagtttataaattggctcgactcaatgactcgctaataaagaactactggaaggttgaacatttacgacctactaccaataaataaatgatgtaactcgcattactaatgtaaaatttaaacttcatttatgaataaagagaatcatttat

SEQ ID NO: 54929 - DNA, 2747 bp, Cannabis sativa
gaatatgatattccaaattatattataactggatactttgattaaaaaaaaagatattatttatttatataataaatctgattaaaaagatattatcgttatgtattatctggtttgaagtggaaattagtgtagctttacgcgtcaataaaataaaataaaatcatccccgccaattacgcattgtgtctacaaatctccttaaaccccaaaactcacacttaaactaaacctttcttcttcttcttcttctgggttctctctcagaacataatatataagacatcaagaaaaagtcttatatatatatatatatatctaatcaacaatggcggaagaacaaggagaagagtacttgttcaagatagtcttgatcggagactcagcagtgggtaaatccaaccttctctcccgtttcgctacaaaccagttcgaccccacttcaaaagccacaattggggttgagtttcagacccaggtcgtcgatattgacggaaaagagatcaaagcccagatctgggataccgccggccaagagcgtttcagggcagtcacttcagcttattatcgcggcgccgtcggtgctctcgtcgtttacgatatcactcgcaagtctaccttcgaaagtgtcaagcgttggctcgatgaacttaccagtaagtactaatcttatcttctttcttatccatttcaatttcactttaatttatttcattattttcgattatgatcaaacagataagatttttgggtactcgatcatcaattttttattgcaattttttttaattgattgggtgttttataatcatctgggttcctatctgctgagtaagacaaaaattccattcaaagattctgtcttttttatataaaaattaagaaaaatgagaattaaattacataagtgatgaactgtatttggtatcagaacctttacaaaaagaaaaactttggaaaattttcaaaaataatcttttttcttattatttataatattaaagcttaaaaatttcatgtataataaatttttggttcacggtctctataattgttactgatattttctaaataatagttgaagaaaataaaattgataaataatcaagatgagattttttttcgttgaggtgttaaaaaactttaatccgaactatattataaaactaaaatttagattataattacaaaattaaataaaatgttagtctaaaactaaactacaagtcaacaacatcgttattgtcgtcttgagtgggaggggtagcctgtgaagaagacccaagaccaggaggctgaaatggtgaaatcggtggaatcggagcaatcgaaagcatgttgaagccaggaacgacgctagacaaatacctgaactgctcctaaaacgtgtccaggtattgattcttagtatgcaaaatttattgttgtcactcgttccgtacttcttactcttttaccctttacttcagggcctcttattcttcctgagtgatagtaggttgcccagagggacctgccctggaagttgccctctaagccccctccctaagtctcggtaactggcccattttactcaagtggcatgaccactcacccagcatctgtgtcataataggcatgtctgcgaggaactgggtagagtctacgtcgtactgtagggggacaccgattggcgctggttaagtttcacgaatttcaactattttggcctaaaaaagtatttaataaactattatattgaatataatttaaatataaaaagtatttctaaaagatataaaattacttacatgcgatttttgtgagtattcatcgcgtcatttgttgttcttatagtggaacttttggaaagtgcccacaacactaaaaaagttcccacgtctcggaattagcctattttatacataaaaaaattataaatatattattaaaaaattattaatttttaggcaataatatttataacatcataccccaccaacgatgtggccgaccatggtcttagatccctatccaccttattaggtgtccaacttgcggcgtaccttattaaatacaagcggcagtaatatgaaaatgcttggttatggcatagatcgaaaccgctaatagattttcaactggcagcgtaccttgctagatatgggtggtagtaatatgacaatgcctggttatggcatagatcgaaatcactgttaggtttctaactggcatacctttattagatacgggcggcagtaatatgaaaatgcctggttatggcatagatcgaaaccgcagttaggtttccaactagcgacataccttattagatacgggtgacaataatataaaattgccttatggcatagatcaaaatcgctttagatttctaactagcggcgtaccttattagatacgggcgatagtagtatgaaaattatcaggttatggcacagaatgaaaccgttgtaaggtgtcctcctcgtgacttattgggtgtaggtatgggcgttaatgacatatgagaactaggcataggtacaagcttgtctgattaggcgatgcgttatattggtgccaagtcgtggcacgagttcacctgattaagtggtgcaatagtattatatatgatattgcattatgacacaggcttgcctgattaggcaatgcaaatgtatgagtctatctatttttatgcatatggctggttatattaactattgttcatgaatgttatggtataatcattttttgataatgaaatg

SEQ ID NO: 54930 - DNA, 1285 bp, Cannabis sativa
atggctcccactcaacaataggaatctgattaaattcgtacacaactgtgcatttaacctcttactatagatgcttagagtcctcttattatgacattttatctagtctagaaactataagttccttctagactaagtcatgaacatagcattctagtattaacattgatgtaaaatacttgcttaagattaagtattactttagataccataaaacattttataaggaacaagaattgtgcttaagtctttcaaataaatattgcaaaatttcctatcttatcctcataatggtgataagctattactatccatatgaatggttagattaacttttctttgtttattttaaagtttctatcttgaacatattatagtaggttaccactggtgtcttccaaataataatgggttggaattttaaaattctcacactaagataaggtactgtgatactatatccaagaacttcattggtatcatttttttattactacagtaacatgttaattggaacacttacaggatcaagaataagttctattagtttgctagtttatttattatattatatccatgtctaatcaaaatacatgtgccatcaagatactgtggtgtattgagtatatagtctagagttcaaagttaaaaatgtttgaactacatatatcaataacttcttccacccctaagtgtttagagatttttttttggagttttgaatataatctagagttcaatagatgtaaaagatctttgaactgcatatattgcttcttaacatcttccactcctatcagatcaaaagatctttttattaagcaaaatcttaataattgcttaagaattttaaattttaaattctaagtgttatgtggtattatctctttgcagataataatataccatggactttgtatcaataataaaacacataaaacatgataaacttataaacataatatggtattggcatacaagttaaacatatatcaataacttcttccacccctaagagtttagagattttgtgaagttttgaatatagtctagagttcaatacatgtaaagatctttgaactgcatatattgcttcttaacatcttctacccctatcagatcgaaagatctttttattaaacaaaattttaataattgcttaagaatttataattattcataaacatttgaattttaaattctaagtgttatgtggtattatctctttgcagagaataatataccatggactttgtatcaataataaaactcaaaacacataaaa

SEQ ID NO: 54931 - DNA, 4395 bp, Cannabis sativa
aaaagtaatgtactataataaatatataaataaaagaaattattgtgattaaagcatgtaagcttataccacctatagtgtagtagaaccctgatccaagttgtccaaacccacactcgcccggccgccacccatctccgtcccctaatccaagttgtcaccctttcctacctccgtctacgtctacgtctccacctctcttaccctttctcattctgtccctgagccacttctgtaatggcgcaattgaagtcattttcttcttcacactcaccaaccaccttcgcttttcatggtccagaaagaggtacattttcatcttcttttcattcttggttttcataatattcgttgttgaacctctgggctttcccttcttccctttctcaatgcacacacataaaaagaacgacttttggggttttcgctactgttttagcttaaacctatgatagaattgttgttctggggttttctttattctttgtagaacaatcactatgtaggcgggtttttgttctcttttctgcgattaatatgctcgtttggttcttatttttcagctcaccaagcctgttggtccaggaaattgaattcaactttagaggtagttatatatactgtgttttaaatgatacacatatatctctttagatgatatcgtaatttttcttttgaggggctggtgtatcttttatttggattttgctactttttctcttaattaactcgtctatttatgttcgtagttgggggcgagagtaaatgagctttatggtaatgcttgtgtatccattagaagtaatggccctagtgttggctctcgtaacaagcaaggtttggttcttttactctgtttcttacttctttggtagtttcaattatcttactcttgatctaatgaaactaacttgatgtggactcattaacattgtcagtattttcttgtacatgaacatgattacaggccttatactagtgcttggttaatgatgaactagtgaatacttttcttcttcacaagataaattaattttactttgactcaatggcgtttgacatttttacctaccttgcagtcattagagcaaccttgccaagttataaagagccggaaatatctgaagcaacaagcaataaaggcttacgtggaaaattgaagaaggttgttctagcttatagtgggggcttagatacatcagtcattgttccctggctaaggcatgtaccttgtttgtgttttatttataaatttaactgcagtagtgtgcttctatttctattatactgccctgttttgaccttatgcatttgaactctgcagggagaactacggttgtgaagttgtttgcttcactgctgatgttggtcaggtatgtttttttacttcttggtaacggcccttggtaattgacaatctttctcggtacattttcttgggatgtgtaagtttgttctcacttttttatagggcataaaagagttggatggtctggaagcaaaggccaaggccagtggggcttgtcagttggttgtgaaggacctacgagaggaatttgtaaaagattatatatttccttgcctgcgggctggtgcaatttatgagagaaaatacttgctgggaacctcaatggcacgccctgttattgctaaggtgacttttttttttcttgctgtcaactgttttgaagtcactaggtgtgaatgtatgtatctacaaagaaaactaagatacattagtttaaactgactgtgcccacattctgtaaaacaaaaattcttatgcatccactactcaaatctgtcagattttaaaaagccaaattgcttcatatatgggggccttttcctttcttatagattgttatctgttaattattaactgacataatcctataaacaggcaatggttgatgttgccgaagaagttggagctgatgctgtcgctcatggatgtacaggaaaaggaaatgatcaggcaagttttgcaattccatgtttaacactagtcccatctgtttcttttgacgattgatgtcatctgttctgtgttcaggttcgctttgagctgaccttcttcgctttgaatcccaaactaaatgttgtggctccttggagggagtgggatattacaggcagagaagatgccattgaatatgctaagaagcataatgtgcctgttccagtgacgaagaaatctatatacagcagagatggaaatttatggcaccttagtcacgaggtagaattctactaaatataatattagttggataaaccataacaagatgttatataatgacatttttctaatattaacatctggcttgattcaatactttttttgcaatagcagaatcttggcctttttaaatatttcaaatataatggttttacctcagtttctttgcatcagaagaggtctcactgtgttgtttaacttgtaaatcttgatcttattatctcatatatgagtattttctacaaaactgaagggtgacattttggaagatccggcaaatgaacctaagaaggatatgtacatgttaacagtggacccagaagatgcacctaaccaacctgagtgagtttatcctagagtttcactttgattttctcttattatctgctgatatgtatgtgctaatcctcttgtttgttcacatggtctcttttcttcaggagtgtaaaaattgatattgtttctgggatccctgttaaagtcaatggagagacgctttcaccagcaaatatgttgttagagctcaaccgaattggtggaaagcacggaattggccgaattgacatggtagaaaaccgacttgttggtatgaaaagccgaggagtctatgaaaccccagggggtaccatcctttttgctgctgtacgcgagcttgaatccttaacattggatcgagaaacaatgcaagtgaaagactccctggccctgaaatatgctgagttggtgtatgcaggcagatggttcgacccacttcgtgagtcaatggatgcattcatggagaagatcacagacaccacaacaggttcagtgactttaaaactatacaaaggctctatcacagtcactagcagggagagtaagcatagtttgtataggcaagatatttcatcatttgagagtggggatatatatgatcaagccgatgctgctggatttattaggctttatggtcttccaatgagggttcgagcaatgcttggatctagttaaatgtatttttaatccaaatattttagttgtctccagtgtttcaataatgttttctcctccagtttgacttgtacttttatgtagtttcaactatttattttccttataatttctgaattggttattccgccactaacatatccatatattttaatatttaaacctcatagctgaattgggaaatttctatacatagagggacagccaaagcttaactcggagttggtattttttaggttgtattctctggaatttgctactgtaatggtatgcatgtttctaggggcaactcataggttgactgcccgtagttttctaagaaaaatctcgtcctagagtttctctttgtagtctttcatatgtgacattgctttgagcttcatgttctgttggttcgaaacacttgcttactttttgataacaagttctttttgagaaagaatcaggagagggaccaagtccaatacaagcttcaataagccattaaaggcaaattatcattgaaaccatttgttcagaatgtatattcaatgaaactcgaatactaggtggatgtggtcaacattcaaatactaaggtaacatcggtacatgttagtcatagggtgaaaatcagcaacagtcaagtactaaggcaatatagatatgttgaagggcaaagagtcaaaatgatcgagatgctgttaaaagtgataagtggaaccggaggagccgtgtgtgagaaagttgttagcttgtgagttaagttcccaagttaaattgaggattcatatgtttgtttaagcaatctaagtttatgtaagtttatttaatccttttgactcatgaatattattgagcttgatgatgcattctgaactatttgatgaaagtatacttgccctacgaataatattcccccgttagagcaacaccaacgagtatgcatacatcaaatttggtgttatatcgcgctcaaacgtaacggcaaagcacacttcaatttgttgtgtgtgctgcagtgcatatggcatatactctagtacactgtacacaccatgcacatagatattgatatatacacattactgtagggaaatttgattttatatgcttacaaaattaaaaaattttattattaaaccaaaaatctaaacctttaaaaaactatgccttttttttcaa

SEQ ID NO: 54932 - DNA, 1283 bp, Cannabis sativa
attagtaaatctaattatattaaaatagattttatttagtgcataaaatcccaacaaactcctatttgtgctaatataaaactaaaagtgtattttaattaatattgtcttcttgatgtccaaattaattgtggtatgtaatattatcattgtaatataatctaacaggttgtattcaattttaaccttctctaccattacatctccttaatcacaaaatccttgatattgtgaaatttctttctatatgtttagttctcttagggtattggatttttactgtttggaaactatatgtgtgttatcaggtggtaacactagtagttaatctatgactagaataatgtcaaaatctgtatagaacttttcataggctgaataattatctactagccttctgggccactttgacattcagtctcactggtagagttagagactttagatacgattttacacttctccaaaaattactgctctgcccctaaagtaatcaccatcccaaatatagactttttagtattaatgcaaatttagaaatatgagtcagtgcagcctaaagggtttcgaaatacatcacccttatagactaacatatagttcctccttgatcttaagatttacttgattgtctttcaatgttcctatcctggattaaactgaaacctacttataactcccattcaacatcaagtgtctggtctaatgcataccagagcatacataaaatctctcactgttaatgcttaaggaattcttttcttggaatttttttttttttttggaatagttgaaattatctggagccaaaagacttcctttagagttagccattaaaaaaaatactccagcatcttactaaagtaagttgtttgcaccaaagtaagtaaattactaggtataccacaagtcgtaggtttagatggtctcaaacctttgatactaggatcgagaagttttgttaagttcattgaatatttattatcaaaatttctcttcttttccttgtaatagaaaacttttagttgttcatgtgaatggtcttaaccgtagttctcttggctttgattcttagttccttagtaggactatctattgcttgtttaaactaacaatggaattttttaacatgagtgtcttccaagtcataacagggtggattccttgaaattttcccattacgaaaaaggtatcatgattttctgtctaggaacattagtggtattgactagggctgtacaaaaaaatttataaaccggctaaaccgaataacccgcccaaac

SEQ ID NO: 54933 - DNA, 799 bp, Cannabis sativa
gacaaaacataagtttgaaggtggtatgggctttcgatgtttgcgggattttaatcttgctatgcttggtaagcaaggttggagattattttttcgtcatgattctatggtggggaaagtctataaagcgagatattatccacaaggggattatctatctgcggagcttaggtcaaatccaagttttgtttggagtagtatctttgctgcacgggacgttgttaaagcgggtttgaggaaaaggattggtgggggtttgtctgcgcaaattacgtcagatccatggcttcccattgttgatcgagccactccaattcctgttgggccgggtcttgagcatttcacagttaatagtcttttccaagtcaataatagaagctgggatgttgatgtggtaagggatttattttctcctgaagatgcagctattattcttggaattcccttaagttcggctggtgcagacacttggtactgggttgcagagaagaatgggttttactcagttcgaagcgattaccatctgctccaaacattgaaacatccgccgggtttgtcagaaccaaatgatagttggaagattttatggtctcttaaggcacctctgaaagctaaagatcttgtttggagggcggcttctaattgtctcgccaccaaagttaatctgtgtatcaaaaaggttttggccgaaaatacttgccccttgtgtggagtgttcactgaaactgaaatgcacatcctggtttcctgcaatttcgcttgggcgtgctgggagtttgctggtttggcggctgcaaac

SEQ ID NO: 54934 - DNA, 1036 bp, Cannabis sativa
attttatgatgttatatatctttttttggaattaatataaaatatatatataattaaggttaatcgaaagggtggtgatgatgttgatggagatgataataatgatgaaaggtttatggtgatgacaattattattttgggatggcaatggggtattgctatgctggttgtggacacatggcaatatttcatgcaccgctatatgcatcagaacaaatatttgtacaaatatattcactcccaacaccaccggctggtggtgccttacgcatttggagctctgtacaatcatcctttggaagggcttttggtggacacaatgagcggagcattgtcattttttgtgtctggtatgtcacctaaaacgtcaatatttttcttctccttcgccactatcaaagccatcgatgaccattgcgagttatgccttccttggaatccatttcatatcatcttcaaaaacaacactctttatcacgatgtgcaccaccaattatatggcaactagttcaacttttcccaaccctttttggtcatgtggataagttgtttggtacctaccttccccctactactcctcactgtgtaccatctaattagtgttgctatactacaaatgttttatcatatattaattaatgtaaatattttttttataagctttttatatttctttgtggtttgtctgtctttaacctctgctgttgtttttggtctgttcgtgtgtttggtagtactactgctttgtaatatctcactttggcttttgcccttttctcttttaatgaactttattaaaatatatatatataaatatatttatatgtgtgtgtgttaagattaattttttcttttttctttacgtttatatattgcaatacaaagtttctttcccatgggcgccactactacaaaaaggactattcccaacggtttaaaactgtcttttttactatttcccaacggttcctaaaaccgttggctatgtgggtgtcataaaaatacggaactttaaaagacagtttataactgttgg

SEQ ID NO: 54935 - DNA, 1511 bp, Cannabis sativa
  modified_base (28)..(55): a, c, t, g, unknown or other
atatgatatataatccaattcaatatannnnnnnnnnnnnnnnnnnnnnnnnnnncggcgttccaaacgagcccattattgagtgattatatatacttctctgcactaacgtcagaaaagacgttgctcttattttgagaggataatggatctagttgctaattgataggaatgcaatatacttgaaatatattaccaagtcaaaaaatgaatgagtcacctttatgtttcttttgaaatatataaatataaatatatatatatctattctatgtaaagtgtccaaaaagtagaattggtgacatagtaacatttgttaaaaaatgtaacaataacatgcttttagtaacatttaatcaaaaatgttacttttatgagaataattaacattttcatcagtgacatttttaaaaaaaatgttattattaatatgatttagtaacatttgataagaaatgtcattaatttgtcaatatttaattatgtagtatttgaaaaatatcactaaagtatactattagtaacattttataaatgacactaaatattcaatttgattacattttaaattgtcactaaaagggaaattattttcaaatttaaaaataaaacaaaaaatatttttaaatattagtaaataaaatacatttttaaaaaaatcaattaagaaatatccaatcctcaattaacaagccctaactctcatctttctcaatttttttcgtgacggatcggaactcatctttctcactttaccaaccgcacattcatgactcattctccccaatcaatcactcaatctcattgaccaccattcctgatctcatctgattgcaccttctactctttaggcgacagattgcagcgtgcgaggcttgacaacgggagggattgctggcggggaggctcgatgatgcattgcggtcaaccgcagcaggggaggcttgaaattggtttaatgtttttatgcaattatatttttgcaatttaatgatagaataggtgattgtatatatattggaatctcacctttttgagttgcgttcatgtctttggttttcatctgaatatttataattatatatgtgttatacataatatgtggggctgagttttgggtttgtatagtgaatgtgaagttagctcttcagttaattacatacatagattttgtaagggttgctctatttttatttttgttcttcttttctacgattgtttcaatgtaatatttgtttggctttgtaattgtggcttgattaaaagtttctcactgacagctaatcttaatcagtttcaacacattattgagtttattagcaatatcataaatcaaattggtagacacatagtattatcaaatgatgattttgaacatatcatattatcttaccatttatacaatttagctgtttgaatgaatgtctcacaaacaactaattgatcatttatatgttatgtgttcttttatttttcagaattacctatctaaagaagcttttgtaggtgtt

SEQ ID NO: 54936 - DNA, 1004 bp, Cannabis sativa
cccctcaaactctgaattggatggcctctaattctgagtttgtcacgaaacatagagaatctttggctggaaatggctttagttaacccaactgcaatttgatcaaaggctgccacatgtttgatttgcaccatcttgtttatgaccttttctctcacaaagtataggtccaattctatgtgtttagttctagcatgtagaactggattctgagtgagcattatggtacttaggttgtcacaccaaattgtaggagtctgaggtatttgaatgtgaagttcagagaataagtaatgcaaccatgtgagttcagctgtcacattagctacacttctgtactcagcttcagtacttgagcgagagatggtttgttgcttcttgcttttccaagcaattagattagaaccaaagaaaatagcatagccagaggtagacttcctgtcatcggggtctgaagcccaatcggcatcacagtaagcaacaaggtcataactttttggttttgtaaacctgaggcagaagtccatagtgccactgatatatcttaaaattcgcttaccagccagccagtgtgtcgagagagacttttgcataaactggcataccttgttaacactaaaggacaattcgggtcttgtaattgtaaggtattgcaatgctcctacaatggatctctacaattggacatcggcaagaggttccccctggtgagcagataagcgaagaccacttgtcgtgggtgttggagaaggctttgagtcaagcatttgagcccttataagcaagtctcgatcatatttagtctgacagagatgaattccttcatcagaataggcaacctcaatgcctaggaaatatctcaaaggaccaaggtccttcaaagagaattgagtgttgagatctgcaacaagagtgtcaataatagtttggtcactccctgttattaaaatatcatcaacatacacaagaacaagtgttgttgaggtgttggtgtgattaataaa

SEQ ID NO: 54937 - DNA, 1387 bp, Cannabis sativa
  modified_base (35)..(61): a, c, t, g, unknown or other
cttttatgtgtttaattttcatcgttttagaagtnnnnnnnnnnnnnnnnnnnnnnnnnnntgatctaggtcctggtaaaatatattacaacagccacttagcctcaagagtgacgaatgcactcggcctcaagagtgacgaagccactcggcctcaagagtgacaaagtcactcgacttcaagggtgatagaaatgactcaacctcaagagtgacgaaagtcactcggccaaaagagatcttgaaagaaactcatggctaaattcggaaacaagagggatgcctctcaaacgtaagcacacatttacaaatcaaaaggttgtagcgcagtcaagtacaataagctcccttacatccaattaaaaggatgaaattaaacaaatcaagaggttgtagcacagtcaagtacaataagctccctcccatccaggtaaaggatgaagaaataaataagaggatgagacctctcaaagagaaatactccctcaaataataacctacttatcaaaataagaaaagtcatttggtcaaagagtaacccttagagtcacttgaccaacagcagttacaaatactgaagatgcagggaataaaaatggagtcttacaatcacacgaaaagaaagcataaggatcgctctaaaaagtcttaagggcccaaaaaaagagaaaagaagaaactactggtcattgctggtgctggcaccatggcgtgcttacactcttgttctgcatgttgctcttcatgatcttgtttgaactcctcaaccatctggagtgctgtggagccaagaacactgaaatccacatgagggttggtaacctagatagagtgcaacagacgctccaccttgtcagcctcacgtgcatttattttcttctttatagtcttcatacgcctctccaactattttatagaagctttgaagatgtcttgctctttttgcgcttcatccttgagcttcttgttgagatctaaggaagattggagctgtcgggaaagttcctcaatttggggtgttgtatgtttcaagtgagcctgaagcttgtccaccttgacccgatactcattcacttgagtgtggaggttgccgcgctccgtgtttgaagttgccaattcttccaaagttgttttgagatgcaaaataccatcgcggtcggaagagcttaaaggcagagatgtattattggatgacaaaagtctgcaaggcaaaccaaagtataagttagaaagacatcacaaaggaaataaatacaaatgaaagtggtgcaggtactaacctatatagagtgtcgaagcacaacttcccaatggtcttcttccaacgaattgtgaagccaagcccgtaattgaggaggatattccctaagatactcgttgtacccac

SEQ ID NO: 54938 - DNA, 1230 bp, Cannabis sativa
ttggggcgaggatatactggtcatttcgggagggtcgcacctcgctggaaatagtaataatgcccaaaaaaggtatatcagtaaaataaagaatgggcaatcggcatttgctccaaagccactaaaaaaggcaaaatctaataaacctctaattatcttctcggaggaagatacaaacatgtacaatacccgcatgttgatcccctcgttgtaacagtccagcttgccaataaaagggtgaagagagtgttagtagacaatgggagttcagtcaatattctctacaagggcgcactaaaaaagatgggactagaggatgcgaagttgaaaccttgtatggtgagcttgtgtggatttacgggtgatagtgttgccagccaagacatcattgaacttccattgactataggagagccacccttaataacgacgcttatgcaggaatttttagttgttgatcttccatcagtatacaatgtattgatgcgtcgcctatcactaattggactgggggtagtaagctcgatcaagcacttgtccttaaagtttccaacacagttaggagtaagagtagtctgaggtgattgattattgtctcaggaatgtcatctaatagaactttagaacaggagagccaatcatcaattgatggcaatcctaacagaagaaggcgagaggaaagaaaaagatctggatcctagaatccaagatgaaaataaccagctcaaacctattgaagagttggaagaggttattttatatccaaataatcccacaaaatatgtgtacattaggaaaattttggaagaaaaactaaaatagcaattaattgattttttaaaggcaaaccaggatcaattttcttggagccactcagatatgatagggataaaccctagtgtaatttgtcatcatttaaacattgaccccagctatccaacaaaaagacaaaaacaacgacctttaaactccgagagacaaggggcacttaaagaagaggttgataaactgttgactaatgacttcatacacgaggccttctatccctcatggatctcaaacctagttcttgtcccaaaattaaacgacacttggaggacttgtatagaatttttagacttgaataaagtgtgtcttaaagattatttcccactacccaggatcgaccagttagtggatgcgacagtaggacacgagctaatgacttttatggatgcatattctagatat

SEQ ID NO: 54939 - DNA, 1910 bp, Cannabis sativa
tctcatgctctctaagtctttcactaatatgcacccagtcactaaaaccttcatttattaattgtcgtctaacaatccctgttttaaaaatttgtcaacaaaaacaaaatactctatctaactcttttgaataaacaagccaatctctatcacacttctctccatttaataaaactctagtatacaaattaacagtgaatcgtcttgaaaatttacctttaggaccaaccataatagaacaatcactttttggacccttcatcactaataaatcaatcatttttgaatcaagagcatctcaatttttgaatcaaatatatcaagtaaatttttaaatgagtttgtttgatctgcattatcattattattattctctaaaattttatttttgagtgaattattcaaatgatcattatcacaatttttcagaatcaaaattttgattttctatattatcatttttaataggcacatcacctttattttcgaatttattattttcaataggcatgtcacttctattttccacatcatcattttcactataattctcaataataggcaacatattttcagaaatttcaatatcaacaatattatgattataattttcaaaagaaacttgtggttgttttataataaatctatgaagagctcctctttgagattgagttaactcctcaattttttttctttttcttacacttttcatacccaaactcatattttttaattttaggagagatagtaaaaaaaaataataacaacaactaatataatatttcaaaaagcaataagataataaataattattaatttggaagttcaaaaagggacaaaaaacctgatattcgctgctgattccgttttcaaagtttaaaacttcaaattgagaaaaatcacagtcaccaattgcccaatgctcatttaaaattgattttttgatttatgcaatgatatttttagaataagtaaatgtacataaacaataattaactaaataacaattaacaattaatctcaataaaaaaagtttacaaaaatataattaattgatagtattaaacaagggtaaatttacaacaaatacatattagatatataacaaaaatacagatatgaaattaaaaataataaacaatatagatacatataatgaataaagagtaaatatcaaatacataccttctattaaccgttgataaattttcatcaaaaaattctaatgaatgatattattttctaattattatatttttttttttaaaaaaaagaaaaaaactagaaatatagatgatagcaaaatatagaaatatagatgatagcaaaatatatctaatgtattttctctcaattctcattaataattttgatttttgatgttgatgaaaaacttaaaattgaatatatatatatatatagtcatgtaggtgaatacaaaaggtttttttaaaaaaagaattaaatgatattaataaatttagtaccgttactttactagaaactaggaaatttggtaattaattgaccaagcaaaaattggtttataaaaaaaataaaaatatttgaaacgatttaaaaattaataattttttttgataataagcttgctgacttccaaagtcagctttagaaaaaaaaaccaaaacagatttttgaaaattcgacccttaaaattaataactttttatttgttaagaataggttgctgaccgaagtcatcttaaaaaaaaaaccaaaaatagattagagaaaattgggcccttttttgtgtgggccctgtgcaataggtctggttgcacaccaaaagggtcgggcctgtgcaggtcgtacatggcagcttatgctcagatatgtagtttctcatatttttctttgtgttcggagttgtggagatctcaaatctgaga

SEQ ID NO: 54940 - DNA, 2165 bp, Cannabis sativa
aaaaaagaaaaaaaaaacaataaactatttttttattgttttataatttatttataggtgtattatatttgtcattaggttgttttggttattttatagttgatttttcgttttttttaccttttgttgaaaaaagtgtattttttgtaattttaaaaattttacacgagtatttttataaataaaataaaaattttaagtcgtaaaattgtaaacacataaaaaaagatatttttgaaaatttcctttttttttttggtgtcatggtgtttgctctatggtgaactctgttttactttcttctgtgttagtccagtttgatgatttctgcaatactcctatcctcccatatttttaagctcatttttcttttcacaatattgttaataatatttaaccagagaatacttaaacatataaaaatcaaaatttccaaccaaataataattatttgcagaattaccttctatattttgttatctgatattaagtgaattgaatttcttgtatttcatagagaaataaactagtaagtcataatttataattgtatagctaatatatacatcattatacaactaatatatatatatatatttatatatatcacgctcgtggtcaagttggaccctaattgaaatgcttacaaaaataattaacctgcaccccatttatagtttttgtttttcattcttcacatatcctgtgaaaattaaaccttgttgaatattttcacgtaaaatgataatcaatctcaatgtgcttaatctattcatagaacgaaagacatgattaggtgcaatattaaaagcaacttagttatcacaccacaattttgctagtactgaaatcttaagttctacttcagtcaatagttgatatatccacattacctcacatatagattgtcatagctctatgttttgactctgtactagattgtaacacaacattttgccagaaaagggtctccgccagaaaagaaggccatgatttcgtagtttagacaacaaatagttggaagagcccaattattggaagaaagtaacaaatacgacgaaaatacaggttccttgaacagagtatgagccagccaaaaagtttggccaagattggattagtcaacttgtgagcaggacggggcaatattttgcttcttactctttgaagagaccaaactctctccaacaaaagtagaataacatgaagtggatcttctatccactttgaaacatgtccaatctgcatctgagaaacactcaatatgagcgtgtgcccatgatctgtgtacatgatacatcgtcctggtgctccttttaagtaacactgataacactaattgagaatgtaatgttagacgagtcacggtaatataattcaaatttttaaccaacctgtgatatttttcaaggtcttcaaagacttctccgaatctcttgtaaggtacacaataagattcattggcgtaccacaaggcttttctcccaactttttttgtctctgtcaacaagtcaagtacatacttttttttgagatagataaatactttttttactccgaatgacttcaaattccaagaaatatgtgagcacccccaaattattgtgaagttgggtaagaatggaagatttaagagatgagatccccctagcatcatttctagtaataacaatgttatccacatgcacaacttatagaatgatactaatagttgatcgtttatagaacacagaatggtcttacttgtcaacatactgaatttctcaataggctgaccaaatttactaaaccaagcatgaagattttgtctcaaaccatataaatatttttgaagatgacagactccccctgagaaccaaaattaggaggttgcttcatatacacctcctcttgaagatctccatgaacaaaaacattttttatatctagctaatataaagaccaatgatgtgtagctgccaacaaaataaatagccgaatagatgtcaactcagcaatagaagaaaaagtattacaatagtccactctacaggtttgagcgtaacctttagcaacatgatgggccttcaaccaagtgctcgatccatctaggttgaccttaatattgaatacccattcgcatccaattactcgttttcctgtaggtaaatcaaccaagtctgaag

SEQ ID NO: 54941 - DNA, 1707 bp, Cannabis sativa
ataaattaaacgggtccccgtcggggcggggagtgtcattcccgtccccgccccgtttaacattcggggacaaaatttaatccctgtctccgtctcgttccccatttagacggggaatccccgccccattaggggcgggtccccgcggggcaccatccccatggggaaaatgtgcatccctaattataatacaagctcatacaaattgtttgttatgtattaaataatacaacaaatagtatattaaaaattttagttgtaataattaatacaatacattactttatccaaatataatgttatttattatttagtacaatacgacccttatactacgtaccaaacgagcccataaagtgtaattctatatttatactgcaaaaataataaaattaataaatatgattatttgatgataagactcaataaacaatataatttattagagcttagtattatgagttcatagtcaataaataatataatttattagagcttagtattatgagttcatagtcatgggtataaataatacaaattaaagcttaaagaaatttattttcctcttacaaaatagtaattatgtatttttaaaattaataataatttaaatttattatctagataaattgggaagatagaaaattgtcagagcaagagaagatcaagatgacatttggcgccaccttgcattattacaaggggtggcacctacactgtattcttacacaataagtgtctactgctagtaatgggtcccattaagtttattttttgattaattaattaaaaaagtaaatatttattaaaatttgaattttaaagttaattatagatatgtattatggttgagatattctttcaaaaggattgagaaaattctctctaggtggttgacatgatctgtcaaatggttaagagattttctgaatcagtttttagatagttaatttaaataagatatttaattttaaaaaaatatttgaatttaaaaataatatctatagcaaaattacactgctacaaagtatacttttggtgtcagttctaaactgacacttatacttttagtgtcggttcataaaaccgacacttattctacagtcacaaaagttagagtttaagtgtcggttataaaccgagatgaatgagtattgattttgttttataactgacacttaaagtgtgcatatatatatttctccttttagtgtatgttcaaaatcaagactaattggtataagtataagtttttaaccgacactaaaaagggtatttttgaaaagaaaaaaaattgttaaaaataagctttagtcattttgaaatatctgtaaaatgaatgttttcctttttaaaaaacctattaaaatacataaaaaaaaaatatacagttttataacaatttatcaatttcacagccgatacaaaataaagaatacagtaaacccaatatacaacaaaatccaaaaatatagttgctaaatacaaaaatttatcaaacaaaatcaacaaaaatcaaactaaaagttataacaaaataggcctaatcctccactacttcagggttcgagatttgggatctcgattctatggtatgcttggaccatcgacgaccatggacggccaccatttccctggtcgtggttgcatcgagacagagatagagaggaagagagtttgagcaagagagaatgagagagatgggct

SEQ ID NO: 54942 - DNA, 1492 bp, Cannabis sativa
atatttgaaatatacagaaatctttatttttctctaaatttataattagaaattaatttacaaaatagtagaaaaaaagaaaaccttaagaaaaaaaaaagaataagggtgagagaacttgtgagatagttctatattataatatattacataaatcaataaaaattaaattaaaaaaaaaaataaaaactaaaaccgaaaataaattgccaataaaaaaaatttccacataaagagaaaataaaaaaataggaagatgacaaaaaaataataaatgatataatacattagtatgaaaacaaacaaaaatttaaaaaacaaaaaattcagaagaagataaaaacaagtcgtttttacattcttctattgatgttatgatatatatgtaaatattacaaaagttcaacacccaataaaaatgtttctaagatccgaacttgtatcactaagacatatatttaatgtaactttttatttttactataagagaaaaaattaaaaatttgtatcagtttttaataaattttgtaagcatataataatataaatatagaaaacagattaccccctcactctcttatttttttaaaaaaaaaaaagtatgccaaattcttagctagttcgccaacttaaaattataactaacaaagtttacttggatattaatatgatattcacaatcacacgtaaaatgggattagtcttaagaaaagagtaggaaaattgaattgaattataaaacttgagttgaagtgtattttgatattgatgaacggcctacgtgccgtacggtgccaccccctacaattcaacataaaggagctttattaactaaagaaataatatatgagaaatgctttttattgcatgaaattgatgaagcataatttcgccaacatgtttccgtgcgtaatcaacggaaccggaaaaccataaatcatacactcatttttataaaaatctataactttatttcttcaacaagcaacaacttattacatttcttttcttttattatttttttttttaaaaaaaaaaaaggcttatttgaatcacgtgatgttgcctatatacttttgtttttgttcttagatttcaatatgagctcttaaattaattatattatttcaatatgatttggccactataaactcaaggttgtccgttccattttgaagcaatatattaaaattatttaatgctgacaacttgtttaaatgacttgaagtttgaccaatcgtatttatattaaggtgatactttatataattaattagtaatttttgtattatttattaaattaaagtttaattttggaatccgataataaaatatattaataataatatgttattgtttgtagtgtttgataatttaaggtaatgccatttcttagcatttttcaattataaatacatcgtttacttaggagtgctcaaattagctaatatgatatatctcaagtgttgggattcaaccggccagtcttttt

SEQ ID NO: 54943 - DNA, 1198 bp, Cannabis sativa
  modified_base (1155)..(1171): a, c, t, g, unknown or other
aatatatatatatatataaactcatcatataatttcaaaaacactaatcaccgtatcttacatgtagtcatcactacatttaaagttgatgttatcaatgtatgtaactcatttgcaatcatcatttatattcttccccataatctttaaatgtaggtaatggtgagaaaaaattaaataaattaattgaatttaattgttcatataagagtctgtgataatttagagaagataaattagctataaaaaaaggtgatatagagaaaaaaaaaattgagtgttgtttttattattaaaaaaataaaatattattattgaattctaaaaaaattgttattgagatttgtttcatctatatacatatactaggtggatgtaatatgtcgaactacgtaaatgttagttttacttaaggtttggtttattagttttttttagatttgactaagtaaagtagtatgatcattttgaatgatttgttatataaaaataaattgtttgtcagtgtatttggttagtaaaatataattgtatccttaaatttatgatatgtacattgttattaataataaaaattatgttaatctcaatatttacctactcatattgcttttatctttgatgtgaaaaaataatttttgataagtacttataacaatataagattttaatatttattatttgtctctaaaaaattcaaaggaacaatatatatattttgtacaatttaaaggaaacattatgtaccgaaaaataaggaaaaagtgtcatcttaaaatagaggagaaaaataatcaattaaagtattaatatagaataccctatgaaaaattaaacaaattaagcatagtaagactttatcctaatcttctatcgactgagttgtttgaatggtgagttgattgtactttagactcattgttcgttttgaatctgcatacaactagattttttattttttggctgataatttttcttaattttttggacaaacaacttatgtttttgcaagaataatttttaaaattactttccagattattaagataagattcattatttttttatttgcgaaaaagtattatatatatataccttatgtaacaccctaactaacataggcgtattatgtgatttttaaacatgttgtgcagnnnnnnnnnnnnnnnnnaggtttatggaaaacgtgattaattaa

SEQ ID NO: 54944 - DNA, 945 bp, Cannabis sativa
caaccactttagaaacccaaaccgaaaatttgaaaaaaaaaaaatcaaaaaacagtatatcgggtaattccctaaatttttatacagtatatttttttgcattaaaaaaatagtatttttgaaaaattttgtaaaaagaggcccaataatacccatatttcattttagataaaacacacatttaaaaaaaaaaaagttgggccattattactcagggtcggccctgctctctggaatatatagataatttcatgtattcacaattattatatatatattttggttgaaataattaaatttaaattttggcgttagttttctttatgtgtctaatattttaaataaattaatttgaacaatatgtcgccaaagtgacctcttttgtgtagattaatttatttaaaatatcaagatggttgtgtgtttgtaattgatgcatatattgactaacccaaatgtaagtgaatatttcgctagattttaactatatatgtggagataaatatgtgacaattataaagtattttgtgtgaacaatatgttagtccaaagattaatttattgtttgacacagttttattgtcaatgttcgattgttataccaagagtaccacttacaattaatgttgctacccaaagacttgatattaatgtgttgcgtcaataaatgctaatattaattatattcttttgcttaatgagattgattttaatgattggaaaatgaacttacttatagttctgggatgtacggatttagaacatgcactaagggatgaacaacttgtacttttcactaaggaaagtacttgtgatgattaaacaaaatttaagaggtgggatcgttcaaatcgcatgagtctaatgattataaaacataacattcgagaagctttttgaggcacagaatctaaaaggtttactatggccaagaatttccataaa

SEQ ID NO: 54945 - DNA, 1672 bp, Cannabis sativa
tagtggaagtcacattttgggcgttaaacagtagacattaagatatgacattgtaatacactgggacacccaattgcagaacttctccaggaccccaaaacacttcaacacatggtccgcaaaattctagctgagtttgtcataggctttagtgaggtcgatcttgatggcaaacaagccctcctttccttttttccttttaaagttgtggaaaatttcctgcacaatcacattgttatcctagatatccctcccaggcacaggcagcttgtgtgggacatataaagttagggagtaaaggcttaattctatttgcaattctcttcgaaataaccttataggccacattgcatagagaaatgggtctataatggtgggttctagtcgggttacgagtcttagggatcaaaatcaaattagtcgcattgactctcctgtgcatgtatcctgaacaaaagaagtccgaaatggccgcgcaaaagtcgtcccccactatttgccaataatgcttgaaaaaaaaaaaaagcaaacataccgtcaggtccaggcgctttgttgcttcctatgctaaacaagattttgcggagaaaataagaatgcattattatattacttttgaaatattagacagttacgagttgtaaaattataagtgtgcttcttttcctataggtggatctcattctcataagcacatattaaaaaaattgtctaaaataacttatttttaatttaattgttaaaatatttttatttatttgagtacatttcaatagtcttattcataatttcttgtttttttatttctcttttttccattctcttatattactctttttctctcatttttctttctctttcttatttctcttttttctctcaaattttaaaaataattttgattatgtcattactcggatgagcctaaaaaaatattattacgattactcttcaatgtaaatatttcaaaatgtgagaattatatatttttttttctattttcagagtagaaactatttagttactaatatattggttagttattgttttataattttatttaaatcttattttagaattttattaattgaactatattatattatacgataactaattaacttttaaaacaacaaaaaggtatacaaaataatcgatatataaaaatagtagcttcttatattacatgacaactaattaatttcaaaagtatttttaaagttacgtattttaaattataatatactataatataacttaaaaataactaattagctacaaatatagatacaaataaatttttaaaaaataagtaaaatgtatctcaaattatatgataaaaataatttttttatataaacttaactaatataaaaatatttagtaactaaaagttatttttaaaaatacaagaaaataaaacaaaaaaactaaaaacaaaaaaaatatcaaaatattttagaaacatcaaatttggttgaagagtaggtaataataatgttatcattgtaaattaaatataaaaaatatatattattataaatttctcaccaaaaaaaaaaaatagggaattttacaaaaatactgcttttggaccaaaactttacaattatactgggacacggcaaaaacaacatttttactgccccagcccaatttcattacttttgta

SEQ ID NO: 54946 - DNA, 1504 bp, Cannabis sativa
ttcttcatctaacataccatgcaaaaatacagttttcacatccatctgatccacctcatagtcgaattttgcaaccagagccatcataattctgactgatgtttgtttgacaatagcggagaagatatcattgtaatctataccttctttttgactgaatcccttagctacaagccttgccttgtatctgaccttgccaattctattgtcactttccttttctctaaatatccatttgcagcctataactctttgccctttaggtcttttcatcacaatccatgttttatttttgatcagagaatccatttcttcattgatagccattagccatttctctcttgctttgccttgaactgagtctgtatagctgatgggttctgcattgtcaatctcttctatagcagcaaaggcaaaggcagtgcattctgatgcagagtagtctgcatagccaagtctgtcaggagcctttgtttgcctcctttctctgtcccttacaagttggtaacttctcagattttcttgattgacatgtgtttcatcatcagattcgatttgtgcttctccagtttctggtagaggtgcttcttgagtatctgtgtcttgccttattgttaaatttggatccacctgaacttgtacccttccattcacaattgaattctgtccaggtttcattgccatttcattctccttaaatactacatctctgctaataatgcacttcttgtaaccatcctctaagcaccaaagcttacagcctttcacaccatcaggataaccaaggaacaagcatttcagggccctagattctagtttgtcttgtctaatatgagcataggcaagacaaccaaaaacctttaagtgatcatagtgaggtttgtttccagtccatatctcttgaggtgttttgaaatttaatgcaacagagggacatctgttgattaaatagcatgatgtcttcacagtttcaccccaaaaatgtttctgcaatcctgcacccttcagcatacatctaactctttctagaatagttctgttcattctctcagccaacccattctgttgaggtgtcttgaccacagatttgtgtcttttgatcccagtcttagcacaatagtccttgaattcatctgagcagtattctaatccattatctgtccttaataccttcagttttctgcctgtttggtgttccattagctttctccaattgttgaatgtttccaaagcttgattcttgtttctcaacatgaaaacccaaaccttcctactgaaatcatcaatgatactcatgaagtaattagcacctctaagagtttgtgtccttgaaggaccccacaaatccgaatgcacatagttaagtggttctttcgtgacatgcataccagtagaaaactttaccctacagctcttgcctagtacacattcttcacaaaactctaattttccgttcaacttgttccttaacaggccctgtttgtcaagttcaattaggcctctt

SEQ ID NO: 54947 - DNA, 1152 bp, Cannabis sativa
cagtgaggggggagatgagaatatatgaatatgatgtgttgtttggtgtgtttgaagtagacattattactatatactagattaaatttatgtgcgtttacacctatagtgttttatgtaaaagtattttgaataaaggaaatactttaagatttcaagaaaagaaaacatagtagtcttttgataggaaattaaaaaaaatgaaacatggtagtaattagttcttcacgtttttcattctttctatatcgtcatttggattgtctattttttgaagtttaccagtaacattgtggacaaacttgccatgttcctacaaaaataaatatagatgagaattttctacctagtttctaagtcagctatatatatgtcacaagttgttgatttcttttagagagatttatatgttattgcatcattttgtcttggttgagtgtctctcaattatttattgcaaatagttttaggtgatggatattacattgctatgagtaatggaagttaagttcatatgtttaccaaacaaaggaggattaaaagagagaaaattaaagctataatctttgcataagtcacttgaaattcaacaaaaaaaacttaaatgatatgatacaaactcttctctctcaagcaaggtttgtcatggcgaaagcaagacaagaaagagaaattcccaaacctcatatctaattacatctcgtcgagagccatgcaacttattcatcaattattttttcagcctcagacaagggtttccaagaacattcttttgaatcattacaaataaggagcacaaaagagtaggcaaaatttgacctaagtgataataacttttccaaatagattgaatttattcaaccttacaatcccgaatatcaaatctctcgtacttgattggcccattagcaatcttctctttaaccaagcctgaggaattttgggatagtgtctgaagaagttgtctaaagcagaattttaaattaaagtttaaacacgaacctcatgcctcacgttcccagtaatctcagattcatcaccaattgtcatgactgggcgctctacttccaggctattatagttacaagacactgcttcactttatatcaacctccaaactattaatagaacaaaaagaatgatcaaagaata

SEQ ID NO: 54948 - DNA, 1898 bp, Cannabis sativa
agaattaggaatatacttggctgtcaatgactatgctataagcgtcgtgctgataagagaagaaaagaacgtccatcatctagtctactatatcagcaaaagactcgttgaagctgaaggacgataccctttaataaattagctcacttacttcctgatcatagaaataaggaagttaaggccctatttccaagcttaccctatttgggtatacactgactaacagttgcgctaagtattgcaaaatcttgatgcctttgggtgattacttaaatgggcaatagagttgggttagtacgaaataatctttcaaccccgtacaatagtgaagggacaagtcttggcatacgttgtggttcagtgcacaagcaaagaagaaatcaacataagggacaacctggggccagtataagaatccttgccaaaaaacaacgaagagcaacctacctagaagttgcacgtagacagattagtcacagagcagctttctagcgcaagaattgcccatgtcacacctgggcagcaacatctacatggagtaataaaattttggttcaaggcttccaaaaacaaagcagaatatgaagccctcaaagttggagttaacttgcttgggaggtccttgccgaatacatttagttctgtagtgattcgcagttcgtagtgaatcatgtttcaggagagtacgaggcccgaggagagaaaatgatggcttatctaagcaagatacaagacttgcttgcacaattcaagggttataccctcaggaagattccaagagaagaaaatacaactactgatgccttggcccgacttatgagcagtatagtaacagataagttcaacccaatcccaatccaattcttagaagaacctagcataaattgtgcgcaagaagttgaaatgatagacacaacacaaaacttgatgacacccatagcagcctacctcaacattggagaacttccaaatgataagaacgaagctcgaaagatgatgatgaaagtttcacgatacatcatagtagaaggtgtgatgtatagaagaggtttctccatgccattacttagatgtgtaacaaaagaagaagttgcatgactcctattcgaagtacatgatggattctgtggtatccacgcagtaggacaaagtctatcaaagaaaatactaaggcaaggacatttctggccaacagtgatggaagattcaaaggcctaagtaaagaattgtgaaatgtaccagagattttcaaagatcccctatgcatcgcccaaaaagctgatgcagatgcaaagtccttggccttttgccattcggggaatagatctgatcggacaatcgcccaaggcaagggcggggtacattatgtagtgattgcagtagattattttacaaagtggacagaagtcgagcctttagcaacgatcgcagctaaaaaagtactggaatttatggtgaaaaatataatatgtcggttcagacttccgcacaagatcgtttcggacaaaggcaaaaagtttgacagccagatgtttacagatttctgtgtgacacataatcaaatggtcaggtcgaggaaatcaacaagacactcaaagacaccatgaaaaaatgacttgaagaagctaaagggaactggccggaggaactaccagaagtatcgtggtcataccgaacaataaagaaaacaacaactgggcaaaaaccatatgctatggcctatggttatgaggccatgttgcccgtggaattagagcctttgtcccatagaagattaacttacaatcaaggagctaataatgctctcctagcagaatcacttgacgagattgaagaaaaatgagcctcagcaaacctaaagctagtagctcattagcaaaaggtagctcggtacttca

SEQ ID NO: 54949 - DNA, 1723 bp, Cannabis sativa
gagatagggctgccgagataagcctttttttttttgtagtgacaacaattgagcaatgttctcacactttaccactacaagaaaaggatgcttaatcacccagataaagtaaatggaactcgccggcattgtttcgctgatgacattttgtgccggcaatggttcgtcggcatatcatcttttgtcagcaaattcaatagatgcgttggcaaaagtatttacaccagtcaattaaattgtcggcatatgtttatcattggcagttccgtgccagttgaggtggcctggtcgatgttttaccagcgagttaatgcaccatcaaaacttttggcgcatattctctaatttgctggctaagttttgtcggtgcattaactcgccgacaaaactgtttaatattaaaaaattaaacagtcttgccaacgagttaatgcgcttgaaaaaaatttaatattaaaaaattaaatatttttgtcggcgcatttaaactgcgacaaaagtattttttttaaaaaaatatgtaaatatttataatatataattaaaattaaaattaaaattcaactagcaataataataaaaaaatataatagcaaatatattataaactcaaagtttatattataattacaaaattacataaaatgtcgtaaactaaataaaagtattttagttcataacaataatttaatgtacactaatgtacactgcacactaaaaaagaactataaatccactgcagcatcattttcatcaccgggatggacagtctgtgaggaggacccagcagcatagctaggaggctgaaatggtaaaatcggtggaatcggaagaatcgcaggcatgtcaaatcctagaatggcattggccaattggattatttattgttgaaacgcactcatgatttgattttgagtctgcatcatttgttgttgccactcgttccgtgcttcctacttttccacccttcgctttagtgcctgatattcctcttcagtgactgtgggctgcccggagggacctgccctgggagttgctcttgttcccctgtcttacctctcggcaactggcccagtcctctcaattgacgtgaccgctcacccaacacctatttcataatatgcatatctctaggaaattaggtgggatcgacattatacttgcacgaaacattagttggcacttgttgagtttcacgaatctcaaccattttggccttcaaaaaatttcatgaaactgttagagttaaatagaaattaaaatatacaacgagtttattaaaattatgaaattacttacatgcagttgttgtttgtgttcatcgtgccatttgttgtcctcgcatagtggaactttgcaaaagtatccacagcactggaaagttcccccgtgtgggaatcagcctattttggtacaataaaaaaatagaaaaataatattaaaaaaatattactatgtttaaaatatcataccacgctcacaatgtgaccaactgtggtcgtagatctccatccaccttgaaccttcatatgtcctaagtttttgcattttgttcagctctccgtaatttaaagtaaatttattattagcaaattgagaaaaaaagtcataagttaatggatattaaaaattacaacattcaattaatacctgttattttggatctttccagtatccgataacctctacccacacctctagtgtcaccatatttggacgtgat

SEQ ID NO: 54950 - DNA, 1103 bp, Cannabis sativa
  modified_base (1045)..(1072): a, c, t, g, unknown or other
gttcaattaataaatatgataagaatttctcatgtgggcactgcatatctaccatcgtcttcctatcctttccttaaacttaataaaatttatcattctcctactctatctaagaatttactaagtatttctcagctttgtttggataataatgcttatgttgagttccatcctactttctgtcttgtcaaaaatcagggcaatcatcaaatccttctcaaaggccttctttatcaaggcatctatcgagtcacctcctctcccgatccatcactcgctgcctcccctcatctcctatacacttccaagtcctcggttgatctttggcattatcgtttgggacaccccgcatctgatgtcatttctcgcatttcctctacttgtaattttaattttccaagaagagattgcctatctttttgtactgcttgtcaattaggcaaatctcataggcttagtttttcaaattctgtatcttgggcttccaagccttttgaattaatacactccaatatttggggaccgactcccgttactgccataactggtgttaaatatttcttgctctttattgatgattatagtcatttttcatggttttatctacttaatacaaaagatgaagcattcaatacttttctcaccttcaaaaatttggttttaactcagtttcaaagcactattcaattggttcgcaccgattggggtggtgaataatggtctctctctcaaatttttttactcaacatggcatccgtcatgatctctcgtgtcctcatacgccccaacaaaatggtcgagttgaacgcaagaatcgacatgtggttgaaacgggcctcacactgttagctcatgctcatctccctcttcatttttggccttatgctttctctactgctgtatacttaatcaaccgtctccccactcgtgttctccgttatagcagcccctaccacttactatatcaaaaagttccaaactattctctactctgcgtgtttggctgccaatgctttcccttcctcctgttgggttttatgccctnnnnnnnnnnnnnnnnnnnnnnnnnnnntttacttattaataaagatcagatataacat

SEQ ID NO: 54951 - DNA, 1229 bp, Cannabis sativa
catatcctgttcacagaccgggcaaaggttggagggtataggcaaatttttttccaatttatccctggtaagaagttgacaattacaaacttgccaatatataaatctatgcttgggaataataaacctatgtcaaacagccttggcataaacaacctcctggttatcaataagagaagcatagaacagtttagcccgaagcttcccatgcttaacaaattgcgacagctttgtctcattagtgtaattccttatctccaattttttttttaagtacaagctcatattttgatttatcgggacagtccatatactaaaatccttgaggtagatagaattcacccactactacaaagttggcttttctcaacggttaataaggaggtcaattatgaaaaccgttggaaaaagtaagaggagattctttccaacaatttagaactgaaacaaaaaaaccattgagaaaaataaatgccaacagtggagaatcgtgggcaaaactaattgaatttttaaaaaagaaacaataaatgccaacagtttataattgttgggaataagtattcccaacattttataactgttgggaataagtattccatatttgttttagtatataaaaaacaattttttgcttaataaaaaatttgtatttaataaaaagagagtttcagattaaaaaaaaaaattgtacttttttttacttaataaaataaatatgtatttaaaattaaataaaaaatatactaaaaaaaaagtttcagatttaaataataaaaaaaaaatacttaataaatttaaaatttgagaattgataaaattgagaagtttggattttatatatttttaattagaggataattttataaattagttgtatttaaaaaattattgttattcaaaaaaaaaattattgtgaaagagaaaaattattttattttttttgtcttaatatttaaaatataattttttttttttttgttaagtatattttttaagaatataaattggaagaaaaaagttaaaaaaaaaaacgtataaaaagatatatattttatataaaataaaaattgttaaaatgtgatgtctttataagttttatttttggggtgcaaataaattttttctaaaaagtatatatatattttaaggaatttttctaaaataattaattgggggtaaaattaaattaggtataattaataaaataatcagtttttttttttttt

SEQ ID NO: 54952 - DNA, 501 bp, Cannabis sativa
tagattcaaatctgaactcggaccaaacccaaaaaaaattagaaattacaaacacacccttttaaaagatgtactacaaattttctccaaataaatatgagataattaaataagttatttaaaatgaatgactacaattgcaacctcgtccaataaaaatgtatcacatttgaaaacaatttcgaagctcataaatacatgcataggcaaaatgaggataatgaatgcattcattagcctaaaattaattttttcatttcatttggtgaccccatcttgatcattttgcttttctcgttgaaaacgactctgtccttccatattagctataataaatattttttatttatcttaaaaaatatattttgatttcacatttttttttcttcttggtaataatagtattagaaaaaaaaaatccaatagaacacccctaaaaaatgtatgtttatggtatattttctatatatttagaagaaaaataattattttattttttac

SEQ ID NO: 54953 - DNA, 1669 bp, Cannabis sativa
tagtgatgaggtttgcttacacttagataagcagaatgccttttccagggtattagtaaagtaatccaggatcggatgtattggctatacatcaaactagagcggtattgagagtggaaaatatatcataaactttttattatatattttctaagtcaatgtcacttatttggtcatagatcattttatctcaatcgtgagatggttaagctccaacttaattctattgcacgagttctttgacttgttcgttaccagcgtgctcataggactagcctatacttatatcttggtaactcaatagtgcaattaagtgtaagtgttaatcatagatatgcacatctatagctttcatgtgttattaaaagtgaaacaatagttccctttgagcttagctagaggcgttaaatgattgaacgttcatttttgtaattatattagtttcctgaaatattatatacaagtagctaagtgtttgaaggataaaatattgttgacagtaagaactcgtcaacgaaataacaagaacttaagatgatgtttcaagatcctaatagaagaatactcaaagtaaatattactctcttcactatttagaaaaactacagtttcattaatattttttcattcacctccaagaagctttgacttcactagatgttaatttgttgaataaagatattaatgatgaaatggactctctagagtcaaatggaacttggcatttatttgtgttactaccgggttgtaagtggattcttaaaaagaaattgatacccaatggtactgttgaaaagtacaggacatgtcttgttgccaaagggtttagacaaagagaaaatgtagatttctttgatacatattcacctattactagaattatatctattcgtgtgcttatttctcttggtgctatttataatcttattgtgcattaaatggaagttgaaattgtgtttttgaatggtgaattagaagaagagatttacatggactgtgacagtcagtagtcccatgatttgtaaggagaaataccgggtaagttgtgcaatctcacactgcctagggaaggtcaagtgtgatgattctgagattgtgtaggtatgggactacacaattgaaaatgacttaaatggattgattggtactacctatatcaacaagatgcatcttcttttctagtagcccaacacaaaagaacttcacagttaagcatgcttggcctaggataattttaaattcaagatgggtgacctctcgggaagttttcccaagaagcgggcaagtgaggacaaagcacgctggaaagactcgtgttggtctgtagggccagtcgccaacccacgaagcagccagagtgacgtactcgtgtataagagtcttaaatccgtaggggaaggcccaatggaggcttgaaacggggatgttacaaatggtatcagatccttgacctagctagaagtgttgtcgatgaggacgtcgaacccctaagggggtgattgtgatagtcagtagtctcgtgatctgtaaggagacacactgggtaagttgtgcaatcccaaactacttggaaaggtcaagtgtgatgattctgagactatgtaggtatgagactacacagttgaagaatgcttaaatggattgaacctatatcaacaagatgcatttt

SEQ ID NO: 54954 - DNA, 1252 bp, Cannabis sativa
agagggtaaaaataaaagaggacattatgaaaaaggtatagagtgtaatttcctcttaatactagtagttttgtccctgcctagggtccacctagcctaggggcccaaaagaaatttgtcgccttttaaaattacacatttttttactaattttaaaaaataccatatttttttctaaataagggcccaaaatattttttttcatatggcccacttaaatttaaggtcgactttgtgtatgtatgtgttgccctattagcttataatatatatagtagaaattacattgtatacccattttactttatttgttttaatttttacttttattttcatatcctttaagatacccactttcataacataaaaaataaatatatgatgccaaaaaacaaaacaaagttttgaaaatgataaaaaaatctctatctatcatcccttaccaaaaataatttactatatacctccaaaatctaatctaaataaaaagaatacaactctaaagaggagagccaggaggaggactgctgcttcgttgctttgagaaccaacttacaaagttaagtttgatatgccttaattaacatcaactttgattgtctttaaaatagattttctattgtataaactttcatatatttcgaagggccaaccaattaattacatgaagtctctaactaccattcttatcttctatttaatctttgagtatatgtaccttgaatataattctattaaaaacagagcatataaaaaattatttattgatgtttttttttatatatattttatgtataaatttatatatttttatataggttgttatgaggtcatggaaagtgttggtgtaagttgtgataaccttctgcgcaatgggaatacattgttagcattctcagaattgtcaatcaatttccattcacctttaagagtacgtatatttaattcttttttttttttatctctttaataattatgtatatgtatatataataattatatttgatatttacggtaaaatctactaattattatatatatagagaaatttaaataatcataccacaaaattttaaaaataatcaaagatatttactctataggtagtgccctaatttcatttgatacccaaattacctctctcattgcaaaactcatctttctcttttctctgggccagtttggcacagctgtgctgtggggaaaagcagctgtagctgtgctgtgggaaaaagcagctgcagctgtgctg

SEQ ID NO: 54955 - DNA, 1215 bp, Cannabis sativa
  modified_base (784)..(787): a, c, t, g, unknown or other
ggagaagaaaagaactagaataaaaaacactttgaagccgatctctgtctcttccttactctctcccttagtttttctctctaatgtgtagattttgaattcttaaattcgtagcctaagggattctattaatagtgtttgagaaaatagatgaatgtcgttagaattaggattatattttatagtgattgaaaagatagatgaatccgaattaggattctatttatagtattatgaaatatctcactaaaagaaatgataactcatctttaaaaaaaataacaaaatcgtaactctacttgaaaaactatctttttttcgctattttttttccagaaatttcttgctacgatgactgaaaatattttggccataactctatcgatattgctcggaattagacgattcaagatgttatcgaaagctaagaacgagatctaaaactttcatgttgagctctaagtccagttatgcctctaaagttgtccaaatatgctaaaattcatccaaaagactctaaatgcatgaatagtttttaaaatagcctaagaaattaaaattaaactaatccataacttaaagaataaatttaagggtcttttttatttttacactttaaaacagtttttttttgcatttttacggaattctacatataacccataattcaactagcgctgcaacctaatttgcaacaaaaaatcatatagaaacccctattgcaactaacgctgcaaccactttagaaacccaaactgtaaatttaaaaaaaaagttaaaaaannnntatatggggtaatttccctaaatttaataatattaatgaataaattgatcatatttataagacaaatatggactcatcaaattcccccacacttgactctttcttgtcctcgagtaagttaatgataaaataaatgatacttaaacaaatcgctttttataaaaaaaacaaaaaaagtttcaaaaattgtacatccctttataattccaagaaaatccaaactcttcaagcattagaatttcaactcaagatagttacttttcaaactcaatttttgtgtgtgtttgtgtgtgtgtgtgtgtgttcaatcaaatcatcatactactaagtccactcttaggtggcgtttggttggaggtaataaaatggaatggaatggaaaggaaataattttcattccattcctttgtttggttgtattttaaagt

SEQ ID NO: 54956 - DNA, 967 bp, Cannabis sativa
gcagtgacaaagattctccctctaattccgacaattatcaagaatagggttgcaacagtgaagatgtgtcttatgagtgtttacagtataaatattaactatgtattcatgttatttctcttgtagaaggagaaagctagaaggaatttttgtagaggttttgaaagtatgaaattattcatcctttacacatgaaaagtaagggtatttatagggacacatgtgggtaagggaataccctttacctacctagggtttcttactcaacacgccacaagggctaatactacaacatgatgatctgatcgttgtttggtagctagttttcccattgtgtggcgtatgactgttgggaattgcatgggaatgtggacacatgtcactcaaaggtttcacctttaaaagttgtttcctagataagtccttagacaaaatggtgctatagacgcacgtatgtgcactaccatggtatgacgtagggaacaagatctcattcggtgttaaaagatatgtaatcttcgcttcgagctccgaatgggatatagtcatggtggttttgaaaccagttggccacatccttctcaaattacacgaacttgttactctctttgaatgtatgtagctttggaggacttcatcccttctcagtagtggatgaaaggtaggagtttcgaaatccttctcgtccttgctatcatgaggatcctctgactattcttagaatataacttctttcatgaccctaataagcgaaaggtacacactaattacaaatagtccaaggtggcacctttctatgattactacatattaaagatcttagaatatggataacatttcacccccaagcttctaggacaatttgagttcttggaagagctcttgtttcagagattatattagctcactgaaacatcatttataagaagcaaagtgttttaaggatgaaatacattgaggggtgaaa

SEQ ID NO: 54957 - DNA, 1051 bp, Cannabis sativa
gattaaacaagcctttatgaaagttttcatcagaagaacactttcttggagagaaacctaggaactccaagtttagagagaatttgaaccgagtgatcaaatcattcaaactctcatggatctttcatacaatgtagaaaccgctcatttaaacaatcgtatttgagcatttgaatttatgtttgaagtcaaaacatatcattcacgttacattgaattaacatcttttatcctgcgggaatactaagtcaaacttcttatatttattgtgtaaaaagtgtccacatactctaaatgtgaattttatgtttgattaatttgacattctatttgtaccaatctctacttaaatttcatcgttgttattatttgtcttgaagaggaatttagttaagcccttcaagatcatagttgtcttgtgtgtatatagttcattcataattgaaatgacaatgtttcgttacaaattgtaagaaatgtttaacatacgtgaaaatatacttaaattttaaccctacttagatttagcttctgtgattaattacttgaatgattcttgtggaagatagaattaggttagcattgcttgcatagcttttgtgattctaaccatgctaattctattatacactattttttcccttattcgtttcttacttttcttctaagtaaattatcttaaatattatttctttaaaaaaaaacttcaccattatccgcattatttagaagaacaaaaaaataataaaatagttaagaataaaaatatttaatgcaaatttattttgaactaaaataaatataaataggttaaagctactaaaatctatcaaatatatatttaaaaaaaataataaataaaattatgtaatttctaaaattaagatcaattaagtaatacaataataatatacataagatttcactacaaaaacagttacctacaatcttgtaagtgacttagtaatatgataatagaaattcatattttatgtaattactaatattttaaaattggtaaataactttttagtatttgtgttttatctaa

SEQ ID NO: 54958 - DNA, 1678 bp, Cannabis sativa
  modified_base (32)..(33): a, c, t, g, unknown or other
tacagtggttgtaccctagtatggaacgttcnnactcatctgttaagccttgtaaataggtgtatgggcacctacatacaagttggtattatatgtacgttatatgcttttcttactgagtttgtcgactcacggttctactttcatgtgtaggtaaaggaaaggagataacgaaacaggagtgagcttgagctgggatgggactgtacatgtcatggcagcacgacatggaatgttcggtctcggaacgtctggggtttccattttgtagtcgctgtgcgaggtgacataatatattttcgaatatttttgtaaaagtttagaaacgggatcccgacattcgtaaatattttaaataaagtttataaagtttcaaagtaatatcaaaagttttaatttgtcacgattttcgagaaaattctttgattagcaaagattgcactacaattgaaaaattattgtagtgtgccttagcatttgggcgttacagatagtcagtatgctactttttcccatcatacactattattgtctaaggaagtaaggcaatagcaaataacaaaaatacttattataagatgagtcgacgtgtcttcgcagtcaatgtacatattcgaccattcttctagacctttaaactcattgctgctctgataccaagttgtaacaccctaatctatagggacgccacgtgttaattttataaactaatttaataccaatagattaattaattattaaaagctgtgatattatcaaaaactttaccaaagtaaaacactaaaaacagagattataacggtataaaaagcatgttctgaggatccctgttatgaaaagttttacataagaacgatatacaaagacgcctcaaaaatataaaaccaaaatacaaaatcgatacagcccaaaaaaactcctgacaacttggcacgcaggccggtagggtcaatatgtacattgttggagaagacagtcacctcatggcagctctaacttttccttgctcgtacctgcagcacatagcacccgtgagtcacaaggactcaacatgaaaagtaataataataatcatatagtttattattagaattttatcatttatacaaattcagaatcaaaccattactcattgttcataagatgaaattcaaattaattctggcatctacgatgtataagcatcagtatacaaatatttggtaatacaaaactattatactaataactagtaagcatcccgtgcttcacggcagatgtataaaatattttaaattatatatacacaaattatttattttaaataataataattacttagtaaaattatattaaaattttaactttactattaaaaaatttgtgacataaaatacttaaatattaaatttattctgattaaataatggaattcgaaaaatagtagcataaatcctcaaatttctaaacttaaaaattttaatagtcttatatggagaccaagccaaaaaataagaagtagatagatttgagtttggaattgatttatttattgtttaatttttattctgatgtgtgtgttaagttttgagttcaaattttattgtgtgtattttcaatgttttactggggttctactctttgagtttatttttatgagatctatttatttatttatttttatagattttgagaactt

SEQ ID NO: 54959 - DNA, 866 bp, Cannabis sativa
tttgtcacattactagctcgcattattgtgttgaagttgttcaaatgtgagactggatcggtggttccatcaaatgatgagacatgtgggtttttaaattccaagggaaaaagtgtattcatgatatctgggtggtacggctcaagctcctcgtctgagtcgtatccaaattttctccctaattcccccatttgatatctcctgaacttgtcctccaacttgtctattcacaattggatagtatccttttgctttggaacgagttgttggcgaagatcaggtttcttccgattcaagtgctctcgcagatctggttgggagtaattactgccagacctcgttttactcatagattgtgtcctactcatggacctcgtctttctcatggactttgtccttgagtgactcacgaatttactggttcccatactttctcaatcattagttcgtcgagtactttctcctctttgagttgatcgactgttggtccttgaacgccctgaggtcacacttgcttcttcacgcactgttcttttcccctaagtgtggtttgtcgtatttcccccattagggtttgtgcgagccctctctctatgggttcaggaagaacgctgatgatttcttgcaggtgacctaggttctccacgttgaatcccaagatcttcctcatttttatgaggaatttcttgttcgtcaatttcttgttgcctcccattcttatttctatgagagggttctggctgatcattttaattttcaggggtaatctcattttccctaggttgttcatcctggacattttcctgtctcctggttcgtgagccacgaggcttgcctcgttctcttctcacaccaggttcaggttg

SEQ ID NO: 54960 - DNA, 950 bp, Cannabis sativa
ggttagaaacaagaggaaacaaaaatcaaattagaataaaaattaactaaactgatattgataaattcaatcccctacaacggtgccaaaaacttagtcggtaaaattgatacgcaagtatacgcaatcgaaacaagtaatataatgataaataaaatatcgttccctcgagaattaattatcaattaccaattaattaattctttagttctatttaatgaataacaattattggataaaaagtaaataaaaaacaaagaataattaaaattttgaaaaataacaataataaagacaaagattgttgtgatccccaactatcctttattttacttcataatataattacccaatttcttttctttctattcatttgataagtttagttaagaagtttataatttggttaagacttataagcccaatctatataaaaacttcgtatatttctatggtaagtttaatcacaaagattgcataaagatagcaactagtaaaaatcatacaagtattctagatactcccatcctaaattgattttcatccattaaaatcatagcatatttaaatcccatctttcagaattttgatttaaattcataaataacaattaaggtgatcagtcaataattgcaaaaataaaaaagattgtatggaattaaataaagagaagaagaagaaattgaataatcacattaatccataaaataaactcaagtggttcacataaaaatctttaagagaacttagctactaaaggacattttaaagcaaaaggaatgtagctaaagacataaaagatagagttgaagagatagaataatgttggagtcctccactgtgccttctgctccttgctctccttctacactcaggattcctctcaatttttgaatggtgtcaaagcttttccatcaagcctccttttataatgcaaaaatccaagtttc

SEQ ID NO: 54961 - DNA, 839 bp, Cannabis sativa
gtgaaaggttgatatggattgaatgaggaagagaagctgaggtaatttaatttttatctcaaacataagaaagctcttaaaggaaatctaacttatttgaagtcaattttctacacgtaggagagggtgttagtgcaagaggggctgaaagaagaacagtgagtgagcttgaggaatcgtcaaagttagccatagtgtaaagtagacactcgtccataggatagtatgaattatggctctaataccatgagatatttaatgatttattgttgagttaaaaaaaaataaaatttaattatctttaaaagaaattgataatatttaaaaaaaaaaatctaattatatatataagttttctaatataactctaatttttttctacaactcttacttcagtaatagtaaaccagatcaaagtgggtcaatacgaacacaacacaattgttacaagtcaggttagggtcgagataattagacgcagatcgacacacctgaaacaaaatataaaagcatgtcaaataatatatgatatgaacacgacacacgttttgccacctatcaatatatatatatatataaaggaggagaagtatgagacggtgatatgacattctaaaatcactccaaaattatttttctcttctctccttaattctctcaattttaatattttattaaaacataaatctacaaattcatattttactattattttaataatttttctataaaaaagtataaatctgcaaattgatattgtactattattttaatattttttctataaaaacaaaaaaaaaataaaaaaaaaaattcaaaaaaaatattaaaacttaaat

SEQ ID NO: 54962 - DNA, 1979 bp, Cannabis sativa
taaaaattggacaacaccgcgcgaaacgcgatttagttccctagtttatcaataaaagaattatataccatcaaaaaattaaaaaaaaaaattaaacgatattgaaaaaatgtattagggtaactagttacctctttttttttttggtatgttgttaccatatattgttttttttttcatatttttaattttcctataaaataatttttttgaagaaaaatcccatatattttcacaaattgtataatctcccaaaatgtatagaattttcattttatgttttttttccaaaatatataaaaatataattttttttttcaaaaagattatttaatgggaatattagaaaaagaacttttttttttgaaaagtaacgttcatttattcataatacattaaatattcttaggaatagtattaatgtcaatacaaccatataaattaggggtaagttgaaaaatgcctcttttattaatcaattaactaaatttacctctaaatttgttttaactgaaacatacctctttttatatgcattatacccaaaatgccctaacataagtgagtcacatgaagagtatcttaaagtgtcaatggcaaaattggtataatatttaaaaagagaggtaaaaataatagactttaaaaaatagggtaaaaataaaagagcacaatataaagagagtatagagtctaatttcctctatacattatgggtaaaagcccagttaaccacattatgggccataaaattacaggatattcagagagtatgaaatattcatttttatgttgttttagttttggcaaagtttacagaaatatgactttttttttataatatattattttatgggaaattaaaaaaataaagttaaaaatatgagagagaaatttggattactagttacccttcaataacaataggaataactaattactttactgtttctatatttttaactgtataattttcactgaaaaaaaaaatatatggatgtagattatagaattggctcatcgtaatgtttgcgtgcgctaaatggaacaagcagtatggatatagattacggaattggcacaaacataatgttcattccaaaaaaaaaatcatttgaaaaagtagaacaggacaaactaacattctagttttataattatgtttaaataaatgcctccaatatgattgttccatgtaagatttcaacacaaacacctaatgaaactgcatatatgcttgcttaataggttgcttaataggtaagccaatagtaagagtccaatcctaccgttaaaactacagcttctactttcatgactgcaaaagtcccttgcaaaactataaaaaaaaatttaataagagcattatactacaagaataatttctttaaaataaactattaataccaagattatcatactattactggcaataaaattttatatggtggtagattaaggttgaaagaatcctagtaatactattatgaggaaatgatctttgtacaaaataaccttataagcttttacctcgacaactattaaaaatattgatactttaacattctgaacctagaattacttattcaatgaaagtaataaaataataataagattacatataaaagtttagaaacacaattaattccacaagaaaatagtactgaccgaataaagactgaatgacaagccactactccgcctgtgttgttgcgaattatagcaccaatacctatagtattagtatgcttatcaattgatgcatcaacattgagtttgaattgtcccataaaaggagtaacccaattagaggtagaagtgcacttattccctttctgaatgttaatatttttttttttttgaattttactaaattcctcataaagcttatgaattcgtgtgacaacaaccgtgggtgaaaataactcttgaccatgaacaatcggtgtgcgctcactgttgggctttgtgtcctaaat

SEQ ID NO: 54963 - DNA, 2295 bp, Cannabis sativa
taatagacaaatactgtatatgtgtatttgtgtcacttggattaaattttataattacttcatatgtttgataaagggccaactaaagaacaatggaaatagaattggtagaagcaccatcgaacattctactatactcataaagtgtaacttcatgctttcttggtcaccttaagatactaaatagcaacaatagtaaaacatacccagcggaagtgttggagatggaagtcccttcagtgatgagaaatccgccttgggaggacctctgtttgtagtactcagccagggctggtccaggaatttcatctatagctctgcaccttgtcatgggcgcaagcaccaccctgcccaagtgccaaccacaccaaaagtagaagcaaaaactaaatcagttcaaacccatatctaagttctctgagttttccaaactaactaaatctatcgactttaaaggaataaaataatgtagatttgggtgactaacctgtgagagagattgaagttggccatcttgaaaggggaaaacaggttgatccccattggtgaaatgctttctgccatttgagctggagcttaatttacaacactcggaaacaatattgatctgtatgcataagaaaaaataattaatgattaaattgataaaaagagaaagagttatatagtgctctggtgtcctctgtagttaataaaaatatcaacacaaaacatatcatatgatgtagttcagattttttcaacatgccagttattaattattattattattatattgacagtggctcgcaaaaacagcaaacaattatatttatataacatatattgaaaatacatatatgtaaatgcatgagcccatttcaaataaatgaatgaatacattgcacatgttcaaataaatgtatactattttagaagatacagaataaaagaaacagaaaatagaaagtctcagtagcctaaaatggaccactagaataacgactttctaaccaagtgaacaattttactttgttctcttcaactaggctatggtagtacaaaatagaaatgcctaaacctaaagccatatagctagcttagaatcagaagactaagttaaataaaagtatttagtttcagaattttctgtttttgcagagaaataaaatatgaatgtattatgcaaagggagggtaatatgctgttgttgaatctaattaatttgctcacttaagaaactatgagaaagagatgaaagccactttttagaaatttaaaagcaaaagtcaatgttatatgatgggcaaggggcaactattcaaaaccccaatgcaaaacacacaaacacagaaaacagtgtaaaggtgtaagattgatgtacttttttttcttaatctttgtatcatattcatatgcacatctttatattaattaaaagcaaataactcttacttcaatgagaggagttgattgaatgccaaacaggaatgggttggagggatcagatcaggctgagagagaagaatgtgaaaggcagagtggaggaattgaagggtttggaagagagagggtgatgactgatgtgttataagagttaagtctttcatcaatatgtacatatatatatatatgtaatatggaaaggtttttgaattctctgtttaaaattctatgggggacgctttgttagcaaaaaaaaactatggaagatgcttttagactaccgaccaaccactttattttttttttattgtatttttcatgttttcgtggacggagaaaagtaattatgaatcgtttcctttatcaaaaaaagtggtctatgaatagtccataataatcacgttattattatgaaaaaaaatgtaattatcatttgtattttttactgttagactactaatattgatgtcagcccatatgcatgtcgagtttcgactaactggtattggaaatctaattgaactttgctacacatttcgacttaattaattttgtaattttttcaaatttagaaaaatttaataatcaataatgcaatcgggctgtttagaatttatcaatcttaattagttaggctttggttggtttgttttacggagatgtattcatgggagcatgggaagccacgttaaggccaggatcaaccactaatttttgttttatacagtacattaaaaaaaaattaaatcctattttaaatcctgtgttttgtaaaagttaccaattttactttttattttgttaaatgataaaatagactttatattttttatatattgtattctcaaaaaaaatagaaaaatattttta

SEQ ID NO: 54964 - DNA, 1519 bp, Cannabis sativa
  modified_base (26)..(43): a, c, t, g, unknown or other
ttcatattaggatgttaaacaacatnnnnnnnnnnnnnnnnnnatcctggtaaaaaatattccaacatcaacttagagtgcgactttgcgaagacgaagaaccagactcgacatcatttatctcattttgcggctggctctactgcgcgggttacgtcactctgggtcttcttcctcgcgattgagatttcgtgcggtttgatccctcaatgttggttgattcaacccctccttgccagttcttcgttccctgggagtacggttagttcgtcgtctagaattagttaattgaggattattcgagtgggtagttggtactcgaggaggatgtcgagtcctatttcgtccatcgatttcagcctgcaaggtccgcatttgatcctgtaatgtcgtgtattggtcggtagttagttgaagtaggggtgttcatgtggaccggcaaaccgcggattcaatccggaccaaggcaatccaaaccattttaaaccgtaaccggagggaccgctgttggtggtccgattgaaccaaaccgttcttagcattatggttcggtcatggtttataatatattttttttggtttgatcggaccggaccgtcaatcataatatttatgtatcaatgtatgtatacatatattatttgatagttccattcttcgttaatctcggtcaaacttcaaataaattgataaaattactctttttggcttaacttggcaggctggcagctattattagctaacgtcatttatcaatataatatcaccaatcaaaagtcaattccaatttaatttattaatatatatgcatatatatagtagttacttaaaaaaaaaattacgatgtacctacctatgcctattgcagcacactgcctactaatctattaaaatcatttccgtaatccctacagcctactattagtctattatagctcctgctcatttaatttgttttttcttctcaagttataatcgcctaggggagacaagtaactactatatatatgcatatatattaataaattaaattggagtgagaaggaaaaacaataatattttatatatatattggtagtgatcgtccattctctctaatctatcaaactcaaagcctctaagtctaatctatcaatatttatttttagttttctattacacagactattcacactttcaagtattaaatttagaatttggagtcctaaaattgaattattggtattatattatgtttagaaaatatttttatatagtatagtattatttttatttattttttaaagaataattataaactcaaaaccatggttttgaaccaaaccaatccggctttaatggtttggtttggtctggtttgagcgatttattggttcggtttggtttccaacattcaaaaaaccgctatgttggtttggttcgaaaaatatgaaaatctggaccaaaccaatccgtgaacacccctaagctgaagatgccttcaaaaccacgacatgtgtgataggtggaaactgcccca

SEQ ID NO: 54965 - DNA, 647 bp, Cannabis sativa
gagacgatactcgatttatcacttgattacttgttacgattgcgtgcacttgcgtatacgaattttcacaacaagtttttgaaccttaaaagatgacttcactccaaagcaaagaaaaaagttaagaatatttagagtgtttgaaataaggatctcataaatttttccaagtgttatagtttcattgctctcagaaaattcaaaaatcctttccttacaatggacttgagagtcttatttatagtcatccccttctccttgtaccctcaacatgcccccatacaccctatgtcctgtcactttcatttatcatgacaccgcatcctaagtgacctgacatatctagaatcctaaaagacactaaaaatgccccttctattttgtacctcagacgaactgaagtttgttcccattatgtaagtgtattgtgccgtcgttatccctcctgacatcttctcattagatctagtggtgtcaggaaggaaaggtggataggaagagtgttgaagccgcgggcaccagtgttgtgagtgggtgaagtggcgcgggcacgagtgtggacgagcgggcgtgggcgagtgggcgcgagaaggcacgggtaggtgcaggcgagcaggcacgggcgcaggcacatacgagcgggagcc

SEQ ID NO: 54966 - DNA, 1066 bp, Cannabis sativa
gtaaagtttgaactaccaaatataggcgccatttttttttattaactaataaactagcacacccaatcttatttcggaatcttttaaatgtcgtgacatatatgattttatcaaattttaatattatttttttgaaaaattaactatgtttttcttggaatttaataccaatgtcctttttttaaaaaaaaataataaatgacattatttgggctttttctttttctttttttttttcccgtaatgttgggccttttcttttgtttttggcaaattgttaggatccttttataagagcttagtcattaaatatccttcaaaaaaaaaaaaaaaattacataaaattttattttttttaaaaaaaaaaatcacaaaaaaaaaataaaaaaattaacatacaaatataccaaaaaattgtattttatgtaaataaaatttaaaaaatcgtaaaaaggttaaaaactctgtaccgaccttatttttatatatatatttttttttgttgtttttatatatttttttttggagattatacaaaaaaaaaatattgtaattatgcatttctatgaaattataataatgataaaacttgtggaagatttctattctatgttatatgtaaatagctcaacaaattaagttccatgatgtatgaagtgatcaaggaaggaagtgtacttttttttctttttttttttctgaaacaggaaggaagtgtactttagtaacctatatatacttcgttgtgttcatatttaatttctaaaactgtgtcctaagtcaaataacaagtgaaagtgttggcctagagtaatactttcaaactaaaattccacacggcatatcttctataatatatgcatatattgatatatttgtttgttgccatcaatcaatgcttgcttgactacaaagaaaccaccacttaattatatataatcacgttgggtcattcaccggcttttaaaaacgttttctcatccatccatatataatatatacagatactgcattaatttcttttatatattatacgttcttctttttctttatcaatattatacgt

SEQ ID NO: 54967 - DNA, 803 bp, Cannabis sativa
  modified_base (125)..(144): a, c, t, g, unknown or other
attggattggatcggttacttttggaggtcaaacaacatccaatccgcataagtgcggattttagatttttcaatccactccaatccgcacaagtgtgggtatccgcattttgcggattggattnnnnnnnnnnnnnnnnnnnngattggattggatcggatactttgtgaatacccctaggtccaacagttaaaaacttggagtgatatgtaatgaaacatgtgggatagagaaaccctgcttgaacaaatgtgttgggcttggtgatggcccattgaaagcataatgtttgaaaactaagtggcggcttggacatgattcaaagaagttggacccatattatgtattgctttgattgtcattttattatgaattgttggtacagagaatagcactgagtgaaagtattgggcttagttgagcttgccttcttcttttaattttcaaaaatgacatttgatttgtacctcaaatcttaaaaataatacaaaattaaattaagttaaatatatctaattgaaataactttataattgaaacaatgaaaatatttagttaaattaattttataaacataattaaaggtgtcaaatgtataaatttgagctctaatcataacccccaactagcttattgctagtctctagcaattcaagcaaagaaaaataatgtcaacatgatattttcaagtcaaaaattttaaaattacaccaatattcaaataaaatattagtaacaagccaataaaaactttacaaaactacctttaataaatctagagttgtgagtgtgtgcatcaaac

SEQ ID NO: 54968 - DNA, 1021 bp, Cannabis sativa
  modified_base (27)..(28): a, c, t, g, unknown or other
actaatcagattgtaaagagttttatnnagggcataaaacctaacagggttactttattttcgacccgcccaatatacagattgggcgggttttttttcgtcgggtttttcggtttttttttttgcggttttttcggtttggtttaatcaggttattcggtttaggcggtttacgaaaatatatgtacagccctactttattcaacatatgatgtctttgactcttgtctaaacgagacactgtatttcaatttgttgagaacctaaataatttaaatatgttttatttttgtattttttataatatatcttcaatacttgttattttctgaatatgtgtatgaatttatattgaacaaagtaattaatttttgtttattgatatttgtaattgtcaaaatgttgtttatcgatcctcaccccaatcctcttttacttaacgcatttacaaatgaactcacctgcaaagataactcctaatcagagtatcatttctcactgatgatgaatttaaaattcccgaagcaaccatgctgggaatttcgttgccaaaagaataaagagttcaatttgatctcaacagtttatctcctgagtatagaaaaattgttgtatctttcatgatcaacaatcggaactcgtttgacatagacaagcttgatattaaattgcatgcttatgaaaagacattatcaaatgcaaggagaacattctctagcattgcaaaccatgacaaaggaagaattgagaatattgagaaagaatcctccaacaatattgtaacttcaggctcagttgaaaagattggggaaaattcttcgacttccccagttactcttgaacaacaaattgaaccaacaataagaacaatcaaggaatagttaagcaagcatattattttatgttctcactgtggacaaaagggacattgtaaatcaaagtgtcctgcacttctcaaccctaagaacaaaggtaatgcttttgtctttgaatcatgtagatcggaagagcggttcagcag

SEQ ID NO: 54969 - DNA, 1027 bp, Cannabis sativa
ctatttttttaaaataatcaaattttaatttaaatatttaacaataatttttttagcaattaatatttataaataattttatttttatattttcaaccgttaccatttaactataatatttataataaattttaattcttttacaaaaattagactttcacccagggcggagctaggacctaattactagggggccaagcggcaaactattaatttttttttaaaaaaaataaatctatagtgcacttcttaaaagactatttcggttcacttctatctattttagcatttatgagagttttttagtctattcttttatgattgcatatgttataatattttaagatcacttataaatttttatagatttctaaatagtttatagtgcaaaaataaaatttgaatagttgattaccatacttaaaaaatagtcgcgagtgtaatattatatttgaaccttatttttgaccttataaattattctgaatcttttgaaaatttacatgtgattataaaaaaaaaaatacaacgtacataatcatgaaataacaaattggattaaaaagcttttctaaatgaaataactgataaaaaaatggatcaaaatgaccattttaaaggatgtgcaatataattaactaatatttttagtaacatgtaatacatataaaaatattttttataatatacacacccccaaaaggttgttctagtacacttttctctgtttcggcatccaaaataattttttagtcaattttattttcatgatcgtatacatttgtaattatttaggaccacgagttgattgttttttttaaaaaaaaaatacagtgccaaaaataaaatataaatattttgttgcagtcataattattttttttttggtaaataccattttgaaccctgtgttttgtagaaattaccgattagaccctctgttttgttaaaagacaaaatggaccctgtaaatgagcatttcatcataaaagctataaggttcaagggttacatattttattatcca

SEQ ID NO: 54970 - DNA, 1899 bp, Cannabis sativa
gtggaagaccatggtttctgctataagtccgtggtcatcgattggatgggtacctaaatggtactagagtgaaaccaatcgagtttctaccatctgatgcttcttcaggtgaagatgctgtggttattaatcctgagtttgaactctagattgtaaatgaccaactgttactcggttggctctacagctctatgactgagagcatagccacagaagttatggggtgtgactcgtctgcaagtttgtgccaagccttggagacattgtttggtgcacactcgcgtgtgaaaatggatgagtatcctacaaagatacagacatatagaaagggaaccatgtcaatggcagattatctgcgtcagaaacgtcaatgggccaatgtcttaactcttgctggtgacccatatccagaaaacaacttgtctctaatgttctttctggtttagacattgaatacttacccattgtgcttcaggttgaagctagaatctcaacttcttggcaggaatttcaggatattctcctaagttttggcaacaaattagacaggttgacaacactgtctggaacctccaaaaaacgcatctcgggttctccatctgctaatgttgcagctacaagaaatcctggttttgtaggaaatagatccaacaatcctgggcagtatggtcatggaaatcgtggcaactcgaatcaaactcgaggaggcagagggtctggcagattcagaggtcgtggtggtagaaatcaaagcaacacaaagcccacatgtcaagtgtgtgggagatatggtcatagtgctgcctattgttacaatcgttatgatgaagcttacatgggttctgatccaaatgcttcaaatagtggaaacaaagccaatcaaaccagcaacaatggaaatggttcctctgccttcatagccactcctgagatggtggaagatactgcttggtatgttgattcgggagccagcaattacatcactgccgactcaaacaatctcactcacaagacagattacaatggtgaggagaccttgactgttggtaatggcaataaacttgaaatcgcccatgttggtaaaagtctaataccctctgttgataactgtaccatagtattgagcaatgtcctacatgttcctaatattactaagaatttacttagtatttctaaactcacacatgacaataatgtgtttgttgaattctttgctcaaaattgttttgtgaaggatctggagtcaaagagggtgctgcttcaagggactcttaaggatggtctataccaactcacaaattatcaagaaggtcttcccaaccaaccaagttcagtgtctatttccaagtgtgtcaagccttttactggtgtcgttactgtgtccagcaaaaagtgtgttaatcctagttttatttccctaaaggataggtggcacaagcgtcttggtcacccttccaatcgagtcttaaactaggttttgagtcttgcaaacgtaacagctaatgtgaatgaaaagaatagtttctgtgaagcatgtcagtttgggaaatcccatgccttgcctttcaatatcaattccaatcgtgctaatcatatgttagatttaatacacacagatgtttgggggcctgcccttatcacctcaagctataactataagttttacattcattttgtggatgatcatagtagatacacttggatctatccactcaaaaccaaagatgaagcactttcagcctttatccaattcaaaactttggtagaaataaatttgacaggaaaatcaaagctttaaaaatagattggggagtgttaattctatttttggcatatttaattgacaaaaatattttattatttcctattaattttggctggtatgtgtttaatatggtt

SEQ ID NO: 54971 - DNA, 1093 bp, Cannabis sativa
tatagtgacacttcaacgcgcgtcactaatgagggtgactggaaagacaatttttagtaacacttcacacgtgtgactgaaaccttttgcattcacattctgcgtgtcactataggcgtatagagtcaagttttgtcagactaaaaaattaacagcaacacaaaaaaagtgtaactatatctctttttttttaatattattatttattattatttttggagatatagtgacacacaaaaagagccactatattagatatttttctaaaaaaatataatatttaattttttaattcaaattttatataatataaataataatttaattaattatatattaatagagttaaatatatataaataataatttaaattaactaaatataaacaatactaaattttaatttaaataataaaactaaaaaacaaaatacaaaatacttttattgctgaaaatatatatttttattaagattattaactaaaataatacaatctttacacacaattttacactcaaattacaactgatatgaaacttaatacaaactcacatctgtttctattaaaaaatacaaaaacatgaagaaaaaaaacccacatcaaattatttatctgttgttaatgaaataatctcaaatcactttcaaaatattacacagtgtacactttgaacaaaaaacctaaacaacaaaaaaaaaaaacccatatctaaagtgtacattgtcaaccataaactgtcaaatatggctttagaatgaaataatcccaagtccatttttgaactcaaatcccacactgtcaaccacaaacatcaaacaccgggcttgtcgaacccaaccccttcgaacacgaacgtcgatcgtgtacctagaaccacaaaaaaattaaaggcaagacccacgtggaccttcaaacgtcgtccacctgcataaatcaaagacaaagagagggagagagaaagataattaggtggacaaaaaaataaatataccgattaagctagcagtatgggtaaacttaaagggcgtttgggcggcggaggcgtcaactgtggacaaacctgttggaatttattttaccatgatcttaga

SEQ ID NO: 54972 - DNA, 665 bp, Cannabis sativa
cgtagctagctaggtagatcagcattagttcaattatatttgttttgctatacttaaaagtcatatattgctaaagaacttttttgtttttttatacttaatggtttggctagcttcgtaaatagagttagattttagcactttaaagtaaagcatatattggtgatgtatggaaattcaaaggtttcatgagtaataatggatcacttttgtatatatgtatatatatttatatcatattttttatgaaaacgtaattcaatttaattggtgaaatgaaaaagaatcatatatatatatatgtagatattgtgaagaaactaaattaaggttgaatagaggacatttcgttatcaaaatatataatgtggcatgcgtacacacattatttgatcaatatcaagacgtttcagtccgtaacacacacacacaagccaaatttaaattattaaagctttcctctgaaccttccttaatttatggtcacacctgtttataaatgtgcaatgtttagtctattcgtatgccctatatatgtctagcccaactctagttgatttttcatttattctcctcactctaaactatataactacacatataaaagagaagagttcaatcaaaatataacacgtatgcaaaagacaaaagtatacaatcaccat

SEQ ID NO: 54973 - DNA, 1908 bp, Cannabis sativa
tttttagcagcataagtactaaatattagttaacatgtaatttttcatttagtttcgttagtacagactctgttagtgttttaaatttaaatttattaataagattaattcgttcatacctaatgattcaaaatttaggctttacatatatcatgtttaagatacttataacaaagtctgtagtaacgaaattggatgaaagttcatttttaagtcactaaaaaaatcactgggccaattattacaaactcgaaatgggtatttatactacaattactctttaaagaaatactaaaggataacttaaggtatcaaataccacaaaaaatgacatatcactattaaagcatttcaatatcaaattcaacatatttttacttaataaataatataagaaaccgttaaccaattatagagtactacatcactatcgatacgatattagacacttaagatattaaataacaatactctaataatttttatcgcttcacaaagcattaccttaatagtgagtaccactagtagctaataacagtacttgtacatcaacttgtacctctccaaaggacatatcactcactcactacaaagtccacaactatcataatccatctcataattcccacatccttggccatgtgactttgcacgtttcttcatttcccacctccctctcctttggtttatctcttcttttctattctcttctctccatcatccaccttagacacaccttattatatataataactttatctatactcttttacaaaatcttttcttggtacaatgcaattgcaataatgttggatttggatgtatatgggggcatatttctcaataatgcttcctaagagggtgtgtttggttcatccttataaaatttggacaaattgttggattaattgatttaacgattgttaattaacaaaaattaaagtatatcaaactaggtttagtgtttattaaaccttaatcaaattatgcaaaaattaatatattaaattatgcaatacataatgaaatacattcttcatcagtatgaaatcttcttaatgttagttgagtactgttatgttttcagtatatattgactcgtaataatacttacaactaagaatagacaatatccaatttaatctaattaaatcaaaccgattaaatccaatctaattacaacttgattagattggatgttaaaagttagattgtaattaaactgaatctgttattagatatcaatctcaaaattcaactaaaaacattcaatccaagttatatattaaaaaattatttatatttaataaaaatattaaaaaaatatataaaaaaatatatatttttagtggctatttagttttttggtgttgaatttgtaacacatggttgttttgtgtatttatttttatgttattttgttctattttagtgttgttttagtttatatttcaaacttttttagttttgtattaaatttgtaaggatgatatctttacggggcattcaacttaataaatggtgatatttactttttaggtatttctcttcatttatttaagttagtattaaaaattaagtgtgttagatatctgttgagaatcatagggttccatctcaaaactaattagtaatgagtggggagtagtccatgtttatatggctcaatatttttacatttgatcaatgtgggacaatattgccatttgctcacttatttttgtttgcagttgggagtaccattttgctcgcttgtgactggctaactctttgataggtgtggatcaaaaatccgctagggatatgactctgataccatgttgtgaatcatggggttccatctcaaaaccaattggtaatgagtggagtagctcatgttcttacatatggcttaatatttttacattt

SEQ ID NO: 54974 - DNA, 1431 bp, Cannabis sativa
aaaatcatcacaagtccaaaaggcatggagttgttaatgttgatgacgactttgagtcactgatacacttgtagtgtcatatgatacacttgtgatgtctagatctaataagtatatgaatatttcagatcaaaaatgtttcgtcggatcggagctccgagacctgatcaacctaataaatagatatttttgacatgcctagtctctagtatatatatatatatatatatatcattagagcattgttattgggctttagtggtgcccaacacattttataaatggcatcttacgattggttaacaatattttttaaagttatttttttaaagctatataggacccgatatctaattacatcaatagtagtacaataccaatgagagtggcaaacactaatacaccttttagtatttctctaagcattattatagctagttaattaaaagagagaaattgattgactacaaaatacaataatattattagcacataattaaaaatcacagaaaaaaatgaagattctcttttacaacactattagctcataattaaaaatcctgcaaactattattattaatattaattaattaaagacttaaaatattaattatatataatattacaatcaacaacactcttaattccttaaagtatatatataaatatacatatatatataagggtggttttataatgcaccaactaaaataagtatactgttgtaacccctaaatatttcagcatttataaagtttttttagtttaaatttttttcataattgtatacgttatagttatttaagatatctagtaagatgttgagaaatttaaaataatttacaatatagaaatcaatgttcaaactgtcaataatttttttgaatttctcaaaattttaccaaatgtcttaagtaactataacatatacgatcataaaaaaaaaatggactaaattctttttttcagatatcgtaacagataaggatacatcggtgtatcaagaggtgtattgtagaattttcttacatatcatataggttaagtccaaagtgcaccccgtatagggatgtttcggtaaatctcgatctatttcagcatacaaaagaattttttagtcaatttttctttttatggtatacttataattatttaagatcacttataaattttttaaaaaaatttgagtagtttccaatgctgaaataaaatttatatattttgttgtatgcacgactatttatttttggcaatataaactatatatttagcgattttaaataacgtaatgtatgtgatcatgaataaaaataatactaaaaagttttttagataccgaaacagataacgattcaagtagagaaatttccctatatatattaaacccaataatttttttttatcctgttctcaaccatggaaatctcagaa

SEQ ID NO: 54975 - DNA, 3433 bp, Cannabis sativa
ataagggtttcttggtctattattacaagctagcatgcatgagaaagtgtcatttgaaatctgtacacactcacatactatcaaactacaatatcaaaatggtaactgaacaataatttcataaattttaatttccaggatatatttacagctgggtcagacacatctgccttaacaatagaatgggcattatcagagctagtaaagaaccccaatatcatgcagaaagcaagagaggaaatatacacccttgttggacaaaccagattagtagaagagtcagatattggtaatcttccttatcttcaagctatagtcaaagaaacactaaggcttcatccaacaggtccaatggctgtaagagaatcaactgaaagatgcacaattaatggctatgacattcctgaaaaaacccaattgtttgttaatctttgggccattggtagggacccaaagcactgggaaagcccacttgagttcaagccagagaggtttgttagtgaagatgatgatgatgagaatgggaatgatggtaagcagttagatgttaggggtcaaaactatcattttatgccatttgggagtggaagaagagggtgtcctggaacctcacttgcaatgctggttgttcaggccactctagctgcaatgattcagtgctttgattggaaagttgatggtgttgttgacatggaagagggatctggtttgaccctcccaagggctcatcccttggtgtgtgtaccaattgctaggcttaatcctttgccatcatgaaaaatttaagtgaaataaacaaagggaaaattatggattttgctgtattacttctctaatggagattgttgggagtgattgaagctatttaaatatgtgacaagatatatattagtagttatcatttagtgaaaattagtgaaacattagagggagctactttgtagttatgatacttcattaatgaatttatctagctctgcaggctgaagacaagtaatatctaaaagaatattatgaatacttagtgtgtttttatttttttagttatttctattttatcacacttgtttgatattttgtagtgacagaactctctctgtagctaagaatacttgtttgttgtaccaacttctttattccacatttaattaagaaaatttgtaatattgaaatacataatttttggacaaaacatgaggtgagggaatagatggagtgtaaagaattgagagaagaaccaagttttaagcatttacactactaaaaaagattgattttccaactggtttaaatagtcaggtaagggtattgttcgggccatgtaaccgacgcctgttccaaaatcacgaaaatggaatacgtgtcggttaaaaacaatcgtgtatgccaatatcccaactgtttagaactgtcgccaaggatgaagactatagccaacgacttataacagtcgacaatggctatagtgagctactatccctatagatctggaactaaatctacaccatcaaaaccagatctcaccaccaatgtcatagttaaggggaaaacatcctctttatgcattttaaaataattactttgaagtagggggcgttcatgaattgttttggtctgaatttttatttttatttcgaaccaaaccaacaatgctagttttttaaaattcaaaactaaaataaaccaattaaatgctcaaaccaaatcaaaccaattcacttaagaacggattggtttagttcgaaaccataatttgtacttcataaatattttattttttcttactaatactaaattcttttactttacagtttataatatgaaataacaatgagaatatatatatttttaaaataatattaaagaaactatagattgtttctaaatatcaatattcaataataataaaaaattgtattaagtatatataaacaattaggcagtttagcttggtttgaaccacgggcgagaattttaaaattgtgactaaactaaagatttataaatggaccgaatttaataaatcattgacaccaaatttatgtggttcaatctgaaatagtttgatctgaattggttggagtttgaaaccacaaattatggaggggagggtatgaacaacactactttgaaacaaaaaatttaaattttgttggtgaaaaattgccacgtggtactcgactgctcggtattaagaaaattgtcacgtgacaatctctgattggtcaaagtcattaaattatttaaaaaaaataatttaactataccaataaaaaaatgacatgtaaatataatgtctaaaaatttaaccactaaattaggcacttaatattcagttaagtgggtgtgcgtgtgagatatatatatagagagatatttaaattgggccctttcggggaaaacagggtgacgacttcttgctcgtccaaattcacttgctatctgtgttttcaaagcaatgcgactttgagaagttcttagttggatcaaacattggggctgacagaatgtttgtgtggaaacagactatttatgtgttgtccaagctatatagagctctatttataagatttctttgtttggtaatgtaatcaatgattgtaaagttttaatttttgaacttggagatattattgtctgttttgttaaacgataagcgaataaggtggttcatagttttgctagagcctctttactctacccaagttgtagtttctgtttggagtctgttccaactcattagttactaatattagtaacagaagttgatggttaataaagctgatttttctatttaaaaaaaaaaactaagacagagagagaattgagacaattatattggttgagtttataagtgttgagggactaagacttgctgtaactattttcttgttgttcttgagaatgatatctcttattctcattcaatgaagaatggtggtgtgttttcaaactagagtaggattaagttcacattaattctcgtatgttgctgggtctacatctataagttattgacttttatctatgtgtttatattgttaatgacactcactctgctgagttgtcaaatggtcaagattggtttgtttaggcttgtcagtttgtttctgttggttctgttattagttctaactgtctttgtaaccaacttctgtcaagtggattctatgtatatattcctctgtaacaaagcttctcaatcataatgattaatgaataatacacttaaattctctcgttttctctctttcgttttactcaatatctatttctgatttactatatgtttgatgatttgttctttacttaaaatttatttgtgtaagtatgatattggagctgaaattacataagttaattccttcaattacaaccttcatttctacaacaccatagtaagacagcgagattattactaactattactaat

SEQ ID NO: 54976 - DNA, 1745 bp, Cannabis sativa
tgaaggtagctaaatgtatacataaatacaaatttaactaatttaaaaagatttttaaatagtaattaataagattgaaaaacaaaatcaatttttgaaaaataaatggctaaatacaagtaacaccctgttaaaaaatattaataaatagaaaaatcatttaacctcaaagctcacccatcaaaagttaatatctgtaatgcaagaatttcggtggtcaccctatattcgggaatggatttgttaaatagatctttcaaattatcaacaaaggattccattctattccgacttggcttcaatcgaagaagctgagtgaagccgatggagtcatatattattagctctttctcacgtgagttaaaatttcactgaggtagtaaagccaaaaacaccacccccaaccaaacccaaccccaacttggaattgggaaaaccacttactcttctctctctctacatgataatactaaaccatacacaataaacagatagaaaaataaaatacttcagagaattaagaaagttttttcagtctcttctcttctcctcttacacttctcttaaatgattgtatttttttaatgaaatttgtagctttacaacggtgacccatttgtttaacaatagtaacatgttgggttaattagttgagtcacaaaatcactttgacaatgagtcattaaggaaggtaaccaatggtgaccctccatcacggctagctataaaacaacccctccatcacgctgccaactctatcatcgggcaaaacaaactctggcacattccactcagctagttttttttttttacaatgattccatcagctagttcaaataaaaaaaaaataacagaatatcatgagaaaatattcatatataaatacaaattatatatatacaaagaaaattgcatgataatcaaattaaaatgagaaaaaaaacttctgagaatagtcaaagagaattgagccattaaagataagatgccaatcttcataaatccctattcaattcaatggttacgtactccgtcaaattcagtcccttctacgagaatctcttatccgtagctatccaaagcatcaaaatcctcggcaacagccgcctctacgtcatcgacctatgcccttctcccaacactacaatcatcgagctcgccgcgtcgtacaacattgccgataccttatgttataaattgaaacctctacgttcccatagttgaagaattcttcatctccagtaacaagttccgttccatcatcatcagaatccccagtaaaatgccgaaggtcccagcttgggatcttggggtcattattcattaacctttcaactgaagccacccttctacgagagctagaacactcaatagataagtcctctgggaaacagaaataaaaaaatcagttagccagtttcgaagccaaatatagatacacaatactctcataaaattctttacattcatatgtagaactcataccgtgtctttgatcggttcgaagaggcggaatccccaaaggaatgtgataaagtttatccaagaaagaagaaaagtcttgagctctaaagtttcccgcaaaattgagtttagagttatcctcaacccaatcattgtttcccaaagccttactcgtcactgccatagccaatggctccatcaagctctgattgagaatcatgattgataaaatttatcaatatatgaagcggaaaaaattcttgaattgaattagttttagc

SEQ ID NO: 54977 - DNA, 1023 bp, Cannabis sativa
agcaatgacactggaccattacttaacaacccaacttaataccgaagccttattggaaagctgctctacctcagaatcactcggccagacatttcgtttgctgtcacaaaattcagtcaatatctacaagctcctcgtgctccacatctctcagctgccaaccgtgttcttcaatacctcaaaagtacacctggacagggcctattcttctatgcaaccgcaccaacaccactacatttacaagcctttgctgacgcggattggggatcatgcttggatacacgaagatctatttcaggatattgcatcttcttaggaaaatctctcatttcctggaagtcaaagaaacagcaaacggtatctcgatcttctgctaaagcagaatatcgagccatggccaatacatcatgtgaactcacctggctgcattccataatcaaagagttcaacatcaccatcaaacaaccatcaactctattttgtgacaacaatgcagctctccatattgcagaaaatcctatcttccacgagagaaccaaacatgttgaaatagactgtcatctcattcgggagaagatcacaaacggcaccatcaagactaaccatgttccaaccaaatccaacctagcagacatattcaccaaacccctatttcctagtcaattccaatatattgtatccaagatgagtgtaaatctacacactccatcttgaagggggctatgaaagtcggttatgttagtttatttggttatgttagttgagtgggttataccttagtataaatactcttctcccgaatgtaacagaaatatacaatttttatttcttcaattttctctgtggaataaaagggaaaaactctctgcttttgtccactaataattgcagcatcttcgcattaatcttttgatctcatgactttgtgccttttaatgaaaatattgattttttcaggaaaaaaaaactacatatatattaagaacaattggtggtatatatatatattctagatacatatat

SEQ ID NO: 54978 - DNA, 1020 bp, Cannabis sativa
  modified_base (872)..(886): a, c, t, g, unknown or other
acctataaatgccattaaaccagttgagctaatttacttgttgaactttaattatctctgcatttgtttaccactccaaaactccaaacaaaattgattaatgttttagggtaagacatattggaccgcaacttcaattactatcacaaattcaacacaaacactttggtacatggtatgtagcgagtgtaaaagaattacaactactgacttcaatcaagcattcacttgtataaaatgcactaaaaatgcaacacctgaaccacgatttgtcttacttttaacgcaatctacattttctattttctatattttactttctcatgttttataaattatttataatttctccatttcactatattatcatatcaaatatgttttattttataaaaaataacttcagttcaaattcacacgtgacaaaacattacatatagtatgttacattgcaatgtattcagaactagaatcactgtacaacttaatgactcaagtggttccttggaggcaataatgtttggtaaaaaggctgaaatgttcttatgttgctccacctcagaccatgtcaaattttcaactcaggtaataaatgtaggaaatattttaccaggatctagatttactaacaactatgtttcattaacatcctaatatgaattctaaaacattgaaataaacacataaggttttaagaaaaccttacattgggtgtagtgaaatataatgactccttccgttcagatctctagctcttgattcttttctgtagcagtgcatcaccaagatctgaacctggatctccttctctccttccttgatgttaattctccttcttgttggttggatttttcacaatcttccacactatnnnnnnnnnnnnnnntgatgtgtgtgggcactcactaattcactcaaaggctaaacaattgaagaagaaaagagaggtagagagtggaggctagggtataggtagaaggcttagaattttctctcaaggaatgagatgcatcatctttt

SEQ ID NO: 54979 - DNA, 559 bp, Cannabis sativa
taacatgtccgcaaatgaattttaattccttggaacctggcaaatgttgtaacctttgaacccttgcaacagctcttgggacatcatgacgtatgcagccattttttcacccttcgcctagtactcactaaaaatttaattctccaccagctgggaatcactgtgtactttgctctgttaggctcccacttgcttaaccaattttaaacctgccaacatggctttgttttctgcttcgtagttggaggcgcaaaaactaaaacgtagagcactctaaacttggtgcccttatagagagatcataatgatcccagctccagctcccttttcatttgacgctctgacaacatagaccatctaggtaggaaattccaggattggatctccaaaaggtcgttcaagctagaacactctactatgaaattagcaaggtcatgacctttaatagacactcatggctgttactggatatcaaattggctaagttccatagcccatttgagtaatctacttgaggaccctgacttttggagtacctgggagaggggatggttcgtta

SEQ ID NO: 54980 - DNA, 1111 bp, Cannabis sativa
  modified_base (431)..(431): a, c, t, g, unknown or other
tgcaaccaatataaggtttcttgaactttatatgtgtttaaattccattgttttagaaattcagatttacgatgttaaacaatatacatggtagtaaatctagatcttggtaaaataagaccaacacaagaagcctgcttaagtccataaatacacctattcagttttcaacctttctcttcttgtcctggaatctttaaccttctagatgctccatatagatggtctcttcaagaattctatttaggaaaactatgctgacatccatttgccaaatttcataaacaaaagcggcagctatggagagaagtattctaatggatttgagcataacgaccaaactaaaactatcctcatagtccacaccttctctttgggtataaccctttgtgacaagtctagctttaaaagttttgacttctccaccagcncgtcttttcttcttgtagacccatttacatccaattggatgataatcgttaggtgcatctacatatttccagactttatttcttttcataaaatccatttttgaatccatgtcagctgaccattatttccattccagacttgccattacctatttataggttaatggatcgtcatcaatatcgtcaccaatgaccatattgatttcaccatccaagccataacaagctgattttctagaaacccacccactatgacgaggagctgtgaccttctgaataggaacattagtggtagttttctcagttgtatcaacttgcattggttcaattgagggagtgtgaccaacctctatttgagtagaagatgatggaactttagttggatttatttctaaaagcatttcctccaatactaatttgctttgtggcttaaagttcttaatatagtcattttcaagaaaagtggcatttgtagaaacgatcactttatcatccttgggactataaaatagtccacccctagtctctttagaatttccaacaaaaatgcaaacttcagttcacttttctagtttgccatctttctttcgtaagacatgagtagggcacccccagattctataatggcgtagactgggtacacggccattccataactctaaaggtttcttagggactga

SEQ ID NO: 54981 - DNA, 541 bp, Cannabis sativa
tcattctcgatctattctctctttaattttggcatacaatatctatataccataataatttagtgaagattatatattcctttcttttttattattctttatacaaaaaaaaaagtactcactgtattttcgatcataatatatcatattagtaaaaaaaaaagttataacttaatgcaacatcaattaagtgtactcagtaattaaaagtctttgtgagagctaggtaatattaattaatattacttaaaaattgtgttacatatattatatttgatggtattttttttgattacatctttaaaatctttaattagcgccaaaaaccagatttttgtaattatcacaacttatttttggcatctatatatataaatttttcctttcattgtcaaataatttgaatgcatagtaaaatttccaacacattgatcggtttattattattcaagagaaaaaaaaaaaagaacaatgaaaaaaaacacaatatcttctttttgtttattggattaggataataataatttgtagcaaattttgt

SEQ ID NO: 54982 - DNA, 2003 bp, Cannabis sativa
gtgatcatccttctgttttttcagtgtttgaagtttaagactgaccaagcacaggatgctaagaaaatggagaagctcaacaacatgtttttcactctgatggctcggggtcctgaaggtaccatattttttacaattagagttgttcttaactttgttgtgtctctgaaaattaaaacttaagctactttagatcctcttgatttagtttttaatcttgaagaacagtagaataggatgtaaagtagcatggtttcatggatttctgttactaatcttatacttagtcaaaaatcaaatgagctatgtaataatagcatggcatcctccctaaaatgaactgtttattatcatattttattggaggaccaattatacaatttttgttcatctgttatgtgcagcggatacatcggaagttaccgggaaagagccgatggatgcacagccaaccaagaaaggaagaggaaggaaacaataaccttgttagctaataggaaatagttactttgacaaatcatgtttgacttgtggatagatacctctgaagaaaaagaaacaagtttcggtagccattttttgcattggcatttagcaaaatcatcatgagatgggagtcttgaatttcttcttgtgagtctcaaaaagctatattcacttgcaattttctggatttattacactcttcactccctctaacttgtgttttatattcaaactaatgaatttctctagtttacattaattgctgttctcgagaaagaagctatttagtttcatcatctaaaaacttaataatatatataaatactcgaaaaatgagattagaaaaagctgaattttgtttttgctcatgtaaatgaacatgaaattagactttaaatataatagctttgttcaaataaaacacaaaatattagaatatcgaaataatgttttcccccaaaaacattggattagctcccaagtccaaccatgttagtggagcagagaataatggaatcaatgcattcttttttcctgctttaaaatttatatacatataaatatatatatatatatatttgtatattttataattgttgctcccatttctctaaatttcgatataaggggttttacctattgttttaacaattttatttatttgttttttttacgatttttcacttttaaaatttatactgaaatgataaaagtaaggatttcatattgtaaaataaaaaaaataaacatgaacgaacataattcataccttataatgtaagaacacactttttatttctctttcattaatattcaataatattgttattgatgtaatttaatattaaattctacaataaaataaatactaaaaggtctagaattttatctcttcttttgtctctcgctaagcattgtcgccacctatagatggctggtcgatcgaatcttggtcgagaggaatgggcttcctttaatgatggttgtggttttgttgcttcccaagagtgctttcttgtttcatctacaactttgacgggttagttttgccgaggtggtttggagctctattggcttatttgtaagatctttcaaaggccatttgctttgttgtgtgactgtctttagagcatgacctctcttttcttatcttggatagtctttttgcctttgcttataagggtgtggttcttcttaggttttgtcattcttttgtaatcagcgtggtttgttatttatttgttcatttttatataaaatttgtgcaactttatttttacctgatctgtaaggttactatagtcttttaaaaaatttaaatgaatattctcttttaaagaacgaaaaatataaattaaaagttgttatgtaacaatggtgaatttgcaataatagtaagaagaaatccatttaattaagttttggtttagttaaatgaacaaagaaaagccatgtttattatttatgcatgacctttatgaatttaggaatagagagagtgaggttaaacttcaaaa

SEQ ID NO: 54983 - DNA, 3173 bp, Cannabis sativa
aaaattgtattgatctaaacttcatggacaatacgggtttaaatgcagtttcaaatcaaaccaatccattcttaagtagattaattttattttctttagattcttaaaaaattacagtattggcttagtttggaaaagataaacatcatgaaataattatatctttactagaacgcatagggctccttcattaaaaatagactttttccacacattatgaatttatgagaaaatttcccatggatttttaggaatatattggtaagattttttctttttatcttatttaattatatagaagagaaattgacagcagatttaccattctagttttaactaatgttcgtcccatttacataaataaggactctaatcatcaaagaacacataattttggtcttcttacattcatttcataacaaactcaaacaaaagtgtatctccttcatcttctattttcttccttaattaatgtaatgtatgggcacgtgctcataaaaaaggcacacattttgctacctaactcaagctatcaaattatgaacaatgaagtaactatttataatgatagttattattattatctaactttttattaataatttcttccatcaacatttcaatattcatagagcttttaacatatattaaactaggttgaaaatgctccaaacttcataccatgtaaaactatttaaaagatttgactaaaattaaatagagaaagtagagcactcgtgttcactctgataaatgcacagccttaaaatgtccccgaagctccaactctatcacgaggaatcaggcgcagttcagaaccatgtttaagaaagacgttccctgagaattcaatcaaagttctcataatgcaactgtttacgcgcaaaacataaccgacaaatgcagggaaaggaaagtgtggatgcttaatgcaggcaaatactattatgagttataaatcggctgtatgagtaataacgaaacactaagcaatgtaatacctgcactttgctgaggattgattccaactccatctgcatacattataagtaatcatttgagaagcagcaacttaataagataagatacagaacagtatttctgcctagtaaaatagtacaaagcactgagatgaatgtttaatattattgcattttatgcagcaacttttatgggaagctacatgtttcatatatatatatgcttatgtgcaggttgtaactaaatatgcaattggttccaatagagcctaggcagaccaaaatccttattgcctagcctttcttcttctttacagtttgtggttagcaatttgatagattaacccagctggagtacttctaaaacgccacataacacccaaccacttgagatagacacaagtggtgtttcaggactatattttctttcttaaaatttcttgagtggtgtgaaggcatgaggaaaacacatattatatcagcataggtttaactgctagtaataaattttttaaatatgaatacatttttttgtctattagaccaagtaactataggtcttggactgagcagaactccatcccttaaacaattatttctaccacattatactcctatcttagcctatacaaacatctctgtactaattaaaccaaggctcacacacctggaagccatcaaaatagactaactgcataaaacatggtttaagccagctatttattgtcttttccgtttttgtaaaactccctttttaaccagataaaattaaaaataaaaaagacatggatacgaatataggatccctaaacatggtctttcaatatgatcaactgcagcctttcatataaaaacatatactgagcactaggaaacataattaaatagaaagttggaaaagtgttggccaaaatacaatctaattgtgtacccaaattgtataacaattagattgattagacctgaattcattaagaatacccaattaggataaagaaattattcacttgttgcaacagagaaataagttcttcagcagaacctagattcataagtatacaaatgtaaatatatataaaatgataaagaagaccaaggaaagaatataatttaccattggtgatgatagcactggtctggggaggcactttgaattcttcagcggcaaatttaagaacggcagtgaaaggggctgcttctggaacgctaaacctgaaaaagcaaaacagttgaaacccaaaacaaggaaaaatcattcaaagaaaagaggaacataagaatgaaattactaacactttaaaggggagcttaggatcagaagtaagagtgactttaaaggacacctttccgccaccagccattctcctttattttctgtacacaaaatattacatgttaaaatttgtaaacttaaaacacaaaaacatcattcaaattcaagagaaactgacaaaacaaagtgtaaatttcaaaaatcaaagcactattacaagtccaacaacaaaggtaagcttttctaacttcccaattcgaaaaacatacacaaataacaataatattcaaagaaagggaattaaaaaaacaaattgaacgaagtatggagtaaccataaaagataaacattctgatttcaaccaaaacaatctctaaaattaatcaataatcttctaggataagaagaaatacattcatcccgagaaaataatgtcagaaagaaatcaaagtgaaaaaagaaaggaaaagataattggtttaccgtgtggataggtggcgatggagaaagcaaagtaaaatgggggttaggaaagagatgattcgaaggagaacagaacgattgggatctgatcaaaggaaaaggggagcgtataaactctccaccaggcacacgtaagcaactcgaatctttaaaaatatattattatttttttttaataattaacatatttatcctcaatttttattaaaaattttccttaacatataatagctcttttgttagattaataaaaaaaaattgcccttttttattaaaaaaattaattttaaaaattatgatattttattaattctaaaaaaattaataaaaattattaaaaaacttaataaaaatattaagtttactaaaacaacttaaaactttattttgtttataagcagtaggggtgttcacaaagtatccgatccaatccaatc

SEQ ID NO: 54984 - DNA, 652 bp, Cannabis sativa
tttttaacaacctgaaaaattcaagggacatgatttggtacatgtcaaagttcagggggcataaatcataattagccaaaatttaatatccagtttatgtatattcttcaatttttcagtggattctgaaattgcagtgaatttatataaatcaataatggataatcaatttttatactttaatgccattacttacgtattttaaggcagagagagatttattaaaattaatctttttagttagttttttttttcttgttctttatattctacattttcttgtgataaataatatataatcaaaatttaattttatatgtttacatgtttttaatttttttctcctaaactcataatactcaatatttaaagtatatactaacttttatattatccctaaaatatcctttccatttacatcacccttttctctttttctctctttccctcttactgtggagctcctctactaccacaaagcaacacaattttttcttctcttcactcattctcttcttttcactacactacaactacaagctacaatattttctctcattggacagagcatcatatacgaagcatcaatgggtaattatttatttttgtaatcttgtttgttgttgttatatttagtttagaatgttatttt

SEQ ID NO: 54985 - DNA, 1406 bp, Cannabis sativa
taattgctttgtttctatttcacatttgttttgagagcttagagataccaacttcttgcccattgcttaactaaacatgttttggttgttaaaagcatctgatagttgaattgaaaatttaccttatgctgcttgaggatatgtcttttcttttgtgatttgctctctgttgaatgaatttcctcttttttttaaaaaataaataaataaataaataaaactctaaattgaataaaaaattatataaattattggtattatctattttaactaactgtaacaatgagtttaaaaataacttcatataaattattaataaaataaattgttaagtgattagaaaaattatatattttgttataaaaattttaaattaataaatttcaactccaaatttttattgaatgagttaggtgggatgcgtgtaacctacccgatttaataaagagataactataatcatcatggaattatgaaaaaaaaatcaatataaagttgagtagtacaacaatactactattagaaagtaggagatacagctcactctcactttcattctttaggcgggatcatcgacacacacactctctcttgttccctctttcaaaatatggaggtaaaatcaatcatcaaggtcggcccaaacattttgagagccttgtgcaaaagattaaaattgaaccttttataaaaacaaattgggggccttgtgcaatagcccaagctgcccaaagcttgggtcggccttgaaaatcataaatcaattatttctaatatatatgaatgattctacatttggataaagtcgagtagtacaacaatactactattagaaagtaggagggataattcactctcactttcattctttaggcgggatcatcgacacacacacacactctctcgttccctctttcaaaatatggaggtaaaatcatcagggttgacccaaacattttagaagccttgtgcaaaaaattaaaattagaccttttataaaaataaatcgggggccttgcttgggccggtcctgaaaatcataaatcaattatttctaatatatatgaaggattctacatttgtataaagtttaatagtacaacaatactactattagtattatgtaatattataatttagagaaagataatagagaagagataagagtcaaatattaagaaattaaaaaaaatggaaattaagaaaaaagaatattgattacattaatagtaataaataaaaaaatttagacatctacataattaataatatttataacatttttaaattttttcttcaattttcccataaaataactcttaaaaaacactatatttttactcaaaatatatatatatatatatatatataaaaccaataaaaattttaattttttaaaaaatata

SEQ ID NO: 54986 - DNA, 1109 bp, Cannabis sativa
aataaaaaggaaaataatataataatatttgaacttaaagaaaacaaattaggaaagttgaggggcggttgggatttttttaaaactgttttagatatatatttatatttaatattttaaaatatattttaattagaacgttacagttaaaatatgcttataaataagccattcataagtagtactcgaaaactcttttattttctgcaaaacttattcttagttcgaacacattaatttaataggttttcataatccttaacatcctagctagctcccacttacttgaatagcatcttagctagtttctcttcacttcaataacatcattttcagatcaactaccaacacagaagacagtaaaaacaaacaagcatacaaagtaaataatcaaatcttaaaactttaagctaatcttaatatctacatattgtttttgtgttgtaatttcattattttttctattgttttcttgttatttgtatactttttttatgtgattttcttgtttcatgttatttttataaaacgctatataattctaattaaaaactattaaattgaaacaataattttgtaaaaatgtaatatatatatatacgtatatatatatttggctgtaaaaatatgaaaattttgctaaaatggtattttgtataaatttccccatattctttatgttatatatcataactcaagtatatatttatttttattatctttcttgaataataatatgtaaacatcacttaattaattttaatttgcttctaaattatacagatggagattatggatatgtcattttgctcctacaaccataatacgaacaccatttgtaaattttgggctgttggacaatgtaaaaaaggcgaaacatgtgaatatagacattcttggggatctaatggttttcaggaattagcttcattacccaaaactttaactaaggtatacatacaaattatttataattaattaactaattcaaatattaattgagtctaccatgaatatgaaataaatatactaatttaatgaatatatatttttttaatataggtacctaggaagctacaaattgatgaagtgagttggtttcctccacc

SEQ ID NO: 54987 - DNA, 1940 bp, Cannabis sativa
aagatcctggtaaaataaaattccaacaaaagcttcaattatgaaattgttgttgtgcagcttctctacttcttctttagagctagcgctcgctccttgtccaacagtcttcgcttttgttgaactggccggaagtttggatcaatatttaggacatgtgaaattacagaaggatcaatcctgaccatatcctcatgtgactaggcgaaaatgtcaaggtttgctctcagatattttatcgatgctaattttacttcgagcaacaaacctttttaaattttaatttttcgggtttgaatattcaggtcgatttcaatctcttctaattcttccattggtccaacattgctgcttgggtccccaagtcgagggtccacatcttcatccccgccttgggaggttccctacttagtaatgttttttcccttgtccgaactctggcgagtggatacttctttttaagccttggtaatggcaaggttataacattccccagtagcctcctggtttcctcttaggcaccccaccccattctttgttgggaacttaaggcatgaatgaaatattgacgtaacagcctttaagttatataaagctggtcgacctaacatgacattgaatgctgatggaactgcccaacagtgagggctaggaaaattttccttagaggtgtgacaccttggccggagaaaccataattgagctagagccccattttgtcatacggtgtcttgaataagatgttggaagaggctccattgtctatcatggttcgggccaccatcttgtttgctatctggacttccacgaccaatgggttgttgtgcaggaaattgatattgatagcatcatcatcattaaatgttatggtgggctcccctgcccgtggtatctttggttggttttctttcctcgatggccagaattacttctttttgctcatgttgtactgttcgggcatacctttcccgagctttgcctgaatctccagctatgtgcggacctccaataataacttgcagatgtccatctactggtggtggtagtaactcttagttgttatcacccctctgattttgattggccttgacataaatctgtacgtgcggattatttttcttgatcagaaattcaatttcccacttcacattgttgcattcattggtgtcatggccataatccccataaaaatggcaaaacttagccatgtctctcttgcttacatcttttttcatgggtgtgggcttcttgtacggggctaacaactgactagtcatgtacacactttctatatcttttgtcaagacataaaatgcattttactttgtagaattctccttgggagcttgttcggtttcaccagtgaactttccctttttcccgtttccttgcctattattgttgttgttggaccattttccacccgagcttgaattgcttgggtattaggggagctgaacggatgtcccaacagagggagcatttggctggctaggtttttgctcaacttctgcctgctgaatggcttcttcaagcttaataaaaccttctgcgcagtcaaggaagtcactcattgaatctactggcccgttcttccttatgtccttccaaagttttccaagaacttcaatgccctctagtatcgcgaacaactttccgtcttccgttacccaggcaaccttagtcgcctcggtcatgaatctgttgatgtaggctcagagaggttctcctagtctttgcttcacttggaccagatctcctaagtgcaacgaaagttggcgagaagaggagaattgtgcatggaactccgaggagaaagccttccataagttgaactttttgggcgccaacttgaaataccattgctgggcggcctctgagagggtggcaggaaaaactctgcaacatacatctcctcgtgctccttgcaggtccatttg

SEQ ID NO: 54988 - DNA, 1167 bp, Cannabis sativa
agatgaccctttgagatcaatccaatacttgaatgaacatggtcaattagtggagcagagtgtcgactatgaatggctgccagtgaaatacaaaagttgctcaggttatgggcatatcatggctgactgttgaaaaggagggaatgagaaaaataaaccttcgagtcaaaaagtaggggataactcttaaaaagctcaagttcaagctggtattacgaagacagatacaagaaatgagaatgataatccaaatgttggaaagaagcctacaaagagtcgagatacataatggattatcctcaaaaaactagcaagacaaagcaaagttcagttgggaaaaggaggtcaaaaaagggcaatgattcaaacaactctgagaattcatttagtgtgctgcaggagatagaagaggatatgagaaaggagataaaggcagttgaagaaggggaaacaggtttcacaaatacttgactatggataattgcaatattgctagttggaatgttagaggtaataataaggtgagaaaacaagatgttgtgttagatttttgttgtatgaataaaatgtgagttggagctttgcttgaaactaaacttaagggtaataagattgttgagatgatagaaaataagttcaagaactggagttactttactagtagtaatattgagggcaaactgttggttatttggaggaagaattttgccagactaattgtaatagcggaagggcctcaatttgttcattgccctgtgaagttatcttaccaaaaggaagctttttgcatcacatctatggttttaacaccatagaggagaggaaagatttgtggacatacctgctgaagcttagattccatgtcaagccatggctcattttaggagatttcattccgggttcttaccttgatgaccgaatagagggtaaccaaatcaccttgactgacatagctgattcttcaacttggcaagttcaagctcaagtggatgccctcaagagaactggctcgaactacacctggacaaacaaccaagatggcttaattagaatttattcaagaattgatcatgctctagccaacgaagattggaatgatttgttcccgaataccattgctcgattcaactggaaaactgtaacatcctaactaccttaggcgtatta

SEQ ID NO: 54989 - DNA, 1234 bp, Cannabis sativa
  modified_base (617)..(625): a, c, t, g, unknown or other
aaaaattatcactaaaagtaattattttttacccatatctacctcaatacccatttaaattaaagcgagaacaaggtgagaattacccgtttaaatgtaattaaataacgtttaccatttatagttaacatccatgaagttcacatatattagaatgaatcaagtctaaaggttcagtttctctatgtcttagttatttttgcttaactacaaaaaatacattttttaaaatcattttctaatattttcaaaattaagcaaatattactcatgttcttaatgatacacttattaacataacaaagtctagaatgccaaacattaaaatcacacaatatgtaagtaaaagaagatactttattaaattcaacccaaagaaatttaaacatttcataagtagcataacccttcccccacaaaagtaccactcttagtgatggtgtacaaaatcaaccttaattatttgagtaaacccaaccttgttaagcaaaaacccagaaaccagattattcctcatctcaggagtattcattacatcttttagcaataatgaaggtctttcccaaggtaaactttagttccacgtttccaattccagcaacaatagtggtgtgggnnnnnnnnnacaacactttcttgtcatcagtagttgtgtatgtttgaaacatagcatgatcatcgcagatatggcacgaggcgcctgtgtgtacccactacccttctaatccaccaatcgggttgttcaaaaatcatagctgcaaaaagcttctttagtcaaattagtttgcaggacaatgctaggttcgttcctacactttcgtgccatatgacccgacgtgtttacaattgtaacataaaaagtgagtggggtcattcagcttaggtggaggtggctgccttccatgttggttcctattatggttccaactctgattattatttcgaggagggtcgttgcggttagaattgaaattcgagttgcaattctaattcttaaaatttttgccattaggcttcagaaccgctagtgtggacttcttagtgttgctgttagaaacaacaagaactttctctttctagtattgttttctcgcttcctcctctataggaaggcgggtgatcaaattctcttagggaaattccttagtcttaagagtacttttaaaatatcaaggattttgtgattgaggaaatgtaatggtggaggaaaggttgtattgaatacaacctgtca

SEQ ID NO: 54990 - DNA, 805 bp, Cannabis sativa
ctggtaaaataatttcaaacaccctgtactttcacatacttgtgctggtaacaccatgatgtactccttaacaatttaaactataccaatgcactttgtaccgtacccgtacaagtgttggtagtgtaataaacatataagcatgcatatacacttaacatatacatacattcgcatattcatattacatattataaatagttcttacctcctttctagattcaagtgagttggccgacctgaacggaaagtctcgtggtggatggatgtcctaaccacataacataaccgagtaaatcacatgtcaaaaccctaatctgagaaaccctaacctacaactcaaggttttgttattatcactagggactacattaacctaggaaacagggaaacacccaactaaggcactgaaatgggcaagaattgagaaagtgagttgtttggggaatttgccgaaaccggttaaccggttttacaggtactggaaaaccggttaaccggtttgcaccagttttccccaaagaactcccaacatgctcaaaactcatcccattgcgaccaaacctttcaaagcacctaaacaaggcatatacaacatctaactccgcttgcccattggtctatggatggtaagaattagcaaccttgtggagtacaccgtactttcgcatgagagcctcaaaagacttgttgcaaaagtgtgtgccttgatcactaatgatagcacgaggcgtaccgaaccttgacaaaatgttttccttcaaaaacttgataactgttgcattatcattggttcgacaaggta

SEQ ID NO: 54991 - DNA, 1595 bp, Cannabis sativa
gacctaaaaacgatatcatgtgaatgaaaaaaaataaagtatgtgaaaaagaatttgaagaaagtagacaaaggtaaaacaacgttttgttgttattgtcaattaatttatgaaagacatgcaaatcattgggtctgaacgtgcagtaggagtaggacagctaagaacgagagagaaaggaaaagaacgtgacatatagttagtggattggaggaatatatttgtggcgaagacgtaagagattgtatcaaagtttaaaattcacatgatgttaggttggaaaagactaaaatcttaatttttaaaaatgggaattttttcttttttcttttgttttttaataatggaggaatgtagatcaagcggtactatctgcacaaaaaataattcaatatcatttttaaaaataaattaactatagtaatatactattttctaagaatattagtatagctttacaattaaatattatttaagttataaagtaatctttaattgaaacttctttttaaacatttaactagtacttggcaattaacttgtgcatgtatgacatttgtaattttttttcctaagatgagtctcctttgttcttttttctttttggataatctgataatctttctttttaattgaactaatgacatgtttactatacattattcagaaacaaaataaataaaaaatgtaacgaaataaatgagtattgccattaaaatattagaaattcattatatttactaataagcaatgtgaatcaatagtaattaattaagatacatgttcccttacagttttttttttattttaatttattaaaattaaaaaaaaaaaaaggagaacttgactaaaagaaaaggaatacttgtcactctagatttttaagaaatatcattaaaaataatgatttctatttattttttaaaaactaaatatgtaatgataatttttttcctttaatatatgtcttacaaaataactatcatatattatagtataactcaaaaagataatttagttaatttaagcattccaattacgtttttttaataaagtaaacaagataaatcattatcattccatttagtaaacaacatattacaaatattaattctatttattcttcatttttattctgttatatttctccattaattgattctgattctcaataccgtgtagtaagaatgttataaaatattccacaaaaataactctttggctctctatcaagctgtcattcttgcattcgggaatggaaatttgtgcatttctttaccgactgtcaagtgcttgttgttgctatgtttgttcgaaagcttcggatcggaagttgactactttttttaaacttattttgttctctcaattcgtttgagttttggaatgttctttggattcctcgttcctgtaattacgtggctctcatcagattgcctcttggtcggctgatggcaattatgtttcccgctttctttcttttggagaggttgcacccctattgcaactctaaccttgtagttcttttttatgtgtttaatgaagtttttagtttagcaaaaaaaaaaaaggtgtcattcgtcgtctttgcaagt

SEQ ID NO: 54992 - DNA, 1305 bp, Cannabis sativa
cttgcagaaggtggtagccctatctaccacgaaggcagaatatatggctgctactgaagccattaaggaagcaatttggttgagaggtttctcaaaagaactcggattcaaaggagaagacatcacagtgcattgtgataatcaaagtgctatacacttaatgaagaatccaatgtaccatgaaaggtccaagcatatagatatcaaacttcattttatcagagaagtcattgcaaggaaggagatacagatcaaaaagattggaactaaggaaaaatcctgcagacatgttaaccaaatatgttccccaagccaagttcagactttgtctgaacttgctaagcattctcactgcctgagattgctcaagtccagaacagctacaatcgatctctatgctactgtgtatttgatatatgtccaaggtggataattgttgaagtggttgaccaaatatcaaattcctaaagtgcccttaccgaacttaaccatattaaccaactgtctgttatgacagttggtgttcgggtctttcaactcagctgtaacattggtatttaaagggcctctcattcatctgcagtagctaatcttggagggaaataaaaaccgacagagagagagttttcaggagcaattgagagagaaagagagttgccttgagtgttgtaattggggtgacacattgtttgtgttcatcaccattagagtagacaattgcagaagcaaagcttccttgttgtgtaattgatatcagttgtaatctctcaaactcaatcgataaagactctccaaagccattattgtggttgtttctggccggggatgtaggcaaggtaattcaccattatcttgttcgaccctcgttaaattgtgtgttcttgatgcttgttaatacttgtgatttctggttttacgttgctgcattacactacttgagttaacttggttttcattgatcttttgtgttctgtttcatgttcttgccgaggtgttgtttcacaacaattggaatcagagctcaggcttcttgctgcaagaacagaatcaagaaagtgatctatggcttccgcacgctttgaagtagacaagttcaatggagccaatgattttgggctatggagaatcaagatgaaatcatttctggtttatcaaggagtgtatcaagccattgataaagaagagttgaaggaattgggagatgaaaagaagaagattaaagaaattgaaacaaaggctcatagtgcaatcttgttaagttcgggagatgaagtattgagggaagagtcaaatgaagaaactgct

SEQ ID NO: 54993 - DNA, 1417 bp, Cannabis sativa
agaagcaagcgagataatcaaagaaatccacaaaggtttttgtggagaccatgcaggtcagcaaagcttgtcaaagaaaataattcgacaaggatattactggccaactataaataaagacacacacaaatttgtcaaaaaatgcgataagtgtcaaagattttcacatatatctcgcgtaccaccaacagaactaagaatgatgacctccccatacccatttgcaatatgggggattgatttgattggggcactccccacaaggtgaggaggagcaaagtacgcagtggtggttgtcgacttctttgcaaagtggacagaggttgaacctctagtttctataacctgcaagaaagttctcgactttgtcgtcaagaacataatttgcagattcggaataccaattaagatagtatatgataatggaactcagtttgatggtgagttattcactgagctttgtgagaggaacaagatcattaagagcttctcaccagtctcaaggcttcaagcatatgggcaagtagaagctgttaataaaaacttgaaggatactattagaaagaagttggatgctgcaaaaggtagatgtgtagattaactactgcaagtactttgggctcacagaacgactgagaaaacagcaacagggcatactcggttcttgctgggatctggctcggaggcaatgttgtcagtagaagtcaatattgcgacacacagacgagatttctataattaggaagaaaaccaagaactcttaaaattgtccttggatctacttgaagaaaaaatttctgagtcgcaaattactaatgcagcatatcgacaccgagttacgagatattttaataagaaagtgaagaaaaggctttttaatgtcgttgttttggtgctaaggcgagtatttgcgaacacgagagatgcatctgcaggagtatttaatccaaactgggaagatccttatgtgatcgaggcaataggtggagctagggtttataaataggctcggcttcacggctcggtaataaaaaaccactagaatattgagcatttgcaaccctactaccagtatactcacaaaaatgttgtaatctccctttttgatgtaatttttaaatttcaattcttattaataaagttgaagtatttttcaagtaattacaagttttattctttaaaattacttgaggggcatatatatgtgcatgatcaactagaatttatctagaaatacataatatattgtaaatccactccatttcaaatttttttaaagttttcgtctatgaacaatgtaaagtccttgaacctttctcacaagaaaggaaagtcaaaagtagcagttgtaaatgagatttaactcataaaaacaacactaagctacatgcaaagccactactagaaaattaggttt

SEQ ID NO: 54994 - DNA, 1287 bp, Cannabis sativa
  modified_base (855)..(857): a, c, t, g, unknown or other
tgatatttattatgatgtaaaattattttgtgtcaaatttaacatattttttagccggtgttaaatttagactactttatagagagttcacttttatatgacagtctaaaatagagtattgttattgggtatcagtgatgcctaacaaagcgtaccatcttgcaattagttagttgtattccttaaaaattattacattaaattatatgagatatgatacttaattgtatcaatactgatattgacacataggagattattaagcactactagtacttagtatttctcaactaaataaaatatatatgtgtaccacacttttagcacttcattagaaatactttaatatatggcacatttataacactacacccatattgatgaagcactttataattatttagcaattttttatgttatttttaaattaaaatttatagaatcctaaatatttctactagacttacctctaaataaacagcaactcaatagaaaaataatgaattgataaacaaaaggttatatcattccaaattttgcaaaaggtggtatggcactgttaggatatttttaatctattatttatattatttttagagttaattttctccattattatcattttagaattacacttattcttttgttaatttcaggtttcgacacttgaaatgtataaattggtcaaatcttacaaaaagattatctataaaatagagaaaattgtgcaagaaaataaaactgaaacttcaagcctaaatttagactatgttctaatcagattttggagaaaatcaaaacatgaaaattttagatttctcttttatattttcggaacatcttgaatcgtccaannngagcaatatcgagagagttatagctaaaatactatcagtcgacgcaacagaaaactcactgcccaaataaaggggggtcccgcccctcctaatcctgaaaaaataggttttcagcgtattttatcttttttctattattttttggctataaaaggagtggacttcaatagttttcaacaagcaatcaagaagtacaaattttggagaacaaaatcaatattggaggctttctcaatagagttttcaacattcttttcttctctattttcttcttctaatttaatatgtgtgaatttgctacgatgaacatgagtcagttcattagagtctagatggatattgattgacattgatttttagtttcaatatgatttaattttctctcaatttttatgtattctatttcattcgttcttaattacttttaatt

SEQ ID NO: 54995 - DNA, 3861 bp, Cannabis sativa
ccgatcccctgcttcagtaagaagagatttgatcttgttatttgactttcttgcagaggctttagcatgaaaaaattttgtgttgcgatcacccgaattaagccaatctactcgtgaacgctgctgccagtaaatttcttcttgctccaaaagatcgtcaagaatagcttcagtgcgttgtagttcattcatagtatcttgagatcgatgattgaggttgcttagagcagtgacacgggcttgagaagcagctatgttcttcttcatactgccatatttgtgctggtgccatttttgtaaagaagtggcacatgaatccagatttagtaacacagtttgtatcgggtcagcatgtgagtgagaattccaggaatttatgatcaaatctttgcattcgggatcagaaagccacaatttttcgaacctgaaccggcttcttcttttttcttgctgaaccgtgctatccataggggtaatagttgcagaaatggctctatgatccgagctgtagtagtcatggtgctgcacagttgggatactaaaagtagacccccaaagagagttaacaaagcaccaatccaacctttctttgatggtattggtggctaagtgatttttgatccaagtgaatggttccccttcaaagggagtctcatggagtgagcagtgatcaaggactttacgaaatgtctccatttgcgactcattgcggagaccacccccagatttgttggcattagaaattatctcattaaagtccccaattgcaagcaatgggaggtttggagctacatcagccagccttttaagaagagtccaggaagcatctttattatggctgtgaggtgaaccataaaatgcagtaaaatgaagacaaggttcaatgccacttctgatatagcaatcgaaaaaagtgtgtccataagttagaagagtgacatcaataccatcatgccaaaggagcattaaaccgccactcataccaactctaggagactcaaggccattattaaaacgtaaagactgccgaaaacgggaaataaaattcctaggaagctttgtttccatgagaaacaaaacatggggcgattgttgagtaacaagcaatcgtaggtgtctgaatgcgttcgggttccccaaaccccgcgcattccaacttaaaattttcatgatgaatggcgaggttgcgaagcaaccgtcgccggacagtcaaaagaatcaatagaatcctcgtctaaagaaaccatagattcaaggacaacttcaaaggtggagtgggaagccgattgacccccaataccacgccagcgcttaaggattttcctcatggagatagcatcacattgtctctttatggtaggggcaggaggagtgttttctttcccacttgcatcagcagtaatgccatgggaaaaagctgaggttatggtggcagtagtagtgagtgaggaaaaggttggattcatgggtgaaggtgagcatggccatggtttgggtgagggaattgggagtgtagtaggtgtggatggtggataagtagcaaaaatatttggagaagaaccaatagcacccgtatctggtataaagatatggaaaaatcagccactatattggaaggatgagggtgttgattgttggaacttgcggatggcgtagaatggcctgagtaaaaagaagtgtttatttttggatcaaagggagccccgagtatgttcttgcctttgtttaaaggcaaaggtgaaccgtgtgttatagaagaggagattggttgggttatggaagagttggtaggagttgggaaagaggaagatgtttggtcaactgtgtgtgtaaggcagggctgtgaagatgttgagattgtgggcagggtgatggttgtgagggggctagtggagattgcaagggtggaggggccttcattgacatgcagcgacctaggatgaggcttattgctggtgtgtagttgtggaacagcagaggaaagtgattggtgagccaaccgtgtcaaaagaggccaagcattggtcttagaaaaatccgtacagtagcgatcatagccattcgttgggagtcttgcacccttaagccaaggcccataagggaggtcatcatcatttctattatccattctttccataaatttgggacaatgttcaaaggggtgtccaaggatgccacattcaaagcaaaactcaggcaagcactcgtatcagtaatcaatccaaaactcatccttaatagatggcaatcagatcatttgaccacgcggaagtggcctagtgacacatattttaacccggaccctaagaaaaggcccccaaccttcatttgtggagtcctcaaaaacttccatgaattgcccgatggtgtttccaagtgcttcagcaagcgctgtggttttgttgaggaaaggtagcctatagatttgaacccagaaatgagtgaaaatcaaatcctccgttgagacattttgcagaacatctggcatgagtaaaacgattaagtggttctgaaaatgccaaggctcctttgtaaggactcttcttctatctccttcacacccacaagagacatgaaacatatcagttttgaattcagtaatggttacaggaaaccgacctctccaatggccaggcatttgatcgaaaaaacctggtatgtaaattggctttgaggaaataacacgggctatgagggagaaaggtgaggtattaggggtggaaaccgaagttaaggagataatgtttctctcctcatcagtaagggatagggtggattgtagtgaatcagtaaagtggtccattgcaacaatagtattgcaatcgggggcagagaaaagaaccagaaaaaacctggaacaagggaggagcaaggcggaagagggaggagggaaaaggcgggagcagttaagaaaacttaggattcaaaagtaaagggaaaaatcagatggaaaaacagttgaaagggaaaaaaaataattaaaaatacaaccattggagtatttttaaaaatgaaggtgttaaaatgatgtgaaaaaaaaaaagataaaataaaatattatatttttagatgatgtggagatatataacagttttaaaaaatactactattgaagatgttcttagcactattatttttttttgaataagaaaatattttaatcaatcctaatttaaatatgctccattcaagatcacaatattacagtgtaattactcaattagaaccaactattaaatatcttataaataaaatatttttcaaattctccaccttaaaaaatcccgcatatactatgactagcagatcttaaaaccaaaggacagagctccgcgttatgattgtgccaaatttgagggttgaggatgatggagttagcgtggtaagccaagaagacatcatttccgaaacaggagtagttggtccatctacgctatcatatatcgttgtctattattattgttgttgttgttgttaattagtgcttatatatatcaaacataatggcccattttactttctttcctatgttcgtgattcattcatggggtatgatgggactggcttcagaaggtaagttaggataaaaccccaaaaaaatctcattagagagagagagtaattaaagacgtacaatattgttgttgttcatgatatcattcaattcaatggagtggggttcattcggttatttgttatttactttctctctaaacgtattgtcgtttaacccttccatactcttatgtttccatcttaaaatgcatatacatccataaatgtatgttctcacgtaccttataaaccacctcatttatgataaaggatccaatcgaagcgtttagtttttttttttttttt

SEQ ID NO: 54996 - DNA, 1286 bp, Cannabis sativa
tagggcataaaacccaatagatgcatccacaaccctccgagcttcagaattttccataccgcaatagtaaaaggctgatttgtcctcacttgatttcaatccagatgactctgaaaacaatttcaatccctgtagtagataataaattgatttaaagtccccatgatagaacaatagcacatcatctacaaaacatagatgattcagcttcaaatccgaacatctatcatggaacttaaaatcctccatatgcccaactcgagttagtactctagacaagtattccatagccagcgcaaagattagaggagacattgggtcttcctgacgaatgccccttttagcctcaaagtaaccatgcatcgagccattgaataacaggctgaatctagatgttcttatacaaattattacttactgaatgaatttctgtggaaagttaagtgccttgagcatttcttcaatgaagtcccattctagagtatcatacgccttcctcaagtcaagtttaatcatgcagttcagtctagttcctttccttctatgatgctttaccaaatcctggcaaatcattatattatatgttatatatctcccctgtacaaaactactttgattctgggatataatgtgaggcaggatcaatctcaatctaccacaaatcatcttagttgcaactttatatatgacattacaacaagcagttggcaggaaatcacttacattgctcgggcattttactttcgggataagtgtgatagtagttgagttcaattccctaagtagcttccccgaatgtagaaaggataaaatcgcttggcagacatcttctttgactagatcccagttatcttgaaaaaagtaactactgaacccatctagttctggtgattttctttctggaatgctaaacaaagcctctttaacatcatcaatattaaaaggatggtttaagaatttttgatgctgctctgttaaaataggcccctgctttaccaccttctcgttcacagagttccgttcaatcattttatatcccaacaaattcatatagaatcgcaagaaagcatcattcacctggtttgactcatccacccagtcacctgccatgttttcaatagagcatattcggttgacacttcttctagctctcaagctagcatgaaatagagccgtgttatcatccccttcttttagccaatgcatctttgctttctggtgcaagaaagataaataagagacatgaatctctttatatctcctttgagcctctaattcttgctggc

SEQ ID NO: 54997 - DNA, 794 bp, Cannabis sativa
atattatttttaattagtaattagaatatgaattatctagatagatattttctaagtagactttttggtatttttctagatatatttaattaaataagaaagttaatattgttaagtagttaaaaatgtatatttattagtgtcaaaatacaaaatgaaattaattctatataatattttcatgaaattaatgtaatatatttttatttaaaaatattatagtattgagttaattttgtaagaaaataacattttatgacacaaataagagaaataaataaataaaaagaaattaagaaaatgcattatttttatttaaagaaatacaaattaatcagatcttaaataatttttcatttaaattattatgatatatattttatgttgaaaatattttgtttggatttaatgttgtttgtattcaaatgagaaaataacatttgtgaaaagaaaggaaagaaaaagaaaaatagtaaaattgtggtccaaagcaatgaacaatggcatttttgaagtccaacaagagcaccccaagaaggcagcccattcagctcattttccttcccagccgacagccacgataggtggcgtcttctcgttcgtccgcacagcagcatagtaggaggttgtcttccacgcgcgcgtggcctccacttcttctccctggccatgcatgcgacacaccttccaagcgcgcgagtgggcctcgtcccaccttggtcaccaagcttcaaaaaggaagctttctcctcttttctgcatgcgccaagtgtcactcaaaggctcaatttgct

SEQ ID NO: 54998 - DNA, 1177 bp, Cannabis sativa
ggaatagttgagattttcgattgataaaaatacccctaagtgatttttatgacttttggctaagtggaaggtaaaatggtcattttgcctaattatattttgtccttagtggactttagtgggttttaattaagtttattaacttgattttatggctgaattaattaaatagaacatatcctatttatctcatttttttacaaaaaaaaaaaaaaaaaaaaatcagagttagaaaaataagaaaactctctctcccaaaactctctcttcttcgacccctatagaaccagctagggttctgtttttcttcagcaaatcttgagttttccagaaagatcttagtgtatccaagccaaggtaagtttttagtacctttccttgctagtttcttaagtttcaagttagaaattttgcatgaatttgggtgtttgagttctatagttattgtggttgtttggagttgttttcagaagttaaattatgtttagatatgttattttcgactggtttgattggttgtagtgttgttgagcaagctttgagttttagaaatcaagcttggctctttgatggtgatttttaattctgagcttgtgtagttgttttattgcttggaatatgtcaattgggggtatgatgtgtaggtctagaaggtttggtaaggtttggaatcaatttggttaggtttttcgaattgtttgagttttctggtgtaaaccggttaacctgttttacaggacctgtaaaaccggttaactggatttgatgttgggttccctgaaaattttgtgttatcgattcgtgttagtttcagagctctggttagccaatttcctgttagtttagggtatttccatgttaacttgcagtaggtaggtttttggtttaaaacctaagtccccggttgtgatttagtgtgtcacttatccatgttatgatcgatgtgatttaggggcctgtaattcgtcgagcagttgttccactcaggttggctggcacacctgaattcggaaacaagataagattagtataatgttatgcatatgtaattacatgtttaacagtttatgcctgttaaaatacattgatagcagtaatagtatacacagagttgtactgattactgataaatgtatgttgggtaagatactggtcgatgttgtcacatcaatatggc

SEQ ID NO: 54999 - DNA, 2611 bp, Cannabis sativa
ttgtatttttgtataataattactatattaaataataaataatgtgtaatattttgtatttattaatttaataattttatataattaaattttaaaataacttttatttttttaataggagatttcctctatgtctccgctcttttaggggatttcccatcccatccctaagtggagatatatatggagtttaaaatccttaacgggaaagagcaccctgctaattctccgtcccgtgtgcatccctacctctgagtgtccttgcctgtgacattcacgcgcaacactcgctcaaaatcgtccttgtggctatccttgagttgaaatttgttgtcaccgagtatgcctgcgttgttgaacattatgtctaactttccaaacgagtttagggctttttccacagcagctttgacttgggattcgtttgttacgtcgcaatggatgtaagtgatgtcgttgtgtgtagctgatgatatggattggcatagggagtgacctaattcgtcttgaacatcggctatgactaatttggctccgtgttgggcaaaaatttcagcacttctttggccaattccactggctcctcctgtaattaaagctaccttaccttccaacctatacatatatataggtcatgtgattatatatatatatttatatatgttctgaaaattaaaaaaaaaattgctttgccttaattttgggacataccttcttgagagtgttgagagcaatgtggttgccatatttgttagggagagattgatttgtttgatttgattatttcaatagtattgtgtggatatagactcatcatattatgtatattgtatatatttataataggatactacttaggattagattataaattaagtccacttcccaataaaagaaaaaaaatatatatattatttaagttggttatgatggctagcatcttagaaaaacaaattgtaataattctccatttttatatatatataaaaaaacatggatgaccagatactaacttgacagctatttctcgaatatattatatgacacaatacttctgctccacttttccaatttcaaatatttaattcttggattttttttcatgattttatttttgtcacctttctcgtaaagctccaaacaatccaaaggaaatagcataccaaattgtgtcatatcatgggaagaaatatcataccaaatttctcttcacacacatatcaaacgaaacgattgaagcaattttttcagttgtcatactcgtaattgatccaataacaagccaatttattacaatacacacccaaccctatatattgtgaccaaataacattaatatatctttgtacggctcagtattaagagtacaaatacgagaacaatgtgctttggaatgatgtttcttaattagtataaatctccataaaaaacttgtaaagatttgttctttcatcataaccaaatccgtagcttatagaatgaaaccctaataagacatccggtgggttcaaaatcttagattgtaaaagacaattttgtccaacaagaagaaaacgatgccattccaatgaagccctctccataaaatttgtcttggagccaaatgataaatttgaaggtggttataacttatagttatcattaatattagttttatcgtatgatattgtgattagttgagatttcgacaagtgtgacgaacaaaattcaattaaaaattttgtacaagtactagttttcgagtgatgataccaatgaatgattcgctctttctcattttgtaccataatatttgcaaacaagtttgaattttatgagagagtcatgaggcagattttgttgaagtatgaatggtcttgtctttgtcttgtgttgtgttcatctcacaaatattatttaaaaactaattaggatttttctatgaacatgtaccaaatcatgttctttagcagttaaaaattttctctgaattattgagattgttacatttaaagactcttgtctaattttagtaaaataattctaacatggatgaaaattaggggcatgatttagtatatatcaaagtttgagagcatgatttggtagataaagaacatagtttagtacataaacaaaattgaatgaaattagaattttatgagagattcatgaggcaaactctcaatagaattttttctactgttaatttcttcaattaaatataagcccccaatttttaagtaaaaaaaaaaaaaataatcaaattataacctacatccatcaatcattactttctcataattgaaaataaaagataataatattaataataataataataaagatcatcgtaaaactgaccttctatactaattaataggaatagacttgattttcaaatattgagaaaatctattcatattatttatcccgtcccaaaagtaattatatgaatattttatttctaaattagttaaatatagatattaagagtacaatatatcaagtgtaattatcaaatttttttataatacaatataaaactttattaattcaaatcaaaagagagcatgatcgatgagaaataacatgagacactttagttaaattatgagcaattccattaaca

SEQ ID NO: 55000 - DNA, 1019 bp, Cannabis sativa
gcataatttattatttcgcctcaaatagcaagcaagcaagttctagaatttctcaaacaacttttcacaagtcacaattagcatacataaaccatttcaattactagaaaattacctaatatgattccatgctcttctaaaacaaaaattaaaattagttaagaatgtaatatcaccaagctcacgggttttttcaaaaaaataaatgaacttttcaaatcatgctatctacctactttcaaattgactcatatttagcaaattaacaaagacacacaaaaaactaaaaaaatttaaagacttaaaaattttaaaactaaaaatttaaattcacccccaaactaaagtgacacattgtccccaatgtgacattaaaaataaagaaaaaggaagttacctgagcgccacatcagtatggcggcgacggtggtgttggtggtggttgcaaaattcaactaggatacaatccacctcttgcatccataagggcccttgtaccaaatgaagagaactgtcctccaacgttgcaaattttgaagctatccctagaatgagagtcaccttcacaattcccacacatcagtcttttcatatgacgtcaaaaagtttgaaatcgttctttgcgcttccctttcttcttctcgacagttacttcttgacaatctttcactaattcaaccttacaacaggtaggaattttaatcggagtaaatacattaaaattcatctcttcatcttgaacccgcaactttaattcccccttttgtacatcaattagagctcttccagtcgccaagaatggtcttcccaaagtgatgggaatgttttcatctttctccattcaagtattaagaaatcaacagggaagataaacttaccaatcttcaccaaaatatcttcaattataccccgagaatgagtcaaagaacgatccaccatttgtagagtcactgttgtggcattggcttctcctaatcttagtcttttaaacatagacaggtgttgggttttgtgcccta

SEQ ID NO: 55001 - DNA, 711 bp, Cannabis sativa
tcatcccttcctcttcttagcttgtacatgattattaataattagtcctatatcctatcaaatgagtcttgattcatttggggaaaaagatattccatattttatttttatgattataattttcattattattttatttatttttagtttttgtcggagactttggaatagttttctattatattatgttaggatagtcttgataatgatgaaaactacatatgtacaataatttgtgaccgattctaaggcaatttaccaaactgccctttgttccctcataattgcattaagtatagaaagaatattatagaacatacattatatacatatcctttacacaatggttattatatatggtaccttcttatctcaacaagctagattaggatcatttgttaatatttagttaattttttttatatatataaaagtaatttgtggcataaatattaaaagttaaatctcagttgtaaataaatacataagtttaatatttaacggtaataatacttaagttataattgtggaacttctgtatgtatctgactgttaattgttaagtaaattgccacgtgataattcctgattagcccatgtcatgaatttttatattttgtttttaaaaaaattaattttaaattttaatataccaataagaaaatgacacgtaaataatgacttgatatttaagtaccaagtaccttcaga

SEQ ID NO: 55002 - DNA, 1418 bp, Cannabis sativa
cacaattcagtttaatccaatccttagggggtggattccagttttccgtcaaaatcggagtcgggcacgacaccagagaagcatgtaattctgcaaaagaagtgtaaataaggtcaatacattttaatacattcggggaattgttattgtgtactttttcatttcgcgccctctaaatggtatcaactacaatcgaagcatagagaaaaacctcctcctctcggatacccctgtttttaagactccaaagaaatttcacctagtcccaaacacgaatcccattgccacagaccagatatatgccccaaggagaggagcgccaaaggtgtaacgccacatcacacgagagcaaaaggtgttcaacagattcctcccccattccacacagaggacagctgatatcctctatttggaatcttcttccaatgactgatctgacagggagcgcctttgagaggatgcaccaccaaagaatcttatgccgctccagaactttactattctatagtttgttccacagcgttggggccacctcacaatggttggctctttccagtgcttgagcaaggtaagcagatttactcgtgaacctcccattagactctaaggtccaaccctatttatccacaccctgacccgaaggattagcccctttcaaaatagcagagaccgtgtctttatcgaatagcctatttagtttagaaatgtcccaagagccagaatttgtgaggagatcagccacacagttcaagtcaggcgggatttctcccattggtttcggaatgaaaccttttaagtgaggaatccaaggatccctccaaatgcatgtgcctctaccatgacacactaacttacaagccccttttctcagaattgacacttattaattttcacttgtaaaaaatgacacactcctcacaataaatttagctatcaatcaattttatttttaagccatttgtgaagggtcgctgcttgcaagggcgaagaagtatcataattttcatccttgtttctaattgatcaaatgttgtaaatgtaaacaatagaatgaatgactgttgagataataaaagacacatttatgacatgaaaatgacattaaaaacatgttttattgttgctgcaaaggtcttcaattcaagccaagacagagaaattatgttgatctagaaagtatcaatctaattcttaaatccgaagaatatacaaaaattattatgaatataactgttccacatactttattagtatgaaactatatggaaagatggccaaaaacaaatttgaaggtgtcgttacaccatgagattctattagagatacttattgatttagtataaaattattggtgatcaactcaattctcatattaaaagaatataaaaaaaaaatatcatgaatataagtatttcaca

SEQ ID NO: 55003 - DNA, 1466 bp, Cannabis sativa
  modified_base (40)..(46): a, c, t, g, unknown or other
caacgagctgcacagtacgtttgaaaatcacgtaatacgnnnnnnntagttagggtgttacattacatgttgctcaacctcttcagtaattaaggctagttcaaccactttcttatacaaagtgtcatgagcagcggtaatctttaagtctcgactgattgtggcattcaaccctctcatatatttttgtttcctggtgaaatctgtaggcaccaaatcaccagcaaatttggacagccgatcaaattccagagtgtattcgaccacagtcatttttccctgagtcagtttcacaaagtcctccatatgagacgttctcacgacaatgttataaaatttttcctcaaacagactcttgaactcatcccaagtcatcacactaacatctcgagtctgccccactatgtcccaccagacgcgggcatgatcttgtaacataaaggcagcgtagttcactctttctgttgccgtcacccccatgttatcaaggatgcggatgattgtactcatccactactcagctttaattatattagtacctcccagaaaagttggaggttgcaactttacgaagtgctcaaacactgaatctttgtgcagcattataaacccctagttacccaccacttgcacaggagctggtggtaacacttgttccacaggagctactggtgccagtttcctcaaccgatgcaattcttattcttaacgaagtatgatacctcgcatttcttgaaacatccgctgccaatcagcaggcggattattagttccaacccccgcgttatcccccgaattctacggaggcacaggcagtgccagtggattggtttggtctacactaggctctacttggtcgccttgtggtctaaatgattgcgacggttccattttttacaaataaccctgaaatcaacaaccctggcgagttaggcaccaatagcacacttatgcacttattgccttaaaccataactcaattatttcattccaattaaataaacatttatcaattaatactctaaacatagtttcatatcacataaatacactagatgctcacatactgtctaaaatggaaagtggtaaataaataatcacataagcagttaagcatttactctcaacacttactgcaccacgagccgagcttgtctctaacgataattgtacatgttcggccggtctacaggaagtttaaaaaccttggcgttctgattccaaactgtaacggcctaacaattaggcatgtcacgacaactgattataaaaccctaatcccctaaatcgagattactagaaaggtaagcgcgataaaatttaaattttacttgaaacataatgaaaataaaacttgtaataattttaaactttacaaataaccaaaagatacatgtttcgtgtgttaagaacactataaaacttaattttagccctagttaattcatgagaatcaaacaataaga

SEQ ID NO: 55004 - DNA, 1011 bp, Cannabis sativa
  modified_base (59)..(59): a, c, t, g, unknown or other
catcacgaaagaactctacggttaagcttgtttggcctggggtaattttaggatgggtnacctcctgggaagttttcccagaaagcgtgcgagtgaggacaaagcacgttggaagcactcgtgttggtctgtaggatcagtcgtcattccatgaagcagccaaagtgacgtactcgtgtataagagccaccaatgaaggcttgaagcgtggactttccacgttgcccactgatgggtaaatacaaattatatattcacttcgagtccatctagtggagcccgacccatgaggtattgatcttctgcttaagtggatgacacatcatgttgataattatcaaaatgtgtcctatttttatggataataaaaacacataaatgtttgattgaaaattatcttattttcttattcagaatatcaaattttcggacaagattttgaaaataaagtcctaatattattggatataataataaatgagtgagacactaagctttgacatctaaggactcatcaattactctttcagaagcactgcttgatactatctggagacctgtcttattggatctttatctcgcctggatgagtcttttgtctatcgtctggatgacttgactttgataacgagtttgattcattattttgattggacctttaatagttgaactaaataatcttaaaattacacgtctcttccttctaaaaacacgaataacacaactaataatttaaatttattattttgatttaaaattattgaaacctaatattcttgattaaaaataatgtcatcactcaatttttttcttccccatatataaatatatattataattaatgtaattatatacaagtacaagggctctacaagctacaactaagaaaaaaaaacctcttagaaatgttatgtggtccatagagagatgtaatacttgtaaaagtgttagtaaatacattttttattatttataagtaattgtagatatatatacagttcatgtatttag

SEQ ID NO: 55005 - DNA, 1508 bp, Cannabis sativa
  modified_base (26)..(32): a, c, t, g, unknown or other
  modified_base (90)..(103): a, c, t, g, unknown or other
tgcactcaatgtaaggtttcctaaannnnnnntgtgtttatttcattgttttagacttcatatttgtatgttaatgaaacatacttgttnnnnnnnnnnnnnnctggtaaaatatatccaacacgtgtatgataataatattgtctgtattatctgtattatcttatgcaaaatatatagtgtgtgtattgcatatttagttaagagttttattttctatttatagtattttcttaagggttgagtttagacatttaagatagactaaaaaagataaaataaatatgcctagaaacaatcatagctgaaccctatagagacccaatgagtttcaaaaatggcattttatgtcttgacttattttttttctcaataataccatttttagttctaagcctttaaatatgaattttgtctatttaataataatgacaaattatcaaataaaattaccatttaacttatttattaattagattttctaaagtctcataattaataaataaatcctaaatttctttttcttctcaaatttatctttacttagtggaactcataattaagacagagtattatttaaaattttaattgattaattaaaactaattaattgattctacaagacaacattatctctggtagtgtggggaccataagactatataatcaagcttttaatatatagttctagaatttactgagtaaatttcctatcttattaattcctcatgataaattctgaattatattcttaattacataagacgctctattcactaagaatagatacgatataaattatctattgtttcaatctaaataattattgaaaaaatagttttaatgaaatttaatttaaaattatcaataaaattagataattgtttttttatacataaatcttaatttaaatttaaattagacattaagtcaaataattaattatattttaaaacaaatttattagttatataatttaaaatatctaaattcatgtacttattttattatttaataaatttagttacatatattttcttatacataaacttaaatatttaaaatatgtaattgaattgtattagatttaattttattattattatttaaattaataatcaggtaatattaactaagagtgtttattggatcacatttaatggatttggacccaaccgatctgatctaattatttattgaatagtaaattttatcatctgatccaatccaatcgaattgagtcatccgatccgatctgatccaatctaaatggatattgtgaaatctcggaccccattagatgcattaactggttttttattggattggattggattcttccaatctattttatctaccacttaagatgatttcattaaaaagaaaactacacataaaaaatataatttaaaacctaataatccagcatacatgatagacattaatttagtccaacttaattctcatgatcctataataaaacggctaaaaaataaaacttattcaat

SEQ ID NO: 55006 - DNA, 2100 bp, Cannabis sativa
tctaggtgagaaaaatctcactataacacatgcccctagttttgcgactgacagatgcggtcatgagggaaactgtaatcaagagacaggcgaagagatgtcacgaggtagtgacctttgtttgtcccatcaagggtcttaaaaaatgacgactataattattacatttcatcctacctatggtgccacgtcacgaaactcttcggtttccgtgtaggcgtgcccacggttaaccgttggatgggatgaccttaggcattcctgttgccacgtgtcatgattccaattaatgtgggttatcagtatttaagctgcctgatatgaaatgattcccttacttttccctctaattttcattttcctcatttcatctaaaacttcaaagacccaaaaccttctcccatatttctgtctttcctttttgaatcttttgagtttttgaggcggttgaaaccaatctcaggaagaatcgtcaaatttcaaggttagttttcgaaactacttgcgaattttggtttccgattttgagagaaacactctgcatttcaaatttttgaggaatagaaaatgcatgttgttcatagggaatacacatagacccttatttttctgctagaactgggtaattatcagaaaaaataaatctgaaattttataatcgtgaattctaggaagaacactttgaatattcgcgtctttttacttgctattttgaatactcgcgattattaagatgaacatcttgaatactcgcatgtacatttccttaggaatcttggagatttgatcactccgacccattgtttagaactttaggtttttctttatactctttgtgtattttggtgtgggaacactggttgggtctttcaaatggtgggtgtgtcgctgtagcccaatgttcatgcgtgcgatcgcatgtcccttgagttactgcgaaacccccagccatttgcgacataaagccaatttttctctttccttgcgtaatcacgggtttcaactagtaggttttctcgaaacagtgaggagtttccgttagcccaatggttgtgcgggaagggtagttcccttgggatacaggagactcctcagtagtttcttgaggtacccagccattttttgaggcactctactaactgcacatgtgcgatttacaacttgggagggttggctggattttctcaaaatggtgggtgcatctcaatacttcaatacccatgtaaccgacatggtcattagcttattgagagacacccagccatttcttgagaggtcaaaccaactttccaaggaaatcttatattttttgtgcgtgtgaggtcacttgtattattctcgcactttcaccacactaaaaagatcttctatctttcagatgagcgacttgtcagacagtcaaatgctcggctctggaggtgatgccttcactgatgaccaggaccaagaggatagttttattccaactttgatttctaagacacaaatacccgttgttagaactgcgacgttaggtctgctgtcctctgaggacatagattggatggttcaggagctcgctgaaccggggacaatcgagatttgtgatagtgaatccacggtatctgctcgtgaacatcttgttcactctaggcatgctcctgacgttgaagtagaggagatgggcgaggactgggaggttcctgaccgcgagtcagatgaggaggaggatgttgagggaagtggaaatgattcagtggataacacacaactgaacgagcctttctcatgcgaggacttggtctcgcgagtcaccaaatctgacctcaccacttttacgaggttgaatttgctgcgacttagcaccatgcgtccccgctctactcagagaccacatctttccttcaccaatcccacaataatccccatagaggatgtggttgtttccatacccattcttcgatgtggggtatcgattcccttccacccattcatcactactattcttaagcagtatgacgtatcccccttccagttaaccccaaacagctattgcatagctattgggttttatgcgatgtacatggagtacgcgcatagggagccttcgatggaggactt

SEQ ID NO: 55007 - DNA, 695 bp, Cannabis sativa
gggttttagttgtccattttacttcttcaatgattctgctacattctgccaatttcttttgccatatcaaagcatttctagccttccacaagtggtaaaccaaggctgcaattgcaacagaaaacatctgctttcggaattttgagaatctgctcttcccgatccatctaactagtttctgcaagtaacatgcttgagcatggatcttcagccagtccttcactccctgaagacaaacacctgcaattttacaaacaaagaagaggtgctggcaggtttcgggtagctgatcacataggcagcaagtgccattaacctgaatgccaaatctgagcagcctatcttaagttttgagtttattgagcatgggcaaccagattattacactgtgttttggggtatttagtctagcccaaacttcactactccattttaccctatcggttgaggttgagaacatgttgtaggcagcatctatggtatatttttgcctctgaaaagttgcagcatcatttagcatttggatttgatccttgaggtctattatctttttccaataccaactagcatgtattgaagctaagcaactccaccactcttgatccctgatatacacactatgaccccactttagccacaaactttcttacttgttggagatggcccatatgtacttgcccatggccgctttgttc

SEQ ID NO: 55008 - DNA, 1368 bp, Cannabis sativa
catgtcctatattccacttgggaatatcagtaaatttaactcatattgccatttttctaatctttctaccctatcagacgagttaccactaaataacttacacgtactgcccatttagatattttgatatcccctcattgagtgtataatatttaatatcgatatcaattgaaacaacaactataatattgcccataaaattctaacttgagtcggtcaaaggaccgatatctgagtccccttgaatcataattggcacttgggcaggacccgtacacttttcttctttaacattagtctttcttaactgtgggtagggtcttttcagatgacccactacctccacaataacaagatctggctctacattagcccaaatggcgcttttcacatcttggacactcaagataaggtcgccatctcttgttcccaccttgcctactagtctagtcaacctggagctttttgttctatcccataattggtggttcatttagtttttgctccatgatctgcttgtaagttgactcgatatatttcaccgcatccattggtgcatcaggaagtcttggtagtacaagaacagacacaagatgagcctattgttcctttagatcttggatctgttttccattattgtctaatcatataatgcataacaaaatttacatatttctagtgttacatcaataaagggattctcttccttaccgtttgccctgagcacatacaacttgctaatcaggcaattcaattgccctactgtataacttgtaacacatttaatccatatcttccaaatacttaaaactcagatagatatcaatatcaatatgcgtataccataaacatattcttagtatagatagtcagtacactatttcttcccattatacaccatagttgtctaagaaagtaaggcaataacaaataacataaacaattactataccacgagttgacctgtcttcacagaaaatgtacatatttgaccagtctttaggacctttaaaaccatagttgctctgatactaaattgtaacgtcctattccataggcatgccacgtgtgtgattttataaactagattaatactaatatattaattaattattaaaaattgtgagaatattaaaaacttgactaaaataaaagattgaaaatggacattataacggcagtaaaaaggtgttccagggattacgtgagctcgtgccacaacttgacatcaatatattgcatcatctaatcagacgagcttgtacctacacccgctacttatcatatgtcagtgacgcccgtatctacacgtcgcttgaaggaaaccctacaaaagtttcattctatgccatcacctggaaattttaa

SEQ ID NO: 55009 - DNA, 994 bp, Cannabis sativa
tatgtttacattagtttttgaaatttcatttttaggtgtacatgtgtacacaatagcaatctcaactgacaaattaataataaaatttaattagtatcttaaattcgcacaaaaagtaaagttagagagtattgccaaaaaaaaattaagaatacaaaaatgagttttttgcggctaaattttctcaaatataaattttgacagtaaaaccctccaaactacttaactgttcacaaatttaaggtgtcatccacttttcacagttaactaccaatatagactgcttatgtgtacactcatgtacacgtgacacgtttatattggtatacctaatattattatttaaaaaatataaaaaatatttcaaattttatactatttttcatttcataaataatttattttttatttttataattttatttaatatttaattttaaatgaataatgaattttaaagataatttttaaataataatattcggtgtaccaatgtaaatgtgtcacgtatataagagtatacacataaatagcttatggtagcagttaccggatgacaccttaaatttattagtggttcaatagtttgaaagattttaccgctaaaatttgaacttaaaagattaaatacaagtaaaactatagttaagagagtttacccgccaaaatttctataaaaattaaaatatatatataaaaaaaaattactgccaattacccagttgaatattatataaacttgcgttcaaaatttgttgttggatttataatattatatgttttaggtgaaagtagtgtgagaatttatgtgtaaaatttatatttgaaaaattttttttattattatatttttaaaattatatataaattctaaaataaataaataatctcatataatttaaaaagtttaatatgatgcatggagacaatatatctgtgaacttatactcttttttgtattttattacaatattgaatttttgtaataagtaat

SEQ ID NO: 55010 - DNA, 1516 bp, Cannabis sativa
tatattaattcattattacttaatgaactattaatatataattactatcttatcggcaattcccttattgtaatcagtgacaagttttattttcttggtccgagatttgatccaaacattttggcgtgggggatcttgaaccttgaggtccttttttagcattattttataaaaattaaatgtgtactattatattttgatgcacattgctagaaattcattatattaattacttaccacatcttcccttacgttcaccattccattccaacaacttcgatgtcgagattggattcttgtcgagcgttccctttgtactttactcaattcctggaatgcaaaaaaatatgttagctaccaatacttgtatttaaaattttatcttagtacaaatataattagtacatgaaattcaagagctagtcgacttttaaaaaatttcaaccaatcctttttgtcaattttaggaggcttatcaggaacatatgacaactgttgcaaatccttttcttctaatgcgggcataattatgtcttttgtcattttgtgcttgaagtctttcattaacttcccagcaatgatcatgcaattatgtttgaaatcatcttgaactataaaacctgtctagttgtaaggtaaacaaacatgattagagttaacatctgaattaatcaaacaaaaatcaaaattctcacaaataactacttacctatatatctttcaaaattttatttttaaatttagggttgacttgcttccaattttcataggacagctctatcgtcatatgacatctaactcctaaagttgatactagcttgacatagtttcttccacaatactctcctttatcactgactaggagaggaagtcttttttcttggtccattagcttggacacttcattcatctcacttctacctcatttaggtattgccctaggacactctgctattgggtctaaatttgagcttgaacctgagtttgccatatctacaccattaacaaacaaaatataaaattagctataacagagtaactacataaaaaaatagtatcataagtaagctataacaaatattagctacataaacaaaccttatcactagtaagctattacaagtaagttactaattagacatgttttcttttcttttttcatttatctttgcctgaatcacaattgacccatattccctcatcgtgtctaatgtattcagcaacgtcttcttcaaggttacaattaatttttacaactttttcatgtattggttgcccaacaatgaagtcatcataacataaatcaacattctcttcatcctcttcattctctaagaacctcatctctggtgtcgataaaacaacagactatttatcattaaccggatcaaaaatgtaaaaaatttatactgcttggcttgctatgatgaatggatcattcttgcttcttgtcatacttaaatcaaccaaagtaaaaccaagctcatcagttcttactccaacattgttgtcaacc

SEQ ID NO: 55011 - DNA, 690 bp, Cannabis sativa
tatttttctcatcttttaatcagatctagatgtgattttctctaaagattatattttgatatattatcaaagtttaaaagtatgatttttgatataggtttctgttttttcactcagaattttcaagaaaattgtggagaaagttgatctcagagattaaaattatgttgatggagaatggatgacttggagcttttaagtgtttgagttctttgaaaattgcaaattgtactaagcgtaacaattatgctctttgggctatttcaggtatatatgtaattagatgtattttgattcgtttgtaaggaagttggtttcatgaattcatttactttattttgttggaagctcttgatgctatgttagatgtttctcggtataaagttgaatatttggttcttgggttattgatatcttctgtttattatctgttacttcaggcatcgtctattgttattgcaacattgcatgtttactatatgtgtggaatgttgatacatggggtatcgtctttataattctttggaagattaatctggtttctgatcaagtacttttttagtatgttagggtggtggtgggttgggtttattagttttaatgtttggtggtattctagtttcgatttggactactttctaagggactactcattttaagtgtttattttgatctctctctgaatactct

SEQ ID NO: 55012 - DNA, 898 bp, Cannabis sativa
gaccgatatcgaaaagattgtcctgtaaaacaaacttcattagttaatattatatataactaatgagaagcaatttaactctaaaataattcacctctactctagatgatatcttcttcacaaagtcaggtccttgtgcccaacttgtgtactctggatccatgtactgtcgtacgagcaatcctaactccctcaaaaaatttgaactgtacaaacctacctccttgtatatttttcctttgatgtcccactcgataggtagtggaaatttgagtttttctcacttttcttgtgtgcttaatcccttatggtgtccacgtttctttggatgagctgttatatattcatataaatattaataacataagttaaatatttaaaattatataaggtgaaagactccctcaaatattatcaatatgttgtcaattacaagtaaaaaggtcaaagactcctttatatattgtcaatatattgtcaattacaagtactcatactccacaaaataaataattcattaaatatccactcaaatacctattccttctaattacatgaaatagtatcacaaatacttaactaataaactccaagggtcaacaaaactagcaataattacaagctgcatccaatggaaaaatccaagtgttcaagaatattaaccaactaaaccttgaccccagagaagaatactattgtccatgtcaatatcattgcttccaaaatcactcacaatacatgctctatggtattaacttttactatatatatttttatggtattaactttcattttattatggccaaaggctattttaatatatcgcacattatatagccaattaaaataaaaaatattggaaactcatgttctttaccaacatatactatcgtgttag

SEQ ID NO: 55013 - DNA, 1326 bp, Cannabis sativa
tattagattaaaattcgatggttttatatttttaaaattaatatttatagttaaatttgcttagtaacctttcacgggtaatacccattaaaaagtcttccttatatatatgtatattaactaatttagttttattgaaatgataaaacattctctaatttttgcattctacacgagtgagagtaaaacataacttgtaaaaaaaaaaaaaatcaatactaacttaaaatgtaaatgtcattctatatgtatatatccaatatacatatctaaaatggcccattacaaagcgagcagatttttttttaaaaaaaaaaaaaacaacaacaacaacaacaatgtacacaatcacacacttagaaatatgtgtatgcaccaactggtacaagggataagtcattacaaaaaaaaataaagctatctcaaaacataactactgaagacacacacacacacatatatatatatagatatatgaatgtataagataatacagtacatgtgtattctacctcaaagacaagctattgtgtaaacgcttccaagcaaaaacagtaggctaaaaaaaaggaaaggcgtatttcatcaagggggagtataaacccaggtgtttgatggagagccttgatccttacaacgttgttttatacctgctatcttatgatttagctcttcaatttctctaacctttatatcccgttcttcacacatcttttcaagttctcccaccaaatgatgataggggatagatgagttgacagtctcaaaataggattcaacaatttttcctaacatagaatgtcattctggtaaaataagacaaagtatcttccaatactccaataaatgagagtagtgttgctcagaaatttcaaatgttaagcgaagcaagggtaaacaaggagaacttagctgaataaatagtgacttcttgattggagaaagattctcaaacaaagagataaaatccttgtccagtgaggcataaagtgagcaaaatcgtgatgtgtaaggcccaagtggggccaaacattctgaatccaagccaacaagtgtcgctaaatctttaccatattcagattctacttgagtgtgttcaatcactaaaggattatcattaggagctgatgggtatgctttatgggcattctgaccaatgttagccttggttggtgtacgacttgaaatatcctcttcatcctgagagaacagatttgaagtttttgagaagtcaaggaatcctcccgtctgtaagtatatgtatatgtatgtatgtgtataagaaaattattcataatatactataaagcaagaatgaagaggaga

SEQ ID NO: 55014 - DNA, 784 bp, Cannabis sativa
cctatcttaatttatttttttcacttttataatgattttagctctccctttggtgagttatgagctgtgactgtgttaaatcataaatgtggtatagtcattattatttttaattaaattggaatgacatgttatagacagccttttctcagtgtaagtttattgatttgatttgattagaaaagaatctgaatcatgtacgtagcatagtgccataattaactttcttctgtagtacaatatttcatgagttttaacattacataaataagtagtatactacagtatactccctatttgtgatcgagttttaactttatatgaataagaagtattttccgcattatgaagagttgtttaatttgttttttttttctcatgatttaaaaaaaaatgataattattttataaatttcaaataattatttattatgcacaaataaaaaaaatataatcacaactacaataaaatatttatgtcttatattttaatgtgtctcatagcctaatcaccctaaatcgcaaaaactctaaagaaacacccccttctctctttttccactacaagaaatgtcacttttatcattacagttcgctactgcgttggtaaaagtaacttttaccagcatatttcgcaaactgcactggcaaagaggtcaaagttttaacagtgtacatatgcagtggctaaaatctaacttttaccatcgcatttacgcgctgggaaaagtcatttttgccagcgctttttattttatgctggtaaaagttctaataccaatat

SEQ ID NO: 55015 - DNA, 2675 bp, Cannabis sativa
  modified_base (241)..(241): a, c, t, g, unknown or other
ttgcccgttattttattctttttttaatccatataattcaaatctaagccctagttgaaacattataaaaggaacatgatgttctcatctcatccaatggatttcaacctcccaaatccagtttctaactatgtcagacaactagtagatgagagacacattctatagtgattcgaaccctccttcattgttcttcattagtcaagccataatgattgagtgacatgcccacacatagcangtcaagtactcaatcatagtgcagaagacggtggtaaccattccaaaggagagaaagagatccaggctcagatcttgataatatctgcgacagaaaggaacaagggttatagatctgagcggaatgagtcatattattctgctgcaatcaattgaaggtttttaaactcttatgtgtttaatttcatcgtatcagcgatattcatatttaggatgttaatcaacatacatagtagtaaatctagatcctggtaaaataaaccaatagagttgactcattcaatgaccacaccaatgcatatttcccgaacccgtctgtctcaagacaagagtcataccacaatgaatcatattactagctacttttcccattaatgttttaacttttatgacattaataacttcttcaaaaattctagttttatttacttcatcttatgcttaaatttttaaggcaattatctcatcttgaacaaatcttaaaataattattgatgaacaactaaattattttagataaaaaaaccaatcctataaggtgaaaaaaatatttttatggtaatttttaatctaaaacctaattaaaagaaaacaaatacatcaatgtaaaactctatataacaacacataatttcatttattgaccactcctaaaatacaaactttcatgagttataattttttttctaaccaatgtactaccaaacataaaggcatgtattaggtacattatattttgtactctacttttacaaaacatcatgcaaaactataaatatactcggtacatgatataacttactctattaccatcgcataaattcataaaaaatatgaaagattgaaaagacaaaaataacctcagtccgacaacatggacccactctttatagtactattgtactattaactactactaactaccatttgattaaacctttttgtatgtttttatttttaaattaaaaagaaactgttgaagaaacttttatcaaataaataagaaaaatttatagaaaaaattaaagtacattgggcccactatggccggaacacaatttgtgattttacaaaatgagcacaaaattgactacttatatttatactaacattcttaaagtgttttatattattggagtatttttagaagtaagagtactaaaaataatataaaaaagagatataataaactattatatttttaaataacatatatagttttaacacttttaaaaaatgctaacattagaatgctcttaaagaatgtccggagtaaaagacaaggtatttcacatgtccaagaatagttagatcggtttgtgtgcaatcaagcttggtctgagttgtattcttcagtccaagtgtgccatggtgattttcttcgttctgaccatcgtcccatagttgcaaaacttgagaatgttgtcgtacagagtcatgagcgagttaaaaggcagttccgctttgaaccacattggcctaaagaagatgaatgtcgatcaattgtgttgaaggcttggcaaagatgtacggtacatgtggctacatgtggccgaccctttgggacttcgagaatctctttaatactgtgcaaatctcctgtcaacttagaataagtaaagatttgggtcattgtctaagcaagtagtggaaactcaaaaggagatagataaacttttgaatgctaatgctctcaatgtgcgaatagatgagataaaaattctaaaacttaaattggataatcttatgagtagagaggaactttattggaaacagagatcaagatcagagtggatgttgataggtgatagaaacacgaaatactttcataacaaaacatcggcgaggaagaagaaaaatgctgagattatgatggaaactactcaaaagttgtgtgttgaggaagagattgttggtgaagtggagagatattttatagatattttcaaacatccaacccgacaaataaccaaatccatcgtggtacagaagttgttaattcgcatatttcggtggctaataatgagtgtcttacaacaccatttactcaggaggatatttaccaggctgttatggcaattggcggcactaaagcttcgggaccagatgataatcatgctttattttttttatagagattttaggatattgtgggtcaaagggtcaaccaagtatgtcttgcaatcttaaatgacggtacttcggtgcagcagtttaataattcaaatgtggtgttgatacctcgttgctattcatgatgcggagaagaatttgaaactcctgagcattctcttttttcctactctgatttgattcctgtgtggcagtggttggaggtgtggttggtcatccgtcgttgtgtacatggaccaatgcaggaaattctcatatttctctttgataagctatcttgtgaggcttttgaattgatgatg

SEQ ID NO: 55016 - DNA, 1592 bp, Cannabis sativa
  modified_base (735)..(749): a, c, t, g, unknown or other
gtgagtggatctctgattgttctaagtgtgtgtgtctttttgaagctgttttttgcccctcttttcttttgttgcaactgaacaatgagtaaggtgatgatgatgaaatattgttaccctgataaatgtattgatcagtgtataaacaaaggtttcatgaattttttttaaaaggtatgaataaaaaagcaaggatacattggaatgattttgataaagtttacttgaatcccttttcagcaagaagaagagaatgacatttcagatttttattttagcatttagttagagttttagtttttggattttaatttaattaaaatttgacttttaaatatttattatttaattttaatttaaaactaatttttattttatttttaatattttaaattaatttatagataaaaaataaaatatttaatgatctcgtctaatgacagagtgacacgtgaacagtgacctaacacttaatgaccaagtattacaaaatttctaggactctaagagtatctcaatagtcgacaacatttatagttgtcaaaatacacacatcatcctaaaatattattttttgttattttctctctcatccacataaaatttttcatcttttcttaaaataatactctaatggttgacaactctaaaagttgtccaccatgttcccacattaaattaaattaataactttttagataaaaaataactttttctaataataataataataannnnnnnnnnnnnnntaataataataataaaaagaaatatcatgtgatcattgtctatattgagcaacacttcacttcaaattaatctttaaaattggaccacgttacatacgtggcaagatcacttcaatggacaaccccattggagatgctctaacagaaagtatttatacctcaaaaaaatttatttaggtattaatctgtaactcggagttaaacaaatattttcaccataaattactcaaaagaaaactatacttaaagtactaaattaaaaggataattgatgtcacgtaggtggaccaaattgtactgaattattgatgaaatgtactttaaaaaataatttgagtacataattattataaatttaagaacttaggtaatgctgctacaaatatccctaaagttaccatgggagatccttggttatgtcatttttggagaacaatgcattttacttcttaaaaggcttattacccataatgttgcttttggatttgaatgtgttaatgctatggagccacaaacttatggttgaaatgaagctgataatattaaacttgacatatttaaaagcatatgtgatctcgtggagtggagtgactctatttatgtgatattatgaggaaattgaattttcgtgaggattggattatgaagatctttgcttgtacttctactagccaattctattatttgaatggataaagtttttgaactattatgacaaagagcattgctattgggtcttagtggtgcatagtatttctagacatgtcgccttgcgattgactagcgatattccctaaaagttattatatttgtaaagtccttttttagcaagttaggtgacaa

SEQ ID NO: 55017 - DNA, 651 bp, Cannabis sativa
atatataaattaatatatatttatgtttttttgggatgatatatatacctatattggcaagtgtatagatagtaatatatttatatgagaaatgaagctatatagtagctagctagctataaaaaatattattagatgctcatcaattatctcactgtataataattcatatataaaaatgttaattaattagtgatggatcgagacacatacctacgtattaaattactaataataacaataaattacttaatatatcatctatatttttttttctgtgtaggtggtaactttttatttatttatttttttgaaatggtaactttttattttaaatgagataatatttgttattattcaattggattaggtacccacttacctactaataaattatctggtattaaattttgaccactcttctgataaaattcaaagtggaatcagaatgttattgctgaattttgagtgtcctagtatattactaataaaatgactagacttggtccataaactattgcaaaagtcttattttagttacttttttactaaatctttatttgaagttgtctagtgtttagtttagcctagaggaatgaatttggttgatgtctcaaattataggagaaaaataagggtaaataccatttt

SEQ ID NO: 55018 - DNA, 857 bp, Cannabis sativa
ttggttgtgtatgaaagacaataatttcatgtcggccttacttattcctggaccaaaatcaccaggttaagacatggatgtatttctaagaccatttgtggatgagctgaaagatttgtgggttgatggagttgatacgagagattgtaggacaaacactatgttcaagttgcgtgcagcccttttatggacggtaaataattttcctgctcgaagtagtttgtctggatggagtggtcaaggatacaaagcttgtccaacatgtaacgaaggcacttcttcgacacgattgattggtaagacagcttatgtaggtcacggaagattcttacccagtacccatcgatttagaagggacaccaactttgatggagaaattgaaagaagacatccaccgagacgttttactcatcaaattttcggttgactatgtatctaggagagttaattttgcaacattttaaagtgacgacaataattgatactacacaaaatttgaatgtaaatcaggctgatgaaaatgttgtagatgatgacgttgatgatgtaatagcatgaatgtgatgagttgctaattgatcgatgtgaagacgatattatttctcaaaatgatgagtgtgatagtaactattagtttacttatgttttaaatattttgtaataattttgtaaatggtgaatttgatgatgttaattttaattcaaactaattatattttttgctaatttacatccatactaatttagtcatataattttacatttaaagagtgatgatgtcagctgatatagcttcttatcacgggggagacggtgatggttttgatccactagatcctaatagggtaccctcaact

SEQ ID NO: 55019 - DNA, 1035 bp, Cannabis sativa
  modified_base (695)..(712): a, c, t, g, unknown or other
  modified_base (795)..(802): a, c, t, g, unknown or other
aacatataaatcttatatcaatatgtaatatccaaatttctaacttcattctctattttggcatttaattttttatttgcttgctcaaaaaccaaagttgatttaagcatacatatgcagcaaatataacaaagagaatcagaaattaaaatcaaagagaaaaaaaaagaaacaaagaaaaataaagagacaaaaatacaataaaaaccatattagaataacaaaaaaaaaagtagaatatatgtgagaaatcagttagtaaaacaaccaaaataaaaataaacaaacaaaaacaagttttctaaaataatcaaataaaaaaattgaaacttaaaactcaattaacgataaaaaaaaaaccagttatgaaaactagttacttaaaaaaaccagttatgaaaataagaaaataatatgtgtatcagaaattgattatttaaaataaaacaaaaattgttcaaatatcaaacaataataaaactgattttatataaactaaaaaatatacaataacatcataaaaatggagcaaccccattacagaacagttaaaacttgtgaaattagttttgacgctataaaaaatcataaaaaatataaatgttaaataataaagttaactgaaaccagtttcatcaaacaatcaaatgaaaaatgaaagaaaaaaaaccacacacaaaaatacaaaaaaaaannnnnnnnnnnnnnnnnntataatcaaaacaacacacaatgataccaataatttgaaaacaaaatataagttgaacttttgaacctagaaacaaaataatnnnnnnnnaacttaaaataaaaaatttgtaataacatcataaaatagagcaaccccattaaagaactctcaaaatatgtaaaccagtttcgaacaataatttagaaaagaaaagactaacaaacataataaaaaacaacacataacaataatttaagaacataatataaatataaaaaccagttactaatttagaaaaaaaaaaaagggaaaataattgaaaaatacaaaaaaggaaaaaa

SEQ ID NO: 55020 - DNA, 2422 bp, Cannabis sativa
  modified_base (37)..(46): a, c, t, g, unknown or other
ccgaaatatacattaaataataaaatatttttgtcannnnnnnnnnccaaaaatggaattaacactatttatggtatttaacacctcccttaacactttttaattgggataaattgaggaatacctctttttttttatcaattaatcaaaaataactgcatattaaaatttattgaattcttgactaaaaaaaattcattgaattctaaccgcttttataagtcttataccaaatatacccttacttaacatatcctaacagattgtccctatcacaacctaacccaatgcacacaagctccgcctcctttgccatcacatgcgtccttccgcctcctccatcggcaaaatcaacattacacctctgcgatcacaatcgcaacccctgacctccaacctcttccaatatttgaatgtaaataacctccaacgattttgggtacttgaatttatattctgcaataatttttttcatatcatattggaatgtaagtattgcttgggacttttttttttattaaaatccaattatgaagccagtgtctaattatgcttgtctacaggaatttgatgaaagttgaggtatattatagagtcaccttgctaaactgaacactttttatcatcttttggttcaaattaatgcatatttagtttatacataacgttaatttgtttttattttaacagtcactatattccatcagtagatagcttctatattttgcaataatctttttatatcatatcggaatgtaattatcgcaagaggaggagcagaggtgatcatcatatttggaatctagagaagtaattgattttattttttttcattaagctatgggcaaaatggggacatgacttataaaagtggctataaataaaataatatgaaaagaacggtaaaaatgaaatggattaattaaaatgggtatacggtgaaattttcctttttttttttttatcattttcaatagatgatatgtataatttgagcttgaaaaataagtcaaattatatttggcccaaatttatacagttaggataaaattaactctttttttttttttttatatatagaaatgtgtaaaaaagtcaacaaaacattaaatttttagtaaattatataaaaattatattaaatatataaataaaatgtaaaaaataactaattacattaataaatggcaaatagtaaataaaaaaaataatatttattatggtataaaatttgatacatgttatattttgtgctaaatttggaccactttatacaccactattagagttcacttttataaagatggccttaaatattcacatacgctacatttttagctctctattagagatgcttttaatatgcatatctttaatcactttaattataattttaactttttttttttctaattatacatagctttttaaacttttttttttctacttgttatgtactgtttatgtgagattttcctatagtccttgctcttttgtattttgaattggcattgtcaccgaaaaaatcaccaagaaactggtttcttgatgaggaaactggtttcttgatgaggaaatcagtttcttgatgatttttccagtgccaatgccaattccgacgacttttccagcgccgacagtaactccagcgactttttcgacaccgacagctactccgacgacttttcaggcaccgacagtaaactccaacaatgtcgtcggaatgtcgctggaaaaattaccgaaaaaatagaaactagtttcttcgtgattgttctgctgatattaccaatttcgatgactttttcggcgccggtagcaactccgatgacttttccgacacctacagctactctgttactttttcggcgccggcatctaagtctggtaactttttcggcaccaatgacaaataaaactgcctaaaaacaaataaaaatattaaatatggctttgaaaacctaattttcgtatatatggaatatcaaatactttaaaaatacgtaaaaaaaaaaataccatataaattggctaaacttaaaagtgtcatatttaagtaaataacttttaaaatctcatagtgagtgtaattttctcatttaaaaaaaagaataattacactacatactgaaattttcaacttttatacttttatattatagggcggaatttttttcaaaaatattgtgtaagttttatattgtgcactgtgttaaattttcactgttgttctatggttgctttttagttgtttcactactgtttttagttgttttgttttgtgttcctgttgttttatataacacaatatttttggaaaaaaatttatgtaaaagtatttttgtaacaattaattcaaatttcagtatttttgtaagtttctcattaaaaaaacacgaataataaatatgggctgggccaa

SEQ ID NO: 55021 - DNA, 1984 bp, Cannabis sativa
tattagtcatgttattatatatatgtgttgttattgcttataatgtttatattagagattgtaaaatttatattgtatgatatattaaatatatattatttaagatcagattttgtatacatcttgaagattagcaaaagttacattcatatattctttaaaatattgcaaacgagattgctaaataatttcttctttttatggataaacaattaataattttttaaaaaatttataataatgttctacttgtttaatgtcatttcccaaagtgaataaaataattttaaataattaatgatattatttactactcaaatatttctagaagaaattagaagcaacaagaaaatataataccacacacaatcaaagttcttaaaatctatgtatcatgtgtgaaattgaataatagtggtcacgtagttgtagaatggatacacttataatcaagataaaattatatttgattattgaatagaatgtgaattgtatacatgttttaatatatcgcaaatttattgtacatttataatatttaaatatcattctctgaagagaatgaataaacatgaaattttatctcaaagaatacaacttttacatatattagtaatgccagaagtaaaattaatatatacatgttttattatttctaaaaatcaatagtttcaaactattgttggtacaacatatgtatatatatatacatttactacttaattcagtttgcatattcctaggcgtgaatgtataatttactaaaattatagtaaaatttgttagtgatctaatataatttaatatagttacatttctcaaagtaataaagaatcacaaaatgattatttaaaaagcttcctgaagaagtcttaaatacaattgctacttaaagtagttaaatatatttttatgaatctaaatgtatagtttttatcatgttatgaaagtgacaaaaagcagcttattatatgtactggttgtacatttaaatatataatatatcaaatcatgataattagactgttgaatagtctattagactacttgttagaaagacatggggaaaaaataaatactatattatgattatatctatttgacaattgcaacaacatgatgaagttgtcttgtacctatatatgtccacatcattaaattgataatgacgaaatataaaatttgataaataaatagtgactcttgaagagtgtatatgctttgaaaaataatatgattagtttattcgtgtatataaatataaaacttataatgattactgatatattgtagtgattttataaattatcctacgaaagttttattgaaatataaattatagtgaaccctaaatttatgaattgagttattttgacatgatcaattatacgcaataaattataaatgatttgactaaattttattgaagaaccagaagattctttccatgattaatttataaggctcaaaagaagaatgtgcatatattttgcacataaaaaaagtgaacgtacattttaacattttcttttaattttaaaaataatatatctataatttcatttagttttttattatcctttgtaccgtgacgtgacattgagttggatgacacgtgtcctacattctcttacctgggcggaagaaagtactcctagcagcctaccaaggttgatataaatgtctatcgtcagcatatagcaagatgtccgagcaaaataatcaagagacatccgaccaaagtacaatcttgtgatcaacccacatgcaccggacataatatgtgagttggcaattttagagataagtctcgccgtattcaagacacgaagataacccctatattcgtgggattaggtcaagaaaaaatgcaatacgccttagtttcctattctttacattgtaatcatggaattaatatagtttcatattttatttattatagattaagggaaaccactcttcatgtaataagctcctataa

SEQ ID NO: 55022 - DNA, 1090 bp, Cannabis sativa
aaaaaaaaaaatgaacacacaataaattaataaatatataaaaatgttactgcgtgtatgtataaatttcttttaaaaattgtacctgttttattttttttttctctttaaaaaactgtatgtttctactaaaataaatattccccgtaaaagaatcacataaactataaaaagttattataacatttagttttggagacataattaacatttagttttagagagagaattaacattaatatagaaaaagaattaatggctgacaaataacaaaagaaaacaaacggagttaacaagactttggtttgttcaatgtctatttggcattttaaatgatgtggccaaatttaactggtggggacaggaatggaacaggtaaaatgggacaggtgatttttttcctggggtccaagggtgatatttaaccagatttagaatggtcagaacgccagtggtatttaattttgtgagttggcagaaagctatttttgcactgattaccaacttaacgggcccatccattttatggtgagggtgaggtgaccctccagcctggtgggttgggttgggtttgctttgcttcccgctacccagaccgtcgtttcctctcttcaaaaccacattgattttatctcaacttaaataacccacgaattcttgataaataatatcttttcacaccaccaaatcgaccatgttatgaaatgatgagagacaaacccagtcctgtcaaaatataatataatatagtaaaaatattttaatcatcactcactaaaagtgtcatcatttgtttatcctttacacagagtaaatcttattatttgtttgttgctgaaaaatctagcaacaacaatatcgtcattagaagctatctatacgaaaagatcgcttttagtgacgatatatattgatcgtctgtctacctttgtataaaatcttttgtatttatgatttaattttcaatagttttgttcacaagtgataacgatgacattttttttcatattatttgtactagtaaacaatactacgcgttgcgcaataatagaattgatacgaaaaaataatagtacagtagaacctctat

SEQ ID NO: 55023 - DNA, 3333 bp, Cannabis sativa
atatatatataagtacgaaaatgaaaaacaacaacaacacagtctaagagaccaaagagacaccaagaaaatgaaaggaccacaagttacataaattacacgtacacacacatacaaataatttattaatgaaaccaaagagtacaatacctttcttctaatttctcaatcaaacaaaaaaaataagatatatttatcaaatatcataaatattacattaactaaaagaatatagagaacacaaaacactacactattatgatttgataaaaaaattgtggaaaaaaataataccatgtaataaaatcaatggtgatgaatggatcagtaacattaaggagttcaacatcattcccctactaagcaaccctagccaccaccctactgaatcttttagaataccctacaaagataatttgatgaaaatttgaataccccatctgttgagtaccccaatcttttagaattaattattttctttaccttgttgatcaagccattgcttctcttactaaaagatttgaacaatatcaagaatatgaaaatatttttggtttcttgtttacttctcacaagttacaatcgttaaaatttgaagtcttgttgttgtcattttaaaaacacattgagacataatgaacaatctgatattgatgggaatgaattatgtgtggagttgaagctattaagacaaattttgccaagagagaaaatgagagctatcgacatattaaagtttttgaaaggcatagattgttttcctaatacaattattgcatatagaattttgttgactattcctgtgatagttgttctgcagaaagaagtttttcaaagttaaagtcctacttgcggtctactatgttacatgttgtggttaacaatcacacagaggaggatcaagaacataagacaccaagcataaacaacaaaactatgacaagaactagttcgaattcaaaccagaaaactaaaagttaaaaaacagatgaaaaagagagatggaaaagaatggctcagcctttatttcacttcttgatcaatagcttgagagcattacaacttgggacaaaaaatgaactgaactgtacttgagatcattacacattataatacttgacaactaggctctaagctagcaaaaatcaatatgaaaattgtatcaagaagagttagttattatagttacacgggttgtgtatttatatactaaccaacataactaactgaactaacaaagtctcacaaacaaatgaggtaatgccaagtgtacaaggctaagtgactagaccataaaaaactaacaaatccaccttggtatagccactaagacttgaacactttgaaagagagagagtgagatgcagagccatgagagagtagatgggaagttcatccaatgtcactaatgttcaccagattcatgcagtgactgaattttgcttgagtgacacatttgataaacatgtcagtagggttgtgatctgtgtttaccttctgaacttgaatctccttcttggcaatgatgtctctaatgaagtgcatctttatgtcaatatgttttgacctttcatgaaacaagtggtttttcattaattgcagtgcactttgattgtcaatgcactgtcatgtctttagatttgaatcctagttccttggtgagaccctttagccatatagcttcttttattgcatctgtaacagccatataatcagcctcagtagatgatagagctaccaccttttggagatttgatttccaacttatacatccacctagagctgtgaaaacataacctgtgagagatcttcttgtgtctgtgcaaccagcatagtctgagtccacaaagccttcaatttcacagccttctttcttggtggccttatagattaaaccagtgtttaaggaccctttcacatatctcattacccatttgactgcatcccaatgcttgctgccaggataatcaataaacctactgattatgctcatggcataggccaaatcttgtcttgtgcacaccatggcatacatcaggcagccaacacaactggcatagggtatgcagtccatgttcttcctctcagtttcaatctgaggtggctgatattttgagagcttgaagtgttgtgccagtggagtagcaactggtttggcctcattcatcatgaatttcttcagcactttctgcaagtatttctcttgacaacatgattacaccaggcctctttcttatgatttcaattcgcagtatcttggcttctcccatatctttcatctctaaaatattcaccttttagttgatcttttaacttgttgatcttgtgtctgtcctttcctactattaatatgtcatcaacatacaataataggcaaaggttgccatcaaaatagacacaaggatcataacagctcctggtgaatttgatccttgccatgaattcatcgaaccttacactccactgtcatggagcttgcttcaacccatatagtggtttgtgtagcaaacacacctagtttggatccccattgtcacccttcaggttgcttcaagtagattttttcattaatatttccatggagaaaagttgttcctacatccatttgatctatctcaagatcttgatctacagccttagccataattggctctaatggatgcttgttttactactggagcaaatatctcattaaaatccacaccttacttttgagtgtacccctttgcaactagcctagctttgtatctcacttcttcagtacctggtagcccttctttttgtctaaacaaccatttgatgtcaattaatctatgtccctgaggtttgatgacaatagacaaggtcttattctttatgatggatgatttttcttcatcaatggatttcagccatttctccttgttgttgctttcaatggattctttatatcaggtgggttctgagttttccaactcatttgcagcagcaagagcaaatgtagactaatctgcaacaccatatctggcagggggtctgatgcttcttctgcttctatctctggccaggatagtcatcaagctattcttgagcttcgtgggtgtcagtgctgtcatcttgagttggtatttcatctgagttgctaggtggatccacctcaatgttcagcttggaagagttgctctctatgttgagtgtagggactgttaagggcttcattgccattttttcttctctgaatatcacatctctgctgattatgaatctattgaaacctagttcaaggcaccatagtttgtagcctttgacacaatcagggtatccaagtaacatacacttcaaggctctaggttt

SEQ ID NO: 55024 - DNA, 1527 bp, Cannabis sativa
  modified_base (50)..(55): a, c, t, g, unknown or other
ttttagaattcatattaggttgttgatccaacatacttgttagtaaatcnnnnnnctggtaaaataatttccaataacatattcccattgagagcattgatgactactctaaagtcgctctccacgatgacaaacttggcaacaaaatccaaagcaatagaaatagccaagcagcaagccgccacaaagagcatcagaaaagtcaagacaagccgtatgaactcgaaccatctcgcctaagtggttcctggcaaccaccgttatacacatgctatcaagccccactttaacatcacaattcaatttgatccaatcctcagggggggagactagcactccttcaggcaagggacaggggaagggaaaatagtagcatgtaattctgcaaaagaaaatcgaatagagtcaatgcacttcttcacatctaaagtgagattattatgaaccttctcatttcgagagcgccagatggtgtcgaccacaattgaggcatacaggaaaacctcttccacatcaatccccttatgtttcaagtcccaaatgaatttgacccagtcccacatccggataccagtatcacagatcggataaataccccaaggagaagatcgccatacatggaaagccacatcacaagtaagaaataaatgttccatagtttgctcctccctcccacacaaagggcatctctcctcctcaatatgaaatcttttcctaattacagacctgacagggagggcattggagagaatgcaccaacaaagtaccttatgtcgctccaaaactttactgttccaaagcttattccaaagtgagggagcaacctcacaaaagggggctctttccaaggcccgagtaagataagcaaatttacaggagaacctcccgtccttctcaagagtccaaatccacttgtcttgacccatgccagagggagcaccgcctcttaaaatcgtagaaacagtctcacgatcaaaaaggcaattcaacttgtgactatcccaacctccatctatagaaagcaactccgcaacaagtctgtggtccctggcaggagacccaatgggcttagggaggaaattcttcatgtgagggatccaaggatcctcccaaattcgtgtatccctcccatccgccaccagtttgcaagcacctttccttaagatggatttggttttaaccacgtttttccaaaaccaagaattagattctttgaaaccacagttaaggaactcttttcttttgaggtatttcgcttgaagcaccctacaacacagagactgacttccattgaggatgttccacccccacttagctaaaaaggtttggttcattcctctagattttctgaaccccaggcccccaagagattttggaaggcaaattttatcccacacttttaagtaaatctcgtgattgtctttctcaaaacctcaccaggaggcacacaccatattgtcgattttgatagccagacggttggagagtttagtagtttgcatagcgtacatcggcatcgacaggccc

SEQ ID NO: 55025 - DNA, 719 bp, Cannabis sativa
tcaaataactccctcatctgacggcttccgtacatcacggattaaaatccgtgaaagtacaataacgagacaaaatcatatccctatatatatacataaggaagcaattcttttgcacgaagatcatgtttaattaattagaagtattgttattttgtgttttaagatgtttaatataaaattaataggatatttcatatcaattaacagtttataatattattattaaattaaaatatataaatacaatataaaatacacaaatatggccgtctcagaacaagtattcgtgtattttgccagtaatactggtttcaatgtgtattgtatgttaggtgaagctatttataggagttagttacttttttgttatttccgttaggactgattagttcgtggtatgtcgggttatgacagttggtcattcactatttatgtactctgtagttcttcattgtaattcattcaagacaaaccatcaataatatttttcttttttgttcactctctaatccgcaatatggtatcagagcggggaaaggaagactttcccacgatcttgacccttattcttcatcgatgtgttctttccctttggcgatcactgcagcagaattggtgtttctcccatttctgtgtgctctgttcttgatcaagtctttcttcacttgatcattttttgttatgtcaagtgacaatcagacaaatccagctgtcac

SEQ ID NO: 55026 - DNA, 873 bp, Cannabis sativa
gtttttatgtatttttataaaaataccaaaaaaacaaaaacttatacaaataaaaaatgccctttttggaatgggatttgaaattttaattttcatatttgagtaaaactatatatgtagattatcattatccattcaaaaaaaatcatatatagattattaaataaaagaataatgatatttttattttacttttttatctataataaatacggaagtaatttcgtatttaaattcaatatcccaatagccaattaaaaatcatatgactttcttttcctttgataatcaactccaatcatccaaatccataatttctcgatcttttttttgatgtatctttcttttttttttttctttatacagaaaataaaaaaaaaaaaatctacgaaactaccttttaaatatatatatataaaaaaaaaggccctattataataaagtctgtgattcaacaaacctgatttttttcaattaaatatatatatttttgtaatatttgtgtataaatagctaacggaaaatagtaagaactagaaataaaattagaaaggttttcttttttcggttcctttaaactttctatatttatttttatttttgagacaaacaaattatatataaagaatgttaattaattatataaacaaattattaggttgcaaaatcacaaaagatttatttattataggaaagattgcaatataaatatcccttgttttattataaataaatgaataggtgtttagggtgatgatgaaaatgggtggaggtaaatcctctattttattatttttctatataatataattgaattggatgatttgattgattatttttctgaatctatactcaggtagcaatatggatcaa

SEQ ID NO: 55027 - DNA, 1046 bp, Cannabis sativa
gtacttcttctacctttaatatctctctattggattctctataaactcttgtatgagagtggaaatttcttctgcaacatagaaacatagaaagtaataggaaaatgaaagaaaatacaatgcacacaacactgctgataaggaatctatttcgaactcgttcacttcttcctttcgtcacccatgttgttggtgcctcagaactttgattgagcactttgaccatggtcactacatcgctatttccctgatccggtttggcatatctcaatggcaaccttagtttgctgcatgtgttggatttatacatagaaatttcgcattgacaatcattcaagcaattttgttcacaatcaatcctgttgttctctggtacaatagagtaggagttgttttcccacaaaaccttatcaaattccacaagtgaagccttatattgataattagttgtgcaataatctatcttactctttctttcacagcctaatcttttctggctttgatcaatgaaatcaagaccaggaaggcatgtacaattgggttgttgattttgatcaagaacacaatatgcattcatgccacacaatccagtaggatcacacctattgttagtcgaattccattcgacattccagctgctattgacctgaaccaagttgtgagaatacaatcttaatattccatcaacatcaattgttagacgaaaggtaacatggttcatggggtgtatccaatttgcagggtgaagtttgtatacactagctttgcttgtagagttgagtagctctaattggccattgggacgaagactcagagtaatttttggtggtactttccaataagttccggtgtcccagtaagcatgatattctaagtgatctttcattgcagggtatagaacctaaacaccatcagtctgcatgataagttgaaattctccggaggagtcatttgacatggagacagctgagacaagctcttttcctgtctccaaaatctgccctgacaaaagggtatctgttggattctcaaaactctgccatatg

SEQ ID NO: 55028 - DNA, 520 bp, Cannabis sativa
tcaaggacgagcaaagttcaagtgcgggagaactcgataagtgcatatttatctattaagttgtgttattttccctcattattattattaaagtaaatctttaaacctttgattagttttattttgttttttttagtatttttgaaagctaatcatgagtttacattattttggaaggattttagcatactttggtgaaaaatgtcaatttttgagagctcaattttacatggcagaacttggagctacacataaaagttgtagatctcgttctcagctttttgaaacatcttgaatcatccaattcctagttatactgaagaagtaacggttaaaatactaatctgaacaatcgacataattttttcagcgcgaggctcttgccacagcgagcttaatcttttatttaaatcaaaggatttttatggcgtataaaataggacttctagggctcgtttggtagccgtattgtaatgtattatattatattttgttggattgtattgtattgtattagtat

SEQ ID NO: 55029 - DNA, 839 bp, Cannabis sativa
  modified_base (666)..(675): a, c, t, g, unknown or other
atatattaactaggaaaatgttagaatccaaaaaattagaatattactattagtataatttaatattaattttttttatctttgaataaatttgtctttttttcttacatatataattgatgcaatattcgccttcaattacatttatattagaataattagtatttttctctttaaacttttaccactacttaattttaccccttaaaatatgaagcttgttattctccctaaaatataacagtcacataattatgtcccttcaattatgttccatttcttttaccattaaaaattagtatttttatcccccaaactttgaccaatacaaatatttgtcccctttttattaaataaagtaactttaaaaattataatattctattttttaaaagcaattataatattttattaattctaaaaaaaataaataaatattaaaaaacttgataaaaatattaaataattttttttgaacataaaaatattaattttacatacaaaaacttaaatttttcctaaataatattttcgaacttcatttcatttaaaacacgtatcttaaaaaaaataaaaccaaaattattcagaatctaataaataatttaaataaattaagatttttttgaaaaaaaaaaattaaacttattaatatttataaactcnnnnnnnnnnaaataaagaaaaataattaaaaattcaataaaaatgcaaaattattttgaaaaagattataaatgaaaataaaaaatgttatgtttactcaaataaatcttcattttttgagaaaaataaaatatactcaagtttgttcccataaaatttagtttttacaaaaa

SEQ ID NO: 55030 - DNA, 1317 bp, Cannabis sativa
ttggttgcattgtactgtaatttaggtatttttagaatgtgttagttgatttggttggattttgattttttggggattggataaatagagattgtttgagcaatatttggttgaaaagtctgtgttgtcaatttgtatatttaaaattttttatttgtcatctatatttcttgttgttgcatttgtggaaacgaatgattaggattttgtttataaaaatagttaataattattaatgctaagtaattttaaaatctgttttgaaaaagattcacatacaacagtgattcatactctattcttccgttttcaagtgtcataattttgtgaaagattaatttatgaatttgttggtgagtgagattcacatcatctaacttgattgggatctttgtttctttgattacatagattattagttgaagtatgtcattttactagggtaattaatagttttgagtaatgtatgaaatggctataaactaagggaaaacgaaagtaagtgaaaattttgtttaacaaattatatgttatcagcaatatcgattttaaaaatgttattttaactactctgttagtgttagtaaaagaaaaaagatttgcttgattaagtgtaatttttatgagattgaaaaattgaattatttttttaagatagtttttaaaaaaaagccgcacacaaattgacaacaatttgttgtcgcatttgttgattaagtttaatttttatgaatgtgtttgttgcatttggttggatttacaataaaaggtggtgtacttttttgaaagtagtaaaaaacaaacatgcatgacacactaaaggccagagtttatacaattttaaaattcaattaggttgtcctgcttagtcacacaatggttatgattagcctgaatgttataatcatgccttgaacatatatgttaaagatcatgtggaattgggtatagaagacattctaggaagttaactgctacggtactttaataaaatgctataaaaacgttaataatttattttttgtaacataaaagtgtaaaaatatatagtataaaaaaaattacagaaaaaaagtagtttgtgtcattttttttttttttttgtgaagatatctcttaaatcttattcttatgttcattcttttcgaaattcaaattttagtctttcaccgacaaagtcactgtgttattactagggttgttttctgatttgattagggaaattgacattgtttataaattgcattttaatcttattttaattttccttttgagaaagtataaataaaacaaaactaacaagttacagaatccatt

SEQ ID NO: 55031 - DNA, 2009 bp, Cannabis sativa
  modified_base (825)..(827): a, c, t, g, unknown or other
aaactgttttgaaatgtaaaaatgaaaaagcccctacatttatatatttttttttcttaaatcttattatttattaattatcaaagtattcaaaataaccatatttagacacacaaattttacactatagtgaaacttttttggaaaaattaaggcaaaagtttccaaactcgagatttttataagtctgttggtccttattttaatagatctgttagttgcatcgaagaatgtcacgcatttaaattacagcataagtccttaaaaaaattattttaatacagataagttcctaatctaaaaaaaattacagttatagtccccaagctcgagattcctgttagtccgtaagtacctaatttaacagctctatttataatttaaaacattactacatgacaaaagtttattgctccacaccataaaaattatttaaacatcatttaaataataaaaaattattaaagcctttttaatttttgtttattaaagattaaaaatattatatatatatataaaaaataaacttttacgattcgccacccacctttctcgatagtagaggcttgtcgctactaagtaccatctcttcatttccactttctttctcgtttccgtcacacgatcccaaaaatatatgtttatatattacttagttatttttgttaaaaacctatcctttatttatattttttttaacataaacttgttttttccaattttttatttgcatattctaaaaatgtatataattaaatttattttaagtatttgataaaatataggtaaaaacttcttaatgtaaaaaaaaaaaaataaaaaaannnaaataaataaaaaaaattatacattactttttagaaaattattaaaataaaataaaagtattcgaaattaatgataaaataaattaaagaattaaaacaaaaacaaaacaaaagtcaatcaactaccttaacttaacttaatattggttgccaagaaattaaaattaaatttggagtttaatttaatttgtaagaaaataatgtttgggaatcgtttatcagatgataatttgaatctgctaagctatatatagctgttatgtacctcaagatttgtgcaaactgataattttagatgtcaatgacagcagtcttacagttcatgtattaaatctttatgtgtggtatatttattattataacacttcgatccatattcatattttatatattcattcagatgaaacaacacattaattataccacgtttcataaagtttcttggctattaattatcactacaaaaagtcgtattatttctaataataacatgtttactaataaataattgagaaatcattctcttacatttatttatttaatttattaaattaaaaaaaaaagattaattaaataaagaaaaagaaattgagaattttttttaactaattttctaaaaaatatcagataatgaattttatttattttattttatttttaatattaaatttataataacaattttatatatcttttcaaatatccctatcttacaaaataactactatgtactatagtttaattcaaaaggctaatttaatcaatttaagcattctcattacgtttcatgataaaataaacaaaataaatcactattattctatttccaaacaatttcaataaacaacatattataaatattgatttcgattattctttatttattctgcatatttcctaattattatattcagattctaaatactgtgtagtaaacgtgccataagattaagagtctttttattgggtactagtagtgcgcaccacttttaataggtgacgctccacaattaatttattttttaaaaattattttcttaggttatatgtgagactcaatacttaattacactaatagcactatgacgtcgagaaatgtgttaggcaccaataatatttttttagcaattctcttccaataataattaaaactttatcattattgttgaccgaggttttcgg

SEQ ID NO: 55032 - DNA, 1059 bp, Cannabis sativa
  modified_base (34)..(53): a, c, t, g, unknown or other
cgctcttccgatctacaacaacaacaacaacaannnnnnnnnnnnnnnnnnnnataataataataataatggttttacataatatgttttaaaatgtataagttttaaaaataattttttttcacattttttgtaattatattatttttgttgtatatttatgagaaaagccctaaaatataaggtttttaacatgttacgtttttagaataaattattcgtatttacgtgtcatgccttttaggcttgtcatgcttaatcctatatttttcgtgtcgtgttatgctaatttgtaatatcatattgtgttgtgcccaagtccatattttttcatgcctaatcgtacttgtacctcttaaactcatgttaatttcgtgtcgtatcaaaaagtccaactcatatttacaaccctcataattgttcactatcatataatattgtttttagaaccttatataattagactaattgtagagacacatgcattaatattaaaacaacttttattgtgtatagttatgagagcctcagaataatttttaatttcaaataattattataaaatgattatttcaaaaaaacataaaaaattacaaaaatatagttttacggaattttaaatatttttacgattttttttttattttatttacaaaaaatacgattttttttttatgttgtaatcttgttaatttattgttgattttttgttatctgtatattaatttttattgttactttgatgttattttcatgttacttttatgtaattttcttgttgattttatattgttttcgtgttatttttcggaaaaccgtaaaaatgtaaaaaaaacattctttgaacgtaaaaatgtaattattttacaaaaaaatggtatcttatataattattcctattataattggctatctatctatcatcatatagattaatggaataagttgataaataccacttttttgtatctattaattaaaaatactctcatattaaatttcattaaaatatacccatttttatgagtggttgcctaattgtaacgcccgtacttttat

SEQ ID NO: 55033 - DNA, 1686 bp, Cannabis sativa
tttgcattaaggaaggggtctatcgacaagcgggaagtgaatcgttgcctgctaaaagataaggaggaatgattacgagcattaagatggcccacgtgtgtaaaatacatgccacatcactccttgagactagaagtaatatacaagtcttatttgccaagaactaaataagacttgggggtaaatattgctctggttttctcccaatatacgtgacaatcccaatacttatgggcacatggcacgtcagactctaagactctaagataattaaaggaaagtcattacataggccaaatcctctcgagacagctcaataactacttcgggagccatgccccgaactggagaggtccgacttaaattcatctccgggagctggatagggtctagctccttcgaatttagggtaccggagatgaactgtcaattggcatttaatgcaacatggagaaagcgtctataaacacatatgagaggacatgtcaaacgccataaacccatccttcaacaattacgtaataatcaagggtataagtgacggctccattatgaataatcacatcaatcaagaaggatgagggcctatcccacctaaatcctatgcatcctattacgtaagttgtgcatgccctacttcgtagatttgggaacttctgcatagccaaggcaagcacttaaaataattgaaacctttcttcttcttaacaatttctataaacacccctcaaccacattaatgaggggaggtcagaaaaaaaaagcagaacattctccgtaagaaatacccaccgattaatattagagactcatggactaagactcattaatgtcccaaccacataaaaatatttgcatttactcttcttaaaccatctttattatattaatgatttaattgtcaaaaatcttagtcaacaacttcatcatttgaattttaaaaaatataatatcactatttttataaatttttttgtctatttaaacgtttttgttattattttagtttttcataaatcgagtcttaatttttcaaatagttaaaattggggaaataaattaagcatttttcgtactttagagataatttttttgtattttcatataataaattatgataaaaatatgaaatttaaaattgttaaatcctgccaaactaaccattattcggtactactttaaattaatacaaaagttaatatattttttataatacaataaaaaaaatatttggagcataacttaatgtagtgatcgtaaattataaaaacaaaaaaaatcataaattaacctaaaaaatatttattaattagtataatgaccgcgcaaaacgcggttatattgcctagtttgtatataatatagaacacaataataatagataataattagctatacgtacttgattaatccatagcaattaccgtaattcgatagtacaatactatcaactaagtcttccttcttagatctctaaatcagaaaaaaatttatttatctaattattaaaagtatacaattgtgataatatgtatttttagagttagggaggggaacttagctacataaccctagttggattgggcatgctcatcaaaaacttcagtaaattagaataactcacacttttgctttaactagactttagacacacaaatgctaagtccattaacaattgatcactaa

SEQ ID NO: 55034 - DNA, 851 bp, Cannabis sativa
gaagttggttaagcattgaggtaaactcttaatactttttcccttgaatttcttgagttttaggttagtttaggttaggttttactaggatttcgtggttgtatgtttagtctaggtttagagtttgttttggtattaattttatgagtgtttaggtttcaattagttttaattttatagctgtttcattttaagttagagttgttgctttaagagtgtaattttggtttaagaatggtgaaatggattggtgattaaattactgtgttttggtacttaaaattgttgtatttgtgatattattatgaaatggagcagttgggcagatgtggttgagttttggttcgagtttggggaagaaaacctaagaattatggtctgccaaaaccggtcgaccggttggttctggtgcaacagaaccggtcgaccggtttgcctacaggggaaattttttttagtttttcctcagggccggttttagggcttgggatgctttctatgtctggtatagattgtttagaagttataaaacctatgttggaactgatggaagatagggtttaccgattatgggaattacggttattcctggaatgattgatttaagttatttatttgaatgttgttgtcgtgacataggacccgggatcgtccagctttgattccatttaagtcagcatgctcgccaaatttttggattgaggtaagaaaagtattaaatactgtataaggttaatgtaaggtaaatgttatgattgttacattttcgattaaaatcgaaatcttgttatacgttgttaacgatatgtattggatgtgactagattatgatcgagggaaatattatgaaa

SEQ ID NO: 55035 - DNA, 894 bp, Cannabis sativa
agatataaaagatcgttgaactgcatatattactcttaaatttttccacccctattagatcaaaagatctttttattaaacagtatcttagtaattgtttaaagaataacaattattcataaacattgaatttaaaattctaggtgtttatgtggaattatctctttgcagagaataatatatcatagattttgcatcaataataaaacacaaacgcatacaaacattttaaacatataaatataattggtattggcatacacaagataaagaaaaatatgaagctcaattcataaatgaaattcatgacaaaatatctttaaacgaaaattttattaataatctcaaaaatattaaatgaattgtctgtaataatttgaaatagggaataaaatcccaaacaaataattgaaataaaattgttcataaattaaaaacaattaattcaaaaattataaaagaagatttcgagcttcatcttcaatcttggacaatctccacccttctatccaaccatccgactcaaattgctaggattgcaatccaagtgaagcagctggagctgaaataagaagaaaacaaacatggttagtagatccagaattaataacccaaggggatattcattctctaaaacacatgagtttatagcatagaaagaaataccttgtttatttgctagaaacttaaggaataggggtttccagtggcccttttcattgcaatagaggcattttccttttggctttcccttgggattagcaatctttttctttttaactgttttcacaacttgaataggcttagccgtaccattagcagtgccagaattaggagctttagttcctcctttctgtggtcctccaatcaaattttcaaatgtgtgaaggttgt

SEQ ID NO: 55036 - DNA, 919 bp, Cannabis sativa
tctaatcttttattgataacaaaacagattagattgtaatgggttttatttagggcataaaatctcaaaatctcaacaattacttatcagttcagtcatgtataatcaaattatacatagaacctttaccacatgtttatctacatatatgattcgaatcaaaatcacagacactagagtatagtgtatagtaaactgcacttagtagttctatattaaagattcatttacattaatacactactaactagttttattttcatctcttgtacatccttacaagattgtaccttctccataataaggaatttttagatatttattaattataattctataataaatatattcacttatcttgtaattgtatttcatatattctgtaatatattatccattaaatgctagcttttaaagcataaatcccaataataggtcggctgaacattgggagagatgtattgtccattgtttccctgtctgtgattaacgtcgtcccttaaatactaattcacccaaggtcttcatgtatggttgttatagtaatgggttggtttggtatatctatccaaggatggatattatgctggccatttcccccaagtaatgagcaggcaaaacttgctcatctaccgtgtggcccatagtttgactctaggaccttggattggacgacttgtttccttgagtttactgagtgtttccagctgagcattcttctggcctgtatagagatctagtggggatgtagatatttttccttcggttcgtatcctgtataatcagagtgtctgccactgatttttgtccaattgtttggtaggcttgcctaatcagcacgacaacatacttggaatggttatcaaatgcctcttgctgaggtctcatgatttttatctgttgatccatccactcttgg

SEQ ID NO: 55037 - DNA, 863 bp, Cannabis sativa
aaaaaaattgttagagaaactaaaaacactctagaaaattttagataaaacttaaaactacttaaattaaaaaaagataattcaagaattatttagagaatgatagaaacttgtaaagaacttagaaatattagaaaattctagaaaacttgagatgtttcttttgtagcttataaatagaggtgtagtgtgtgctaaagtgtaagtttgagcaatagaatttaagtgtgagaaaaagagtataaaagtgtaagagtgtcttagaatcattgtattcaaagtgttctaagtttgtactagtatttttcaataataataaaaatgttgtaactttcttactcaacaaagaatatgcataaaatgtagtctaatttgttcaccaatgctcattgaaaaaaaaagacaatattttaattgtttaaaaatttaaaagtgtatcaagtggagtcatttgggcaatcttttcttttgatcacattggacatgtccttaattttaaacacaacattcaagtgatctaacttaatcataatgtttccatactaaaaagaaaaaaaaaaagcattgaatcaaaatgttacaatacccataacttcaactacttcaaaaacaaaataaccatccaaatgataatatgtcgaaactttaaacaactcccataaaatgacaaaaagatcaattttttcacacacattgtctatagttaattttgtcatagaattcaaactagtttctcctatattttaccctcttatcccaattagctgcaaactattcaagttcttgagcttaataggctttatacaaacacacacacaacacaaaatgataaaaaaaaaatatattttcaagccaaacagatt

SEQ ID NO: 55038 - DNA, 1834 bp, Cannabis sativa
gatttgtggagggctattcaagaagagtggcacccttgacaaagttgttgaagaagggtgttgtatgggcatggtctgataagtgcaaagaagcatttcgaagtttgaaataagtcatgattgaagatcctgcattagccctaccaaatgtatgcaagcccttcgaagtacagacggacgcatcatattatgctttgggaggggtgctcatacaagagggaaaccccgtggcatttgagatccataaactttccaaagcagaaaggcggtatacaacacaggagaaagagctcctagcggttattcattgtttacggacgtgaaggcattacttgttggggtcgaagtttgtggtgaagaaggataatactagtgttagtcattttctcacgcagccaaaactaacccccaagcaagcctgatggcaagaattcttggcagaatttgacttatactttgagcacaaggcaggacgtctgaatcagatagttgatgcctttagccgtaaagcagagttggcaactctaaaggtgttagtgagtatgtcaactagccgggtgggtacactaataaaggaacacatcaaggagaacctggagaaggacccggtcacaaagaacatcatgggtcttgcaagaaaaggtaagacaactcagttttgagtggaggatgatctcttatgggccaagggtggacgtttgtttgttccaaagacaagtaatataaggaggacactgatgagtgagtgtcacgacacgttatgggcaggtcatcaggggtggcataaaacacataccattttaaagcatggatactattggccacaaatgcaggaagatgtagtggactacataaggacctatctcgtttgccagtagaacaaggtggagagacacaagacgctagggttgttagagcctttattggtcccaagcaggccatgggagagtgtctcgcttgatttcattactagtatgttaaagataggaaacttgaatgcgatcttggtgattgtggacagatattcaaagtatgcaaccttcatcccaatgttgaagcagtgtccaacagaagagacggttcaacttttctttaaacatatagtaaagtactgaggagtaccttgaatatgtgagtgaatgagaccaaagattcactaggaccttttggtctgaactattcaagcttcttgagtcacaaatgaacatctcctctagctaccatccacaaacagatgggcaggcagaaatattcaatgggatgttggaggagtatttgcggcactttatcaatgacaactagaagaattgggtgtaactactagatgtagctcaattttatttcaactctcagaagatttctacatcaaacaagagcctttttgaagttgtgaatagacatcaaccattgttaccccacacagtagatgagtaccacggacggaatccacgagccttcaattttacaaaagtccggaagacgaatacagagattgcccaagcatacgtagagaaagcctcacgaagaatgaagaagtgggcagatcaaaaatgaaaatcaatggagtttaaagcaggtgacttaatgttgatcaaattacagccagaacaactgagattttgaggagacaaggacatcagactcgtgcaaaaatatgagtgccctattccagccatctccaaagttggcctagactcttacaaagtcgaacaaccttcttggatgaaaagacactcggtccttcacgtcagcaacctcaagccgtatgatgaagatctagaagatccagctcacaacaagtctacagggataacatcagcattcaatgatgcaa

SEQ ID NO: 55039 - DNA, 1684 bp, Cannabis sativa
  modified_base (709)..(712): a, c, t, g, unknown or other
taaacttggaattattttttattttacagacaataggctgaccaggcaacttttaatcccggtattacatgctttttttatctttaatgaatttcattctctgtttataatcatggtgcaactgtgtttgttttacctttaccaaatgttttgtacaggtataggtgccccccaagtgaccgagcagacttattactcttggtcacttgttttttgcaagtatacttttttatctgtttggggttttgggttcgaccaaaccttttatatgcactggatggtaaattaacaacatgttattaatttcgactcaatttgaattttgaaataaacatcttaattcatttattgatcgaaaatgtgtttattaccatagtaacttacatatgagctctttaatctaatccgatcttttagcttaacatgaaataaaacaaattgcagaaattagaaattgtactttagatgatggtcatcggacctgagtactttcaattttgtccgaacctttgggcgtagtccgcccagcaggccattcacttaaaagtaaatattctttcaatacttaatatggtcatatgaccttgtacttctattggtagtattttcttaaatgttccccattccaatactgtggtactagaacaagttacattttttcatcatacttacccaatttgtatgctcctgattcgagaacttcgaccannnnatatggtccttcccagttaggtctgagtacacctgaggtgctgtctttggtgtttcgaaatactcttcttaggaccatatcacccacaaagaatttctaagccttcacttgtttattgaaatatcgagctactttttgttgatgggctatcaactttaaatttgctatggttcgcttctcttcaatttcatcaagtgattcggccaagagtacgtgcttttattcttgattttacgtcaatcttttgcgggatggttgttcgagctctacaggtagcatagcttcatatccatatgccatggcaaatgaagtctgtccggttgtcattttttcagttgtttggtacgaccatagaacctcagggagctcctccggccaatttcctttagcatcctcgagtcttttctttagtgtatccttcaggctcttgttgactgcttcaacttgaccatttgcttggggatctgccactacggagaaacttttgatgataccatggtttgcacaaaatttagcaaaggactagctgtcaaactgttttccgttgtccgaaactattttgtaaggtaatccaaaccagcagattatattcttcacaacaaagtcttgaactttcttagatgtaatggttgcgagtggttcgactttcgtccacttagtgaagtaatcaaccgcaaccactgcgtactgcactcctccgttgcctttgggtaattgtccgattaggtcaattccccagatggcaaaaggccacgaactttgcaactgagttaactcattgggcggagctcgaggtatcttccaaaatctctggcatttgtcacatttcttaacataggccttcgaatctttaatcattgtcggccagaaataaccttcccttagaattttcttagataagctctgcccgacggtatgatttccacaaaatccatcatgcacctcagataaaagtcgtgcagcttcttcttg

SEQ ID NO: 55040 - DNA, 884 bp, Cannabis sativa
catgtttgacacaagaaaattataagagtgttgttctaacagttttagatttcacaaagaaaaacagaacagatgaaatacgaattgacaagaatatagaacacaagttaaacaagattataaaacatgaatggaatagaaacaaaaaaaaaaaaaacacaaaagatagataggccaaacgcgatgatcctaacatgtgataccaaatgatacgaccccaccaacagttttgatgaaagccgataccagttatggtagcctctaagaattctcaaaattttgaggtggaaccgcgacgtaatgcttagttaagcatgaaccttggtatgaagaaagatgccacaaacggtggaggaaatctgtttcataagtaagattgaatgccataaggaatactccttgataagttcgaatagttctctcaaaaacacaagaagaaaagctttcaaaattttattaagaaatattctaattttccaaagtgtttacaaggctttatatagccagcttacaaccaagaaaaaaggaaactaaaagaaagacaattttccaaataaaacaaagatagaataaaagaaacaaaattaaaaaggaaagctaccaaaagccttgtaaaacgtgatcagcataatttgggtctaaattgagtctactttgatgagaagcacaaatctttgttctcctttagtgttgattgtaatctcctcttgttttaaaactctattgactaagttgttgagttcttctttgaatatcttggctcgcgacctcatcaccaggccaactggaccttgacttgtatctttagccttattgttctcatcaagtctgagtcatgttcctaggtttgggtttggttcctggtttaggttcgggtccaggtt

SEQ ID NO: 55041 - DNA, 5310 bp, Cannabis sativa
tcgatggaagttgaatgataatgggaaagagcttaaaattggcactcctgcaaaattgttgtggtatattcccccgatccctaggtttaagcgattattttgcaatccagaacattcaaagagtcttgtatggcatgacgaagagagaattaaggatggaaaattgcgtaatccagcggattccccatcttggaagaagattaacgatatgtatccaaaattagttttagatcctagaaatcttcgtcttggtctttctgcagatggaattaatcctcatagttcaatgagtagcaataaaagttgctggccagtcaatcttgttatttataaccttccaccgtggctatgcatgaagcgtaaatttgtcatgttgtcattattaatctccggacctaagcagcctggaaatgacatagatgtgttcttggcactattggtggatgatttaaaacttttgtgggatgggatcgaatgttatgatgcaagaaaaaatgaaactttcactttacgagcggttctactatggacgatcaatgattttccagcttacggtaacttgtcgggccattgtgttaagggatataaagtgtgtcctatttgttcagagaatacatacggcattagattaacacacagtaggaaagttgtatacttgggccatagacgctttctacatcagtctcatccattccgaagatacaaaaaaagaatttgatggcaacatagaagacaaaattgctcctgctcccatgactggtttggaggtgtttgagaaagttagtaagttggtaaatcaattcgggaaggaggctccaaatgtaaaagaaaaagaaaacatgaaagaacaagaaaaagggaaaggaaaagtaaaagggaaagggaaagggaaaggaaaaaggaaaaagaagaaagttttaaaaattaaaagaatccccccaaaaaataagaatgtgattgaagatgcttgttggaaaaaaaaaatcaattttttttgagttggagtactggaaacatcttttgttgcggcacaatcttgatgtcatgcacattgagaaaaatgtttgtgaaagcataattggaactttgcttaacattccaggaaagacaaaggatggttttgcagctcgacaagatctattagaaatgggaattagaacggatttagctcctcgtgttaaagttggtgaaaggagaaagttattaccagctgcttgttttaatcttacaaaagatgaaaaacatcaagtgtgtgcgactttggccaatgtaaaagtcccgtatagttattcatccaatattcgcaacttggtgtcaatgaaagatttaaaacttattgggcttaagtctcatgattgtcacgctttaatgcaacaattactccctattgctattcggggaatatctcaaactcatgttaaagctgcaatcaccagactttgttttttctttaatgcaatttgtgccaaaactatcgatgtatcttctttgaagccattacaaactgaaattgagtttacattgtacttgcttgagcaatttttccctccatcttttttcgatataatgcttcatcttatagtgcatttagttagggaagttgagttaggtgggcccatgtatatgaggtggatgtacggatttgagagatatatgaaaatattaaagggatatgttcgaaatcgtagcaggccagaaggttgtatagttgaatgttacattgcagaagaggctgttgagttttgctctgaatatgttagtaatgtcgatgcaattggtatcccgaaaccaatatctgatgaaaacactagtagaggagtcggtgctggaactcctacattcacaaatgatgaagaaatttatttggcgcacataaatgtactggagaatacttcggtggtgaaaccttacattgagtgagcactatattaatagttatatagatttcaatatatttgcttattaaaatatcaaataataactttattgtatggtatacagtgaacaccttgaacacttgaggagtgtcaacacaacaaggagggacaagtggatacaagatgaacatcataaaacttttgatctttggttaaaacaaaagattgaaaatgagcttagaaccaaaactgtgccagaagaattgaagtggatcgctaaaggaccaagaaacatgccaataaagtacgagagttatctggttaatggacgtcgttttaacactaagtctcgagatgatattcgagttaatcaaaatagtggagtctcaattgttgcacagacaatgatggtttctagttctaaagataaaagagccgtgtatggagacatgtcatattatggaaccatccaagaaatatgggagcttgactatattaagtttcgagtggctgtgtttaaatgtgattgggttgatagtaacaatggattcaaagaggatcgaatgggttttaaacttgtgaatttgagtaaaataggccacaaagaggatcattttatcttagcatctcaagcaaaacaagtattttacataaatgaccccatgaatgatagttggtctatagtagtgtccgccgaacctagaaatataagaacgaacaatgacttagtcacagaggtcgacgacattgaagagctccaaataattgataaatcatttattgatattgatggtttggatacaagagaaataacaacggggtcttattctcgagatgatatggatggcatatggattgaaattaaataaccaaattaaagtaattgtgtaactttatattaatattgatactaaaagtgtttctaaattcattgctaattgtactcatacatttaatgttcttatgcagagatacatggcaaatgatgaaagtgacacacctgtggaggatagcgcacccaatgaggataagcaacccgaaccaaagaaattacgaggtccatcggtgtgtaaagaggtccttaagtggcgaagtcaagggttaaaagttcctctaaaatggaatgaacatggtcaaccgattggagatcattgtaggatacttcaaacttatcttggccaccttgcacgtacgatggtgcctataaattttatcgattggccaagtgtttcagacacagtattgagtaacctatgggatgatatcgaggtaaaagtacttccatgtagctacattttttttaacatgatgaattgttcaaactttttttcattaagatgcattgtttacaggagacatttgtagttgatgcaaattgtgatcaagcttttatttttgagtctatcagccataaatggagggatgacaagtcatatttgacttcaaatatcatatatgcctacttagaaaatccagaatatgcgaagaaaaatccgactgcattgacagagccaccaaaaaataagaatattacaaaggaacaatggaaaaaatttgtagcttcccgaaataatcctgaattcaaagtaagttttattttaatatttcaatttatatatcttaagcataattgcaatgatgattatttttgtttcaattatttaggcgatgcgaaaggcccaacaagagagacgttctaagcaagaatatgttcatcgatcagctcggacgttaatagcgcaaatagaggacaagatatgaaaagagcgtcgtacatctaagcccattgaccgagctgtactttggaagcaatcttgaacgaattctaaaggagaatttttagatgaatcaacccaaaaaattggtgaaaagattgtaagtaattatattaactaattaactaaaatatatttgatcttttgataatcatccaaactaaagtaatcatgtttatttgtccaggatgaactacttcagaaaaaagcaagtggtgaacttgttgtggttggctcaaaatgatgttcttgcccaagcattagataaacccgagcaccctggtcgtgttcatggtaaaggaatgtctgtgtgtcaaagagaggtgttcaaaaagcctccaaggagcacttacacacaactactagaggaacgactgcaagataaacaagaaaaacaagaaattaaacaagcattgaaaagcatggaggaaaaatttagttctttagaggcctagtggaaaatgatgacaagccaattctctcaagctcaatcgaagaatgcagatgacactcaatctcctcaacctcaatcgaagaatgtagttgatcctcagtctgagaatgcagatcacactcaaccgcctcaacctcaatcgaagaatgtagttgatcctcaatctgagaatgtagatgacaatcaacctcagtatgcaaatgatgtccaacctgggcatggaaataaacatcaacttgatttagttgatgatgatcatattcactcctttgacgatattcatactccagactcacaggttatcttttagacaatcaattatcgttgacatatttgtatttgataatattataaaacaaattaagctaataaatgatcattgctttattgaacatggtcaaccttgcagattaactatagaatcatcacacaaagtagttgcaaaaggatacattatcagtacggaatctgtagatacaattcattgtcaaaaagttgtcaaatctctacgagttcgaatatctgaagttattgatgccgatgcgaagttaccaaatccaatatcagatgagattatcaaagtaggagatacatttggcacttttctctcatgaccagaacatttagtcttaaaaggatttgatgtaatatatatatatcttaattttactacatgttagtcaattgtgtcactttctaatataattggtcatttgtagacactatcacgactaaggattaaaataacaagccgaaagaagagccaagtttcaccaatagcacctacaacccaaccgcaaggtcaagagacattaccatcatcatcatctagtgtaaaaacatcaagtatgaggcccaatgatatcaacattccaagtcactttcccaaaagtttgcttacttgggcaaaaatgacattgaagcaaaaaggttctttgacgtgcacaattacagtgcctgaggatgtctttggaaaattaccgtcacccatttatcttgatagggatgatattacacagcttatacatcttcaagaaatcagtccatgtgtcatctcactatatatgaggtaaatatatagggttctatttaatttgttcgttacttataataactataattaatatgttcaaaagattatgtagaggcctatatgacgaacttgtcaagttaaaaatttctcaacacactttgttcatggacc

SEQ ID NO: 55042 - DNA, 616 bp, Cannabis sativa
tataacatggcatagcatttacacttaattatcactagggtaataaccctaggccattaagtcgctcatgttagaggaataaccctaatctcggtttcgaattttactcacatatatcattttcaatataagtgtcgccgtgcataactctacgtgccaataactgtcttacctgacgtcttgcaaacgtggagattccaaatccccgggtgctcctaaccaagtgccgataatcctactcataattttcgtgatttacaaagatagggttaatccctaaatccacttccacataatacaaaattggcattcaaattacagatattcacattgatctcaaaacgagctttccaacgatatataaaactcccaaaacggagtctggatcacaaagttatgaatattcaaaaattgcattcgaatctacccagaaacaaggggcgggccgcggcatccccacatgcggccgcggcacctgggtttaaaacctaggattttaacagaggcgggctgcggcacccagaaagctgggccacggccactaggtttcaaacccaaaaaatcccaatttcagcttcgaaatttcatgcccaaacacacctaactcaagccaaat

SEQ ID NO: 55043 - DNA, 1234 bp, Cannabis sativa
taaactaaataataaaataaataataaaatttattataaattaatataaaataaaaataaaatgaaagacaataaattaatatgataatgtatattattaaaaaaattaatgaataaaacacccaataaatgaaaaagtcaataaatattaataaacgtcaaatttgtgatttcaaaacattaatgaaaattttaaaattaaaaggaaagtcaaaagtatctaattgataaaagttacagaagaggaaagaataaatgagaaaaataaatatctgtaatatataaaaatttaatgtaaaaggaaaataaaaatagtttaaattataattagagttaataatgaacacgttttgaaataaaatagtagcaaaactaaaaaataatagtcaataaaataattaaatttaaatcaataatactgagatactgagataaagatactgagatagtataattttacacaacctattaatactgagatactgagacattataatcttacacaatttataaatacaagtcaatgaatataatattgtattaaataataccaatataatctaccataatactatattatacaataaaatatggtgtaccagtgagccctaatttttgaataccttcaatactagtggctttttcttaactgcacattagaaatagaacaatcatatactagcataatctaagaactatacttaattttcttatcttgagagtggagagaagaaagagtatgcaatactagcttttaaaaccaagacatttaaataggtagctagttcattacaaaaaaatcgattaattacttgtgtatttttgtcatcaaactttttgtttaagttgttaattgtaataaatataagggtatttttttagtgtcttaaacatgacacatataatatttaaattttaaatcattgagtctgaacaaaaattcatggtatgaattacttctgaatcttcttctaataaatattaaaacagagctaggtttgtatagacaaaaaactataggtaaaaattataattttattaacattgagtacttatgccactagaaacaatcattaaatttgcactacttacaaactcaaaactttaatcactcatcaattttctccttaaatataactacatagagagttttgccgttgatactttttacataagtagtcaacaaataaaacagataaaaactataatgttataaaataatataatataatat

SEQ ID NO: 55044 - DNA, 1239 bp, Cannabis sativa
  modified_base (286)..(290): a, c, t, g, unknown or other
tatatattattattgaagatggtggtgttggggaatattaaaggtggtaataattttattaaaaagttgttggaatgtataccatttggagcaatggtgacaatggagggttgcactatcatcttaaccatttgggctaagacagttatcactaatgggatgagtccattcgtttttgtggtttacacacatgctctttcttctattttcctcttacctttttctttcttttaccatcgcaacgacaagtacgtattacctcttattatctctctctctctctctnnnnntatatatatatatattgtaattgttttatatattattcatgtattattgttaattgtttgttaataattttgtgcagaactgatgaagagccaatattcaacttaaacttctttctgagaatcttccttctcggattaacagggttagttatatatatatatatactgtattcatgcacgtaagctagctagctctctagctagctagatttcatgcatgcactataaatcatcatgaactgaaaatcagctagcatagtaatataattaatgggaggaaattaaacgtgaaataatgtgatgatgaaaataaattaacctgtacaaattaaattgacgttaatacataattatatagagcttttttttgatcaatttgagtaaaacactttgtgttattattctttggcggccccgttcatggaatagtggcataattagatagagaatatacataatacatgtgattattattccagtaatatatatttgctatagtctagtggattggattccattaagatcttaattacttatgaatattctggtatatttatatcaagtgatatcgtgaacctttggacccatgccatcgattaatgatttttatatttagctgagtaaattaatcaccatcgatagatttatgcttttttttttcttataaatgaggacaaaaatgtatcaaaataaaatattacatctagatctaggtgtaaaattaaagttaaatagatattttcccttttttatatgtatatatattttactaacaatttagatcaatattaaccaaccttaatatttatataagtaatgttagatacatatttaaatttcaatttcacaatcttataatacacatgtataaaattagttatttatattattaggaagggaccacacgagttaattaagattaatacacattgttatttatatgacgtca

SEQ ID NO: 55045 - DNA, 1139 bp, Cannabis sativa
  modified_base (32)..(38): a, c, t, g, unknown or other
aagagtgttattcgtgttctttggtttgttannnnnnnctacttttgggtcagagtgatacgtacattcactactataaaaagtataattcacgtcggttttaaagtgtcatttaaagaattcacgtcggtttataaaactgacgtatgtaccgtagtcgcaaaaagttttttattagcgtcattttcaaaacgatgcaaaaaccaattttcgacatttatgaaacgacacaaaagatttacttttcccttttatcttatgcgtcgatttagaaataacgctaaatagtttatgacattttaaaacagtcacaaaaaccttattatgtctgttcaaaaatgtcatatctattacgaaaatacttttttttttcaacatattgtgtcacttataaaatgaagcacaaatataagtaatggaaaattgtaaattttttatgcaattttccctacctgcattatcaaattttagaataactctatataatagtaaatacataatacaaaaaaagttaaaataacatttttaaaacttacataaattagtaattgattttattaactaatcacacaataccgaaattgttaatagaattgatcctaaaatttaaattccatgtatatcgtaacctaaatataaactaattacatatgcaaaagatatcaataatcatgataaacttgttactcatgtattataacaaaagtagtaaccttaatacttaatctataatcaaaggcttcacaaattcggcccactcatcccgtactgcattaatctcctcgttactatagggagcgtctaacttgaactgtaaaacaaaagataaaaaaaaaacattaatcattattttaaaagtataattaaaatacaaactaaataaagaagagttattcatgtttacatgatttttcaaaaaacttgcaggattaacaaccgtcatgaaactcttgataattttcataacataataaccacattgtactccatccggctgctgtcgacatgtggattggtttattttattggacccttatttcgtatatttttttagatcctgtacatgttcacatcactaaacaaaaaagaaattaattaatgaattgatttgtaacataatctaaatttaaaaaattata

SEQ ID NO: 55046 - DNA, 1580 bp, Cannabis sativa
  modified_base (405)..(405): a, c, t, g, unknown or other
tcacaataactatatatagaaaaagagccaccctagctatcgaatatatacttaatttgtacttcattatatatatataaaacatagctataatatatatttttcttaaaaaaaaaaattatataatttataagagtattattattggacatcaaggctctctagctaacatcttttaaacgtaaattgttgtaattagctaacgatacttcttaaaaattattacaatattattaaattatatgagactttatatgtagttagaccaatatcgatattaatacgtatgagggtgttaagcattactggtgccttttaaaatctctcaatttataaatgacgcttcatgattggttaatgatatttcttaaaagttattttcttaaattatataagactcgatanttaattataccaataacaatatgacaccgagaaaaattttagacactaataatacctttcagcaattctctatcaaaaaaagtcactcctttcagaacgattccatctagtgtagaattatcacatataaataggttccctctaaagtgtctctagtagattactttcctattatgtccacattaaataaatgcttcaagaaataattatatatatacacaagaaaaagatctttattggaaggggtattataaatatttttctattggaatatatgaaaaattataaatacaaggtggggcaataattgtattgaagtaataaagtatgcattttttttaattaggttatagaatcttgggttataatgattttccatgttgtggcctatatagtgtaattaattatattatatgtgactttatatacatggggtactatagagaggataatattagaacctaataaagacttttttctagatttaaaacaagatatttaaaagttggagtagaataaaataaagtagctaacaatgtggaaaaaagtaatgtgtggaacggtttttgatatatttttgaggattttgagagttgatcaataaactcaatgttatgccttgaattattaatagttttattttcatgataatatataatgaggaattaataagccaataaatatatatagtactacccttagtataatatatcaagatatgtcaatgaaaattaagataatattacattgttttgtgactataattctgaaaattatggataatataatattaaaaaaaattcctaatatctaagctttacatgtatagtagtgaattatgtctaagtatttgttctatagtataaattatagtatatgaacatatatatataaattaaattgtttcatgaaagcattttttttcttaagattgagattgagtagaagaacaagatatcccttttttcttttaatttgtatatggtatactaattattataaaataagattatataatcatatgaaaataattaattatgatgcaaaacgcatgcatgcaagtgatttatatataaaatgatcaaaagatcatatacattttcatatatatatatgattggtttatgtatatatatagaagttggaaggagaaaatttattttttttttttttga

SEQ ID NO: 55047 - DNA, 1308 bp, Cannabis sativa
ttttcctatcactagggtatttccctagaaggacttaggcagctgctagtaactaatcatagaccttttattttcatcaatatgcaatccaaatgtttggagaggtaagtttgggtacaagttgaagttcaacttaatgatctttgaactgcataactaaatatttctccactcttatcattttgcaagatctttaactacttaacttaatggtttttaccattattagaaattcatgaaatttctcaaacatttcaaatttctttattcaaggtacaatctagagtgatcgtcttaagaatttaatgagaactcatatccacccatgaatgtacatccatatgttcgaatacaaataatgatcttacttatgagtggatattagcttctttctctttgtaaagaatgatcttgtcaaaaccactatgaacaagatgcgaattccatagataaataattatggtttgatgaatcttaagtttagttacaacaaacagttcttagaatagttcaagtggattctggtcacagaatagaaaaatcataatccatgattaacatacagttcagattcatttatagaaaatagatattaacaacttgtgaaagttatactgtagtgtctaatgtattttggaaactgaaatttaaaatttctatttggaatctaaaatttaaagtctaagacataaatttataccaaatatttcttgagtaattattcttttttggactaccactactaatctaattctaagtttaagttgcctatagtaagcatattatgtaggagattttcaaagatcgaaggttaatatcatttcgggatagaatatctggaatataatcatctgcaccactcaattttatagaagaaaatagagtgacatcataagcagatgaaaaagctaagaaaaaaactaaaggataatttagattaaaataagaatccaacaatgtcccgtttaggcaagagtgaaagttattcttattttataaacttcttcattgttacatattgtaaacactggtctaagttgtcatttttagggatgagtcaactagatgtcgcatttacaaatacttgtctattgagatctaacactattatattatttaacagatgacagtcctaggggattgtcccattaaaaataattgaaaacaattaggttaaatataaattcatacacaatttggaaattatcaagtaataaagacatgtgaaaatctaaaacaatcatatcttttttaaggtttctgatgtcgcccaattagttacgctgcggtcgcggtagtaaacgggct

SEQ ID NO: 55048 - DNA, 736 bp, Cannabis sativa
cttttgtgtttagacttaggtccataagccatctttaaaaattattacttctacttctcataaatcaaaaacttgaaaagtcatttatattctaattacgaggtggtgactccctataatgcaaaataagattgtgttttgctcttgtatatcctataattacaacatctctatactttggtacgcttgaattacctttaaatacttgtttcttaataaattctttcttatttctctcagcatcaaactatcaagttcttgtatggatgtgtagcaaatgctttaatattgaaggccgattgggttactgattcggttggagcaggttttattgtagcacctgagaagtaagctgtacttgttattcgaatatgatttttcgctttgttcatgggattgtatcttgttccttttcatagaaatgagtctttaaccatctgagcaaataggaagattcttcaaacagcaacatatgtaaaattggtgtactaaaagtgaatatcatatggtggcaaaatgaaagagtagagctaataaataatcaaggaaagcaaatctaattttttccttaattattatcattatcattaagatcataatttaaatttttgaaatgtatatcacatccactgctttggtataggctataaaccgtactgacttatgtgagcaagtttatatatatatatatgaatctctttatggctgcattaatcaaatttattcttttgcagat

SEQ ID NO: 55049 - DNA, 1865 bp, Cannabis sativa
gtaaatttgaaaataattataaaaattcttatttttaagtaaaaacattgtgactaaaagtatatcattatttgtatgttataattagaaagttagcttaaatttattatttataaaaattataatttattatcactaaatatatttttaattacagtatgtacaattattgtgattaaaataaattaattaatgccaatatatatcaaaatactatattttgatctgaaataaattttcgttataactaaaagtaataatatttttttaatcacaaaaattgcatgttagggggcttatgcaaactttttaaaaaaaattattttttgcccccataacttaatatttttattttttgttcccataaattttatatattttattattattctacatagttttattttgatcttaataatttttttcatctctataaaattatattttttattattatcttatataattttatttttatatctcattaatatctttttaataattttttttttgttcccactaaaaatgtgactacacctcaaaaaggaaagagaaaaatcattctatatttaaaatattttgtcactattttgcatattcaagaagttacttgatagattttctttttaaaatgactgtataaagaaaagacatagctataataattgaaaagaaaattattgaagggaaaagaaaaaagaagagagagattattattattaagctttgtaaatatgtggttgcaaacccatgtgagtatcttttgtaaatgtgtggatctccacctttcatctatcccaaaattaacttggttggttttgcaatgtgaactactttgcttaattaacgattttacttattaaaactacttcttgaatagtttgtttaaaaacaaaatacatttataatattatttattgaaaattaatcgtacatatacatatagtaattaatttggccatatatatatatataaaaaaaatatatatataatcctcattctatatacaatgaagaaaattaaattggtacttgggaattctcaaaattgaggatagaactcaaggtaacttgaataacaagtaaactttgaacaacttatatatgagaaatgctatttagtactttcctcgttatcatatcactatttgtataattaagtattgagtttcatataatttaatataataacttttagaaaatatcgctaattatcaatagcaaaatgccatttctaaaaggtgttagataatcggtaccttatagcatttgctatcgaatactaatagtgcccaacaccttcaggggcgtcctacaattaattagttagttatattttttaaaagctatttttttaaattatatagacccgatacttaattacaccaatagcgatataatttgttaaaaaccatgcatgtattatagcatttctcattttagaattactaaaaggcactattagtacccaacaaagcacattcaatgacgtcttacgattagctagttatatttcctaaaagctattttcttaaattatatatatagactcgatacttaattacaccaatagcagtatgacactgaaaagagtattaaataccatgcatgcattatagcatttctcatatgagaattagtgtttactgtctagcaccatcttcagtgtcatgccatattggtgtaattaagtatcgagttttatataatttaagaaaataatttttaagaaaattgttaactaatcataagacattacttataaaaaaatattaggcactactaatacctaatgacaatattcttccatatatatattcaatgtcatctatatgtggcaaaacaacaactacttaccaatataa

SEQ ID NO: 55050 - DNA, 586 bp, Cannabis sativa
gtaatgggttttatttagggcacaaaacccaacagttttccacctcttaatcttgagggcagcagctactgaaggtggttcacctgaaaataaatcatcagaggtgctaacataagctttgggtttaaatataccagccttagcacgggttatcatgggatgtgacccctgtgttcgaggcattgtggaagtgacaccagcaggaggtattgcatctggtgtgttgtttataccagcagcagcagagggagataatgtagcattgggactcgatatatcaggaacaatattagcataatcagtaatatcattgctaagattaatagatgttggagacctgtcttgttggctgggaagagacgactagtcaggagaggcaggtgctacaacatgggatgctcgatgagtggaagtgacagcagaaggtgttgaactgacaggaaaatgaaggttaggcaattgtgactaagcttcattatgaatgattaaggactgttcaacatcataagtgtttaggaagccatttttaaaaggaaattccttttcattgaaaataacatgtcttgaaatgtaaattcttcctgta

SEQ ID NO: 55051 - DNA, 1508 bp, Cannabis sativa
  modified_base (647)..(660): a, c, t, g, unknown or other
gattttttctgagagtaaaagtattatttttcatacataatttaattttttaacaacaaataaataaaccaaataattcataataaatcaaataattgcaagaacattatcagaaaatttgctgtagatttagagacataccaaaatacttgagtataattgggttgtgggttgtgaggagtgttgtaaaacactgtgtattttttttcttagtttccctaaaagatttccagtagattttgagacgtaccaaaatttgttatcttatttgtgtgtgtgtctatgtgttattcccgccgttatttaatctcactaatttgattcaaaagaaaatttgcgtaattttcttaacaacttgtatcagagttgtggttataaattctatccagaagttagatttgagttgtagcaatggccgcaggcgtaggaacggtgaaacttgagatatttgatttcgcagattttggattttgtaagatgcagatcgaagactatctataccagaaaaagctctatcaacctctctcacaaaagaagccagagggtatgaaagatgaagaatggaatcttctcgatagacaagccctcagagttattcgattgacgttgtctcgtaatgttgctttcaatattgcaaaagaaaagannnnnnnnnnnnnnatggcagcactctctaatatgtatgagaagccatcagcctcaaacaaagttcttttgatgaggtgattattcaatttggggatgacgggaggtgcattggtagctcaacatctaaatgaactcaatactgtcacaacctagttgagttcagttggaattgagttcgacaaagaagtacaagcattaatacttttgtcttgtctaccagagaactggaatgctacagtcacagttgtgagtagctaatcgggaagcaataagttaaaatttgacgatgttcgtgatctagttctcagtgaagagattcgacggagagagttgggtgaatcatcaacctcttcagtattacatacagagtcaagaggaagaaattcaactagagggcctggccatggaagatcgaattatcgaagtaaatctaaagataggaggtccaaatataggaatccaaataattaccagagctcaaaaccattgagtgctggaattgcgataagattggacactacaaaaatcagtgcaggagtgcaccaaaaagtcaagattggaaggctgaagcaaatgttacttctacatcagaaggtgatgatgcaatgatatgctctctagagagcaaggattactcttaggtgttagactctggagcatcattccacgctactttgaagaaagaattctttggcagatatgtccctggaaaccttggaaagttatacctttgtgatgaccatccttgtgatattgttggtaaaggtgtagtgaagattaagttaaatgggtctgtttgggagctgaaggatgtcaggcatattcccgacctaaataagaacttgatctcagtagggcag

SEQ ID NO: 55052 - DNA, 1133 bp, Cannabis sativa
cacagcaggtacaatccttgtccattgttcccacttttagttttcaaactaatactattccttcatattctaatcatggttttattaattcccctaccactcataatgccacggttattgaggaacatgacaacactgttcatgaaggacaacaaagtgtacctcctattgatacatcacaatcccatcttaccttacctacagtacctaccccacgccccatcccctgtattatgcaacctttgaccacaacacatgacagccggcccacccctatcacacatccctttcctacttgtcctttacctagcctacacactaaaaccaatgttgacaccttacctactccctcaccaaacacatgtcccactatacccgatgcacccacacaaagctttcccactccattaataccttcggccatccccattgtaccattgtgtgataatgacaacccacctttacccaatgtcactatcccaacagctataccaactttacctttgagtgataatgacaacccacctttacccactgtaccattgtgtgatagtgacaccacaactttatccaatgtctctatcccaacggctacaccccatattcccattcctgatcacctcacagccccttctactacaagaactcaccatatgaagacaaggtctttaagtggcatacgaaaacccaaagcattcaatgcaaccaaatatcccttaccagagtcactcatcccatctgaacctaagaacactactgctgcactcaacaatccaaggtggtttaaagctatgaatactgaatttgatgctctaaaaaaggctggtacttggactcttgtcccttactctccttacatgcaagtcattggcaacaagtgggttcacaaggttaaactcaatgcaaatggtactcttgacacactcaagtcaagacttgtagctaaagggtatttgcaaactcttggaatagactatgaggatacattctctccagttgtcaaaccagctacggtaagaattattcttacattggccgttttccttaattggcatgtcaagcaattagatgtttctaatgcctttttaaatggtgcactacatgagaccgtctacatgagtcaacctgaaggg

SEQ ID NO: 55053 - DNA, 1339 bp, Cannabis sativa
ttccaacagtatcaggcgaagggtttaaagatggcaaaatatttggagaaagttcagaagagcttggagaagtttgattattttaagattgaacaaatttcaagagaacacaactcaaatattgatgcacttgccaaattggcctagcaaaattaacttgataagttaaatctggtactggtggaagttttgagcgacccaagtatatgtgaaaaggaagaagttgagatgattgatgcttcacctacatggatgacacccatactcaaacatctactcaacggagaactaactacagacaaaaacagggcacgcaaactcttgtattctataccttgctatatagtagttgagggaaagtcatataggaggggctattccatgtctctcttatggtgtgtattgccaacaaaagcatgcgagataatcaaggaaattcacaaaggcttttgtggagatcatgaaggttggtaaagtttatcaaagaaaattatccgtcaaggatattactagccaacaataaacaaagatacacacaaatttgtcaagagatgcgataaatgccagagattttcacatacacctcgtgtaccgccaacaaaatttagaatgatgacctcgccatacccatttacaatatggggaattgacctgattggggcattccccacagggcgaggaggagcgaagtacgcggtagtagctgttgatttcttcataaaatggacagaggccgaacctctagtttccataacgtgcaaaaaggttctcaaatttgttgtcaagaacatattttgtatatttggaatacccattaaaatagtatctagcaatggaactcaattcgatggtgatttgctcactaagttctgtgaaaggaattaaattattaagagtttctcgtcaatttcaagaccacaagcaaatagacaagtagaagctgttaataaaaccttaagaagttagacgctgcaaaagagagatgggtagatgaaccaccacaagtactttgggctcacagaatgacatggaaaatagcaacatgacacactccattctcgttggcattcggctcggaagcaatgctgccagtagaagttaatattgcgacccatagatgtgaattctataatcaagaagaaaacaaagaactccttaagttgtcattggatctacttgatcaacaacataatgagtcgcaagttacaaatggagcatatcagcatcgaatcacgagatacttcaacaaaaaagttaagaaaaggctcttcaatgtcggagatttggtgttatcgcgagtatttgcaaaacacacgagatgcatctattggagtgttta

SEQ ID NO: 55054 - DNA, 545 bp, Cannabis sativa
tgaaaggtgaagaatttccccctaagtttggctggttcaacctgctcgagaaagagagggagagggagatgaagccttttttgatttcttaatttctaacctaaacctattattctaaaaaaaagtttcagcatttacctaatattagcaaataaaacccagcctaatttacactaaaggaaaaaataaatttacataagaaaagaccatattgcccttctctaataaacttaaaccgttaaaaaaaatctagggacatttaagtaattctagttaatccgccaaaccgacaacccaaatctctaaactagtccggtataaaaatccaattcaattcatcttttatcatcgtgacatttctaaccaccccgtcaagttccacagttgtcaggtccaaaaaaattttattcgaattatggtatctacgatacccatatattctaacataatttttataattaataaattatgctttatttattcatatttccctaatcaactcgtaattagtttaagtagggttataatcctactctaatacccac

SEQ ID NO: 55055 - DNA, 936 bp, Cannabis sativa
gaaagactaaccaatttgtattgaaagtgcaccagctgcctgcatacaacaatataaaaaaaaaagcttgttattcattatctaaacaagcttctcaatgtatgggaaacacgaatgtatatgatacagaaccatacaacagagatccacgttgaactgacaagtactatcatggttaagcaaaaaagtacaggtcattattacgttttataaaatagagatctaagatgcaagtatacatatatgcatttgaaacatgatttttcattttacacttgcattttggttccagatgaggaggagaaaaggagaattccaaaagtacaattctgaacacataattaagaaaaattatctcttactttggaaagaaaaaaactatcttaagttattatcaaagatatttaagaacataaacggaaactcctgtagggaagagaagatgtcaattgaacaattaattatatttataataactaagtaaaataaaagctcgcacactcattcctgtctggcaaacacaaatgtaccaaagtatttggcagttgatgtaaaatcaagcttaaagcaaggagttgaattaaattagacattttcattaaaatcatttctttcaaattgcttagggttgttacaaataacactcacacatattcaaaggggaaaatgaatcaaattactctcatgcatattaacatatcgcgtcaaaacgagtaggcaccgtaatcccttaacttggaaagttaaaaatatctaattcctagcatttcttgatagccaaacaggaaagcgaaaaggaaatagagaaagcataccatttcttgggatagtggatttgcgccagtgagtttgcattgagtgacaacgattctttgaagctgatcgacctggctatggaatagctctctctgcgagtccaatgacttcgctaacgag

SEQ ID NO: 55056 - DNA, 1441 bp, Cannabis sativa
  modified_base (28)..(40): a, c, t, g, unknown or other
  modified_base (357)..(360): a, c, t, g, unknown or other
  modified_base (790)..(793): a, c, t, g, unknown or other
  modified_base (868)..(875): a, c, t, g, unknown or other
  modified_base (1399)..(1402): a, c, t, g, unknown or other
ttatgtcccataattcatcagtgcactnnnnnnnnnnnnntgtgatagtcagcgataaagtttacttacaccttggataactgttatgttcttcgcaggacattagcaaagtatgctagtcttagatgtattgagtatacattggattgggacctatatttatcttggtaaagatactataatcttaccgttgtatctttctcagtcaatatcactggttgatcttagattaaaagatcttaattctgatggttaggtttgatctcaagagtattatttctgttcttagagttgttcgttaaagcctaccaattaatttgggtaacacatacatcttaggaacatgatagtacaatnnnntgggagcgctaatcatagataaagaatctataacttctatatgggcatagaagtaaaatgatagtttttttcaagcttggcctaatatagataaatggaagatctcttgtttcaaaagttatattagtttactgaaatatcatttataggaagttaagtgttttaaggataaaatatatagaagggtggaatggtaaatttgtccctagctgatgtaaataatttataaaagatctttgattattgggattagaacaatagataattcatattgtatctatatcatagaacatataaaacgttctatataattaagagtgcaattctaaatctaaagtggcataagaaggaactaataagttagagaatttacttgataaattctagatctgcttattggaagcttggtcatataggcccatggtccccnnnntagttgagataatactgcttgtaagacttagttaattggttttaattaatcatttataattctaaaattagactnnnnnnnntttatgaattttcactaagtaatgacttaattgtgaagaaaataggttttaggatttatttgttaattaagagactttattaactctaattaataaataagttaaatgaaaatttaaattgataattaattttaattattaaataaatagttatgatatttaaaggattaaatttataatatatgacatttataaaagaaatgataaattgttgaataaaatggaaaaattctaatttagtagggcgcatcttatggccggccacttaaggagaattttagccaattatttatcatattttaatgccatataatttgaatctaaccctaggagaaatcctatataagaaataaggtggttctcattctatccaacctaagtcattctagttttcattctatgtcaaaaaactagaaacttgagaacctccttctatagaattcgaatctccctttcttcttctttctaattttcaagtcctatagtgaaagagtacattcccacccatagcaagtcaagtactnnnncatagtgtgtaagactgtgaagattccaacacttgaagg

SEQ ID NO: 55057 - DNA, 2210 bp, Cannabis sativa
gttagttagggtgttacaatcaaaacctattttcccacttcctaattttctgctattttatcttcaaacttccattaacaaattttcataacaatttgtactcttcttttcttgttgtgaatctatatataattatgagtattacttgttcttcaacctccccttctctatttcccaaaaaaaattcgaaaataggtgttaaatctgtaggaaaaggttcaaaggaaaacgcccaattgtagaagatgatgactccgactttgctcctcctgtattgaaacgggattgtggacctgcgaagaagaaagctaaagtttctgttccttagaaaatttcccctgcctttgagaacaagaaggagaaggttcaagaggatcatgggttggaggtttgttttcaatttttttttagttttcccccaactttgattcttttatttagttctaattttatgtttagtgtatattgtttttatttttttagggtttagtttctaagttattttttatttctgttgtttttagttttaatcattccattttcttttaatttggttaacgtttaggctattatgttcttcttttttatttttccagttttaaattttgttatctttttggttgtttttatttttctatgatttccatatgtgttatgtgtttgatttcattttgttcatttgatatgtgtgtttgtttctttacagtttaaatactataaattattaaacaatagttttaagtattgatcatatttctttttatattttgcacatcttttcatcatatatattttctatgatatccatataaaaaatcaaggagtaaatataagaactatcctagaacttgatattaaagcagcttaattgggtcggtctactattttttttcatatttatgttttttatgtatttctatatgttttgttgtttatattaggttttatttttagctctatttaggtttatgtattgcttttactttttactatgtgtgaatgatttttcatggttgttttatagttgtattacagtttggaaacttctgtttttctattcattattttatctttcttttttaatgcaggattgggtataaaaatttagtcctagagattattatagatccaagtgtatttctacatgcacctactctgttattcttaatataaaaaaacactatctcgagtaatttttgaacatgtttcgagatacccactttggtcatattttagatattcctgagttcgtattccatcctgaaattttgcacaaccatctattgagggaggttaactagtcaaattttaaaaaaaatttgggcaaaggttgcttgccattgtatacggttttagtgtggaagagttttatttgatttctggtttgaaatgttatggtgattgcaataaatggctttttactcaagaatcaaaccaattggttgatgtatgtttttctgaaacaaaaattattgaccgtaagtctattgaggatgcttttttgggcactaggtggggccctgatgaatcacttggtttgaaattgaccattttgtatttcattaatagtttccttctaagtaacactactgagaagaaagttctttggtcagaattacatatcattgatagtggttgttgggatgattattttggggtaggaagtcctttgagttgaaaattaattcattcaaggatagagttgaacatggtatcaagatgaaaaacaagaaagagaaaaaggcagttcagtcttatgatggttggtatagaggtttggggtgtttgtgggtgtttattgtatggtttaatgaatattcgcagaattctttttacaaacgagttgcttctactattctcagaattctcaattggaccaatgatatcagggcaaaaaatccaacttttagggatttgaaagacaagatatttgattttctattaaagcaactgatttttagattctttactattttattattgttttttcccgttctgatgatcttctttatttatttttttggttatttttgatttataattattgcaacttttttttgcagttaaagttgaagaacattcgtctttctgatgaagaaaggaagtctttgacattggatgccttattgaggatcaatcgattgatgattgtgctccattaaacgcaaccattgacactggttcgccatccaaaaaatttgagtctgacg

SEQ ID NO: 55058 - DNA, 1194 bp, Cannabis sativa
ccaagcaagcttcttaggacacgtggtgactaaagatgatattttggtgaattctgtaaagattgaaacagttcgagattaacctcgacccaagtttgtaaccgaagttaaaagtttcctgggattagcaagatactacaggctgtttgttgaaggatttgtcaagatctctacatccttaacggaattaactcaaaagaattggttaggtttcattttgatgtagtccgagaaagttattgcctatgcgtctaggcaattgaaggtatgaacaacagcggtggtatcctacacatgatatggaattggcagcgatgatggttggaacttgttaaagattttgactaagagatcctttaccatcatggaaaagtaaatgttgtagcagatgttctaagttgaaagggtccaaggaaagtccatgaattgaagaagatctcatcaaagttagctgaggatatgactagagcggggattgagttcatagttggaaaaaaaactagccaatattgcgttgcagtctgatttgttagaaagaatcaagacagcccaaaagagtgatctagaattacaagagtataaagaaaagtttaaagtcgggtcagcatagagcttctcaatttcattagatgaattagtacgatttggagacagggtttgtgtaccagatgatgatggtattagacaaaaggtgagtttcataccacgccatattcactacatccggggacaactaagatgtatcacgatgtaaaagccctgtactagtggccagggatgaagggggatattgtagagtatgtgtcaaaatacttaacctatcaataagtcaaggcagagcatcaaagaccagcgaggttacttaacctctaaagattcctgagtgtaatgggaagagataatggtggactttgtggttggatcattaagaacagtagggctttatgatttcatctgggtaaatgtggatcgatataaaaagatagctcacttttaccagtgcagactatgtatacggtagattagtacactaatctatatgtcaagtagatagctaggctttcacggtgctccaagttgatcatgttaaaattcgagatctaaagtttacatccaagttttgggagagttgcaatgagcaatgggtaccaaaattaaagatcagtttagttttcatccttagactgatggtca

SEQ ID NO: 55059 - DNA, 1070 bp, Cannabis sativa
tccttttcacttaaataaatgaaggaaaaaatatattaacaaagaaaaatatatagtaagccgattgaacttaaaacaaacacatgttcatcaacaatatcagagatatcaatacaagtatattgcctcaataaaaagaaaagaaaattacacattgcagctattttattatataagataacgatatacatataaaaaatatactgaaattaaaacattttgtatatatgcaactaggcaatatagtcgctcttcgcgtggctatttaattttgttttagtataataattaaaaaagaattacttatgaaaataataaataataattttaaaattaattaaatatataataatattaaaattatactattgaattatttattaaacataaaattggataaattatattttatatattaagaagtttaaaatttatatgaataatgtatatatatggaattttaaaattttctatgaaaaattattaatataaaaagatataaaatagggtagtacaaagaaaaattagagtattattattattatttaagtaaaactatttcctgtaatcaataatttatatctcaattattcaaagtcgttgtgaatcattgtatctcacctgttgctatcaccatatcccacatttagtcgttacagttgtaatttccaaaagtttacttgatacataataatacaaataaataatataatgaagtgctagtggaaatgaaaagatcaaaagttaaaacaaaaaaattaaacactgcaatatcatatccatataaaagcaagattaataagagatggtgttaaaactttataagaaagaaaagattaaaattaaaaaatttataaagaaagcacataaaattaagagatctaaataaatgaacgaacaaaaaactaagaaatatgtagagaacttaccatacaacaccaaattcaaatgaaagaaatatgataagaaaaaataattaaaaaatttaaaagaaatgcaataaaaaacctcaaatctagataaatacgataaatatatgagatatgtatctaatcaaatgttataagaat

SEQ ID NO: 55060 - DNA, 1377 bp, Cannabis sativa
aattaaacatacatgtattgcactcagcatcacctaattgaacctaattaaaaagaaaattaattatacgtgcattgcacataacgtcaacctaatatactttatatatatcaacatcaaaccttttatataaaaaaaagtttaatcttggaaagacacgtggaagctcaaaaaataaaacaaatattttaataaaaggcagtgtcgtataaaacattaaaaattatactgtataaaagaaaaaagtaacgcctagcagtataaatataaaaaataagaaaaactccgtatactgtataattttcccttactattataccaaatcaaacacttactagagcactctcactttataatagctaaaagcttaaaaaaaattaaaaaaaaaatagcaaaaggcttaaacttgatctccatcaaatgttctaaaatcttagctattatagttcattttaaacttgaaaaaaattctccacatatagctcaataaatagtggtgagctaaacatactttatgtttttttttatcttcattctttaattaattctatttatttctttttttggtcattttttaaattttaaataataaattctatgtaaagatataatatttaagagaattgctaaaaatgtacatagtgtctattatctaacaccatctttgatgtcatacatgtcttatataatttaagaaaataatttttaaatattgttaagcaattttggaaagctacctaattctatagaaggtattgcgtactactagtgcataatagtaatgtttaatattaaataatgtagagcaagatattgaaaaattaatgtataatgtaatgtaaaaatatgaggtaaaataaaaagataaagttttagtaaaatattttaaagaataaagtaaagatggatgggaataggggtgtacgtcgatcggtttagtcgggttatagtatatttttaccattccaatataaatatcgggttgcaaatatttaattgtaacccgcccaattaaaaattaaaaaaagtttaacccgcctaatgatttcgtcaatttggtcgggttaacccgtccaaactgtttttcaccttttttttttttttttaatcattattcttagtttctgattcaaaaaattagatttaaaaaaataaaaatacattatttttttatttcaagttaaaaaaaatgctatagtctaaattaattttaaaaactttaatataagataaatataattgagtaaaataataatagaataagataataaaaaaagtaataatattgtatagattttaaactttaacttcaatatctaaacacaataaaaattattaactataaagtctaaattttaaattaaacactaaaatgtc

SEQ ID NO: 55061 - DNA, 2186 bp, Cannabis sativa
caaggtacagaggtccctgctgctatagctttgaacttgactccactatcgtaccatataccacccaagcaaccgacacagtaaagaataccccgtagagaaaatcgccaaacacccggtactagtagtagtcgtccagacagaacgagtaatgctagaggtcctagtgatgctagaagaactagtgatgatagagggaccaatgatgctagtggtcctagtgatgttagagggaccaatgatactggatttggcgatccattttcttttttgacaagttacagtaaaatcaatgagaaaatgtttacaagagaagacatcgaggatcatagtcattatatatctatgggtggcacaccagtcaaggagttacatctaggaaatttttttagagacaaagagcatttaaagatagttttgggcttgtatgcaatgaagaaatggttcgactactttgttaggaagtccggtactactgtttggtacgttacatgtaaggataccgattgtgagtggagattaagagagaagaagaatgtactttctaacatatttgaggtgactacatttcaaaatgtacatacatgttcccttaatctttgaggaaaagataaccgtcaagcatcacctttgatagttgcccacctaattaaggataaattcgcaactgacgactcagatcatttggcctatgatataaggaaagatatgtacacagattttgagatccaaatgagttatgaaaaggcttggaagtgtagagaaggcactacacctagttcggggtacacttaaagattcatactcaaaattgtctggttacttgcacatactaaagttaagaaatccaggtaccatcacgaattttgtggtagaagatggtcgcttcaagtattgtttcttcttgctgggtccttatagatgcgggtttagattttttcgacctattgtatgtgttgatgggtctttcttgaagactaggtatggtgggcaaatattgtgtgcagtggcactggatgcagtcaaccatatttttcaaatagctttcactttagttgatagcaaaaaccacaacacttggacctattttatgataaaattgaaagatgcaattgatgattttgagaacttagccttcatgtcagataggcatcaaagcattgttcatgctttagagctcgtgttccctaatgcacaccatggttcatgctaccaccacattattatgaacgtcaaccacaagttcaagattgatgtctccttgaattatatttacacatatgcctacacgtattcaaaaaatagagtttcacagagaatttgagaagattcaggcgatgactgttgcagttgcattatatcttgaggaaattggatttgagaaatgggtttggtcgaactttctaaggataagctacaatgtaatgacgagtaactgggctgtgagcttcaacaacacaactaaggacgcaagaggcttttcgatcattgcttatgtagcattcttgaggtccaaagtctaacagtggtttgctatgcgaaaagaaaaagctaaccagtggacaaagaccctagcaccagaaatggaggaggacttggcttgtagtttgagaaatctcagtatttgaacgttgacacatgtggaccttacacgttgaatgtccaccttggaggatcaattgagaccagtgtcgtagtggacttgcaggaacaaacttgcacttgcggcttgttccaaatcatgacgtttccttgtcctcatacatgtgttgcagctcaacaacgaagtattagtatgtatgcactatgctcgccatattatacaacaaaatattagaagagcacatatgaagatacaattatgccatcttgtgatgagggtgagtgggaattgcctaatgatataaagaatatgacaattgaaatgcttgttgagaagcaactagtaaggcgaccgaagcagcaaaaggttgaaagaattaagttaaatcgaactggttgtaatggtaaaaggattgtggtaaaacaaatctgtagcaagtctggttgcaaggggcacaatagaaagtcttgcatctaccgaggttaaaaatgaatattgaatttagttgtattgttatgtgttgcactattatgtaatcttattgaattcttgataagacaaaaaaaaaaacgacattgtgtgt

SEQ ID NO: 55062 - DNA, 863 bp, Cannabis sativa
tgatttgactttgtataagacgtggtgtgaccggtgttcattgatttttattataatggtctccatcaattaattcaacaaatacaaatatataatcattatctaactaaaattgtcatttcttaccattcttaatcatacactgttgtgaccattcttacctatatatatattgtattgttaaaaatatgtttgcttatatattgtaataatctctcatcgatcttttcatccactaattacctttattaattgtttggcattgattatacctaaatgtacacaaattattttcttagatatctgctctaaattttacagtaaatattattgatttttcaaattgtacacttctcaatagtcaagaatataaaaggaaattacgtaaagggagtatattcagatatattgtaatacgtttaggggctatttgtttacacttaatgatacatctgatctgattggaccagatttagacccattaagagtatttgttttttatttttataaatcacttattggcacttaaagtattgaccggatgagatgtataagtatagcttaataaaatttagacatctatctattttatttctctaatatttatatttatcttatcactttctcttctctcttttacaacatcaccatcacgtcactcttgatatctaatatatatatataaaataaataaaattgtaatttatctcctatcataatataattatattgtacatatattttaaaggtatttatactaaattttgacatgattgataatatgatgtataataatataatataatattttttttttcaaaagtaattagtttttaccttatttttctaataataataataat

SEQ ID NO: 55063 - DNA, 837 bp, Cannabis sativa
ctaagtgatgtttatgacttttagtgtgggtaagggcaaaatggtctttttgtcttatatttactttgtcctttagtgggatttgagttgatttgttaatatgattttatgttgtattaagctaatgttaattgattaaatcaattttatttcatttattttacaaaaaatagaaattagacaaaaacacatttctctttctcttccaagctcttttgaaccctctagaacaactagggtttgggttcttcttcagcaattcaagcaatttttaggaagagttaggtgatctcaagctctaggtacgttcttggcttcatcttctttagtttcttgaactttaagaaaatggatttatgcatgttttgtggtttttgttactgtagttggtgttggtgtatgttttgtgtttctgaaattagattatggttaaatatgttgaattaaggtggatttaagggctgtagtgttgtttgagcaagctttaagttttagaactcaagcttggctatttaatggtgaatcttaattctgagcttgtttatttgtattgttggttgaaatatgtttattggggtataatatgcaagtttggaaggtttggtaaggtttggagtcaaattggttaggttttcaaaaaatttaggttgcctggtgtaaaaccggttaaccggttttgcaggccctgtaaaaccggttaaacggagttaaaattggtttcttgcacttttcgtgttttcgattcgtgttagtttcaaagctttagttggttaattccctataagtttagggtatttccatgttaacttacaataggtaggtttttggtttaaaacc

SEQ ID NO: 55064 - DNA, 3465 bp, Cannabis sativa
aaaaattcgttaacaataatgaaaccttttaaataaaactaaaaaattaattaatataaatttttacatgattttgtagtttaaatctacatactccacgagtcagtattatttctaattcttctttatagtgtccctaaatacaaggtaatatttatgagtatttcctatacttaatcttcgaaagtccttttttccaacaaaaaaaaatcctaccctcttcataggttctgtccctatttatagaattcttacaaatgacagttattctcttttgattttatcttgatattgtttatgaaacatggacaaaccccacgtttcatatttacaacatgtgagataaaagaattaaccgttaataacctctttttatccttatcaaaaagtagttcttttgtcgagatactagagtaaaaatatgcctcgcgttcttcaataatgttgggaatgactgggtgcattctacgagatgctagctgaggtactttcctcgctcttgccgcctaagacaaatctttagatagcccttaggattgtatcttttgtgttccttagggtcaatcctctcgcgtctatgagcattcgagatgggtcgtccttggcacatatcccttagtctttcaacatattcacgagtatgcgagtcaatgagctacaagctcttaaagaactcgttatttacctgttgacccggaattcggtcaactgatagtggatccttatttattgctgataatcaccatgtttaaataataataaatgataaaattgacacagggatttatagagatttggcccccttaattagcaagtaatgacttactctcctttaattgtattgattcttgagataatacaacactaatcacaggcttaaaccttataatttctggctatggttctcttcaatattatagtattgagaattgagtgttacaaattcagaacttgtgagactttgtgatgaaaatagactaagtgtctagtgagtgagtgaggaggcgtgagagagatgagatgtaaggcttgtgagacttagaattcaaccctttttctaccttgcctaaggccctttatataatgtagggcttacaaagatcatcattcaaatagatatatatccctctaaaatagggaaaatctccctttctatctcatatttaaattacaaaaagataagtaatatccctagaattcctatcttcgtgtgttgttaaatctgtcccgtaactgaaattaagcttatggatcattttgaaagattgatgtgagccccaccattcatttaaacttcttttggtgttctttgcacgtgttggctggccaaccatattcttaaggcctagccaggacatggaacttcattggccagccaaggtgtggtccaatcacgatcccctgactggaaattttctcctctcgcttgatcttgcttaattgcttgaaaccctcgacaattagcatgtcgtgcaaggtgactttgttgaaccattaacatgttgtactccacgtggccttagtttcttatgtggacatgccatgttaagtgggcaaaaattgagataacactaccctttccactcagctcatcccctcatgttttatgaatgtcttgtttacctcggttaggttctaagattagcttatgatgttgttattctcgctaatcaatgtatttattttattgattttatttgatagccataatataatacaatgcgagacaacgcctcataaactatagcacatcccgagaggtgagacacttacttttattccttaagtttatagtattttccaatcttcgtggcttatattcacgtgtcatgtccatatttaatgctcagaatatggatgtaacacctttgttaaaaaaaaaaacgagttacaacagctagcattcgtccttgaaaactatcctgaaattgatcaagatggttggcttaaatttattgcaagttgcctaactttgaaatttcaggtactaatttttatgttaagttaaacttttaaatacaagcactagtagctaacttattacatttgcattgtaggaaaatagtaaagtacagagggaccgatcacttaaaaaaactagtcaaaacaccgtagtggtcgaagcagagaagttatagtaagtaattgacaactaataaaataaacttagaaatgtacatcaaaatgtaaaggtactcatttaaattttataaaacaatgtaaagaaaaaaagaacttcagattcgagatctcccacgccatcaagtttggatcaaatcacaataaaagaaatcaaaacttgtcactgatttggataaggaaattgccactaagatagtaagtattaatcgttgataacgtaataatgagtcaatatatataaatgaaatattaattgatcattgatatgtgcactaggtcgaattggaggagaaagttaaccaaggacaggttaaggtccatgcccaaaataatatactaacataggcattaaagccattagagcatcctggacatgttagagttgttgggtatactagtacttgatttatgttatttcattagttacacaaaataaatctttatgaacttcatttattaattagtgggttcactgcgaatgcgtcaaattttttttttttgaagaaataaaagggaagtttttgatgttgtggctcagaaatagagagaaatagaaagattgaaagtaaaaatttgatctcttgaaaaaaaatagttgttgaataagagaaagatgatgaagaggagtatgctcaacaatatgttcaacaagaacatgctcacgattatatgatccacctaccatgtacattttcactgaacatagggatgatgaaatagtaattgtttgctcggacaatattaacatctacgtggtcaaagcatattcatatgacaaagaaggtgtggtgacagttcataccatgccttatgatgattcgcatgcacgcattctgatttcaaacatgcttcaagatgatgtggaagtcccagtaccgattcaaggaataagatatgttagggaaacgacgaatacattcctttcttgacctaaacatttaattttaacttcaaaagtaaaattactttcttaaaaacacaattacaaatcatatataaaatttttagtatattatggtattttatagggtccctttgctcaaacacctttaacaagtgatacgtcgaagggtaaaggcactatgcctcgtcaagaagccagtggtgatgatgatgaattattcactccagcaatcatgttaaaaatccccaagtcactccaattcatggttgacgaatatttgagcataaagggaaaatatgtataacccaagttctggtacaacatggatttataacgccttgtacaaacatcacaataattggggaagatgtacaacaagtggcattatgtgactttatcaaaaaccaaggcatgctttt

SEQ ID NO: 55065 - DNA, 1308 bp, Cannabis sativa
  modified_base (912)..(916): a, c, t, g, unknown or other
gtagggctgggctgaaccgtaccccaagtcaagtacagtactaactattgagtgttgtaccacatgcactacgtcatcatcaggtactagtgttggtaacatcggatcgtaccctttgaacatcatataccataccaatgcactccatactgctaccgtactactattggtagcatacgaattacatacacaacatgcaattacatacatacacatattcatatacatgttttatactaatctaatctcatttcttgattcaagtgtgtcgttcaacctaattagaaatttacatgttgaacgaaggtcctatgtcacaatgtaaaattgataagtgtttactctagaatacttctctaatgcgcaaatagaacttagggtttttctaccaaactataaagttaaaacacccttaaataaatagataattcggctctaacttatatttcatatggtagagcttgttaccagctttaaaacagtccatagaacatctaaaatagacatccaagtgaaaagttatggccaaaatataaaaaatggtcccctcggtaaagtccaattctcgaagcttcaccactatggaagctctccccttccagaaactctccaatcattgaagctctcccttcctggaagctttccagacatggaagctctaaaatcatggaagctctccaatcagggaagctccaatcatggaagctctccaatcatgggagctccccaatcatggaagctagctctccaatcatggaagctcctattgggaaacaagggctccaaaattcccaaattataggccccgaaaactagctcctaacctaaccaaaagctaccaaactttcttgaatagcaattttgggtagtctaaatataacccataactcaaaagcatctaaaacaacatgnnnnnaaattcaccatggatgagcaaagcttgagttcacaaattcaaacttcctcaaatctgctacagttgctactaaaagcaagtttaaaatagtctttaacacaattatatctcaaataaaacaaaacccccaaattttcaaaaattacaaaagagaaccaagcttaaaacttttaaaacaacaatgaataaattatgtagggcttacctttgatcttggcttaaggtttctcctcaatccttgctgaaaatggcttggatatgatagcctaaccttggttttttcttggttcaaagagggtcacgagagagaaagagaaggatagggtctcggtccccgagctcactactcattctgtgaaacacaataaatccatctaaagagagtagagaga

SEQ ID NO: 55066 - DNA, 840 bp, Cannabis sativa
tgttctcggtgaagagttgtatcgcggacatttaagcttgtaacgagaacaaatattcttgttacaagccttattttttgtagtgggtacatctgaatatttttcttacctcaattcttgactcaagtgtgtcggtcaacctgagtggaactctgctcggcagttggaggccctatgtcacattagcagtaaactagtaagtggatcgctcaaacactccccaagactaaaatacataatctaaagtttttctattgatgaatagggtggaaataccctaaataatttaaaaacaaaaatatcaaagtgccatcgaattgcccaaccagtccattgaatttcttaaacccaaccggttgaccgcttcttacatcccctcaaccaattctgctactggttcactaactcaaaaacttttgagttctcatcttctatacctatccaaacggtccaaaactctctagaacaactcacaatcacagtaagaattaaaatatgaactcaattcaaagcttaaaccagaaaatcaaaaatcactattaaagagcaaaacttaaactaagaagcttaatgtcatcctttttgaatttcatttcagcaacctgaaaactatactaactcaaaatcaaatccaaagaactcaatataaccatgaaatactttaattaaggtattatcttaaaaacctaacttagatcttttaactacaacttgaaaaagaaatcataaggaaatcttacctcttaaatacaagctcagaccaccaaaagatcactcccctccaagattaactaagattcagctcctatcttcaacaaattttgaaaacttgatgaaaat

SEQ ID NO: 55067 - DNA, 1426 bp, Cannabis sativa
catgaaagaaacatcgtaacacaaaagtagagaaataatgtaacattaacattctaacttacataaaattctaatatttgttttttttttttttttttgtagaaatggagcacaaaaattactgagtatgttgatagccattggtgaagctgttgcttatgtttgctcaggaatgtatggaagtgttgatcaaattggaatttgaaattctatccttattatttttcaactcttctttgcttccattattgtcatatccctagatgagcttctacaaaagggttatggcttaggctcagctatttcacttttcatcacaacaaacatttggtaagtaattagtcttttttcttttataacctttttattaatgattcgattaatgattgaataatgtcatatgatttttctagtgagaatataatatggaaggcgtttagcccggtcactattagcaatagcggtcgcggagttgagtttgaaggtgctgttatagctctattccatcaattattaacccgaacagacaaagttggtgctcttcgcgaagcattttttaggcaaaatttgcctaatgtcacgaatttgctctcaactatcatgattttcctcgttgttgtctactttcaagggtttcgtgttcttcttcgagtgagatcgaagaatactcgtggacaacaaggctcatatcctatcaaattgttttacacctccaacatgcctattatacttcaatctgcacttgtttccaacatttactttatctctcaggtgtgtgcgatctcgatattttttttttgtcgtaattactcttttcgattaaaaaaattaaaagggcattattaaaatttagagggattaagaaaattctcagaaagttaggcaatatttacgacgaaattcctttaatatttacaattgttacatatatgactcaaattaaaaaagtagcggcaaaagtactttatcttacgattttgttgcagtcataccagtttttagttgttaagtgtctattaagcccgttaagtgccagcttagaagcacgtgacaatatatttttttagcttatttaatatgtggttcaataatatgtcgtcacatgtttctaaggtagcacataatggccaaaaaaaggtacgatcgcaacaaaattgtaagataatgtatttttgccgctaccttttttaattagggtcatatgtgtaacaattgtaaatattaaaaaaatttcgccacaaatatcccaagctaacacctaatacgctatttttattgacatattaaacactatttttttgctttaccgattaatcttacatttttttattattctttatatgtatatatacagttgctctacaaaagatttagtggaaattttctagtaaatattttgggaattagcttattatatcaccaaacc

SEQ ID NO: 55068 - DNA, 1042 bp, Cannabis sativa
  modified_base (132)..(155): a, c, t, g, unknown or other
taattagtaaatctaattatattggaatgagttttatttaaggcacgaaacccaacacaacttcaccgataaaagtagtcaatatttacgaatgtcgagcccctttctttcttcttcttctctctctctctnnnnnnnnnnnnnnnnnnnnnnnnatatatatatatatatctctttctctctctgcgccaccaccaccacccatcaaaaccaggcagaccaccacccaccacgtcctcagtcgggcctcaaccacgccggaccaaaaccacactcagccggacctccaaaagctttattttcctcccaaaaacatttatttttctcaccccaaaagtaataggtaagtgtttttatataaaatattattggtttttattgtattgcatggatctacacattattcgttgtattatgtcatttttgtgattttaaatgaaagtagagttcgtacccgaatgctggttttttctgggtttttcgaattttgcgattttgtacaccattgtgcgattttttgtgcaatgccaatagaaatcagaggttagggatgactttcattctttttggcgatattaaacaatgtcattgcgattttgtgcgattttaatggttttacaatttatgtgagatatctttacatcattatgcgatatgatttttattttttttaattgcttcgttattgtgttttttgtgcgacattgtgcgatattattttatgcttgtgcgatattgttgtttttgtgcgatattatgcgatgttgtttctttcttgtgtggttattgtgcaacattgtttcattttttattattttcttgttgccttttgtgtgcaacattatgtgatatgttttttcttgtgcgataattgtgcaatatgttatgctgattttttttgtttattttcgtatttgtttgtggtttttcttggacagattaaacagtatttgttcatgtactatatgatggtgtttggactatggagggtttcaactgagtattcaattccccaataagtaagacaattgctttaatttac

SEQ ID NO: 55069 - DNA, 1485 bp, Cannabis sativa
gacttaacatcaaaacttcaaccaagaattccctgttcccttgcaagccgttacgatcaagttgattgattgctacaacctatacaaaacacacaaaataacagaatccatagttagcttgcaatacaaacaccgcccaaaaatgactcaaattaaggtaaactgagataactatgccataactggtgggctctgtaaataaattggtccaaaactcagaagatgaaaagcatgaaagaaaacatatattgacaaattaagaaggtaaattagcgtcttatttttttttcataaaatggtaaccgtattattgcactggactaacctggttagtgctttctaaaggccctttgtacactcgaccaaaacctccctcacccaagagacattctgcccatttctagttgcagctgccaactcacagaatgtaaacatttgtgctgcaatgtgatcggatcctccattgctggaaggctccttctcatttatggacggagttgtgttgtaattacctgacaatggaaatcagacaataacaaacgcacactgaattacaaaatttaggtacttatcagatttccaaagaaaacatcataaacatggtataatttcctcacctttaccattatggttcaaaatcacagaccagttctattaagatccaactactaattcacaaatagagtaaggtaagttctaccatgtactgctactatgagtatacctattgagtaaactcgaatggattaagttttcgtatgaaataatgaggtttgaaaattaaacaaaactgctaacccctgtactcgtgggtatgaatgggttggtcaagaaacggagaaccaaagagtatgaagacacacgaggtaagattagcggcaattaaaaatatagcacctacacaattattaattaaaatttaaaaagagtacataaatcatcatatgctaaaaataagagagtttagcagcagcaattaagataaaattatattataaggctaaatgataaaaagatatttaatatgcagagagaagatatttaaggtgttgagaagtaaaaagacaatgaagacagagtactcttaccagtaccagtagaaagacaatgagaagaacttgaagttgaagaggatgtaccaactgtttcgcaattgcctgaacttgttcttccggaagacacttgtcatcctcgagaatctcaaatagttcgccctggtcatcaggaagatgcatgtattagaatccattctagaatgggctagtcacatactattacatgtctaacatagttttaatgactgattttaatacatgtttagcttatggtgaatgtaaaactcgagaagattaaaggatcattgcctgtgcaaattcggttacaacacagaactcctgagggctttcaaaagaatcaagcatctcaatgatattttcatgctttagctttctaagaatctgtaaaataactgccaagttaaaaaaa

SEQ ID NO: 55070 - DNA, 767 bp, Cannabis sativa
gcaaaggaaattttaactcttgtaagagtgactgaatccatgatagcttggcaaagacatgggcaagggccctatattcggaatcggtgctgaagcgagaaacaatgacttgcttctttgaggaccatgagaccaaggtgtctccaaagtaacacagtaacctccaatagatcttctatcatcaggacaacattcccaatctgcatttgaatagccagtcaaggtgagtctttcacaaggtttcatgtgtagtccatgatgagatgtccccttaagatatcgaagaactctcttaacagcactcaagtgagaagtggttggtgccttgagaaattggcccagtttgttaacagtgaaactgatatcaagtcgcgtgtgtgtcaaatattgtagtgctttaaggataatgtctttccaacagacattggagttgggcaaggctttaagtgtatcatggttcatttgagaagatcattgacatattttgactgtgacaaatacatcctagttatatcacgatgcacttaaatgcccaagaagttatgcagtgagccaagatccttcaaggagaaaaccttgttcagatttgttgtgaattggttgacccttttttgttgtttcctgtaataagaatatcttagacataaatcaagatgagaatgatttcactttcagttttgtaaaagaatagtgaagaatcagccttggaattttcaaaattccaacaaagaagtgtagacttcaatttctcaaaccaggcacgaggg

SEQ ID NO: 55071 - DNA, 567 bp, Cannabis sativa
tctttgacacgctgatgaccctactaccttcgcattccgtctcatgaaacaaagacttcattaattagctatttcagaagttgaaaactcaatggtcgccatcgagttcaaacaccttctgaagatataaaacttcaaaatgagtctatattgatttccaagcatcaatttctatcttgtttagaaggttctcgacgtaaattcttttgcaatctcccacattctgtatattctgatcacaaacctagttatatttccaattataatgattttaactttcattcttgtttgaattctgtttgatattttttaatttctttactgatttaatttttatattgattaaaggataatatataagttatattatatgtatatatatatagtcataacaatgtgggacacattcaaaaatgagctatcttgtaattttaatattatttttgaatttatatgaaaataaattaccaaaaaattcaataatatattgttcaatttatctgttattttgagtaattactttttgtaaatgaagtatggattttactaaaaaaagatatacatatg

SEQ ID NO: 55072 - DNA, 1023 bp, Cannabis sativa
aattcttttaattcatatatattcgtcagttatgagtgactgaccaatatgatgtttaatataaatgaattaaaaaaaaaaatatacgtacttttataatagtatggtgcatgatttaaattgtaattattaaatttaaaattacaaattatatcgtatgcaatttgaaaatatacaattataatttataatcactgttaaagattttaaacttttttttatgtatggtgcaggcaatttgtgtgaacacccccatgtcgtaccttttcctgctattgattttgtttacttataaataattttacattttcagtcatgagactcaaaaaatttcttaaaaattagtacgtgaagttagtaccctccctttcaaaaacaaaaataaaataaaaaaagttaatatccttaaaaaataataataaattggaatgtatgagaagtatcatgcaatgaatttagagaaagaagatggtcatgtactatttggggtgacaaaatgtgtcatcatatcgtattcgtatcatattttatatgatatgtttttatatttcgtgtcaagcgtgtagacccattatttaactcttatctaattttctcaatcctaacccgacccgtaaaaaatcgtgtcgtgatcgtgtcgacccactgtgacccgtttaactattattgaaactgaaattgtagagaaaaataataaatttaagttctattagaaatcttatatacatttatgtgtaaatagtattatatatataatttaaaaattaaaatttttaaaatattttcaatttcatgttaaagaaaattaaatttaaaattttttaacttaacattaaatcactaaatatatatttcgatataattgtattattattaataactttttattttattatctttaaaaaaaaaaattgtgtcaattacattaaattcgtgttaagcggatcgtgtcgtcgtgtgtgacccgtttttattttatgttaagttgtgtcaacccgctattgacctacgttgaatttttcc

SEQ ID NO: 55073 - DNA, 3365 bp, Cannabis sativa
  modified_base (355)..(356): a, c, t, g, unknown or other
ggaagagagagggtgatgttttgaaatgtgaggggtagtttaggaaaattagtaaagtggtcatatatgaccaattttaataactaggcatttagaggaaaaattataacgtattttaagcttggaattttaaatttcccttgaataaatatgatttattggatagatatttggtttttttttttatttatatacgttaaaatatatattttttttaatttgttttgtagaaatcttcctaaaaattcacttagtaattattacagtaactttcaattgtaatcaaaatttacaaaataatacacataaaaatcatcacaacaacacaagatataaattttaaaaaaaaaattannaaataatatataaaataattctcatatattttcccaaattctattttttttttcaagatcattaatatatttaaagaggtaataggacaatgtttcttcgattagttttctttgtaaattcattatatatataaagtaaatttgattatttatttttttttaaaattaaataattatatattttaaataataaataatttaatatatatgataaaaaatataaatacatttattttttattaaaaataaaaataatatattaatattcataacttaaactctttactaatacaaagtgtttacaatttcaaaaaatataacataaataatattaattgtaaatatagtgaaaaccttttcaaaaagaaaaaatctatatcgtgtttaatttaaattaaatttaatcttatttgtttaaatttaactttaccataatttattaaaagggaaatcacttcacatatcatttttttttaaaaaaaaagtttttatatattttttattattataaaaacaacaaaaatgtattttgaatatttgacaaaaagttaaaacaaaaaaaattataaaaaaaactacatattaaagtaaaaaataattaaagcttctaattataaataaaaaataaaatagttaagtttatacaaaagaaatatgaaagaagcagaagtaatggtaaaactcatttcctaaagagaaaaagtggtaaaattcattaaaatatataaaaagctcaatccataatcaggcccaataaaagggcccatttaatttgaaaagactgcgatctgtctttgtcgaccatttctgcctatgaagatagaaaaatccaattttcttctgaattttctcactctcaattctctctctctctctcttctctgaatcttcacgaatatctccgcctctcctcaaaggtaatgaatttttcatattggtattttgttttcctgtgttgtaaactttgatttcgagatttttcaataattgaagaaaaaaattagagatatttgaatccttttcttgaggaaatgtcatagctcagaacccatttcagctttagatttcatggtgatttagtattagtgtcggtaatggtgtaaagcatgataatttttaaattatgactaaacatattcaaattgatggttaatacataatttaatattttgttattttgcataaatatattgtttttgcttggaattttagtttatgaactttttaaggactttatgatgtatgagactttacatatttgtgttatgaattacaatactcttcattctcaaattttgatagatttagttatgaattttgggattaaaatgttagtaagcttgttatctttgtttatttctaaccattgcatttataaatgttaataaactttctaagcattccatcttatttgtttgcttgtttctaatcattgctattaattttggggttacaatgtttgtaagcttgttatctttgtttatttctaaccattgcttttataaatgttaataagctttctaggcattgcatcttatttgtttgtttgtttctaatcattgctattaattttggggttacaatgttagtaagcttgttatctttgtttatgtataattactgcatttaacaatgaaaaagagactaatttttttgaatctaatagattttaagagtttattttgacattgttgtggtgattcatgttctgtagaccatgtttaagataccggatcatcaagttgctggccacaaatccagtaaaggagccattggtcctcttgtagatgattcggggcgtttctacaagcctcttcaaagtgctgaccgtggtgcccaagaggaggcattctatacaaagttctcttccaacactgaaattccaaatcatatccgaaaattcttccctaattattatgggactaaggatatagaggcgtccgatggctctggtccacgcccccatcttgtcttggaagattttgtttcgattcgaactaatccttccttaatggacattaaaatgggatcaagaacatggttcccaacagcttctgaagactatatcaagaaatgtcttaacaaagatagaaaaacaacaagcttgtctttgggatttcggatatcaggatttcagatatatggaagtaaagactcagggtattggaaaccagaaaggaagtgtgttcaagggtataacaaagatgatgttagattagctcttaggaaatttgtttcgtctaattcgtcggatgatttagttgctgaagaacctgattgtgtttatgcagaaaatgtttatggtggtgataatggggtgttggcacagttgttgaaactcaaggcttggtttgaagatcaaaccatttttcatttctattcttgttcagttctgatggtgtgtgagaaaggggagagcccatgtgctacaattaaactgattgattttgctcatgtgatagaaggtaatggtattattgatcataacttcttgggtggactttgttctctgattaagtttatatcagagattcttggtaaattttcacataattcaaccaaggtttgtgtagtaaactctgagaagaacacttctaatgggtacaagatttgacaagaatcttagccaacattgtaccattgtacttatgaagtttttctctctttttatgcttggttaagaaaatatttgcaatctttcatttgtaatttgattaagaaaaatggaaagtgacttagttatgaatataagtttgggtgaatgtcttgtctagcatattaagagaaatcttttatatattttttttaatgttatcatttgaaatcttgataatattattccctcttgttttctatggcttttgaatttttactagtggggaattttcttcttgtgattggctttttttgtagtcccatttttgaatattgaatttttttttaactaaatatggtaaagaatgcctctaacttctttaaattataattatagggtgattctataataca

SEQ ID NO: 55074 - DNA, 1217 bp, Cannabis sativa
gcatgggtgcaggtcaaggatcgaagtcggggtcaagatctagggcgttgaacgccccctaattcaatttgtgtttttgtttaaaagttccactgaaacttattttaaaaataatattctaaaaaaaataattaacatctctcatcttaaaagattgtagatattttataattataaataccacgtttaatatcttatctatttatcctaattataaataaatatcttatctatttttattttcatggaaaatatcttatttaattattacttcacaaattattctgtaaatttgcttattatagaatatatctaatttttctctctttggatagtctataaatacgtaaattgatgaatgacaaagtatatgtacttctaataaatgtcaaactccaattaagtatcaaagttctctaattctcgcaaaatctctgtcaatcatagattctcaacgtgttagtaccggtaagtactaaattcttctttcactaatttttcttttttcctttgaaacttctaaaccattatgtactatcttgtatttttcctatccttatataataatatgttttataattatttaaaatatttataaatttttgaagaactgaagataaataaatgaataaagttcaaacaatatattttacaatataaaataaatcaggacgagcacaaaaagatatttgaatgtatagtcttgtatttggtacagtcaattattaaatctcttgtaaaatattcaaaatatctactatctacacttttatattataaaaataaaaattataactatttgtattgtatgctcttccattatattatatactagcatattattcagcgtagattattttttgacatggctaattcaagcgcaatacgaagcagatttgcatgtgtgctttgtttctctctcaatattatataaaatgcataatacttttatatataaatatttgagaaaatgctaatgaacacttatcaagcattacaaagagtaacataatattattagtataaattaatattcaattaataaataatattaaaaatcattaactgcttaaaacgcaatttatctatgtgatgttaggtacattccagttctcaatattagaatgctcaaacattgtattattctattaaaccctctaaatcattatttgttaatttatgtaggagaatagtcaaaagtcactaagggtgcttat

SEQ ID NO: 55075 - DNA, 1042 bp, Cannabis sativa
ccggatgtttaaaggccttctgggacgaaacatggaggtgtacgtggacgacatgttggtcaagtcaaaggcatgtgcaagccatgaccttgaggaatgctttaaagtggttcggaaatacggaatgaaacttaacccgaagaagtgcacttttagggttaaatcaggaaagttcttgggatttattgtcagccaatgggggatagaggcaaacccagaaaaaaattcaagccctcctgaatataccttctcccaataagcacaaagacgtacaaagcctaaccagaaaggtcaccgcccttcccgatccacagacaagtgcattcccttcttcaacatcctgaaaaaatgccaaaaattcgaatggaccgaagaatgcgaggaggcattcaaaaaactaaaagaacacatggctaaacctccaatcctatcaaaacccatcctcggagaagacttgttgctatacttggtcgtctccgagaatgcagttagcgcagccttagttcgggaagaagaaaagactcagcaccccgtgtactatgtcagccaacgcatgataggggcggagacacgatatccagtgatcgaaaaactagttttttgcctcctgatagcctcaagaaagttaagaccctactttcaggcccacccaatcaaggtattaactaaccatccactccgacaagtcctacagaagccggaggcgtccaggagacttctcaaatgggccatggaattaagccagtttgatctacattacatactgcgcacttccataaaagggcaagcactagcaaacttcataacggagtgccatgaggcagaagctagcgcaagcgtgcccacaccacaaaccccaacatggaaattttttgtggatggtgcctccaacgaaaacggattcggagcgggggtagcaatgatatcctcaaacggacttcaactccaggcggccctacgtttcgaattcacagcttctaacaatgaggctgaatacgaagccttgattgcaaggctaaggttagcaaaagtcgtgggggcc

SEQ ID NO: 55076 - DNA, 1082 bp, Cannabis sativa
tgatgactcgccatggttctaaatagaagaactccccctttgaatcctcatcaggatcccattagggtaaatcccaatgttagtgttccttccaccataaaggaaccgaccaatctggataacactatcaatccaaaaaatcatgtgaatcttgttgatcataccattcctccaaggatggaacaacccacagatctcacacagttgggctagtcaacatggagcaacctccacagagcaaaactatggttattcaataatgctacgtagaaaaaatagtgtcagggatcggcgaaccatttattggtgagcctctatttgcactaggagatgatactgagctggccaggcttagggaatctgtaggcaggtcactcagataagagaagaatcatgcactgctggttgttatgctttcgcccagtagagatgtgaattcctaagaggacaagaagaaccacatgttgctggttgtgatacttttgcccagcaaatatgtgaattcctaaagtggattgatgactagaagtacatcctctgcgcttgccaagcagaagtaaactatcgtaatcgggacgccaatgacctaataaggtagttcaaagagagaactggtagaagaggttaggatatgataagagatccattataaggaaggctggtagacagatcatgtagggtctacaagaatgtagagcatgaacagacaatccaacaaagttcctcaaacacaagaataacccctttcttgcctaacgacactcaaatcttaccatatagatagtatgacataaacagcaagttcttagcaccaggaggcattggagaacaacaaagaaaccttggaaagggggtgttccatgccagccaggctctagccaaccattattatgactctctctcctagggtatctgagaacatgtttttccaaggcctagagaccctgttcttgacaagctaggtcctaggataaccaacaacactcgggaaaataataactcgtggagtgagaattgggatgactttattccaccacagaataataatttcaggcatgtggatcaaccaaactcaagaaatt

SEQ ID NO: 55077 - DNA, 1395 bp, Cannabis sativa
ggcataaaacccaatagtcttaacatgtcatatatcataataattcacctataatagattatgtaataatataattccacaattgtacacaataatgtagggtattatacaatattaccccccctccgtatagaaatttcgtcccaaaatttacctcaacaactccggatatttctgctgcatatctgtctcgagttcccaagttgcctcttccactttactattcctccataatacctttaccagtgcaattgtcttgctactcaagactttctctcttctatcaagtatttgcaccggttgttcctcgaatgataaatcttgttgtagttctaatgcttcataactcaaaatgttggacgaatctgagacatacttcccaagcaacgaaacatggtacacatcatgtacagctaccagcgctgggggcatagccaacatgtacgctacttgccctatcctctcaaggatctcaaaaggtccaatgaacctcgggctaagctttcctttcttaccaaagcgcttaatacctttcatcagtgatattcagagaaataccatgtcatcgatctgaaatcaatgtctcgtcgctttagatcagcataactcttctgtctgctctgagccgcgagcatcgcgctctaattttatcaactggcccacttgttctctgaacaacttcaggacctaaaaactttctttcacctacttcatcccattgaataggtgatctatttccttccatataaaagttcataaggggccatcccgattgttgcctgatagttgttgttgtatgagaacttgatcaagggaaggtacattacccacgatccttcaaagtcaagcacacatgcccgaagcatgtcttctaagatttgaatagtcctattggattgtccatccgtctgaggatgaaatgttgtgctaaacttcaactgagtacccatagctcaatgtagactctcccagaatcttaatgtgaattttggatctctatccaaaataatggactttgggacaccatgaagacaaacaatttctctaacatatcactcagcatactgatcaatggagaaattcgtccgaactggtaaaaagtgcaatgacttagtaaacttgtcaactatgacccacacagtgtcgtactatcctatggttctaagcaatcctaccatgaagtccatattaatgtcttctcatttctacattggaatattcagtggctgtagcaaccctgcaggcctctgatattcagcttttgcttgttgacaagtaagacacttagcaacctatcaacaatatcattcttcatgactagctaccagaacatagccttgaggtcttgatacatctttgttgaccctagaagaactgaataaggagtcgtatgag

SEQ ID NO: 55078 - DNA, 2122 bp, Cannabis sativa
ttttgtaattaacaactttttaatttccatttttgtttatttccttttttggggtcataaatataaatttcatctatttttagtctataatagaaaaaatctcatatcaattttataaaagagcattcttggtagtactcaatactttctataggtgatgctaaataattaaaccatatttcataaaaattacttttttttttaagttatataaaacttaatacttaattatttccaataacagtataataataaaaaaaaaaaaatactaaacaccaataacatttattaacaattctctttataaaaatattatcaccttacaaaaatataacacaattcaagcaaaattaattaatccactaattacttaaaaaggccataattttgcgtgtgaatttgataatatctgcaacacttagatcatgtgccattctggtcaaaattatttgatttatttatcaaaacataatataataatatcacatatatatagtctacgattacatgaattaaataagtttcaatcttctattctatatgtaaattatatatttatataagagctctaacattcagattaaaagaaacaaaaagcttgagcatatagccatggctactcattgtgaaaacaaagcatctttgttatcatcagctgtggtggtaatggttccattcccagctcaaagtcacctaaaccagcttcttcaactctctcatgtcgtttcatcatcatacgacattccagtccactacgtcagctcacctctccacatttcccaagtcaaatctcgatcctcaaaccctcaagacccaaccaacaaaatccatttccatggcttccaaatcccacttcttcttccttcttcttcttcttctccaaatcccaaatccaaattccctttacacctactcccctgtttcgaagcctcaactcaccttcgtcaaccagtagctgaactactccgatcgctatctccaaccacaaaacgactcgtcgttattcacgatgctttaacgacttacgtcgttcaagatgtcgtttcgatacaaaacgcagaagcttactctttcaattgcgcctctgctttttctgctttcgcttttatgtgcgaaaccttgggaagaaacgacatcgttccgaataaagaacttccatcttcaatttcatgctttccttctgaggttttagcttttttgggttcacagattcatttggcgatgactttgaaattttcatctgggcaactttacaacagctccaaatcgattgagggttctttcgttgagcttttatctaaggaaattaatggaggaaaggagaagatttggaccaattgggcctttgcaccaaacaataatatctgaaaatcgagctgagaagagtttagtattggaatggctagatcaacaagaacccaattctgtgttgtatatctcttttggaacgactgtgagtttttctgaagatgagattgaagagcttgcttttggtttggaacagagtggtgtgaagttcatctgggtattgagagatgctgatgaaattgatgtttccagttctagctatgaagaagggagaaaaggacctaaacttccagatgggtttaaggaaagagttaagggaatgggaatggtggtgagggagtgggtgccccaagtggagattttggggcactcatctacaggtgggtttatgtctcattgtgggtggaattcttgtatggagagcttgagtatgggagtgcctatggtggcttggccaatgcattcggatcaacccatgaatggtttgttgattactgagttgcttaaggtgggagtgggtgtgattgaatggagtcaaagagaggagttggttacttcatcgatgatcagcagaggtgtgaggagaataatgggttcagattcagaagaaggagatgagattaggaagagagctgtggaaattggtgtggcagtgaaacggtctgtcgttgaaggaggtgattgtcgtttggagtgggattcttttattgctcatatcactagatagctctccttcaaagattttctcgggcaggtgatgaaatgatgatgtaaaactaggggtgggcatccgatccaatccaacatttttttc

SEQ ID NO: 55079 - DNA, 914 bp, Cannabis sativa
aaaggtggagagctttctgctagaaaattttttattaactatcagaagatttaaggtattaattagatttttctatagctatatactgaattgttgtttgtctagcttaactataatccataatcatattttctaacttgtaagtataattttataaagaataagttcaagaaatataaataatcgatctaatgtgaatatggcgcatacttctggttcttagagttttatgcgaattaaaatttatcatgtatttaatatataatttctgtacaaaatattataaattttgatgaattcttttattatttttttcatctattttaatattatatatagttgataatgttttaaattttctattattataattgatatagatgaaatattatctttattgttattataggaaaaattaaaaggtggagagctttctgctagagaattttttattaattatcagaagattttaaggtattaattttactagtttgtataagaattagatttttctatagctatatattgaattgttgtttgtctagcttaactataatctataatcatattttctaacttgtaagtataattttatagaaaataagttcaagaaatataaacaatcgatctcatgtgaatatggcgcatacttctggttctaagagtttgatgcgaattaaagttgatcggatatttaatatataatttttgtacaaaatattataaattttgatgaattcctttattattttttcatctattttgatattatagttgataatgttttatattttctattattatagttgatatatatgaaatattatctgttatattatttataaataatataatgtatagattaaatatgtacatgtaacaaattaatatgtaacatatgacattatatatta

SEQ ID NO: 55080 - DNA, 826 bp, Cannabis sativa
cttaaaatttgcttaatattattttactaaaaaagtttttgctttaaattagattttattttatttcttattatgtttgttgctttgtggttcagttcatgcgaagaaatcgaagtgccacaccacttacattgttgaatcctgagattgaaagaactctgaagcaatcgaaagcgaagaaaaagttagatttcaccatggcagacattaacaataataacagcaatggtcttaataacaaccaatcagcacctgctgcagctgatgcacaaccaagggctgttcgtgattattgcttacctgtggtgaataaaaatctgactggtattgctaatccagtcattgctcctaataattttgaattgaagcctgctttaatcaatatggtacaacagaatcagtttggtgggttggctactaaagatcccaatatccatctagccatatttctagaagtatgtgctactatgaagatgaatggtcttattgatgacgctataagactacgactctttcctttctttttaagggataaagcaaaaagttggttgcaatctttgcaactagattttataactacatgggatgaaattgccagaaagttcatggtaaaattttggccatatatttaaaaatttattgatatagcactaacataatattaatctagcccaattcaagagtccagataaaaaatatatatatatataattagcggtctatataagaatattttatatgtggaaataaagtttctatataaggaaatgattttctatttaaggaaataaaataaataattgattttctgataaatgaatatttt

SEQ ID NO: 55081 - DNA, 1698 bp, Cannabis sativa
  modified_base (420)..(421): a, c, t, g, unknown or other
  modified_base (1654)..(1654): a, c, t, g, unknown or other
tgataaatgacaatattatttataattattaaatagttagaattggcatttaaatagttgaattagaaaattggcatttttgagaaaatcagatacaaaagttagctggactagaaagggttttatagcgtgagatcgcctttcaagtccaacattgttggactagaaatatttttctagtccaacaattaagtttcatgttatgggactgctttttaagtccaataatgttcgactagaaaaatattttcagtccaacattgttggactagaaatattttaatgttaatatttctagtccaatattattggactagaattgttggactagaaatatttttctagtcgaaaattgttggactagaaatgtttttctagtccaataatgttggactagaaaaacaccccttttatgtcccnngctattatgtccaacacaaaagggactcaaaaaatttatctagtccaatattgatggacttaaaaggggatttttctagtagtgtttgtaaaaaaatttcaaaccgcgggtcatgtagagaagggtcactagaggttctagattgatcaatcttatcacgcatttttaacataaactcagcaatgactctcatatcttccggactaatggatggagaagggccttgtgattgagcttgactttgagtacaaaaacttgtttctgagttgtgtttcaatttataacctactcctctttgatagtccaaccgactcccaagaactttactcatagcttgaaattgcttgtatttgctagaagatccatcgttggaatcattttctgttcccgtcatgctagcaacctcttcaagcattttctcctgatcaaataaaatattagaaacacaataataccttcatgcattcattttaaaaatattataaaacaaaaatttgaaacttacatgtagttctctgcatgtctcgctaatccaagtgtcttccgttccttttttaaggtggccttttttccaaatatgaattgcatgttctttagggaagtcctgttcaaatatagggttagtatgtgctatttgtaaaaaaatttgctaatagaaagttaataattttacttacaaattcattacgagacgctgccatcgactttatgccttgcgtggacaaatacttcatttcctttctatttttcttgttttgattcgatcgcgcaataaattttgggctcaaaatttatttcaataatttgcttccagctctctgtagagcagtgatcaggtatagcattgataacacttttcaaatcatttggtccctagaataatgttcttgaaagtgagtgtgcctgatattctttcgctcagaatacctctcttcatctcatgatagagagttcacatcactttttcaggctctggatggccatctatatcgtataaattcgcctccatctctttagcatttatagtccttgaacaaatttgcctgaaaaagttgcacagttcagaaattgtggtcgatataaagttcgggagaaactgcgaacaccaacagaaagtaaccattgcattattacatggtagtcgtgtgacttctgtaatgccctagaattaagagatagaatagaaaaaccctaattagataattataaataattgaggaattatattattanatagttcaatatatgtgaattaatatgatttataacatggtaag

SEQ ID NO: 55082 - DNA, 794 bp, Cannabis sativa
aatatttgaagaatggcaagttctcagtccagggttctgatttcctctacaaggattatcgtcgggttttcatcatgaagtctatgtagaaaatgcccgtcttccatgtcccgtcgttcaaaatggatacaccactgtaggtcatgctgtaggactttatgtagcatggctaaaggactacattacgccagttggagtagagttggtatgttttaattaattcccttaacttaatatgtttattgattagttaaaaactctaacttaattgttttgtcttccatatagacgcaacgccccaataaccaaatgcagaagaagcaacctgtgagtggaaaaggacaagtatctgaagaattacttggtcctcgaacacagcctcaaaaaataccagagaggccaagtaaaaagggtcgctacgttgcaccaaaaaggacttcaataatcaacaacttttttaagttactcaacatgtggccaaaaacaacaacaatccactttgaggccagcaaggatttatttggggttgaaaacgactcgatatggcttccaacaattgacatcaaggaattgtgccaaatgggatttttaggagcccaacctattgcaatctggtgcaagtatgatatccaattcttattaaacttgaaaatttgttttgagagcttgttattaattgtgtgtttttaacaggtttttgaaggaacggttgctagatgttaatggattaagcagactatatgcatttttaaatcctggggccattgcctctgatgctggggattataatgccc

SEQ ID NO: 55083 - DNA, 1313 bp, Cannabis sativa
ctgcccagcctcctccttcttggtcttctcgtagattgcaagcatcttttcagctcctttgcccagaaagatgaaatccatctcgggattggctaactaggcttaatagatagaccgtctgacaattctattgaccctatttttggtgtcagccttggcctccttaagctttctatcagcctcagcctggatagccttattagcatcctcgagctcttttattttattctggtcagcccttcattgcttctcatcttccttctttactcgagagagctcagactctaagtcattccacttcttggccatggcatcacgatgctctttggtctggcaaagctctgtctcgagcatctcaactcgttgaagccccctaggttgagcggcaaaggacaaaagagatgcttgcgaggaatgaaaccagaaagtaagagagtataaaaacaatgggattgaaagaaaacaggacagaaaaaagactaacatgctgcataagatcgtaacttctctacaccaagttttctaaacctcctttattgagtaattcccagtcgctggactcaaaggattgatagttccgccaattgtttgtagtttgtaacgagcagagttgtgagccttctgtaccagcttcaatgggcaaggggtaggagggctcaagaaagaccatttttgggcgagaaccagagaatttcacctggtgtacagacccaaggggctgttcactggcgctcgccacggtaggtgtagccttttctagagattatgcaggctcgatggtgagttggtttgaagatcgcttctagtttgtagttgtctttgtcttttgggttctttggtagaacctgaggcttcatttgcctgggctacatgttttttagatcttttatttacaaggttggggctgttgagcatgtcttccaaatcgagatccatatctgcgaggtaaaagagatacatcaacacttgctcaaaaatagataataaaaagatagaaaataaactcccacttaaaggaagttaccataattatcagaagatgacgaggaagaactatgataattagtaaactccctagacccgatgattaaatatatatcatgagggtttattagagacaaattccaatctgaatccagatgactcgccctatccaagttggtgccatattgttccgcaattccgaagtacgaactagtgcaactaagttgtacgtgaaacctaggataccaactatcaaacctatgtgttatgcgatctatgcagaaattatctcaagtatagaagttatattgactatcctgaagggttac

SEQ ID NO: 55084 - DNA, 681 bp, Cannabis sativa
tccacctcgagctccaaaaacaactcccgcctccgcgtcgacctcagccacagaccctcccgcagatcgctttgctcactttgagaaagtgcagcagcaaatgtgtggccaattgcatgcgatgtgcgagtatgagcaaaagcgagatgcagttatggagcgtgcatttaagaggacaacgccacgatttgaccctaagttcccacaattccctcagcacgttctcgacccatgggctgggccatcagcttcgaatacggaggagccccacaaggactctgagtagagggagtttcctaatacctaagctaatttctatttttttgttatgtttcgtttttagtttgtattgtgctaattgtgtgttgtcttttgtgtttgaaacttttatgtcatgtcatttatgtggttgttagtttgacattgagagatttaagaattgttatgtggcctagtgttttgctcgatgatgatattttccgctcattccatttatgtactgcctaattttatatgttgcatttgcatgttgaaattgttggatatcatggatgtttctccttagtctctactcaatagtgcatacttttattttcccaccatactttgcatttttcagacgattgctgcatatatacttttagcatctagaatttgttagtgcatctccttgaagcgaaa

SEQ ID NO: 55085 - DNA, 1198 bp, Cannabis sativa
aaatttaattttgacagcgtcttcatcgttgaaggttatggtcggccctcctgctcatggaactttgggcttcctttcttccacgaccaggataacttcctcttactcgtgctgcgctgttcgggcatacctctcccgagctttgcccgaatttccagcaatatgcgggcctccaattatgacttgtagatgcccatctaccggtggcactacaagaatgccaacttttgctagcgctattgggtaattgcgctagcattagttgacatttgccagcacaagtcctcaaatgtgccggcaaagcaagtcaacaatttttgcccacctcaacattttaccggcgcctaatatcgccgccaatagccaatattgccggcaacaaaccgccaaaaggtgggaattattggctgttcgagtcaacttttgccggagagcttacttgcgctgccaaaacgatttatttattttttttaatattatttacttttgtcgacgccaaaatgcaccggcaaaagtctgaaagaaaggcggtcaattttccctcgcaatgaaaaaacgtgcgcgcaaaagtaggtgtggcctttttccggcgcaattaatttcgccggcaaaagtgggaaccgtttgaccagtggacacgttgcatcggggttttgcttttgccggcgcatagccctgaaatttttggcagtcaacttcccgcctaaaggaaaacgtgtgtgaaaattttgtgggaaacttttgctggcacaattaggtgcgccgccaaaagtcccagcttaaatgaaacgcagcgtttcgtgcatttttattcagccacgaacccttcttccccattttcctcttctctttctctctctctacgttttggttgaaccaccaccagcagccccctctttccccctccaaacaccattttcaccatcccaaaaccctattttcactaccaaatctttttttctctctttttcttctttcttttcatcttcttttccaaaaaaccatttctaccgggactccgatgagaacgtgttgccgcacctccggcagccgctgctcgagctgccacccgccacccgccgcacctccactccggtaccctattttttctctattttagttttatttaatttattttttatttgtgtatatataataattttagtttatttgtgtataaaattgtgtttagtttttt

SEQ ID NO: 55086 - DNA, 924 bp, Cannabis sativa
aagaagaagaagaagaaggtgccaactggtgtcttagaaaacttggttgattgattgaggtatggtgaagattctagtgaccttttaagtagctgaaaggccagaattgaacagaaatgttaatggttttttggttttttaataatacctttcttttctttccttttcttctcagaaattttgattgactgtaagtggaaccgagctcagcttatttccatatcccaccgaatattctagttcaagttcaattattttcacaagctgtaattattattattattactaatcttcctccctctaaatttttttacataaaacacacctataatatatatttttgtaaataaaaatttatccttttccacttttaaagaaaaggaaaagaataaaaaaagtaattatgtaaaatattaatttttataaaaaaatttatatttttaagtttatagttatttttttttatatttttaaagtttttataaaaacacaaaatataataacaaaataatatcaaaacaataacaaaataacatcaaaatatcattaaaaaaaataatgtacaaataacaaaaaatcaacaattaaataacaaaaatataacgtaaaaatactaaaaaaatatattttatgtaaataaaatctaagaaaccgtaaaaatattaaaaatttcgtatagattatggttttgtaatttttttgttatttttgtattttttttaaattattccaaaaaaaatatttttgtaaaaataggttttatgaaaatttttatcaggattggtcacacaagtgacctaaaattatgctgtataactataaaataatttatgatcattttaacctttgcaaagtgtaaatttaaaattatattgttagtttgacaaatttaaaaagaaaaaaaaaacaaaataacaataacaa

SEQ ID NO: 55087 - DNA, 1278 bp, Cannabis sativa
gtcataagtatttattggagacatatcctaggctggatggcccactctatcaaaattggtactatattgtttggcaatcccaaaatatgaactgttgtagcttaactagacatggtattcagagtaccaactgtcaaacctatgagcaatgcaatctatacaaaaactatcccaagtataaaagttatacttgctatccttaaacttaactagcgaggtatgttcagccttaagcacagtaaggagccatccacaattattacctcgggatgcttcttcttcagcttcccgaggggctactttcttcaagaagtgaatgcgagccatatagtccctatctttctcatcagaagggatggagaacctactgctacttagaatgttttgggactttgaagtcacaagtggattgtttagtaccgagaatattataggtcttcagattaatctcatttagaagaaattcaggtgaatgtaacccaaacgaaagacctaagagaatcttgtgtcgtttctccatctcaggagttggaataggccttcttgagacccctgtcaatacaataagcaaaataattaaaatgcctacaattaataaattgaaaactcaaaactaagtttttgagaaaaggtaatacttacgtattaggcgagatgcagttgtgttgatgggggagagaccggatgtccagaagaaatcatccttgagttcagtttttttgggtagcctcacaataatccttcgatcatttgtaagggtcccgaggtaataaagccacctaatcctcacttccttgtgggacatgcctttacggagtaaaggtatagaatttcaagaggagttggacactcccactccataatttggtataagacctttaagcatgccaaaattctgtaagaactcaaaattaactgaaaacgggcaattttgagataattacataattccttgtaataatctctcaaagggagtactgctccaactctgatgtgctcaaggatccaagcgcctatcctagacaagccactagtactacaaccctcttctcgaattattctttcaggagggaaacaggtaaattcccctggagcaacaaacctaacacgacatcctttctcgtatttaatgtcgaaagaccttaatgctcctatggacctaacctttaattcaatcaattcagcctcaaatatgattgtgggatcctgaggggtcttggatttttgagattgtgtagtcataatttcaaaatttaagtctgttggaaatattttacc

SEQ ID NO: 55088 - DNA, 3290 bp, Cannabis sativa
  modified_base (26)..(27): a, c, t, g, unknown or other
  modified_base (606)..(617): a, c, t, g, unknown or other
  modified_base (1431)..(1431): a, c, t, g, unknown or other
  modified_base (2922)..(2925): a, c, t, g, unknown or other
ataaatcacttcaaatttcttatatnnataactaatcagattgtaaaaggttttatttatggcacaaaacccaacattgccatggtatccatcgataaggaaacttttagtttcaagtttaagtccccgaaaagtgatttagcgtgtcactcaccatttttacgaataatgtaatttaggggcctgtaaatggtcgagcagctgttccactcaggttgtcggtacacctgaattcgacaacaaggtaagattagtataatgatatgcatatatatatatatatatatatatttacatgtttagcatacatgtttattaagcctatattacatagagttatattggatattgatagatgtatgtttggctcagatactgatcgacgctatcacatcagtacggctagagtatgactaacgtactgagtataggctgatattatggtcgatagtattgtcgtatgaactttctagacttagttttgtgtcagacacgggaatatggttatggttgggtgtatgggcgcttgattataatctgagttattgctatgttattatttatgtttttttactgagtcaattgactcacagatattgtttgcannnnnnnnnnnnggcaaggctaaggttgagcagccatgagagctagtagatgaagattgtacatgtcggggcgattaggcctggagcgtacggtctttaggatagctggtcatattttgtatagtcgctaggcgacaacttttgtactatgcactatgaaatttttgtaaatattttgtaaaacaggatctccgttcaatataagtatgttattttgataattataaatagttaaataaagttttaattattcacgatttccaataaactcgttgattagcaacgagctggacaattaagttaaaaatcacgttaacactcctaaactagtagggtgttacaataattttttttgaagctttaataagtaaaaagcagtaaaaaacaaaaaaattatgtagagaaagtataaatgtaataatttacttgtcaaatataaatgtagagtttagaaaaaagtttatttatagtgtaaattttttttttaatctctcattgtggacttgttggagatttattgctcattttattaaggttttttttattgaaaaaaattaatggaatttacttttatatgacataaataaataatgcaaaaagatatgagattaaaataatcaaactttaaaatatgaggaaaaaaaaaagacatagataaatttgataaaacttctaataacaaatatcactagaaagtcaccagagaagacaccgacatcaaaaaagtcgtcgaaaaaatcatctaaaaagttaacagagtgttgtcattgttgaaacagtcaccgaagttacatgtctcatatataaattaaaatagaaccggttntataacataatgaataaaaataagcaacacgcgtaataattcaaacgagttataattaaaataaaatgggtactataacataatgagcacaaacaaataacacagaataactcaaaccagttataattaaaaaaaataaagaggaaatcagttcttgaaatattgaaacataaattaaaaataaaactagttccacaacaaatgaagtaaaaacgaattatacataataccacataaacggactataattaaaaaaaggtggttatcaattttaaaaaaaaactaaggcataaatctaaattgaaatagttttataaaaaaaataacacacaataactcaaaatataaaataaaaattaaaattattaaataaacttttatactgtaattatacttataatttacagctaaatagctaaataagcaaattactataaaaaatgaataaattgtaactggatgaggatatttgtaatgatttttataatttaagaggaattttcataattgagaaaaatttaagagataaaacactacaagagtcgtcataggacaaaaatcatatttattttaatattaatttatttaccaaccaataatatcaattaattacacaaaatacataaggtctttcaaaagattccattaaattttgttgttctataccacacgttaaaatagtaattattaaatatttaatgtttaattaagattccaaatttgaaaacaaagacgaaaacaataataatggataagggttgaatatttggtctcaaactatttaagaaaagtttatagtccgtaaacctaaaaaaactcaaaaatataaattaataataaaaaaaagtcaaaaacagaaataatcaataatcttggctcaaattcccttgtctcctcaatttataaatctagctcaatagtcaaattgaaaatgcacccaaaaatcaggcaaactttttcggctctaaacaaagaaaggtatgtacatatatatatatatattgatgttgtatatattcaccaatctttagaaatataatacttaaaaagaaactaatagcgtgcacgtggtttatgaataagaacaactaatcttttaccttttctttaaagatattaacttggacttatttggcttgagaaaaatatttattattattactatcatattaatagtaactacgtacaaattcaaacttaagaatattgtggacgatgaatacacgttttttttctcacttttgaatagtaattattgtgtcaagctgtgtgatatagttatagtatatgaacatggttttgaaatgttaatagtacaatatcctattatttccacaattaaatctttattcatttctaaaaattcttgaggacaactataattaaagagactaattaattaaggagtttaagttatgagtccttgaaagttctgttcttaattaactttatgggttggtttagaacgtcgtattaagtcgtattgtattnnnntgtattatattgaattggattatagaatattttttttatataatactatgtaaaattttaatttatactaaaatattatatatttaggtactcataaaagttaataccacttgtagttttacataaaaatatggcataatatataattaaatataatacaatataatacagtgtaatacgacgtaccaaacaaatcctataagttcatattattacgtactaatattccttcattgtttatatatattatataatattatcttctattacttcatgcacgtatgtacgtcacaactagaaaaagggcctttctcttcggtttttaagtcagtttgtcttcggtttttataaaaattcgctaccga

SEQ ID NO: 55089 - DNA, 996 bp, Cannabis sativa
aaaaacctacaaaataacaaaaaatagaactctttactacacaaaataatgaaaaaagataatgtgaaagaacgatgctaaaccaatccatattaaaaataaggatgtaaaaagacttgaaatacttatctgttaaaagtgaaaaagtcgttgaagtagaaatcgtgagcttaaagtggatcacttctcttgctcattgaccataccacaaaactatcctaaactagggacaagccataataaatggcgcaaaaactatttataaaaggaacataaaccgtaaaagacatcaaactatcaaaaaatagtgcaaaaacctacggtctcatatatactttaagcataaattaataagtataattttataaattatattaatgataaggatataattatcaattattaaaaaaatattcaaatttgaaagttaatgaataaaacaaaatatatttatatgaaaatagatataaaccattaaaatagagaagaaaataccataacattaaaaggtaaaaaaatataacaactgttacaaataattaattaaataaaaaaaactacatacctatagacaaaaaaaaaatgggtcacaaaacctaaaaaatatttaccaagcatttataataaaattagaatactaggtgaaagaaaaaaaattttaacaaaagaaggattttattcaaaaaaaaaaaaaaaataagcaacaaatacaaacaaaagccaactgcacaaaacaaccgcttcaagaaaagaaaactaccaactatttttttttttttggcaatgaataaaatcaattaaaatataataacgccatacaggctagttatgaatactacacttcatcaaataaatactatttttgtcaggataatcaaaataatactatacacccaacaaaaaataaggatattcatatctagctaaacaagttaattacatttgatatacaaatctttccctttcaaattatttaagcaaaggctaagaaaccga

SEQ ID NO: 55090 - DNA, 1244 bp, Cannabis sativa
acacttccgaagaactatcttcagctctaatttggaaaatagccaacacccaaatatggaggaaattttacctcttgttctggtcccttcttctgtagttgtggacagtttctcttgtagtatcctacttgaccacaatgaaaacatttctgcttacactctcccagatgatgcttcttgcaaaagaagcactctagataagtataataacttcgagggctgcactgatggccaccccgtccttgttttccctgaaacttctttctctggctcgagcccattgatgtcgatagagctcttttactttgatcaactaaggaatcactcccacctccaccaagacgattattaggaggagtagcaacctcaccaacagcaagagtacctcggggatcttgaacagactctatagtgtacgcaactagagaagtattgatcccatctaagtttctcaaaataactaaaggtatttgcatcatataactcccaccagattgttccattggaaattgagatgaaggtacaataggagacccttgttgtctcaatctcttaatctcctcatcttgtagttgaatcctagcttccatttcaacaaatatttgctccaaatctaacggagcatacggtggattttcataaccaccccataagtcttttcacggtcttgtaaataagggggatcccaatctctccatccgccaccaatatcgtccatattagcccaactacatgattcttgccaggcatccattctataggacaaacctgcacattcatgagtcagctcggtcaggcagcgatcataattgaaatctaactaccgcttacatgggaacttagtattctcttactcagttatcaatctactaacatgctttctatcatagttttctagtcatgcataataaataaaactaataaaacatgtaagaacttaacgaaccatgagtcaagcttatcttagatgatgattatacatatcttgacaatctttagatgatgattgtacatatcctggcggctctgatacaaaaattgtaacaccctactagattaagtatgttatggtgttttctaaatactgtgcacgcctttgctaatcaaagggtttattagaaaaagcgaataattaaaacttcattagataacttcattttaataattaaacataataatttagataatttgggatcccgttttaaaggttacaaaatatctaaacttcaaaagttgtcaactag

SEQ ID NO: 55091 - DNA, 1600 bp, Cannabis sativa
tgtcagcagatcaaggctgaacattggagaccggtaggattattgcagccactgacactccttgagtggaagtgggagaatatcaccatggattttgtggttgggttacctagaaccacagaaatgtacgattctatatgggttgtggtagaccaatttacgaagtttgcacattttttaccgataaaaacaacctttatagtggaccagtacgcagagttatacatgtaagagatagtgagattacatggggcctcgaagtccattatatccgatagagattcgaagttcaccttaaaattctggcaaagtcttcaccgggacatgggtaccaaactgaagtttagtaaccctttccatcctcaaactgatggacagcctgaaaggacaatttgaatactggaagatatgttacgagcttgtgtgatggattttgaaggctcttagagcaagtacctaccactggtagagttttcatacaacagtagttatcaaagtacgatagggatgactccatatgagatgttgtatggcaggaagtgcagatctcctatcaatgggatgaaatgggagaaaggaaatacctaggtccagaatcagtgcaacagattaatgaggctatagaaaagattaaggccagaatcgtaaaaatgtagaattttaggtaggagatcatgtattcgtacgggtgtctctgatgaaggagatcaaacatttcggaaaaaggggcaagttatgccctaggtttacagggccttttgaggttggactggagcatatcgtctggccttacctctagtgctttcagcaattcacaacgtgtttcatgtttttatgttacggaaatacgtttcagatcccactcatgatcagagttatgagaatcttgagctacaaccagatttctcatacgaagaacaaccaatttagatcttagatagaagagataaagtccttcgaaataagaccataactttggtcaaggtgctctggagaaacagtaaggtggaggaagccacctagaagttagagtccaacatgagagctcaatatctagagttgttcaggttagatttcgaggatgaaatccttttaatgggaggataattgtaaagaccgcttagttttaatttgaaataagcaaataattagggtttaattatgaaactataatattaattatgatttatcattttatggagatttatttgaattcaggatgtattatttatgccatatatgaaattttatgtttctcatgttttgtgcacagcaacattggaacggggcgtttagccattagaatcacattttagtaattttgtagtagcggggcaatataattcgatattgagaatgttgggaatagtcgagaaattagaaatgaccaagttacccttaagtaacttagaagctttttggtttggtgaggggtaaaattatctttttggccatttgatcccttatcctttagtgagacttattaataactcaagctttgctctttaatggtgtttttgaattctgagtttattacttgatgttgttgcatggattctattctatatgatgtaattaggtgttggaatatattttacca

SEQ ID NO: 55092 - DNA, 1190 bp, Cannabis sativa
  modified_base (444)..(457): a, c, t, g, unknown or other
  modified_base (588)..(590): a, c, t, g, unknown or other
atcagtagaatacaagaaatatatagttaagatataggagaatcatcttatataatattttttaacttttttttttttaatttatgatttgtgttgctccagtagtttctatatagtttgttatgtaaattttggttgctccgttagttactataggaatttctataaagaattaattccgtaaaaatataaaaagaaaaactgttttaaagtgtaaaaataataaaatttctaatatatattaaaacttcaagtactttaagaaaaaaaaagtactttaagtagtgatattggtgcagtaacgtgcatgcctttaatttttattcggttctcttttaaaatttattatgtttattttttaaaattattttaccaattttactcttattattttacgataatttctaatattattattcgtgactaaaacataatatttagatnnnnnnnnnnnnnnatttagttttagtcacaataagtgttgtgatcaaaaacatatttgatcacaacaaataaaaatttttgtgactaatacttttaactatgaactttttaatcacaatatatgaatgataatttataattagnnncaacttttttatttttaatcacaaatcttgactaaaagtaaaaaaatttatactgtaattacattatggacaacaaaatttaacttgcaaggaagaaaaagaaaaacttacaaccagacaattaataaattagctttgatcattaatatatagtttgctattgttttattagctttcaaatatatagcattgatattaataaatgagattgtaaactattcttacaatatatagctagctaggtctattagctgtgctaggttttgatattagactttacgtgcatgcatgcattcacgtgtaccacacgtcattgcaaataatgaatttgatgacatgtacggtttgtggtaataatgggaattataatacccactcaagcttgaaggtaaaaattaaaattgaatcttttattaaaaaaaattatcaatcaatattttataaatttaattttttttagtttataattttttttatatttatttagggcacttttagtataatattttttttaattaatttctatttttaaattagaaaagtgaatatattttttcaaattgtactttataaaactgtttttactttttttttttttaa

SEQ ID NO: 55093 - DNA, 1396 bp, Cannabis sativa
  modified_base (43)..(59): a, c, t, g, unknown or other
  modified_base (566)..(577): a, c, t, g, unknown or other
aacaatctcaatagttcggggggcatttttaacgaccttaaannnnnnnnnnnnnnnnnttggtacatgtcaaagttcatgggtcaaaaatcctaattaaccttaataaaatacccaattatatgagttcaaatttcaaggcttctttagtacatctattccaataaaacaatgcaaaatttattgattaatacttgtctcataaagtagaatttctatctaaaaatacatttgagactaagtaaattatattctaattaacaggtaataactaaatagagttactcaagaaaaaaaaaatcaaattccaaaaaatatcaatgtaataataattacaataaataatcattaatactatattataataataatagaattaattttgattttgagtaagtaaatataaatataaatataatgtttatacatgtattacaatttgaagtaaaaaattaattctacgtaaataaatttaaaaaaatatatgtatatattttattaaaatgtaaatattcttatatagaggtatactttatgaatacgggacttagaaaatgtataactannnnnnnnnnnnaggttattcttatttataacttgcccaaattgggacttgattttttttataataaattagaggttattcttgaataaagtattgttaaatagaagttctacgatatatttaatacaaaaagatactgtctaccaggaagatataaataggtagggaaattctatagttggtgcattatcttttatggaattgtttctcaacctgaagagagtatattggtaatcaaagaaatataatctatatatatatatattagttggactgcacatgaacttgtaaaggttattgtaagagctttgagttttttacaagtgtgtatgaaactttcaaagatttaaacctataatctatttttctcaaaaaaaaaaaaaaaaggagaggagggaggaactataacaatatttgaaggttgctaaactccaccgttaattatcaaaagtaaaaacatatttataaatggaaaatacttatattttattattattttctttttgacgtaaaatatacttatatttacattaacataagttgtatatagtatattactactgattgcaaattttttactccatctaatcgtcaatagcattgtatttccttagattgggatgagaacttaatacattggatacaaaacaacaaactgaaccaatgtaccaatacaagttgaatagaaaacaacaatagacttctatatgtgtatagacaaaacgattcctgtaaagatcgcttagcttaaatttgaaaattagcagatgattagggtttaattatgaaaattatttattaattctaaattattattttatgatgatttat

SEQ ID NO: 55094 - DNA, 1466 bp, Cannabis sativa
atttactttttgtttgagttttttgttaccaactgctttttccttgtcgtcgccctccaatttcacatcatcactattttgttgaactggaaactcaacgtcttctttactattaagctctgcttcttctttgagcttttgattaccaactgttttttccttgtcctcgccatctactttgacatcatcaccatctttttgaagtggatactcaacgaccttcatcatagaatttaaccactttttgaacacttcatcacttggaccatggaggagaacattcatttcttgttctttcaatgttaggtagtgcagttccttctcccaaagcttgatttcagatttgatattggaaacgatcagaatgccatattcctttctcatttgacggtaattttttgccttcttgcaaatacaagaatcactcgtgaattcattgtcatatgttactttttgatgaacagctgacttataaaacttgatctctgcttgtagttgcgcaaccatattttggataagtgatcgaactctcgagtaatcaacgtccattgcaagcttttatttttggattggaggatgagaatcaagagaaaatttgggaagaagagaagttttagttgtggagtaacaatgagtaaacatatcatatatagagctagataaggagttaggatattttaaatattttttaatttgatgtagtcttttttagattttatgtaaacaatcaatgctctaacacgtatattgaactccaaatccatgtcccaattgtttgtaattttttttgttgaatattaaattaagttaaacttccaaagaagatatgctataatttctctcatttctcaagaaatataaccaccatatttacagaaccaatatcttataattaatttaacttcaacttccgaagatgatatgctataattaaaaaaataataataattttacaatttgaattatttaatgtggcgtgagtgactatatgagaatgactttttacaataaggataagatattcttgtgacaaaacagagaaaagaagagtttaaaaatctgctctcacataaatttatttttatatataaattcatataatattgatttgtttgatagtagaggaccaatatttactgtccatggataaaagaaaagtagctgccattgttgaggaattcattgatgatataagaaaatttaatgaattgaaggatgagattgcagctttacaacacgaggcagctgaattacgtgaggagttaataaggggctttgatgaagagaattttttcaatattacaattgagaaagcactatccaacattgataaggagggaagcaatgttgatattgatgaagattcagcaaagttggatgcagctgtgttaaagatgaggaagttggggaaattcattaaaagtaacgctgtaaatggtgattatgttttatcattgcacttacat

SEQ ID NO: 55095 - DNA, 786 bp, Cannabis sativa
attacatgatgtttgctgaggaagaattagagtgtgatgacgatcaggtggaacacttatgctaataaatttttgatagtagtctgatttcttaattgattattaactgaattgttatttttttgtaggtatcatgtggtgaaccaagcgaacaatcaaaaacactttaagtaccctcaccatctcatgtggtaaatattccctcactttagttgcttttgcttaaaatcatagcctctatgtcgtgttgtcttgggggccatttatagttaatttgtttctgattgccttgttcaaccaatttttgtctatgaaagattaaattataccattataccaaactcacaccattataccatattgagttctcccagataaaacaccacaaaaaatcgttgttttaaatacttaggaaatataacagacaatacttactgctatatgttcttaaattagtgttgaaccattataccattcctatctacctatacatatacacacaaacttaatagatattataagtcacattaatacatttgtttttttttttagaagaaaatctcttgctattaagttggctctttcttatattattatttatttatagttgttatctttaagtttcattgttacttctgggtcctctactcactatagggtgccttgtaaacttgatttccttatttcactgtccttataaaatgaaacttaacatgttcaccttaccaatcagcttggcactcgtggcttcaccctctgttatgataatagcacttttcttgtctt

SEQ ID NO: 55096 - DNA, 1081 bp, Cannabis sativa
acttacgatcttttgtcaccaaatttccaccagtctggttcgtaccacttatggccactgagaaaagaaatgagattgcaaattataagaatcattgaaacttcacaacaagtcatttatgcttctcatgttgtaaatgtccttatatcttaaggtaaaactcacggttcagagaaaacttcgcctgatttcatgcagccaatataaacacgaggcttatccatatgggttgctagagtagctccaaaagcatctggggaacatacgaaataaatacgaaaccccaagaaagatatgttaacagtaagagttttaattgtgaaaatacttctaaagtaggtagctttcattgtttagcgtgcatgtgatacaagtaaatatactaaataacgccctctcaaacactaatggtgtttaacagaagaatggtatttctcaaatgtccctaaattattgattaaaggtaatagaataatttctgtatcatttcatttgctcaggaataggaaacgtgtggaaataggggagagtagggtagggttatatttgatcatgacagggttcaagaatcccaactcctaagatagtttcatgtttctttactctgtttaagaaagtgattcaactaaccaatatttaaaaaaacatcatcattgactttagcgtagaactcagcgtcccatttctctgcagcatgagcaaagaataatttagccttctttgaatattcctcaggtgcctccacatggtcatcctgccaagaccgcaattggaaaatagttaaatcattgcagcttatataccagttttaattacaggaaaacattcataatcaattttcaataacacaaaaacgcacaagaatcatgaaatcattagtcctcctgttttcactgtcaatggcttggtcaaactggtcgccacgatttgcactgcagtagaatgaatcattaggcagaggtctattattgataatcatataccaaaggaaatattgcttcaacaacagtccctccaaccaaataacagagaataaaaaggaaataaccttcgtccaatgacaaatcgtgcaattatgccc

SEQ ID NO: 55097 - DNA, 2380 bp, Cannabis sativa
tttaatcaaaagcattacaatggataaggcgagtctcgccgaatagcttgactcgcacaaaggggaacaacccctacccacatggcactagctttgttaagcaaagcatcattggctaaattatgcgtaacttggttggcttcctctaaatacaaaagaaatcccctgtcacacattcattttgcagcagccatttaatctgcgcaatgagtccatcaacatcccgacacccttcttgctcatgcatcactaagtgtactgcttgaagacaatcggactcaacaaagaaggagggaagattgcgttgtataccagcctacagacccatcaaaatcgcttgtagttctccctgcagtggcgtaatgttcttttggacgtacctgttagcagccaccccaacccaaccttcatgatccctagcaactgaactcagcccagcaatgccttccccaaccttgacccctgcatccacattgatcttaaaggagccttgcctaggtggagtccacctcacctcttcccgcggctgtccaggaggcttcgatacattgctctctctaaattcatgaagaaacttgctacaccattccaatatagcactagcttgaggcttgagtcccccatgattaattgagttgcgaatataccaaaggttccaagatagaaccagaaaaaaatcaaagtcctccttagtaaaagaactcgaaattcgcatgagaaaagcaagcacatcctctcggccttgtcgctgaatatttccataaaagccagccgcatgccaaacctctcggttaactatacacccccataatgcatgaaaaacattttctcatacgcaccagtagaacacactgcttacaataaggttctacctggatatgccggtgagcaagagctgagttagtaggaatccatgaatgagccatcttccaaacaaagtgtttcaccttcggcggaattttcaacttccaaagcttgctccaccacttctcaacagcctgcgtatcagactgcacatctctcacttgtaaggcagctgccatacgatatccgcttcgaacggaatactccccatccttactatagtgccataggattttatcttcaatatcccattcagtggtgtccattcccatgattaattcagcatctgttggattgaagacaactctaataaattcctcatcccattccccattacctttcttcaaatcaatgacatacaactgatccggtagagacggtttgtcatatatcttaaaagtgacaggacgtggcagccaaggatcttcaagaactctaaccgaattgccattaccaatcctccagcgataccctttttgaataaccttcttcccccaaaccaaacttcgccaaacaaatgacgcatggttcccactttttgcctccaccaccccccatttgggtaatagcttgctttcaatactcggctacacaaagaatccggaaatcgtatgcaccgccaaacttgcttagctagaagagcttgattgaacagtcccaaatcccgaaaccccaaaccaccttgctccttgttcttacataaaacatcccacttacaccaatgtatcttcgaatccttctccgaagatccccaccaaaacctcgccgccatactatgtatgctattaatagttttcttcggtaggcggaagcaactcattgtgtaagtagggatggcttgaatgattgcctttataagaacttccttcccggcagccgagaaaaaatatcctttccatccctttaacttattccataccttattcttaatgaactcaaagtgttgcttttttgttcttccaaaaaaagatggtagcccaagatacttcccataattatccaccaccttcacccccattatacttgctaaatgagtccgaactgacatattaacattacgcccaaaacacatctccgatttatgaaagtttaccaactgcccagacgcttgagagtatttttccagcaaccctttaattcccttgcactcatcctcattcgctgcaagaaacaccaagctatcattcgcaaaaaatagatgcgacaccgacactccctgccttccaaagacaatcccatgtaactgccccgattgttcagcatgttgtatcaaacacgaaaaggcttcagcacaaagaagaaaaagaaaaggtgatagtggatcaccttgtctaagcccccgttgtggaattactttcccttgaatttcaccattaatgagaaaggaaaactgaaccgaggtaagacaactcataatcttagaaacccacaaagcattgtaccccaatttcaacatcatcgcttccaagaatctccattccactctatcatacgccttcgccatatccaatttcaa

SEQ ID NO: 55098 - DNA, 1752 bp, Cannabis sativa
  modified_base (181)..(184): a, c, t, g, unknown or other
aataacgagcatcagtgaactgtaccagcaaccattaattaaagattccataactttaatatgttgctgactgttttattcataaataagtggtcttattagttctttgtacagctacaagccacaacctcatatatgaatacgaaatttttaaatatttaatataaattattcaataatnnnnattaataatttaatattcaagcatttatcaaaatgttcaactctttgttaataattagaaatattaggcttttcaaagcataaaccctaatagactcggaactactcaattccgagatgttatctttattgccacatgtcaaacattgatgtctacatcatcaaggctactcttgatgtaaacacaatctaataaagttttaacaatacaaacaaaagttattaatgtattaacaacataatatatatactaattattaagtcattatattgaattgtcgctaaaaaataatgcaatatatacatatattacatatatttattcttatatgaaaaaataaaaataaaaatcatattataaaaattactaactttgtaatatatagtgtggtgtggtttgaatcacagttattcaagattgcaaactgcgccgcattgtacggtttgacaaaaatgtgaatcacaaccgaagcataaagaatttcaaatcacataaaattttatccagtatgaatgatttgtgcagttgtcatgatctctacaaattaatattattgtacaataatatattattcttataaataaataaatatgcaggtgagaattttgtgtgaatcttgattggttaaattttttgtgggggtttaatttgttttattacagttggggttagtttattgcggttagggggtttgagtggggtcttggtgtagtattgactgaaacatgtgattgacctctaaatagtaaatactgctagtggcaataatagtgatggctcaaagtcaagtgcaacgtatgtgcaatgcctttatttcaggttcagagattgaggacatataaaaaagccttacctctcttgtttggtatcatttttgaccatatatataaaaaagccttaattcctttaaaaccttaggaccttagatatatatatatctctataaatcaatgtcgtcaagctatgaatttatgaaagcttgaactaatttatgaatttccttataattaagtagtacgtgtttgggtttttcaaaaaaattagtaagtgtatgtcgaacaacgatctcaccgacctaactgacgccgcatcttctacctccgatccccttctccgcaagctcgaagacgccatatacactgtattatcgtgcgccgatctactccccatgggctcccttcaggcccggatcatcgtactgggtccctcccccgcgctcccgtaactatggcctcagctgctttagaagcttgctaaccctttgactgaggaggagtctatgtccaccaccattgttaggggtgggctttattccgattatttatttcaaggtctctgtcaatttctttactgcataaaactattgtttcaatttttgttttcactctttttcaaattttccttatttctttggatcagttcgcaaatttacgccatttcgaacaaaactttttgattttgttttctaattagacatgtatgcacacaggggcggacctgccccctgaaaaaaaaaatcgagaaaaaaatgtatatgtattttaattagttacaacatatatttgtat

SEQ ID NO: 55099 - DNA, 1567 bp, Cannabis sativa
tatagattctatatcaatgactagtgctcccacacaattgtactaccctattctcaagatgtatgtattgagccaaatctactggtaggcttcaaaaaaaattaaagaacaagaataatacaattaagacaaaacctaattatcccagaattaatatcattgatctaagatcaactattagagctttacctacaaaagatgttatggtaagtttacgatatctcttccgctgtaaatatcggtctagtcagatgtatagctaataaatctgatgctagtatactttactaatgtcctgaaaaagacattctacttatccaagtgtaagcaaaccctattgctgattaattatcatgttagtgtaaatctagtgcactgataaatcttgagactaaatagtttaaaatattaattaacactactaaaaaacaccctttagaggcaatttttaaggcctttcagcgtcggttttggtaaaattcgctaccgacgctgatccaggtgacgttgtagtgtgtaaataatcgacgtcatatgtactctatggcatcgattatttagttcctagcaaataatcgacgccatatacacccaaaattgacgccatttaccccgtaacaactgacgcaaaatttgtaatgattattgttttcagtttatttaatttaatttatttaaattatatattatagtatttaatttaaatttaaattaaatatttattttttaaaaggtaaattaaatattatttcatttcataaactgaaatgaaaggtaaatttaaattagatatttattttttcggtaattttatgattggccaatatacctaatttcatttcatagaagtaaataaattataattaaatattacacaaatattgtaaaattagtccaaatattaagaatttaataaatataactacaagttaacctaaaaaataagctatagggaagaaaaattcttaggcctttcagcatcaatcatctaagtcttcgtgaatcactgccatcaaccgttctatccattatcgttgtactcgtaataaatcagtttttggattgtatatctgcttgtcttcaaactgaaaaaaaaaaaatttatattagtttatatatattattatttgttattataataaatactataatcaataattaaaacttaccgttttttgatcttgtataaaacagttggggtttgcacctgcgatgatgttggtaatgtatttcaaaacataaaaaccacattcttgatttttaggttgtcttggacaagttactagtgaaatttctgaccaagacccaagatacacatttgatgtccctatatattcgtatgctatgtttgaaaaattatattaacttttcaattcattagttaatcaaataatttgttacataaatagtcattaaattattaccttttcaacaatgcagtaatttgttcgtgaacttagtggccacgtatagggtctaaatggataactttccttagcgcaacgacctctagcatccaatgcgcactaaaaaattatattgggttataggtaagatagtataaaaa

SEQ ID NO: 55100 - DNA, 712 bp, Cannabis sativa
ttggtcggaacctcctcattcacaccaatcccaacatctatttcgggaatgaaagaccctaccacactccgagggagaggattagtaggtggcatacgcttcaacttcccaacttttctcaccttggtcacgaataatggcataaactctgtatttgacattgttaccctcatctctaagaacgttctcagttggtgttctttcttaataacctctggcagaaccatttgtcccttcatgtacaaggaacaaatctccaattttaaattatacgccaaaggatcaacctccaactcttcatataaaattgggcgcatttgttgtagggttgtggcagttctaactgtcaacgtcatactgtcttctgctttgtaaacccaattataaccctcaacacaccaaacaccatcgtacggtacaacaagaaacacagtcgatcctacaatttcaaacaaaaaaatgtgagtataggaaaaaataacaaaacataacaaatatcgacatcctatcgataccccatcgacattatgtcgataaaaacatcgacaatttggtttgcactgcatatcgataaactatcgacacaccatcgacatactatcgatatagactcaatgcgcttagcatgtcagacacgtggataatggtaattaatcttctcaactatcgacaagctatcgacattgtatcgatattcactcgataaatacac

SEQ ID NO: 55101 - DNA, 1507 bp, Cannabis sativa
catagtcaacactcaaccttcgtctgtcccacctgctccactagtttcaagttcttctgctcaactacctagagaaaaaacaagtttacctccccttcctccttgtaatattttctttccaatctgtcctacttcactactagaggaggttcgtgctgaactagacgttgtcgacaaacttttccacaaaagaattaactccatatacgaaaaaataaggaaaaattcatcctttccaatcttgattataaaattcacgtctgtgggttgcaatgttaacttctactggtaacattgctttcaagccgaatgtcaacgagaatagagtgtgtcccgtcactattttctctattgttctgtgagcccaaagtacttgtggaagttcatctacccatcttcctttagcagcgtccaacttcttcttaatagtgtcttttaaggttttattaacaacttctacttgtttttttgcttggggtcttgatactgacgagaagcttttaataatcttattcctttcacataattcattgaatagttcgccatcaaactgagtttcattaccagacactattttaattggtattccaaatctacaaatgatattcttgataacaaaatcaagaacttttgtgcaagttatggaaattagaggttcaacctttgtccattttgtgaagaagtcaactactactactacgtactttgctcctcctcgccctgtgggtaatgccccgattaggtcaattccccatattacaaatgggtatggcgaggtcatcattctcaattctgttggtggtacgcgaggtatatgtgaaaatcttttgcattttttgcatctcttaacaaattcatgtgtgtctttgtttattgttggccaatagtatcattgacggatagttttctttgacaaactttgccaacttgcatagtctccacaaaagccttcatgaatttctttgattatttcactagcttctgttggtaacacacatcgtaagagagacattgaatatcctctcttgtataattttccctcgattatagtgtagcgaggtactgaatacaagagtttgcgcgcctctactttgtctgtaggaagttccccgctgagtagatatttgattatgggtgtcatccatgttggcgaagcctctatcatctaaacttctttcttttcacacatacttggttcactcataacttcgattggtaccaaattcaacttattgagttcgttttacgaggccaattttgccagtgtgtcggcattagagttgtattttcttagaatttgttcaatcttaaaataatcaaactttttaaagttctttcgaaccttctctagatattttttcatcttgaatcattttgcttgatattcacctagaacttaattcataatcagttgagagtcgctatagcatattagattcttaacttttaatgctttagctattctcaaaccagccaacaaaggttcatattttgctttattgtttga

SEQ ID NO: 55102 - DNA, 2621 bp, Cannabis sativa
gaatccgttatttctcaacaaaggggatgagctttggactaaacccgtttctaatgggatcaaacttaatgtggacgctgcaatttttgacagcaacagtcggtatggttttggcttcgtggtgagggactggaacggcgagcttgtggtggcaatggggttttctcgaccgggaagacccactcctgctgatgccgaagctatgggcattagggaggctttgagttggttgaaggacaagtcattccaacatgtttgtgtggagagtgatagcttagttattgtacaagctatccatagtccgatagagatgttttcgggttttggtttaattgttgaagattgtaagtctttgttagactctatgaataatgtttcgttaaggtttgttaaacgttctgctaatcgagctgcacatgttattgcacgtcagtctcggttgtttgctgatcgtacgttcacgaaggatgatgtcccttcggaacttgaaattgtacttttaagcgattgctcttgagttaatgaagttgattatttattcaaaaaaaaaaagtttttcacccttgatttaatttccttttaatcgtgtggtgctcataaaattgttataagaccatcatttttaatttccttcatcactttatatttatccatagtaaagtagattctgtgacatgtattgcagttagataggtggaaattatatgtattgtgaaatttattttgttttaattgttattattttaggttgttttaattgttatttttctgtttaaattttttagaaatgtctaattataattgttatactactaaattgtagtagaaaaataaaaataaattataaactaattttaaacttaataaaatattaaaatattaaaatttaagtagataattcaaaattttatcaggttaatatttttacgattatataattcaattaataaataacttatattttaattagtatggtgaatagctattaattaactaaaaaactaatttgtcataatatcatgatatcatttatttataacaaaaaaaaaagtaagatgtgaaatacaaactaatttaattttgttaaaagtttcattattataaataattaaaagtaaaattaatttataattattaaatatatgaataattaattaattcatcataatagtaattataatttatttataatggaaaaatatatgatatgttaagtaatcaacttaaaaagtttataattttgaataattttttaaaaaaattaagtaagaaactaattcataataattagaaataataataaacttataaattaaaataattaagtgaaaaatgagttcataataataaacgataattcatcataataagggagcattttttaaaattaaaaatttgaatataagttaaacaaatttaataatcttcttcatttaaaatttttcttagatggcgatcgataaaagttggataacaaaaaattattatgacgatgcactagctgtctccgatgacactaatgcagcagatgacacacgtacagcgcagccgcactacccgcaaatgtcaaaagtatcaacaaccatactatctgcaaatgccacaaattccacaacagtagtctggagagaatggtgacggtgatggtgaggaggaggagtccacacaattgagattatagtattgttatttgtaattgtatgaatgtgataatataaatattatttatttgaaaacctatttttttgtaattgctaatttatatggtaggacacttttataaattaatttttattggttttggataattatattaaaacccattgggcacgactttgtcttgccaaaacgtatggctgaaagaatttttaattccaatcgggcaccatatgtgtcgtgccatttgatcagtcaattggcacgatactatttattgtgtccgttgagatttttcaggcccaacagaaaaaaaaaaaaaaaattaaatttgttgacaccaatttagtcatgcctatacttttttttttcttgtagtgaatacccatttaagaataaaacaccgaaaacataaatgaagagataaaatgattaaaattaaatacaaaagacaaataaattacactcaaaacaatattaaataactctttatttaagagttatcaactattattagagtttatttttataaaaaaaatgactgaaatatgcatacacatcatattgcacttcattagatattaatggtttattgacaacgtagaagcgttaaccttttggttgggattaaaatgagcgttggatgtgggactatctatcatggagatcttcttagaatcgttctctttagtttttgtcttttgagagccatataagagcatttctaatcgagtgccaaaaaagtagtgtattgttatattttaatacatttaaaaaaattatattttaatggtgttctaaaaagtgttctaaatttggcacatactaaatgttgtgccaaatttagtacaagatatagtattgtgctaaatttagcccacaataaatgctacttttttatttactataatgtcactaattattatgattcattgattttcactaaattttatttactttattta

SEQ ID NO: 55103 - DNA, 624 bp, Cannabis sativa
gagcattaaacggaaggtggtactcttgatcttgatagcacaaataatcgccatatttgtaaattatacgattattaagatgcatatatataagatgtccctggccatgaacatatatataggcaaaattcggtgcgtaaatttaatggagtagttagatttgttacgtcatatcatgacattataaacaattaatttcagagtatttaagtagtacgtactaagtcctttggtattggaacctgctttaattcgattatatatgtgtatgtggcactctgatattgatctacttcatttatgtatataatgaaatttaatttaatatgtgttttctatctttagtgaatggagttgttcccactactcaaatatataattatattttggtatccaagatagatttatagtagaagagacgacgacagagtgaaaacatttgaataggatcttataaaacctactctgcttttatattattgccaacgatcagttatattggtcccgttcggtacacactgtattttacattattttttactcaaaatctaaaccatatattttggatttgtataaattcaagggtcaaaattgtatgtgccatgttgtttttttttttttttt

SEQ ID NO: 55104 - DNA, 525 bp, Cannabis sativa
agagagagaggagtaagtgcgttctctgaagggtgtctgtgacatttgaacagttgccatcagttgaaattttacggaccacacagaatatccaaaggggcatttgccttttctctctctttctctctctaaaggagctttttttatatttttttttcactggctttttcctcacagattacccagaaaatgttttttttttcttcaagggaaaagaaaaaaaaaaaaaaactttgtgcttttaagagattgtaccttctgcatcactgaattgtactgtgtatcttttggaattactattggagttttttaataatattttctcataaccttttggaaaagaatcatttttggaactcattttaactgattaaattaattagatattatataatatcgtgactctttttaacttatatttatattattttataggttggtgacttcggtagataatagatatcatatcatatgatactcaactaataatttattactttcttattcaataataataataataat

SEQ ID NO: 55105 - DNA, 1981 bp, Cannabis sativa
gtttaactcgcgagctagaatcagcgagatgatgcaaaaattaccaaagtccagtcgcattcgttggactcgcattatgtaggaccaaggaacggatttaactcgcatgtaccaggatatctacgagtatcctctcgattttcctgcaaaaacatagagagggaccctctatgatgcgagctagtctcaatgacccaacgaccttgataaaccaatatagactcgcgtgtctaggttctatctgctcgttatacgatgttcgtaaatgcgactatacaagaacgcagacatcttagacttaattaaattttgggtatatcctaagcctgcgagcttaggatagaatatgaacagccaactcaaacattagaagtcgcataacgttgctgtatttagtgaatagaaactgttactcatttattgatgtttacgttttagtttaattactgtaaatcagtgtataaacggattgataatgaatgcaatccttgtgtaactaactggacacttgctttgtatataaaggagtgatccaccatgaaatggcacactacgaaactcttgcaacagtggactaagtagactgtgatctgactgaaccactatactcctttgtcttcttgatatttccagtttttactaattacttacgttcccagttcgagtactcgccgttctaggttgaatactcgcaattgttcttcacataatttcttcttattattagtattattattcatattgggtgttgcgaattttgctcaacaacagaggcattctagtcttttgacctttattgatatactttaataaaaatttaatttcaaggaaaagcaatgaaatttctggctttactatccctctcacccgacccctctctctctctctatctctttaacctattcccaactttgatttttggaaagaaatttgcttgtgttaagcttgattttgaggaattaagcttggttgtggcttgaatttgaggtagttcttctcctcactctttaattttgaattttttgctgagtttgggaattgaaatcatgctcttctaagctttgagtgttcttgattatatgatgagtgaattgatgtttgattttgatgaaattgggtctttattgcatgaagttgttgtagattttattatagagttgaggctataatttcacgggattttctaggttgaaatttaggtatgaaatgggtgtttcctgctggaaattttatgagttgggtatgcttgaagctcaagttcatgagcttaagtattgctagtttgaagcatgatttatgtgtatgtgcaaactgaattttcagggtatattatgagttgtgatgcatgtaatatatattttaatactatatctttaaattttatagtttgtggatgtgttttgagagttgggatatgatttgggaggatttgcatgtgtttggttgctgaaattcgtgtttcaggctgctggtttctgggtttggaacccaggagccgcggcatggtctgagcatgccgcaacccgcccctgttggtggaacctgggatgctttccccggtgtcgcgacatggcttgggcttgtcgcggccgacccttgaatattttgggcagtttggagttccaactttgaaatttcataattttttattccgaactccgatttgagagtcctttattttgttggaaagctcattccgagctctgtatgattatctgaattattaaagccatgaatatattttatgagtatggaatcaggggttaaccctatgtgtgaagatctcagattgtgtgactaggattaccggcacctggttaggagcactcggggattcgaaatctctgccattgctgaacaacaggtaagacagtagttagcacatgtgagcaattgtaaccgggattagggtgattaccttaataggaacgggtaatagcctagggttattaccctagtgatataagtgagtaaatgatat

SEQ ID NO: 55106 - DNA, 2419 bp, Cannabis sativa
aagttttatcttcaacatagtccatacccaaaacccggagaaaacttcttggcaccatcctcatagacattaaaggccctatatacaagacaaatgaatatgaacaaaacttaattcaaataattgtcaaaaaaatcaaataaaaaaacgaagaaaatagaataaataaaacatcacctaagatatttaagcaatcctttgctaatctattcgtcaaactttgcctcaagttcagaaaaaacgggatcaaaaaaagaatcatcgagagcatgaaggcccttgacatatgtaacaatcttgaaatcttgctcatctcttgcatatagagaacctgaagacaaaaactccattggagaggttttcaaatcagacgacccaaaatcaacaaaagaagatttcaatttcgaggaacactttctgttgtccacaagaggagtacaagaaacaatgccatcctcttcttctttagaaatattgtcatctattttttcaactacttcataaggaaaggaatctggaacctgttgaaaaaaaaaataacaagtaaaaattgacagtttaaaaactgaataaaactcgactgcaactataaaacaactactttgaaacacaatctcaaaaaataaaaataaaaaatcaataagagccatacctttatttttttcaaaagcctttaaactagccaaaacaagttcatcttcatcaatctcaagctggcttaagcccttaaaaaattatcaccctttaaatcaacatctttttctttgacattgccaatgtccttggagtcttcaccttcacttgctgcagtaccatcacctttttgctcaccaacatccgcaacatcagcaccctcctcatcaccaaccacatcatcatcatcgttagcatcttcaccatcaacactactatgctgctcacaagaaccatcaccatcagaatcatcatcattcttctctgaatttggacctatattttcttcttcatcatcgtgagattatgactcttccccttttttagctaaattaatctgtagaaaaatcacgaaactaaaactacataacataaacaaaatatgacatgataaaatcaaaatgaaacaaacttaaaatgacatattaaacatacctgaacatgagacttgtcacaaaaatcaatgacctttgtcttcaattcaccaattacatccgacacacccttgaaattaagttcaacaaaatctttcaaatgagaaaagtcattagacaatttattttgcgaataaataatttcattgactttttctatcaaaaactcaatatcaggagaaacgttcttccccggtgaagaaccaacatcagttgaagacttaaccagcacacgatcatcaataaaaacatcctcataaaaaccatctagcgataactgcttaaacacttcagaattgggcctcgggttcttcacttggacctatacacaataacatcaaaaacaaaaaaaaatgaaaaaaataaatataacaacaaaaaaaaactcagagcaactataaaccaattgcaagcaaactgaacacttacaatattaaggggtaaataaaaaatcttcaatgtcagatcttgcaaagctagagtatcctggccaagataatcaccactcctctaattcaaaattcttgcaatacgagaacgaagttgtttgcatcagcctgactaatctctttatatcctttgtgttactaagaagaaaacagggtacaaaatataagacagcaacctttaaagctaaagcatcatcatctctcaacatacaacccaaaacaacatcttcaacagatttttgagtaatcagtttaacgccacagaagcatgagtcaataatgtggattgatttttgaacaaactcagatttattacaatcacccatacaatccaaacccgtaatgagtacgaactccttaacactaagtcgcacacaatgaccgcaaatatttgcctgaaattccttggcattcgactgctggacctctctcaataaaatttcatgtacaatttaagggtaaaatttaaaagacagaatgtctaaaaatttaccaacttgtatagaccgaaataaggccttcacattcggagaaagaatctcattgagcttcttattcaattcataattacaagtacacaaaacttttggcttgtaatgattagaaatagggaatttgcattcccattcctgagaataaaaaaaaagtaatgagaacagtaaaatatggaaaatatatccaaacaacaatgcaaatacaactattatgaaactacaaacaaaccactcagatccaaccataaaaatttgttaaaaataaggcctaacaccaacgatcaacaaaaaaatataaaaacaaaaataaataacaataaaaaataagaaatatgaacaaatatatata

SEQ ID NO: 55107 - DNA, 3489 bp, Cannabis sativa
  modified_base (69)..(85): a, c, t, g, unknown or other
attttaaaaagaaaggaatgactaccaatgtaacaagaaaaaaaaattaatgatttttttatcaatttnnnnnnnnnnnnnnnnntttattccattccattcatattctcattctcattcccattcgtatattatcatatgcctcctaatgaggactagatctcagaatggaattctgaaactcaaagcttataatgctacaaagcatccttttcttgagtctctcttgcctattgagaccaagtcaattaaatttgctctcaaaagtcctcatcggtttgcttctatgaataaaaagtttatcgctctcatcaagcaagggacatggatacttattccttatgagcctcatgcgtgtcattaggaataaatgggctcacatagccaagttaaaccctgatggctccttagacaaattcaaattttggtattatttgctaaagtctatcttcaaactcatgtaactgattatgaggacaccttcagtcctattgttaagccaactacaattgttctcaatcttgatgtttctcctaattggccagttaagcaactagatgttagtaatgtctttcttaatggtactcttcaagaaatagtgtatatgaagcaacctcaagggttcattgatgaacgaaaaacctaatcatgtttgtctattacacaagactttgtatggactcaaacatgcaccaagggcctggaatgagaaactcaaacaaccttgtttcaatggggttttcaagtatccaaatctgatacctctttgttcatttacgactatcgtaattatcttgtttaccttttgattatgtggatgatatttgtataacatggttgaattcaaccttaatcagttctcttatctctgatttgaattaggcattctctttgaaaatttgggttcggtttactagtgtgataatttatagggatgaaacaggattgtatttaagtcgaagtatatacattactgatctttaaccaaacttcatatggagggagccaactcttatcccaatcctacaaggtccacctctaaactgagtcttataaatggtgaaccctttgaagatattgctttctataaaaatacatcgggtgctcagtagtatttgaatttgacatgacctaatgtaactttcatcatcaacaagttgagccagtttgttcatgctccatcaactaaacattggaaacttgtaagagattactaaggtatctcaaatgtaccttttttgatggactaaatttgtaggtttatgataatttgacttttcatgattatagtaatgcaaattgagcacgttgtgttgatgatagaagatcaacatgagggtgttatatttttgggtaataatttggtgtcttggtcagccaaaaagcaacaagttgttgttatagattaagaacataaagtgagtttcgagtattggtaaatacagcaattgaaatcaaatggattacttttctcttttctaagctataagtctctcttttctaacctcttattttgtgggttgacaatcaaagtgtcacggccttagctgctaatcttatgttccatgctaggtgcaaaaacattgaaattaatctccactttgttcgaggtcgaattcttgccaaacaactttcaatgtattatgtaccttctattgaccaaggtgttgatgcacttacaaaaccactcactactaattgttttaactacctcaaaggcaaatttcatatggtaaccttgtcattttgtttgaggggagatgaaacaaataaaactaatggtttattttgttagttcatggtagttagctagttagttacaaaaattattttttgttttaaaatttcttgtatttatgattagtataaataaagtgatatagctaaccggttagttaagcttttctttggctactcttctctcaactctatttctttctctctaaagttttttctgctattgctaagcttctataaattcatttcatatttgtgtgcatatatcattctaattttaatgcattaccaattaatatagttgtaatctcgattttaataaaacctcctacattaatcttttttttttcaacaactcctatgttaattttgattcatcactaatgaatttcttcttatcattataatcattttttttttcaaacacataaaaatcactttttataagtatttttttttaaaaaaatatatcttttaccataacttagagcatctccaatgattacaaaataaaagtattaaaataagtgtttgtgatatggaacctattttaaagtgatgtacctgcattaaaattttatctttatgaaaatcaaagtgcaaaagttgtcaccaataccatttttttttattggttcttttattattaatgatcatggatccattttggctctttttttttttggtgatgctcaaatgtagcttaccagtaaaataaataagaattaaattaaaaaaaaaaaaaaaagatagaaattaaagaaccaacaagtctaaagagtaattaaaacacaaaattcataccagagatcaaatagaaaatacagtacaatataatttgattaattaatatatctaaactataatatgtatgaataaaataagtttaagttggtactgtgattatatcatgatatctcttgtatgtgaaaattaaatcaataaaaaacctcaaaaattaaagttattaaacttcaccaaatccaccattactgcttctactgctatgaaaatctccaccatcacagcttccagtccaataatggcctcctcctcttaaaagcttcatcttcaaatgctctggcaatctcagagtatacctattctcttcttcttctgataatattctataattattacctctaactatcgaatgtcctgttgaatgtgaccttgaaaatctcccaatcaccacattatcatctccttctccttttcgatgatcgtgatcacgatcattattattgacattgttattattatcaccctgttgcgggttgttaataataccaatgtcaattctcacactgtcccggtcatgattttcatggacccgggacagaataggaagaggaggaggaattggatcaggactctgctctgtaggttttatagctagcggagcagagtccagttcccgacgacaaacaggacaagtcttgtgtgattcgagccaaagatcaacacattcttggtgaaagacatggtaacaaaccgtcaggagacgaagcaagctatcgttttcgaattcaactagacaaatggcgcattccaggccgtacctgtcgtcttcttcttggacatctttaacggttgagtaagtgaaagtagggaaggtttttattatggcgaggtcaaggccattgtgggcggcgattgtgtctgaggaagtggctccagtggtgcctgagaggtttccagagcgagttcttcgaaaatgccacgtgttgaaaattatgtccatgaaacatc

SEQ ID NO: 55108 - DNA, 1300 bp, Cannabis sativa
gctcttcaccaaacaagttggaaaattcattatctccaaattctttaataaaataaaaatatgtctgcatgggattacttttgtctcaaaccaatagcagtcacatattacatcctcatgatcattagaaataagaaccttgcgctttattccattttcacctttcatatattttttgaccaaacaaagagtatatcctggtattttttcgtctttcacaacaatatacttatcagaacaatttagctgttctttaatccttttaaaaatttcccttgtgaaaattgaggaaatttggtcttccatgcattccatatttgtttggttcaataaaggttttgtcatcgtagttttgtagtgctctttaatttcagtgtagcgtaacatagacaaagcatggtcaaaatgtcgtagaaacatacaatggtattttattttgcaagtctttttttaataatgcattcatagactcacatctaccggttgctctagcaccaccaaaataatgacctcgaagataagtatctgcccacttacctcttgacttgtactgatctttaatccacttgttattagccaagtcatatttctccagcaactctatccaattatgttcccattcttcaaccttgtaatacctaataaataataccaaaaatatttaaatttactcctcaaaatggaataataagaaaataaaataatcaattcaaatcatacctgaaaataaatttcctcaaatctgtattaaatcctgttttgtgtatatggtgcattgcattttttaaatgtgccatgagcaaattcgatggacaacatcagacatgacattagatagtgctttgcccatcgatttacaattgtcagtcaacacagttaaaggcatcttaccattcatacactccaaaaaagtttctaaaaccctagtatatgtttcccagttctctttctctagtagtgcaacaccaaaaacacatgttttatcatgattatttgatccaagaagtattactaatggcttttcatatctgtaaaaaaaaaaaaatacattattcttaaaaccaaaagtgaaaattattgtaattgttatacttattatgttatatgtgcataaattataacatttctggttaagtatttatatataaaattatgcactacctaaagacatttaatatatattaaaaaaattaaaatttgatatttaatagggtatgtgtatactaaatttaatatttaaggtagtatatgggtagaaaatgatgcgtgacattcttaaaaattaatatttgaaaaacta

SEQ ID NO: 55109 - DNA, 1972 bp, Cannabis sativa
gtaatgaaaaatatcattctaatgaaatttattctcgtcgcaggagaatatgtatcaattcttgttgtttataaatttaattataagtgatgtagaccctaaaggcttacatcccagaggaagatctaccaactcctaggcatgattttgcagtttggactcaattttactattaatggcttcttttacaaagaaccttcaggagagtttataaattctttaaaacttcgagattcactggcaaataggtcagaaaatctaaacaaaaaagatttcttttataattcttttttaacatctaggttaatcctcaaactcatggtttgatcctaactattttcatcaatagtgtcatgtgttaattttaataaacatgaattatctttgaatctacatggaaatacatctttaaagaaagatgcattcctaaatcatcaatattagagatttgtgaatcatgtacaaaaaactaataaagagtattattatgtgcatacctaatgaaaaagcaattaataatttttagatttatgtttactattttaggtaaatttacaaccacccactttgataagacacgtatttgaaggaaggctttgttctttttccatgactcataaggggtcttattctctttatttttgagtaccttgtttaaaaggtgattagctgacatgacaatttttattacaccgagctaatttagaactgattaaaatcgcattcatcattttttaatgtgcaaatttttcggtcagcaactctattttgttgaggcaaataaggtgtcgtggtttcatagcacaaaattcatcaaagagtgattcatactcactacctcaatcacttattaacctcttgatctttttgttgagttgattgtcaacttcacttttatggagtataagtttatctatagcctcatttttgctttatagaaaatgcatataacactattttgtactattatcgataaaagtaataaaatatttattttcttccattgtttgaacaaattttaaattacatgtatcactatgtattaaatttagaggttcattattattgttaatacttttgaagggagagttttgcttcaacatagattttatatttatgatttatattttaatgtgaaatttaagtatgtgatttaagttaattaatgtacgtgtagtatcacaaataacatatcttagtctacaatgtaatacatattgaaaaactcaaccaaataagtagaggcgttattaactttattgataattagtttaaaaaatcattacattgaacttaaacaacccatcaattatataatttcttcccacatatattatacttttggacaacacaaccttgtctgactcatatactaaaaaaaatccatgtttactcaatggtgaactaattacaaagttcttatggatctccagtacatacaacacattgtcgagagtcagcttctttttggaagtcatttttaggatcagtttaccttgagccactatttcaaacgtggcagaattttccatgaatatatttttttcattattcacttattcaaaagatttgagcatactcttctccgagcatatatgtcatgtagactcaatttcaatcaacccttctcattgattaaatttgactaggtttatctctgagaccattgctaatagatgtatattaccaatatctttggacatgtcattcactatattagcttcaggattatttattcctctttggcagtctatagtccactgacttgtgacctggcttattgaagttaagtacttaccaagtgattagaattgcttttttggtgacaccaccttttagttttaactttacccttatattattgggtttgaagttcttcttttctttggagattggaccttgtttcgttagattggctttagtcatatcttgactataacttttcttgtcagaatttttgttgtcttctttg

SEQ ID NO: 55110 - DNA, 753 bp, Cannabis sativa
tgttcaatgatcttgacatacattcctttccccggtttccataaatccgccataatattttgaaatatcatgaagtccgacactttccccgttagcaatcgtccaacgaggcaccaccgatcgtcaaactcaagttcttccacatcctcctcttcataaaccacctcgttatcttcctcatcttcaagacatatacttttccatttttgttccatatccttgttcactccactagatgaagccattgcagaaaagatcactcaaacaatcaccagtaaacaattacacacaaaaaagaatcactctaaaatagagagacaacaaacatgtcaagagacatgactcttcatcagatttaataatattgtttagtgattaaaataataagagagaaggaaagattaactaaatgatgatagagtggcatccaattttagggaagcttctttgtttgttttgcattccttttaagggggtgcattgtagaattttttttatgtatatataaagaaagtatgattagtattaggtgcttctacaatgcatccccttaaaagggatgcactgatgtaccctccacatgtttatgcattcagaaaaaaaaattatctcattttttttttattttcgtgtatgttatagttatttaagatatatttacaaaattttgagaagttcagaataatttacaatatagaaaggagtgttcaaactgtctattgcacacacatataaaataaaggctaattagta

SEQ ID NO: 55111 - DNA, 1438 bp, Cannabis sativa
gtatggtccattcaaattgcaagtttttttcaggttcaatatatttactatataatatatatatttacataaatatatatataagcaattagtgctctgtcatgataacacataattatatatatatagactattgtacccctcatcacatgcaacctttatcgatcaatatgcttttttccactccaactttctatggttggaccagcttgttaacaaaaatttgaaaaaaaaaaatacattggtgtgtctctcatgtaaatatatatatatatatatattttccttataatattatatttggtccttatatatgtatatgtatatatatgtataaaagctcaagtacttaattcctggtccatttggtccaatacattagcttataataagttccctggtccaaattctaatgtctttgttatatataacatttttctttttcttcttctttaactattgggttgttttaactagatgacaaatatgacaagatcatgattttttttttactctctttgatattattatgataaaaaatctttgcaagttggtaataaaataactaaagggaataatatgtatatatatacaaattacaatatatatactataagagaaagagtgtttgttaagatacaaagacatatatggtctatatacctgtataatacacacacactgtattattcttgagtaagaatccaaagatttggaaaagaaaaaataaaaataagtacagagaataattaaacgaatgtggagaaatatacccctcgaccaacttaaatatatatatatataagcagttaaattaaacttcaagacatgcatgcatgcaactatatatcatataatattatacatatactcatgtagatcgatcgagatctaaatgtatatggtttttaattggtttctaatatatattcaacactagctagcttgatcatcaattatttggagtttattataaagtcagcttttccaaaaccatcttgaaggtatacttatttctcttccatatatatatattggccttttgtaataattattagataattatttaaaattaatgttgctagttaattaactttcttaatttttcattttttcttacgtacaagaaaccttgattttaaatatatatatatatatattacgtactataggttaattatagattgaagtgcttaattataagtaatagtggaatatataataaatataaatatataatcgagttattagtctaattattttgaattattattatgaatagatagctttatttatttgtgtatttttttcactgcaatttatttaaacgtactagaaaacaaattaatattacaaaaatacataaaatttacgtggtttgacagatttaattttcctacatacatgcatccagcagaaataaaaaatatatatatat

SEQ ID NO: 55112 - DNA, 1503 bp, Cannabis sativa
aagaattcggttatataggcacactttatatagaatagatatataaaagtacaatacagaggtaaagtgacatcttaagaaaattttattacatatgttatcttcttttatttacattttttatttaatttttaaaaattttgtaatttaaatcattagtgagttctaagaaaaaaaatctcatggtttaaaaaccagtgtgactatatataaacgactatttcctccttttagtttgttttaaagttaataatacattaatttttatgggtgattaaagaatttaatcttgcccaattatttttttttttaaaatgtattatataatttttgcatttttctcatcaaggttaaagtgttacaatataaaaaataaaataaaataaatattgaattttttgctattaaaattttcaaattatattcttttattaaaaaaaaaatttacacaaaaaattataaaatatgatattatttttttttaaaaaaaaaaaaaaaaagtttacatactaattgttgacgctgaaaagtcaacaccagctcactagattggcaagaagattaataaatttaataatttagagaaacacacataatttatagtagtacaccccctatatcgcgatagtaatagggttacgtctactctgagtttttatttttcacgagatggtaattacagtaataaactaactatcaaaaactctagactagagagagaagctttgaccttgtgtagttttctgaatgtaaaaaatgagctaagggagctctcttataataggtgagtgagacccacaaaaataggagacaaatacaaataagttatttttcaccgttaatgatgatctaatctaatagtgaaaattagcttctggtggtgatggccaatttttggtgcccgatgagtctagttgcaagttacccggaccttatttttgtatgatgatagctttataattgagactagggtgtgagacatgacttgatatagcatttaaatagcttcaaaatgcaagttgaatcacatcaatcggataaaaattgagtgagttatggccattttactgaaggcagttcaggttccaatagccaagttgacatccaacggccaggttgacatcctagcgcccatgttgacatctaacatcaacttggacattgggtaagtgtagatacgtccaaaggatgtcccttaagattcctaagtgatagttggacatcactaagtccatttatatgttcaagtgaagctggtcaccaattatcggagatgttgctattttgcgaaaatgagagactcaaaattcttcatttttgggtgtggtggaaatgagaaatgcaaagttgtgagtttgatttctttgacttcatagatcattgtatttgtgaaaaactagactgatggtcaaaacgacatcagattcgagtaaacagaacccagcgcaccagaccatttgttgacctgggcattgggtctaattttttccaagcctcaaagat

SEQ ID NO: 55113 - DNA, 1431 bp, Cannabis sativa
gtttgtatgttaataacaggtgtcctaccgagaaccgatttttggaaggaattacaagctcgaagaccagaatcactagtcgagttcttcgctatggccaaaccttataagagaattgagaattctctagcagagttggaaaagggcaaggacaagcgtaagtcaccagtgccgcgatcgcgatcccgcagtcccagagggaaaaattcgagaggtcgaagcccaagaagacgcagcccacggagacagtgaagcccaaagttggccaaatcacctccaaagaaggagtcttcgccaaaaaggaaaggtggactgcgcttcgtgaactataccgaactcatggtgccacgagaccacatttatgcaattgaagaaaggatcagagtctttaagaagccgcccccgatcagggggaaccgtgagaaaagagaccccaagaaatactgtatctaccataaagatattggtcacactactctggaatgttgggtcttgcaggatgaaatcgaagagctgattcggaagggaaagttcaacaaatataaaaagaacgaggaaggtcatccccgagcggatggcaaagaagaaaatcaaaacgcgagtggttcgagaatgcctcgcaatatattaacaatcattggaggaccccatatcgcaggagactcctgcaaatctcaagagcgatatgccaaggaagctaaagagaagccgctcaccaatttaaacaatctcagcgagcggccagagcaattatttaaaagagaatgcgacgacatcacgtttatggagagtgacgtgagatgggtccatcacctgcattccaacgcactagtcattgtcgccaatattgcggagacaatgtccatcgtatactcgtggacaacggaagttcagtgaatctcttgaacttccaagcctttaaacaaatggggttgcatgagaaggatctgcgacctgttacgtcgagtatatacggttttaccttgggatgatcaagctcccgattaccttgggaactgcccctttagtagccaagtcgatggctgacttcgcggtaatcgaccaatattcggcatacaatgccgtgattggtcggccaattttgaaagagatgaagatcgtgacgtcgatctatcagctcacaatgaagtttcctactcccgctggagtaggttctgtgcgaggagtctagtcagactcgcgagaatgctacaatgtagcagtcaagctctcagagaagaaatcggttaacgtcatctatctgttagaggcaccacctcctcgccaggaggtccttaggatagaagaagtgtcgcataaagacgggccagatttggatccgaggatcctcgattacgcctcaaccgcccaagccgcggaagaaactatagaggtacctattgatcccgtagataatagtaaagttttgaa

SEQ ID NO: 55114 - DNA, 2107 bp, Cannabis sativa
ttagaggcaggattaatccagtcattgaataagatgaatggaaaaagtcaagcccggagcgaggctttgaaaaaagtaagaaaaggatacgagccccagtatactaagtatactaattttattaactcaagaaagaatatctgcaaggttatgtgcaactcagttcactaccggaagctctcaccattgtacaaggggggcatgcataagaaatatccttgtaagagatgtgaatcccacaacgatattggacataccaccaacgagtgtggatacctgaaagatgagatggaaaacctcatcaaaatgggctcctgcatgagtgggtgaggattccaatcatttacgcaagaccaacgctggctcaaggacaattggtcattcctatatagcaaggagatataaaccctcctctgagagtgtgctaccatcaagctccaagaatccaggcccgttaggcggtcctaaatgttcgaccactcaaaaatgttcgtgctccaacaccaagaaatccttacccaccaagggctactccaccgttagtcaatggtcacatttccatgatatccgaaggcaacacatattgctgaaagtacaagaaacgcacaaaaaagatatctcaatgagcttgagcaggaaggggaaatgtgtgaactagtacaaacaccagcacaatagcctcaaatgttgaattttccaatcacattcacagaagtagatgtgagacatgttcgctttccccacaacgacccattggtgattgaggctcaagtcgtcaataaaagagtatccaaatcctagtaaataatggacgttcagtcaatgtaatatcccaaaaatctaattatgattaattagagcatattttataaaatatgaagttataggtgtattaagggtataatgagtaagattatgattttactaatctaattcagcgggaattaatttttttctttaagtggataaataagcttaatttattaattacaaagattttattggaatatatgagtgatgtatgttattcgtggaataaaaataattttaggttaggcgatcttagagacttgatcggatgccaaaaatgtcacaatagttttaattagtaattttagtaggacagttaagataagttagtttatgaattaccagggtattttggggtattcggtgttgaccaaaatgccttagggttagagtttttttaagggctaagaaagagcaaaatagtcattttgcttatttaaattaattcttttaatttctttttttttttttttttttttaagttagaagctgatagaattagtattataagttagaagttagataataagcataagaaagtcaaaaccaaagtctcacttttctccttcttctcttcttctttcggccaagaaagagatccaaggaacctaagcttccctctgaaactttttcaccatctttagccatcaatcttcttagagttgaaccaagttagggaagggaaaagcataaggtaatgtttctagccttccttcttttgcttttcatgaaaactataggttttggtgggtgaacttttatgttgtagctgctgtgggattagtaaggttttggccttgtttctgggttggaatgggagtgttcttgatgttcttttgatagattgcttttgtagtgaagatgagagtcatgcttgagattttgaactcaaagcttgagctctcatggcatctttcatgttggggcataatttttaatttatcacgtggagaatgctataatgatgttatataacttttttgtgaagtttagaaacaatttcttaagtttggaggattttaagttgagtaaaaatcatgtttaaaattgtacagaatcagaattccagatggtaccaaccggaattccgtttggtcagtttttgggaaacaccgaatttcatattttggccataacttttcactcgtgtgtctattttagacaatttttttatattgttttaaagcttgtgaagaactctacaacatgatacataattagagtcgaattatatattttgttttagggtgtttttaccacaagatttggtaaaaaaccttagattatttatgcgggt

SEQ ID NO: 55115 - DNA, 764 bp, Cannabis sativa
  modified_base (40)..(52): a, c, t, g, unknown or other
tattccaaagaacctgaaaacatagaaaacaagcgtaatnnnnnnnnnnnnnagctaaaaacgcacataaattagatccaaaacataggctaaaaatagttttgatcatgaacatgtatatatatatatactatatacatgcatgcatgcatgtaattaattatacgttaaatagttttgatcgatatttttgcacgttttcaaataatataatgtgtacagtacagtgttattaattaataacgatatacctatatatatacggatcaacaattatatgaattcagttataataaagctcaattaattaaactactccctcacgcgatctatatatcactataatttttttattttggcatcataggaattttaaattttaaaataattgattccctacaaataaatatataaaatatatatatttttttatttatgatcatgctgactgatcttgccgactataataaagtaactattgatatatatatttatttatatagtattattataatataataataataataattagtttggtatattaattgattatagtctatttattttttggtagctcccttcatttaaatttatatttatatatatatatataattacttggttgtattactgtgagttaggtgaagtaggtgaagaattaacgataatagagtaagtgctcaacagaaaaaacagagccaagacgaaaaaaataagcaattataagttgagtgtaattaataatatctgatatatatata

SEQ ID NO: 55116 - DNA, 1611 bp, Cannabis sativa
acagatcgttcttcagtcccttcgatggtggtggtcatgggttgcgggtcgtcggccaggtaccagagagaggaaggatcatgattggtggtgctgtgatgcgatttgtgaattttgaggtggtttgtggtggtcggttgggtgagaagggaaaagacagtgagaaaaagaaagagagaataacaataaacaatttttaatattatattataataaaattatttttaagtaaatataacatttatacatgtattataatttagaacaaaattattaattttatgtaaataaatttatatatattttattaagatataattatttttatatatgggtataatttcttaataacttatatagaggttttactttattattggttatttaagtttgcatcagatccgatctaattataattttattttgccctgtaaatttcagtatttgtttctagtctaatgaactgatatatatttcttaaaaaaaaaattaaacaaattgaaatgtatgtggaattgttgaaattccatttaattgggggtaataaggaatctaagatccaatattgtcgtttaagaagtacagctaattatataccttaaatgtataattataattaaatcaaccgtttaataaggaaaattgtttctttcttttgtagtaatatatacatataaaaattaaattattggccggttgaagaaatatttgtttaactaaaaacaataataacaattaataatgggctacaaaattttgaaaaattcataataataaaaaaaaattaaattacagaaatgggtaatgataatgactagactattaccttagaattatagtagtggaagtttcgggtcgagtctttatattgaagcaagtaattaattaattaataatcataggttttgaattttgattttgttcaaagcaaattttacaatgcagaaaaccaaacttatttagtggattagtttctttccaaatcacaaaagtgaaaaatcaactagtgtcacaaatttgtatatattaagggagtttttactgtatatctcaacaatgtatttttatctgttttgatgtaaaaaaatttaattaatttttttgtgttgcatatcgtaattattatttaggacattaattttgcaaaattttaaaaaataataatttacaatataaaaaataatattcaaacaacttataaattatttaaactttgttttcgacgcttaatttttcttttgaaattttatcaatattttaaaaaatatcttaaataactataattatatacaaccataaaaaaaaaaaatatttacactctaaaaatttataaatacactctatgttttttattttattttacataaaatatatatcttaattatattagttttttctcttaattcatattcttaaaaaatataactatcaaacaaaaaattatatcaaattttattaaaaaaaaataatatgtgatttaaaaaaattataaaaataaaattgatataagtattgaaattaatataaaataatgtaagaaaaaatattaaaattaatttttaagaattattataaatatcagagtttacttatcttgaggcataaataaaa

SEQ ID NO: 55117 - DNA, 1753 bp, Cannabis sativa
tacgtttaaaaatcacataatacgcctatgctagttagggtgttacagttcctttcctggctttgaatgatacttgctgaaaattcccactgcatagaagatgtctggtctaatgcataacataacatacattagactcccaactactaaagcataaggaattcttctcatgtcctctatctcttggggatttggaggagactgttccttagatagatgtaaactatgtctagaaggcatatttgcccctttggcattggtcattgagaagcgctcaagcaccttatcaatgtgagctgcttgtgagagagcaagtaatctattcttctagtctctaataattttgatcccaagaacataattagcttcacctaagtccttcatcttgagctgggtgctaagccattcatttacatcaattatcttcttgacattgtttccaatgactaagatgtcattaacataaaggaccaagaaaaccacaacttgattatccttgagttggtaaacacaaggttcatctttatttgggtgaaaattgtaggttttgattatttcatcaaaccttttgttccaagagtgagaagtcttcttaagtccataaatggacctatttagcttgtatactttcccttcttgtcttgtaatcttgtaatcttttggttgctccatttcaagaatttcattaaggaaaattatctttgttgggattttatgtcctaaataaaacccaattttattgtaatcttatttactttcaataaagattagaaatcatatatttaacttgtcatatgatttgttcacatgttttatagattattatatgtttaatatataaattctattaaatctcgaacatataattattcacaaattacagtgatgtcatcacagtggaaagtaattgtgataatttgcttcaaacatttattcttatgatttattagtgtactggatttacactgacatgataatcaataatggggtttgcttatacttagataagtggaatattttttccaagacattagtaaagtaaactaacatcgaatgtattggctatacattagtctggaccaatattcacagtagaaaatatatcttaaacttactataatatcttttctaagtaaatatcacttaattgatcatagatcaaagatcttaatcctaagatggctaggttctggcttaaacgtattacacgtgttctttgactttgacttgtttgttacaattgaccagtaggattggcccaatacttacatcttggcaacacaatagtgtaattgagggagagcactaataatagaaatagaatctatagcttctataaatactttgaagtgaaatgatgatttctttagagcttagttaacaggcataaatgaaatacattaaagggtaaaacagtaattttagtccctacttgtaacgccctgacccacggggacgccacgtatgtgcttttacaaatttattataatttatctattagtttaggagaagtgcggtttaattgaaaacgctataattaaactaaaatataacttttatacaaaataccaccataatacggggatcccctgtttataaattcctttacaactagtttcaaaactgctattacaaaagtagggttacatttccaaatatagacaaagggttgatcttgatccctagaagccgagacactgcagttgatatgtacatcactgggagacctctgactcatggttgattcactttt

SEQ ID NO: 55118 - DNA, 748 bp, Cannabis sativa
  modified_base (26)..(55): a, c, t, g, unknown or other
aagttcttatttaggatgttaataannnnnnnnnnnnnnnnnnnnnnnnnnnnnntaaaataatttccaacacttctatcataagccattcaactttggctttggtgacgctcctcaggataggcatagagaaactacgtttgtacattatcccatctaggatcagatacctagcagcttttcttcttagtttgccagcctcatttttttcttttggtaaggcttcaatttggaggtaagttgcgataggtgtcatccatgttagggtgtcatccagcatgtcgacttcctatgagacaacaatgatgggttcttttaggaactgtatgggcaccaagtttgctttatcagttatggtactgctcgctaggcgagcaagtgcatctgttgtgccattctattcttttgggatcttcttgatcgtgtagcctttgagttgacttaacaagtctttgattttgctcaagtatgccaccattctattaccttgagctgtgtattcacccaggacttgattcccaactaattgagaattgctaaatatgtccaggtggtcagcccatacttcatgtgctaactatcaaggctttgtattcagcctcattatttgaggctttgaagccaaatttgattgctccatgtagttgttgcctctaggtgttgtaagggcaatgcctgcaccagacaatcggttagtgtagcttctgcctacatggattttccatgttagatctttgagattttgttg

SEQ ID NO: 55119 - DNA, 2046 bp, Cannabis sativa
taataataataataataactaatgtaagttgcgttttcatttttttatgtttttgtaatatatagataaatatagatcaatatttatgttagttaaaaatttaaaattaatattacacaagtaaaaatataattgattataaagttataataatatgatgttaaaattaaattataaaccttttcaagattttctataaaaaaaatacactaaaatataatcactaaacaaataaatttaaagacaaaaaatataagatatgttacttcattacattaatacataatcattctctaggctgttaatacgttatatatgaatttatcaatagataaatattgagtaataactttattttttaaattatagagtacatcaccacctttaaattataaatatttatttacgtggaccaataaaattgtgacattccaccatggcagttaacagctaaaaatagatggaagtgttaaactgctagcagaacacgagtttaggaggttttaccactagaatttaaaattgggggttagttgcaaaaatttggccacttaaggaggttatgccgcaaaattacccttcaaaataatatacgtgtatagtaaaaaaaggtatttagaaacattagaaaaacatctctaattaattaagtaataaataatatattataatttaaattttaaaaatctctctaaaaaaggtctacccataataatttcatactatttcatatttatttgtaattttttttcattcccctaaactcaacctttttaaaaaatatgtttcttttattgttataaagtatttttttttaccaacataaataatgatacaaatagttgaaagatagtctggtctcatcaaaatggatggcaatttgtgttcatgggtcatgttcgtgttgtgtcaacaaatgtattacaagtatatgctaaacccaacccatttaatattgtgtcaaaaaataaaattcaaatacgattcatgtaacccgtttataaatggtggagtgagatacgatgatgacaataatgagtttgaatataatgacaactataaatgagatacggtgataacaacgattttgaattaacgtagtcccgactataagataatgatacaacacttctgagattacatagtcattttttttattgatttattgattattttttttaagccttgtgtaaggattctttaaattttctttttattataatgtttgaagatatatttttatttcatttatttattaaataaaaattgtatgataatttttattttattttacattttttaggcctcaattttatgtaaggattcttcaattttttttttattttaatgtttgaagatatatctttattttatttatttattaaataaaaaattatatgataatttttattttatttttacatttctgaatgaaaaaaattagtcaaatagttagtcatattattaaaaaaaatatcaaaatataaacgcaggttagacgacgtcgtgtaattgcaatgtgaaatactatacaaagctttgttccctccaaaataaattagtctccctccaaatttcaactccaaaggggtcaagtccccaacctaaaaagaaaaaaagacgacacagagatttcatacttaaaaaatataaactcggagctccgaccccattgttgcaccatcgccatgtcaaatcgccaagatgatctcgaccttcttctttctcttcaagaccgcgttttggaaactccccctgcttctccttctcgcccccattcccccggtaaagttttctaatttttttttcttttctttccaacttacttgaacaattgctcattttcgctctctattcatggatactaataaaattctctctctctctctctctctctctcgatatatatatatttatgtttcattagagtattgctcagatgaggaatctccgagccgaaaaggacagccggacatgtccgtgtttagggaagctgttatagattgtcttgactatgagcccgatcatatacaaaaggcttcaaaa

SEQ ID NO: 55120 - DNA, 622 bp, Cannabis sativa
tattatgcctgagatttgtttttattgactttgatatgaatttggggattttaatattgttccaggatatattggattgcttttgtcaatagaatttttatatattggattgatttatgttttgtaagttcatgagaattgaattttgataaatggattttgtatttttggaaagggaaattcttttttgtttgtttttcgtttttgattctgatatatttattttcataattattttcgttttgggtttctatttaaaataggcatttggtggtttggttttcgaataatgtttctttgattgatttaatggaatttgtctctgaccagaagtttatgttttcttttttttttagtgtggtgtagaaatttatctttttgaatgagtctactaatttgagactttactgtggttttttcagttgaattttatcttgtggaagaaattatatagagttcatgctacccttttgcaagataatgaagacaaagtatgagtggagtagggtaactctttttccctttcaactttattgtcttctgcgtattatgatttttctgggttaataaatgaactacttgcttctatctgtaatctttagcttagtggtgagggagggat

SEQ ID NO: 55121 - DNA, 1314 bp, Cannabis sativa
tatatggggtaatttctcaaaaaaaaaaaaaaaactcttgtaatattaaatataaaaatgagtatttttaatatttgaataattttaatttcattttatgtatatgatgttgtatattgaagttatttaagataattgtaaaattttgagaaatttaaaattatttacaatataaaaaataagattaaaatttttcatttcatatacttcaaagtaaaataagagcgtgtgtaacaaatagttttaactttatttgcaataagttaaattatttttattattttaccaaaaattatataatatcttaaataaccacgatatgagaggatcatataattttctatcacttttcatttttattaatatctttttaaattattactatttgatttagctgagaaattggaatatagctattttacacccacctaaataccattatgcatagttgtgttcctttaattattattgaatgattgaagtatgcccctaaattgttatcattactaaattgtgacttcaaattttagaaagagagaaatacgatttagtaattataataatttgaggaatttaaagatcttatgtttttatttacacttttgtgaattttattttacatttttacttattttttcagaaaaaaatattattttcgtgttgctttcccaataacgtcaaaaaaatatcattttgaaacgaaaaaaaaaacactgtaaaaaaatttatattacttcctgtagcaacaatgtcaaaacaacactttttcaaaaataacagaaaaacaacactctatacttttataaaaataaaataaaatttgtaaaaaaaaaataaaaaactgttaaagtccataaaaatgtaaaagttttactatttttgtatgtttatgaaataatccatttttttattgtatttatacgatcactaaacatttttttcatcaatatataatttgaagtttaaattttaactttaccaaaaaagttgaaattttaaaaatacagtttgctgttaaattatagaatgattttctttagcaaaaaacccctaaactccattccaaagagtaaaaactctcaaaaacgaagaagagttggatgtcattaaagattcatggcatcagtcacgagagattgtgttgttgaatacaatttgaatgatttgaccacaaaatgtaataagatcatgaacaacaatattaactctcctaaaataataataaaaaaaatggcatttaaaaaaagttaattaacaatttttcgccccgaactttgacatatactaaattatgcctcttgaatttttttggcc

SEQ ID NO: 55122 - DNA, 885 bp, Cannabis sativa
caagacgagtgtagtaaacttcaatgtcaaagtcagtggggacatatttcccatggatgaagaactccacaaaagcatcaacaaatgcaccgcaatcattgttcaacaaaaagaggaaaaaacaacagttaagcaactattatgcaacatacaacagcacaaatacaataactcactttttctgctgaactggaaggctagcgatctccacaagtcttagaggagctttcaggtcagaacccaaatcacgaacattggacctattcttgcaaaatccaagaagataaaaaaataatgggagcaaaacagaataagtcttcattgcactccttgctacaccattcattttggcagtcctcaaggaattataaagaaatataattctctcgttcaaatccaaacagccaaaaatccaatggctcttttttctaagatttacaatgaataagatatggttggcttaataccaaggcttagaacaagaaattcgcaagcttcgaatataatgggctattgggtgaccagcatgaatgtgagacatcttcgtttttaatgacttagccttgcaggattatggtatatagattggatagaattatcaaaaagacaatttgttgtagcaaaattctcagtaacagcagaagaatactttctttttttcctaaggtaataaaaaatagtattcatgtgctgaaacaacacaataaaaaaacatagtaagaacgtgaaaacacattccaatatcctaataacagaagcaaaactaaaaaataatgataaaataactatattaaaactacaaaattaaaaatgaatttaaacatattaccgagtcattgataaacatgtcatagcaagataaatgataaaaccaagttttatctt

SEQ ID NO: 55123 - DNA, 1432 bp, Cannabis sativa
cacattcagagaaagaagaagagctcaactagagtacctttggggaagaaagttgttggtgttattgaagttgacgccattactgctttatctgcccaagtcgcttctacgtgaaatatgatcaaaaatatgagcatgggtcaacaaagtgtttcctcacctgtcccacaacttgaggaggttttttgtagtgaggctcatacctttgacaatcgcccattcaatcgccattgatattccgtaggtggtccattaatctctatgtagctccatcaagtaattatcagggccattgctcgttgaaatttctataagttttgagaaattttcttgcaatataatgagcttgattagatacattctaaatctgaaaattattctggaatatgctatgctatcttgattatggttcttaattggagctgccattggccatttgtggtgagatttctattcaaggtttggtttgtgatgtttttggggtaaatctctgtctcaaatgttttgaaaatacacttgtcattgctgcccatttttgaataatggtgataattctagtgttgggagattgtaatttgagaatttacaatgtttagaaaaatgaatatctaaatgctctagggttaattgtggtgaactttgattttaattctagtggtggatattcaagttggatggttgctatggtcatttaaatgagttgatatgctgctgaacttgatgtggtttattttggttaatgatgttctgttgagttgtgaaatgtgtagcagatatttttgagcttattgttgtgagattgagtcatggcaaccaacaaatccaagtctcgtaagcgtaaagccccggccaacacctcgcccactcctcaaccgcaacaaccaatcaacccaaacccaccaacccttgccttgccttcccccactccaataccaaccattaccgaacctacacactcaccacccggcactcgtacccgtaaagtctcatcacctaaacccaaagctccaaccgccaaaacagctccctctacctccaaggcccaaccaaagcctaagcgcaccacttccatagtcccaccacctacacataaccccagtactagtcccaaagccaaagccaaccccgtccgccatcaagagcggtttgagatattgcaaacccgcaaccagttggccgagcgtggctttctccctgccccagaggctttacctgcctatattacaaatttgattgcggagcacaagtgggagatattttgtgcaattcccaagcctgttgtggcctctattctccctgcaatttatgctgcacttgatccaaagtatcctgatgtcgttcgggtgaagggtcagagtgtccctttttctcctgatgtgattaacgacttatatggattgacagctccgctagaggatgagtttgctatttt

SEQ ID NO: 55124 - DNA, 673 bp, Cannabis sativa
gctcgatctgcccattaactcgagggaccagggattataaccctcctctacaggaggaagggacacctcggttatctcgagagggagcaagtgacaaaaagacaaggggtagttaatccggtaaagatattttgtaaaagaattgcgacgtgagtacatattggctcactatggttgccatatcaagctgccacatggaaagctggtcatcaaccagaaacagtcaaagtcaaaaaactaaaaccaggattagttgacctgaaaccccgatatatgtcagggaccaaccctagatattaaaacaattctgggaatatgttagggattgaccttgaacatcaaaacccgttttatcaaaaccagattctcctagaagattgataaaataaataattgaattggggaagttcttatgagattaatgattgtaaatcacattgctgatgtaacattttgaacttcagttgtgaataaaataatcatttctttcaacaagtaattgtaaagtgtaaaccctttaaaattacttaaggggcatatatatatgatcaactggaattaatctggaaatacatagtataatgcaaacccactacttcaaaaataaaaagttttttttgaaaactttttataaaaagaaaaggtcctcgaccaaacctttttgacgaaagag

SEQ ID NO: 55125 - DNA, 1427 bp, Cannabis sativa
  modified_base (1019)..(1023): a, c, t, g, unknown or other
caaatggaatcccgcacctcaattttagtattattgttgaaaaacacagaagacttagagaaattgattctttgccccgaagccacctcgtaagtatgcagcaactccttcacgttgtacgattcttccaccgttgccttacagtaaatgtagctgtcatcagcaaagagcatatgagagattaccggcgcacctcgagcaattttacaccccgtgagtaagccactttgttcataactccgcaacaaactagagaaaacttcaacacaaagaataaataggtatggtgataaatgattcccttggcacagccctctttgagcaacattgggtcccaactccttcccaccatgtgaaatggtacaagaaacagaacatacacaatgcataactaaattaatccagcgaccatcaaagcccatccttaccatcatagcccggagataaccccactcaagcttatcataggctttgctaacatctagcttgagtgccaaataaccaaccctccctcttcgtttcctctttaagtgatgcataatctcataagaaatcatgatgttatccgagatcaaccgaccttgcaaaaatgcactttgagtatcagatatgatagacggcataacactcttaagtctattagcaaccactttggacacaatcttatacagcacattgcataacgcaatgggtcttaaatctcccatatccataggctgcttatttttaaggattaagaccaaaattgttttattaaggtttgtaggaagagaaccattatgaaaaaactgcttaaccatattgatgacatcatccttaacaatcggccagcacttttgaaaaaaacccagggtcattccatcaggccctggggatttatccgaatgcatttggaacaaagctttccgaacttcttcatctgaagccggtaacagcagctcagcattctgctgggatgatacacgagtttgcacgctacttgtgacttctctccagtcagtttgggaagaggaaaaaannnnntggaaataagaaaccataagatcatccaaaccactatgccagtcaacccatggacccgaatgatctttaagttttgcaacaaaattattcctttgtctcgtagttgcagaagcatgaaaatacttagttattattatctccctcttgcaaccagaattgcttcgatctttgacgccaaaaaacttctcgttgcacataatattcggccaagtgcttcgtagcttgtttgtaattggctacagagacctcatcttgacccaatttccacttctacacttcatttttacacttcttcaacctgtctttaaagttgccagtaacctccttaccctaaacagccagcttgtccacataacattgaattttatgcataacatcaacagactcacaaatctcccagctat

SEQ ID NO: 55126 - DNA, 2015 bp, Cannabis sativa
atgatagcttggaaggactcgagatcaagagcaaaccacatgcttgactatttgcttatatcgatcgactaccatatagtagataaagtaattattttatcataacatacacataaatctagaactgttttaggaatccctgcttaaccctacaatcttcgagagcaaaccacatggttgaccatattaacattcgaaacagcattaagaagtaatcaagtaagatggcatgaatactaatgaagtaatacctttggtggtttgaatggataatcaggtgggaagtgaatagatataagaaaaacacccccagtaaaaggactttcagctgggcccatgatagttgcttgccaatgaaacatatcatcagccacaggacctgctccacattcattaaaccctttagatactaatctatgcaaattacaatgaaataatagcttcaaattcataaaaataaataacaaaattgcattctcctccatgaatcaaaagttgaatgtaatcaattcgacaaaatgaaccctttttctcttagatacataaatacaatacagaattacacttgttttcttctagtttcaaattttagtaacaatctttgtttattattattattattattaacgatgcgtacacttacgtgttgaatttttcataacacatacatatagagtttataatatttcttcaaaacatgtataattatccaagagtgttcttataatttgtaatccgtgattccaaaccttaatcaatacgaaccaaatcatttaagaccggaccaaatgaatctgataatgtataaataatttggtcaatcaagaccgtttaaattctctaattcgatcagggttttaaatatctcaataggagttcaaactaaatcagtccgcataattatttttgacgaaatattgatatttaagaacaattttggtagaatatttatattctcttaaatattgttaccataataactttttaatcattatttatatattataaacttgttaaagtaaagaaattaccaaaaaatgaaccattattataaaaaaaaaattagaacaactactacatacaaactataattctaaacgaaaccaatccacttttgtgtggtttagtttttgtttgattttatcagtctgttttggttttaattttttaaaaaactagtttggtttgaaaaaattaaaaatggaagcaaacaaacaaatccactataattatgaatgatcagaaatcaattaaaaaaaaaaaaaataccagcactgcaagaggcaggaggatccttctggaggtccttcaactccttgttgatcctttttgaagccatacccaaaaacacacaaactttcccctttattaattcaacaactctgatcagcaccataaacataatcaaaacatgttcttgttataacacaaaatcttaaattaatcgtaaattccagacttaattaatagtaaaaacagagagcttgctcgtaaaacaaccatcctatcatcatcatcatcatcatcatcatcatcgtattcagggataatatatataaaataaaataaagaacgaatccctaaatagttatttaaataagatgatcataataaaaaaaaacaaatgaaaaaatgaattcaaaggaatgattaaaagaaagaaagagagaaacctgaattggaaatggtaggtagggttttcagtaatgaaatcaaacacagagagagagccaaagcgttcgaaggaaataaatcttactgatttgtcacaatcataactatatatatatacacatatatatacactctctctcactcttacacgtggcagtgtaatgtatgcccacctagatacaaatatgtcggtttatatttttacttcaaaatcgagacgagaggggatttcagttcctcctatctatcgactctaattctcaacaacctccttcaggttatttttcttcttcactaaccctaatctatcaattacacaattgaagtgtttgaagttgatt

SEQ ID NO: 55127 - DNA, 2024 bp, Cannabis sativa
  modified_base (264)..(272): a, c, t, g, unknown or other
  modified_base (524)..(526): a, c, t, g, unknown or other
aagggaagaaaacacgactgctaacgcattagctcggcttgcgagtagtaatgtaagttatagagagaatttggttcctatccagttcctcaaagaacctagcagtactggcacggaagagattggaatgattgatacttccccaaactggatgacaccaatagaaaccctacctcaacactggggaactcccagataatcgaaatgaattctcgaaagatgagaaggaagggcttcacggtacatcatagtagagggaattannnnnnnnngaggattctccatgccattgtttagatgtgttacccatgaagaagctgcacggattttgtctgaagtacacgatggattttgtggaaaccacaccgccggacagagtttatctaagaaaattctaaggtaaggttatttttggccgaaaatgatcgaagattcaaaggcctacgttaaaaaatgtgataaataacagaggttttcaaagatacctcgagctccgcccaaggagttaactcagatgcaaagtnnntggccttttgccatttgggaaattgacctgatcgtagacccgtaccccaaacttgggtccgagtccgagtttggatttgagtccaggaattggaatctgactaggacctagacccgggcccagactgggacgcagacccgaatcaaaactcggatcggactcaagacacgaacctgaaccccgacacggacttggacccaaacccgaactaaggaccctgacttggataggagactgagacctagaattaggaaccaaacctagattggggacccaaactcaaaattagagccagaatctggaccaaggactgggactaggacccaagacctaaccccgatcttgatcccagactcgaacctagacacggacacggaacgggatgcaagattggaattgaaacgagactgggacaaaagattgggatctggatcttgacccacgactcggggcttggacccaacccgtagtcggtgtgtagatcttggaatcgtaccaagatccgaacctggaaccatttccagacaaggacccaaacaaaaactcgaacccgagacagaaattggaacaagaaccgaaatcaggaccttggaataggaaagggacctagaaccaaaactggatctaaactgaacacggacgcacacctagactgtgatcgaaactcgaacccagacccgaacctggacccagacttgtgccagtacctgtgacccaggacccatgacccagaaccttgaccagaacccaaactcgtaccataacccggacctaaacctagacccagacacagaccaagacccggacctagacacggactgaaacctagacccaaacccaaacccacacccagaccaagacccagactcatactcaaactcgaactcggacctagatcaggactgggacccagacccagactaggaccgaggcctgaacctggactaggactagaactcggactgggactgggaccgggacccgggacccgatactgagacataggacatgagaacctaaccgtgacctagacacagactaggccaagactcgagacaaggaccagtaccgaacacgcatcgaaacctgcactcggacttgtaccataacctggactcggtcgtgtacccaaaccgggaccgagacccggacccagacctagacctaggacccgatcccagacccagactcggacctagatagggatctggatacgaacctggactcgaacccagacccggacccagaccgagatcaaaactcgggacctagatccagaccgagaccgtgacccagacccagacctagaaccacaactcggacctggaccagaacccagacccaaactgggatctggacctaaatctagactcagaccaagactcgaaccaggactcagatcccgacctagactcagacccaaacccgaacccagacactaaatcgaaatcgaaactaggactaggacccaaacctgaactgttggaattattttacc

SEQ ID NO: 55128 - DNA, 1684 bp, Cannabis sativa
  modified_base (479)..(483): a, c, t, g, unknown or other
aattatttaagtttatattttttctaatattaaggtgtatttataattttatggggtgtaaatataactccccattatttaatgatagggaaattaattgcaatttctaatctgtgtacaattaataaaagaaattcaaagaaaatgatttttcaactcagaaaataatttataaaggaaaaaaaatcaaattttaaaacattagtgaaaggaagaagaggttctagagtgtcgatagagaaaagttgagaaaaaagtagttaaggttattcgtgttagtttttatggtccatataaaaaaaaaaatggattttacaaaaaaaaaatatgtatattttagttgaatctaatatgaactataagctcaactgctcaagatctcaacacgattacataaaataaatctaaactatgagttaaaagaattttacttcttgatgcctatcatggtattctcaattcttttcgtatatattatnnnnnaaccaatccaggtgctatgaacttaatgaagacttcacgccagagtcttccagatcaatcatcaacattctggataagagtgggcttacaagattaattagatgaatgaattttctatcacaacgtgtactcaaattatgagacattgtgaactgagatgaggggaaaaacacctttctctagagagagagtgaggcatgtaggatgagaaagagaggggagtcaaccaaagctttttggttcttgagttgttattttttaactctcaattatatcgtatataatgacttgaaacttaacttttatgtattgtgtatatatcatattgttaacccagaaattgatcttggtggcgtggacatcaatgtttgacagatggcaagaaagaaaacatctcagaattgagtagtctcgagtcatagtagtcgacctgggaggggtccttagccctgcgcccaagttgactttgagaactccggaatgggtatttagatttcgccaacttatgttcaactcaatatctttcagtattttgtaccataaatacatgaagcatccaagtccaaggcctgtgagctgaaaatacacaaaacaacaccacaaaaatcaacccggggggctaggatttcacccagtgcctatgttgacaacctaactagggtttcagtttcagggaccgtcttagtgcaaatggttcaaactttgtactgggacatgaactaaacatgtcacaaacaaatttgaggcatcaaaattagattcggagaacttttgcttttgagtactcggagcaccaaatgctccgggtgttaattttttgggttcatatcagagtcgcagtggaagagaatacaatcaaatttaataataaaaatttgttgaatctgatatgaaccataaacctcggatctcaacacaattatacataacacaaacctaactattagtttagagatttttacctcttattacctatcagggtttcctcgctatttttttgtattacacaataaaacatccaatccgaaagaacttgtaagagaattcataccagggtcttccaagcaagcctcaacactccaggaatagagcggtctattagatttaatttggatgaatataatttagtgatcattgtgtgtactcaactcatgaaatactgtaattgagataagaaagaacatactcacacacaaccacc

SEQ ID NO: 55129 - DNA, 1496 bp, Cannabis sativa
tgcggcccgacaaggtgaaagaacagggcccaacagtttcttgatggctctcttccttaacctccaccaaatgattcactgttcaactcctagattcgctgcaatcagatggtgatgtcatggatcatacactctgtcttactagaaatcaaaagcagcatcatgtacttggacactactgcagaaatgtggactgtcctcaacaatcacttcaatcaaggtaatggacctcgaatctttgaactaaataaatcactcacttatcttcattaaggagatgaatttgttagtgcttattttactaaactcacgactatgtggaatgagatccatcaactaaggccaagaatcccttgcacttgtgttgctgcacaaaattaagaacaccttaattaaacagtagtgctactcaccatgtttgttgtcatatacaatgtttctcttactttaaaactagaacaatcaacaacaaacatgttaccctaccaaatggtacatatgttcacatataagaacttggtactgtagtcatcaattcccacatcacactgcataatgttttatatgtaccctcattcaagttcaatctccctctctgttagtgccctacacttaacacaatatcttttacctctaacatatgttatatacatagcccttcacaaacattgaggattgggacagctaggaagcatggcaacctttactacattcagcaagatttttccatattacctacaactaactgtaatacataatcctggtgtacaatctcataatcaatggcacacacgccttggtcacccctctaaactcattacaaatagagtaaataaacagttacgttctagtaaatatcttgccaatagtcataactgtcctacacgtcatttatcaaaacaaaaaattttaccattcatttctaataataattttgctgaagcaatatttgatctcattcatctagacatttagggaccttaccccctaccttctattgaaacatacaaatattttttaactattgtggataatcattcaagatacacatggatataaatactaagggccaaatctgatgccccactaatcattcaaacttcttcacctatgtgaaagtccattacaaaatagacatcaaacctattagaacaaataaagcaaaagaattaaccctcacaaatgtctatgcctgcaagggagtcctaaactatcactcttgtgtaggtagaccccaacagaatgttgttgtggaaaaaaaacaacaatacattttgactgttgctcgagccttagcatttcaatccaatctacctctatcttactggggttacatggttaaaactgccacctatctcatcaatagaacaccctctgtcctattgcatgacaagaccattgggttttgtgcctaaataaaactcatttcaatattatcagatttactaattaataaggatcagaaatcattttaggttgcatggttcacatgattt

SEQ ID NO: 55130 - DNA, 521 bp, Cannabis sativa
aaattttataccatattaaatattatttttatatttattttttgtcacttattaatgcaattattaattatttttatatttaataattttttttatagacttttaataaaattttaatgtttttatttgatttttttattcatttttatcaaagaaaggtaaatttcacttttagtgtgttggagtacttattgtaaaatttagactaaatataacattaacttatttttagccaaatttaattcaaattatataatattcattggagatggtgcaattcaaattgggaaagaaacatttttgtactaaatactataaagtaatgtagttttctttcttaaaagcgacttgaatttatcgtctaaaaaaactgatttaacaaatataataccaaattaattactggaaaatagtttttcataattattagtcaaaggttcttaatttagttaaaaccaaacaatacatataatcatgtaatgtaacattgtttgattatcctttatttatcaaaaataaaa

SEQ ID NO: 55131 - DNA, 686 bp, Cannabis sativa
ttctatttattattattgattaaaaagaagagaaaagaaaaataaaacacttgattttgtgctcttttatttgttgatcatctttcttttacgctttaggaaagaaaataacaagcaagcctattttagcaaataaataaataaataaataaataatggcaatggaccctgcttctgtataataataatgagaagaaaaatgcatgcataaccattaaaatcttttgtgaaatttaatttatggccataataatagtgagagtgacatagcaaagttaattaatccaagattcaagattggtgccattaccaccatcccttaaaaaacttaaaaagtatatttaatatttgcagacacagacaacttatctatattaatggcgagtttgcatcttactttgttcataaaattacacagaaaaggatttgccaattgccaactgctctctcttagtacttacataattatatttttgacaaatccattactcggtttctgaaagtgaaacttttaatttcattaacacttggagtaacgtttaaggtcttcatatcaaatcatgaatagaatagaccttttagaaaatataaaatgtaagggaaatttgattttctatacttaaaagttttcaaaattttttttttgaaccaataaattttatactatgaaaaatatgcctacttta

SEQ ID NO: 55132 - DNA, 1091 bp, Cannabis sativa
tgatttggatggtttcatgttgttttgtgtgttatattgatgattgattgatgtttgtgaaattttgtgaaaataattttgtgaaaattttgtcgaaatcaacaataaccatagacaagtcaagcgagatgttattttcaaaattagcattgcccatctttaaggaaaaaaaaacatgcatttaagcagttatctagtattttctagcatacaatttaaatgagacatgatcaattttcaagtttcattatacagttataatttaaatttaaatttagaagaactgccaacctatattcctatatataggtgaagatcccacagaaaaagggatggacaaaacttttaagagaacaatagaaatacaattaaatgtatattgtattggatactctaaaaatatttggaataagatagagtcgtggagtatgcaaatttaacttcaaaactacgtaaaaatatatagtgttcttattatactaaatatattttatttatttcttattcatttctgtgttaaatttattacgaaaggcttattattggttaacgaaaatttgcgttaatatgattaaaattggaaagtatggtaattgtaaaataatagataaaaatggttaaaaaatggcaaaaatataataggtgggtcccactttcatggctggccactaagtcttatttttttgctacttttatcattttttattctatataattcaatcctaaccctaagtgaattagtgtaaaaagaatatggtctccttataaaactttgttcataacctagttaacaacttgtcacagaactagagattgttttgagacatccttcttcttcttcttcttctatttttgaaatctcatagtgttcttcacaaatttttgagcctcatagtgatagattacatgcccacacatagcaagtctagtactcaatcattgtgtgtaagactgtgaagaatccaacaactaaaggagaatcgggctcagatcttgataatactctgcgacagagtgggacaagggttagaaatctgagttgaaggagtcatttgaatccgctgcagttaatgtaaggtttcttgaacttt

SEQ ID NO: 55133 - DNA, 2842 bp, Cannabis sativa
tcaataccattttttacaaaaaaaaaaaagaggtcatttattttaatttttctattataattcccactactatttggggctaaaaaacaatttagtcattttctctttttgaatatgtatgttatttttttttcttgtaaataattcctttcttccttgtaatttattttttcttggaaaaaattgtgattgggacatgttgtaaaatgtgaaaagtgtaatagttaggaaaaatattttttgagtttttggagtgtaattctagtataggcatggtattctcggcactgtatcactaaagcgtcaacaactaaagcaaggcgcagactgaaagttcctgtcgtatagtcattgtgctagaaacttaggggcaaatatttacccaaaatttgacgataataacgtggcaagagtaacgacacgtgacataaaaatactgagactggattaatggagaatatgtaaaggcatgaccgtcggggtgactgttagtcatgacaagtggtcatgatcgttggaatggaagtttgacggtcacctttacccctagcttgagcaaggtggttgcatccaagaaatcaacaaaaatagtggactaacaccctcataggtgggataaacaatcaccacacacttacgagtcaaattagtctagggggtagatgatactacccccaccatggacgtaatggcatcctcaaaggtagatgagtacatcctcatgacaccatgactacccacaacgtcgaaaggatctcgggggtgtcagccctagatgacaattgacaccctcctcatgttaggtctcgggggtgtcactcccaagtattagcttctatccccaaaggttgttaacgatcatatcacactctcgggagatcctcataatcagtgactaactcaaatattcaaatcccacaagaagctcaacgacagttacaaacccacgaaaatagtagcatattaccataagaatcagatttcaatcacctccaataaccaaggaggcggttgagataacactgcattggtcgcgtctcctgaagtgagaagcaccgatctttttccctatataaaggtccagtcatgatctgggaaaggtatctgaaaatttgagtacttagcgagaaaagactctgccattgttatttttcttgcattcaagagtctattattgattttacaattttgatcaataaagcacaaggggagtatgctattaccgatatctagggccgaacctttttaactttcagtatctttctttacatttattgcaaattctagtattattatttatatttattgttacaattttagttcaattcttatttattaagataacacattgattaactaaaaatctaacaacatatagatatatttttgacattttttaatgaatgtttactattagagtaaaagagaataataataaaaatattactgtatggcatccttatatcttctctttttcttttattatttttttgaatagaagtgaacttcattaacttataatagctaaatcagccattatagaaggatgtataacactagggacattactgacattaaagatgcgattagaccaataacaagaaccgcaagcaagacaatgggcaattttattagcagatcgcgacaccaaagaaatagacacatcaaccaaacagtttaacaaacgtttacaatcagaaattaacagaccaaaagctgagggcataaaaactgaactagaaatagcttgaactgacacaatagaatcagtttcaataaccacattagaccaatttttacccttaatccaacttaacgcttccttaactccaaatgattcaacaatggccggttgaacattcccaactcttagtgcagtaaaagcttcaatcaactgaccatttctgtcacgagccaccactccaatgccataagaaccgttactttggaagattgcaccatccacattcaccttgattttatttccttctagtttagaccattgctcatccttgttttggttagcaccaggcacaaacaaaggatcaaaacgatgagattgagcgtaactccattgatcaagggctgagcgcgcatgagtaacaacttctgcagcagtacggaacttactcttccatagcagctcgtttttagctttccaaatggaccaagctaccattaatccttcctcaatcatacctggccgtccctaatgcagcaaaattttgtactagagagagaagtcgaagccaacagcagcagcaacaacaacaacattcacccctgcccgattccagcagctctgaacaaagtgacattcaagtaagacatggctgatagattcatcatttatgtggcaaaaaacacacgaaataggaacatcaacatgcttagtttggagctgcaatcttgtaggtaaacaatgtgtaagagccttccacataaagtgcagcacttttggtggaaccttaaatttccaaagttttttccacactacatcctccatatcagcactccaatttcctttgttgagttgtatatatttgtaagcactttttaccgtatagaagcctgaatgatcatgtttccagtattaattgtcacccctccccacattaataggcgtgttcaagacaagggaaacatctatgctattaaataaatcattcaccaaatctgcatcccaagcctctccatttatattcattagctgtctcactttacaatggttaagggctgggtgagtagaagtaacaaaggggtttacatcatcagccagccaaggagaattcaacacctcaacatcccccaaaccaaggcaaattttgagcttcatgaatgc

SEQ ID NO: 55134 - DNA, 564 bp, Cannabis sativa
gtcacttgatctttaaaggcattacatatagttgatagtgctagtgtttacattgaatttttaaacacaaggcaaagctcgtggttgaagacttggagttattcaatgttaatgatcgtaaaattccttatctcaacaacaaagttatggacagaggagttgattgcaggtcttaaaaccttgcgaacaaaccgattacaaaaaccttaatgaaaaaaactttatatacctacaccataaatccaaaacttaataaacagaatacaaataaacttgacgtattgtaactattgagcatagtgatgcgccaactgatgagagtgacttggaggagagtgatttagttaagtgagttgacagttaattagactagctcaacttcagctgattctctccaagtttttaggcatttgttagaattctgttagagctgttcaactctctttgtactctgtaacctttaaggcacttgcctattataaactcagaatttcaaaaacaaaataaatataataaaactaaagaaataataatcaatgaataattaaactaaaattttatgtt

SEQ ID NO: 55135 - DNA, 1287 bp, Cannabis sativa
agtattaaactagtttataaaatcacacacgtggcatccctgtagattagagcgttacaacttggtatcagagcagccacagtcttaaaggtcctgaatactggtcgaatatggacatttgttgcgaggacaggtcgactcatggtatagtaagtgtttatattatttgctattggattacctgcctaggctattataaagtatgttaggaaaagtagcatagtgatgattgtgataagaatatgtgtatggtatctacatattgatattgatatccatctgagttctaaatggttagaagatgtggactaaatgtgtgataagttaagcagtaagggcaatcaaatagtctgattagcgagctatctgagctcaaggcaaatagtatggaagagaattctttattgctataatgttgggaacatgtaaattctgctatgcaggatatgattatacaataagggaaaacagatccgagatctgaaagagcaatagactcatcttgtgtctattcatgtattaccgacacttcttattgtaccactagatgtggtagaatatatgaagctaacttactagtagatcatgaggcgaaaactaaatgaaccaccaattatgggacagcacaaaaaggttccagggtggtcaggatagcggtcaaggtgagaataagaaatggtgaccttatcttgttttggtagcccaccgtgaaggaactccatggttgagtgtccttaacttagggtgatttcatttaggaaatttctcgataaagcgtgcgagtcagagcaaagcacgttagaaacacttggattggtctgtggggccagttatcagtccgagaagcagctagagtgatacactcgtgtataagagccatcattctgtgaccataaagatctaatagaggcttgaagtggggacgttaccaaggtaacatataaaagaacgtcaggaagagtagtgatatcactaaggggtaaaaaaaattatctaaattacttaaggtgaaatggtaatgatggagagtacttcataattgactggatagtcaatatggtatataaggagaccattgagattctgggaaaagattactttattaagcaattatagaaaggcatacttacccagaatggggaaaagcttataaattgagatgcaattaaatgaacatgtatttgagtgattgctgaatgttggattacaaagtaggttgtttattaaacaacgagctatataattgagtgtaaaataagttttaaagtggttaaccaagtatgaaga

SEQ ID NO: 55136 - DNA, 1050 bp, Cannabis sativa
  modified_base (1002)..(1025): a, c, t, g, unknown or other
aaattcacatgtagatagagtcatgtatgtgcaaatactattctggtttattatgtttcaaaaaagttgcatcacagctgcatagccataaatgaattttcaaattctcaagtacatgatgcaattccatttgtcatgttttacaatggatattttgatcaatgaatgaattatgtcaattacgaagtcaatgaccaattcatctcaataaactgcaaatatgatgaactagtatacaacttgaaacaaacaaagaatgcaaccaagaaaacattcagctgtaattgaaatagagagacttctttaaatttctatgagaactattacaacatgaaatagatagccagctagatgtgagtaatcagtgagtgagtgtatatgatatattgaactttgttagattttatatctaagtagcatatttatccataaaagttgaaatttctctaaaactcattgtagagaaagttaatatttatttatttcaaaactctacaaatcaagtaattacaaatgtccataagttttgaaatgataaattccatctaagtccattaccaatcaaacctttaatgcaaatatgatgatatgataattttttttttttttgatatatgatgataggataattaaattaaatgtttatactaaatcggagaatttaacgaaagtggatcctctgtcaaaatatgttgtccattcttttgtctaactaatcaaaacaacccatgttattaattacataatgacataacagccacttatcatatattcattccgttagtttgttattccctatataaaatacataataataataataaaaaatgagaccttttcaaagaccacattaataataggacccactatttattatacctatgagaaaagaaaactgattccatttaatatatatttaaattttaaatcaaattttttaaaagaaattattttagaaattgtataagtggatcttgtaatttttgttgggttttgtgcccnnnnnnnnnnnnnnnnnnnnnnnntcagatttacttattaataaatatc

SEQ ID NO: 55137 - DNA, 1155 bp, Cannabis sativa
ggcaattagaatgcaaactatgcatgttctaggtactaacacttttgtgattccttgaggttctcccttttctcttgggagtcttcagtgtcacttccttgctcagtattatcgagtgacttacttgtaatgtcttctaactttcctccattccttgtcatcatgggaaatagagggagtattcttgccactgctcctactctgactcatcttcgaaagaagagggtgattctttattgttgtcccattactcgaggtcatcctaggagagaggggaatctagttcaatgaaggtactatatgttgatccctcctcctcttcctaataattatcgaatcgagattcagggagtggacacgctgagtagtgcaaagatactagtggatcaacaccactaaccttcttggtggcctctttgagcttgatgaaatcatcatctctaactagaaactcttgaatagtgtatattactatgagtttcaagtcctgtaagaatggactcctattagtaagtcatgtagccattgcaatgactttttcatcttcattgtgtatccttatctggtaaagtattcctgtcggtttttataaccgttacctatgtgaccgtcgcaaaatgagtggaatagacgacagttcaaaactgtcgctaatcaagcatttctaacggtttaaaaccatcagctatagtccatagtataggtgatggtttaaaaccgtcgctaatggattccattaaagaaaaaccatcatcttcatcgtccttgaaaccacatctcgcatatgtcgcacccactccaaaaccttttcaagcttcatcctcctccactgtcactgttctcttcttcatcctcctcaacactttcttttacaagctttgaattactttttgcttgacgatccttaaaactttcttatgattggaaactttggatttcttttacacactcaatgatcaagatcaacaaaccaaattatggctaatagaaatttaaacagtaaataagagaatgttgcgcttacctttgtgttgccacgagagagtggaggagagggacaaagtgagagagattggaggagagggacaaagtgagagagagtggaggagagggatggtttagctagtggtcgcggaggagagagagagagagaga

SEQ ID NO: 55138 - DNA, 915 bp, Cannabis sativa
tcgggggattctttctactttataatccgtgaactcgtggagcagttctcggactatcgttacatatgtggccattctttcgccgcgcgtctgatattctcatgatatctagttcacgaccaattgggagtcgctgtagacctttactattttggctcccacagcctttgctagtctcaggcccgctatcaaggcttcatactcggcttcgttgtttgaagctgagaagtcgaaccgtagggctgcctggagtcgaagttcgctcggggaggggatatcattgcaacccctgctgcggatccattttcgttggaggctccatccacaaatactttccatgtggggaccgaaggtaccggcacgttcgcggttgcctcggcttcagtacactcgatgatgaagtctgccaacgcctgtccctttatggagattcagggtatgtagtgtaagtcgaattgacttaactccatcacccatttgaggagctttccggacgcttctggcttttgcaggacttgctggagtgggtgattggtcaacaccttgattgggtgagcttggaaataaggcctcaactttcttgaggccattaggaggcaaaaaaccagtttttcgatgacggggtaccgcgtctccgccccgatcatgcgcttgctgacgtagttcacgggatgttgagttttctcttcttcccggactaaggccgcgcttaccgtgtgttcagatacggccaagtacaggaataagtcctctctgagaacgggttttgagaggattggagacttggccatgtgctcttccaattttttgaatgcctcctcgcactcgtcagaccattcaaacttttggcacttcttcagaatgttgaagaagggaatgcacttgtctgtagactgggagataaaacggctcagg

SEQ ID NO: 55139 - DNA, 6575 bp, Cannabis sativa
tttctaagttggtatcagagccttccctacacctgtggtgtgtttcttttccttcttcatctccatggcagacccttcaactcctactgctcaaggaaatcaagatggctcggctggaagaagtgcttccagtttcgtaactcaaccctcagctccagcagcagcgatgccaggccctcacgttggtagcacgctgactcaaccgttcgccctgaagctggataggaataactatacgctgtggaagacgatggtttctgctattgtgcgtggtcatcggttggatggctacttgaatgctactaaggtaaaacctattgagttcttacccccagaaatctcaggtggagattccgttgttgtgaacccggagttcgaaacacggattgtccatgatcaactcctcctcggttggttgtatggatccatgaccgaaagcatagccactgaagtcatgggctgtgactcttcagcaagtctatggcaagctcttgagaccctttttggtgctcattctcgtgtcaaaatggatgagtatcgaaccaagattcagaccttcagaaaaggagctatgaccttggcagattaccttcgtcaaaaacgacagtgggctgatgttctcactcttgctggagacccctatcctgaaaaacaactggtatcaaatgtgctatctggtttggacatcgaatatctgcccatagtgcttcaagtcgaagcaaggatctccacatcgtggcaggaattacaagacatacttctcagctttgacagtaaattggatcggctaacaactctgtctggtgctatgaaaaacactggtgtagctaatccttctgccaacattgctgccaccagaccctctcattttgctggaaataaaggtgctcacacaagtcagtttgggtctggaaaccgtggaaactcaactcaaccgagaggaggaagaggccctggacgtttcagaggaagaggaggtggcaggaaccaaaacaactccaaaccgacatgccaagtatgtgggagatatggtcatagtgctgcatactgctacaacaggtatgatgaatcatacatgggttcggatccatctggttcaaacacaacaggcaaaaattctcaatcgggcaacaccagtggaggaggagcctcggcctttgttgcaactccagaaatggtggaagatactgcgtggtatgtggattcgggggccagtaaccatgtcacagcagataccaacaacatgaatcataagtctgactacaatggtgaggaaacactaactgtaggaaatggtaacaaactagacattatgcatgtaggtactggttggctgaatggtaaaaatagtcattctctaattcttagcaatgttctacatgttcctaagattactaagaatttattgagcatttcaaaattgacagccgataataatgtttttgttgaattttttgctcaatcttgttttgtgaaggacatggacacaaagaaggtgcttctccaagggaaacttagagatggattgtatcaactttcagaccaacaaagcatttccaatcactctagttcgaattctaagtctactggttttccttgttctgctggtttttcttgttttccttttactggtgttgtgtccaaatcaaaggataagcatgttgctatatccaagtctatttccctaagagacaaatggcataagcgtttaggccatccgtccaatcgtgtgttgagtcttgtgttaagtcatgttaatgtaaaaccagttatgaatgaaaaacaaactttttgtgaagcttgtcaatatggaaaatcccatgctttgccttttacttcaaacttaaatcgtgccaagtatcctcttgatttaattcatacagatgtttggggaccagctcccatcacatctaacctcaattacaagttctacattcactttgtggatgacaatagtagacacacatggatatacccactcaaaaccaagaatgaggcccttgctgcctttcttcagtttaaaactcttgtagaaaatcagtttgataggaaaatcaaagccattaagaccgattggggtggtgaattccagtcttttgctaagtgtgtaaccgaaaatggaatcgaatttactcatccatgtcctcatacttctgcccaaaatgggagagccgagaggaaacatagacacatcgtcgagatgggcttgactcttcttgctcaagctcatatgcctctcaaatattggtgggattcattccaaactgctgtctatttaattaatagacttcctacaccaatcttgaaagacaaatctccctatgaaatcatccatggtagaaaaccagattataagttcctcaaaacctttggtgttgcttgttttccttgtcttagaccctaccaaacgcacaaattccaattccattcaaccaagtgcgtcaacctaggatatagtgttgcgcacaaaggctacaagtgtcttagttctacaggcagaatgtacatctctcgaaatgttatcttcaatgaagatgactttccctttcaaactggttttctaaacacccatcaacctgaagaaaccgtaagtgtccaagttccctcatggactgctttgtttcaatctgacagattcaacatgtgcaaccaatacaatccatctgctgaaatccctggagaagacaccaataatttgtccactgttcgatctcaaaatcaagagagtgaaacacctgctgaaaacagcagtgccacggcctcacacgattctcaccagtcaaattggacagctggtgttaatcttgaacacagcccgatcatcatcaacaactcaggttctgaaatgtctgtgtctcaaagttctcatgaccctgttcaaactgctgatcccattgctccttcacatccgatgataacaagatcaaaggctggtatttttaaacccaaagtctaccttggtgaaacacagtggcagtgggaaaatgaagaaccgagttctgttgaagaagctctctctcacaaaggatggaatgctgccatgggagaggaaatggtagcattaaagaagaatggcacctatattttggttcccagaactgctggtatgaatattatagggaacaggtggatctttaagaagaaatggaatgccgacagcacttttcaaaggtacaaagcccgtcttgttgctaagggtttcaatcaaagacctggcattgatttcggggaaacatatagtccagttataaaggcttctacagttcgcattattctcacaattgctgttgccaagtcttgggaaattcgccaactcgacattaacaatgcctttcttaacgggcacttggaagaggatgtatacatgtatcagcctcaaggtttcgaagatccagatcaacctaatgctgtgtgtaaactgaagaagtccctatatggtctaaagcaggccccccgtgcttggtttgacagactcaaagccacattactcagctggaattttgtgaactctaaggccgattcatctcttttcttctacaagtcagctgatcaaatcgtctttgtgttgatatacgtggatgacatcataatcacagggaaccacactaccaagctgaatcaattcattcaaaaactcaacacaatgtttgctctcaaggatctgggacctctgcattttttcttgggaattgaagtccatcgggatgactctggtttgtttttaaaccaaggcaaatatgtcaaagagcttctcactagaacagggatgctgcatttgaaaccatgttctactcctatggtcactgggaaaaagctgtccaaaaatgatggtgacttacttgcgaatcctactgcctacagaagtatcataggaggcttgcaatatctcacacacaccagaccagacctgtcgttcgctgtcaataaactgagtcagttccttcaagcgcccacgacaacacattggaacgctgcaaagcgtgttctaaggtatctaaaaggtactgcttaccatggccttcacatcaaacattcccacagacttgacatcacgggtttctccgatgccgactgggcttgttgccctgatgacagacgaagcattggtggttactgtgtatatcttggagacacattggtgtcatggtcctccaagaaacaaaccgtggtctcaagatctagcacagaatccgaatatcgctccctcgcacaagctgctgctgaaatcacctggattcagagtttattaaaagaatttaacttccctctgagtcatacaccagttacatggtgcgacaatatgggggcaagtgcccttgccatgaatccagtctatcatgcccgcaccaaacacatcgaattggacattcattttgtcagagataaagtgatcaacaagactctcgaaatcagatacgttccttcaagtgatcaagtcgctgattgcttaactaagagtctaagtcatcacagatatcatttcttagttgacaaacttggtgtagttgagaccccaccaagtttgagaggggctgtgaagaaatgattttaccctcagtaacttttaggtgcttttaccaattgtggtggtcctgattttgtgtaacaaactctgtcctttttgtaccgttagaatattctttattctatgtaaaagatatttttgattgtgtaatcatttgtaaatgattctctgctgtaatgattgagtataaatacaatacaccagccctgtttttcagtgagctgagattttttcattttgctggtttattatcttttctaagtccacccttctatcaaagcccatacgcaacaacatcgattcaataaaaggccattcgactctatcataagccttactcatgtcaagtttgagagtcatatagccatccttccccaatcttttcctcttcaaataatgcataatctcaaaagataccatgatattatctgatatcaaccgtccaggtaaaaacacactttgagtttcagaaataacatcaggcaacacaagtttcaacctattagccaacactttcgaaatgactttatacaaaacattacaaagcgaaataggtcgaagatcattcataagctcaacatttttcttcttaggaataagaacaatattagtctcatttaaagaaggaggaaaaaaacctgaagcaaaaaaagaccgcaccagcattcgaacatcatcacccacaaccggccataacttttgaaagaaacccggagtcatcccatcaggtcccggagacttgtcagggtgcatttgaaacaatgctttctttatttcttcatcagagattggctcaagtagcatcaaattctattcccgtgacaccatgcttgaacccatagcaacaccttccagaccctccacaacacccggagtaaacaactgttcgaaataactagtaatcagactcgggaggccaccatcccaagtttcccaacccccagtagcagaccaaagcttctgaatggagttatttcgtcgaaaagacgaagccatagcatggaaatattttgaattctgatcaccttctctcaaccaaagctgcttacttcgttgtttccaaaaaaattccttttgcaataaacattattaaattcaatctcggcttccttatacttgtccactgccatagaatcacgacccttcttccatttgcgcaactcagctttacacttgcttaacctttcttgaaaattaccagagtaatctttaccccaagtaagtaacacttcgctgcaaacttttattttatctagaaaatggctatccgaatttgtactccaaacatcctcaataatcttgtaacaaagaggctccttgagccaagagttctcaaacctgaaatttttagctttgaccacccccaaagaaggagtgagaactaagtgaattgggcaatgatcagaggttgtagtttcaagattcaacaatttgaccgagggaaataagttaagccaagcttggctcactaaagctctatcaattctcacttcaattcaatccgaactaccccttccacgctcccaagtgaagggataaccacacaaatccaaatcaattaactcacaatcagacaaagtatcacaaaacccatcaattaaccaattaggatagctattacctccacgtttatctgcttgagaagtaacattattgagatcaccaataatacaccatggcaaatcagacttggcttttaaatcccgaataagatcccaagtacgctttcgcaagcttatatttggttccccatatagtcccgtcaactgccacttttgaccattatccccattaatctcaacatcaatgtagtttctagcataacccaaaagttgagcttcactctcatgtctccaaagtaaagccactccaccactcttgccttgaacatcacaagaaaccaccccttcaaatcccacagcaactcttaacttttccacaacaacatttcttgataaagtctcacataagaaaacaaaattgggcttcttttggatcacaagatccttaaagaattgaaaagcccatgggttcccaagcccacggcaat

SEQ ID NO: 55140 - DNA, 1086 bp, Cannabis sativa
ctaatataacaatagctaaaaaaaatttcttaaagatcaaaatctcaaattccatttcgaaaattaaaaaaaaaatacattacccaattaaaaaaattaaacacacatatattgcatttaacatcaccttattgaatctaattaaaaaaatttaattatacgtgcattgcacataacatcaacctagttctatataaaatgtggctatgtaatagaatttttggtttaacggtatttttaaattttctaaattaactttaacagaatatctgtattttttaattttctaaattaactttaacagaatatctcaattacttaacagaatatttttttattaattttataatattattatatatctattcttctatataaaatgtggctatataaccgaatttttgatttaacggtagttttagttttctatgttaaatttaatagaattacccttcacagtttggtcttattgttcaagatgttcgaaatttacttttggctttatcttttgttgatttgtgttttgtaaaacgatctgcaaataagttggctcattgcttgacaagagactcttgtttctttacaagttgtgtacttcagctggatgactgttcctctgaagtgcgttatattattttgaacgaatttattaattaataaatcttatgatttttattaaaaaaaagcatataatgacaatctttagtttaaatattttattttagtctaatataagtatattaaatcaaatttcccattataaatattttaagtaatttttcctttttcaaattttctaaagcaaaagccttgctaattaatttcagcaattacgactttcgaaacattccgttctcctccattagcaaatagaaatcataattaatttcaccttttgcaataattaaccaaaaagaaaaaaaaaatggttcaagtggtaatgcttttgtaaagagaattgttgaaatgtattattattattatcaaagcatctttaacgataatatttttttaggctaattagtatttttgcccttaaattttgacatgtactaaatcatgtttttgaatttttaaggtcgttaa

SEQ ID NO: 55141 - DNA, 735 bp, Cannabis sativa
gccgtgttattcaagttgtactcctcaaaccgagacttgattttcgcaaaagtttcggtgcctctgtaagtcacgcagccagtaaaatgctcggacgttggaattatgagtctcgaagccatctgaaagaataaataacaaaataatattactgtcaaaaaatttaagaaaggtcgacataacgtcgacatcatgttgatattacgtcgacattatcaaacagttagtacccacataatttcatcgacaaacagtcgatatactgtcgacatgctatcgacattatcacaaaagcaataacaaaataactttgtcgatagcatatcaacaaactgtcgacattctatcgacatgcaagaaaaatgaatcttcatttgcagcaaatcaaaatcatcaacaaaaggtcgacataatgtcgacatcatgtcgacatcactaaacttagctatcataggaagaactacaacttattatcgacaacctatcgatatacagtcgacaaattatcgacatggcatgtcaaaactacataacagcatagacaaggtcaaaccatcgacaaattgtcgacaacattgttcaaacacaaaaacagataaccgcgcatatcgatatcctatcgacattgcatcgataacactatgaaaacacaaaaataccattgaaacatatccaacatatacaacctaccacaagaaagagcacaaaatctacaaaaattccactaatctcaac

SEQ ID NO: 55142 - DNA, 1042 bp, Cannabis sativa
ttggcatgattattcaaaactcaaaatttaaaacaaataaatatgctacctttaccccatttttgtaaataagttgctctctgtatgtaaggaaggttttagcagaaacaagctataattcctagttagtctcatcttcccttccctttctccaaaaacagttattaattttcctctgagaaaattggtctccaccactaccacgaaactcaccataattagattcatacatctccaaagctctttccaattcaccctcacaattctattcctcactaaccatggatttcagcttacaaaggcgctccgccatcaatctatcttccattgatattagccctggattattttctccgatcatcttcggcgctgctttctctgattccttctttgaagtttcagaagtagaagaagaagaaaactccattttcttcacttcagtctccttactgttctttacattttgttcaatttcaactctctgtttctcgttcctttcgcgaatccgatttctccatttcttcataatcatagccaaacaaagaatttcttaatcagcaatttaccgttcattcagaattcaagaaacaaaaacattaagagaaagaggccggattaccttgagcttgggtgaattcttgttctggtttgtcgcttggttccttttttcgaaagtgaaggtactgtcgaacaaggagattatcagttttctccgttcgaaatatggaaaacaatttggggaaaaatgaaaaataaaagagagagacgcgagattgaccttggagaagaggttgacgatgatgatggtgaatgggaggaaagaccgagtagagccattgatgcagtgatttcatcaggggttgaagataaagccattgcctttttcacaaaagctctttctttctcttatgaaaagaaacactcattcgcttttccttctcaattttgttcgagtgtatgcagggcgggttctaaagtatatagggcctacagtgaaattaaattttggtataactgtagtttaactattataaaaattata

SEQ ID NO: 55143 - DNA, 1313 bp, Cannabis sativa
gatgtaggaagtgccttagttagaacatcagctgcattgttctcagtagataccttctccaatttgactttccctccaattagcacatctctgataaaatgcaaccttacatctatgtgtttagttctctcatggaagacttggttcttgctcaagtgcaaagcactttgactgtcacattgtacagttatgcacctctaatctagaccgaattccatggagattcctttgagccacagggcttctttcactgcttcagtacatgcaatgtactctgcttctgttgtagatagagcaacaatggattgtaggttcgatttccagcaaatagagcatccacttgactgaaaaatgaacccaggttgtgaccttctggtgtctagatcacctgcataatcagaatcaacaaagcctgctatgttgacagattctgaattttctccatagaccaatcgcagttgtctagtaccttgtaaatacctcataatccattttaccacattccaatgttccttcccaggttgtcccatgaatctgcttaccatgctgacaccatagctgatatctggtctggtgcagatcatcaggtacatgagactgcccaccacacttgagtaaggcaccctgttcatatactcagtttcttcatcatccttgggtgcctgtgattttgacattttgaacagtggtgtgtagggagtcttgacaggtttgacttgatcaaatccaaacctgttgaggattttagatatgtaaccatgttgagacaacttaagaattctctttggtctgtctctaatgatgtcaatacctaaaattctcttagctgaaccaaggtctttcatttcgaattccttgttcagcaaagctttaattttgtttatctcttgtatgtctttacatgcaataagcatgtcatccacatacagtaagagataagcagtaattttgttgcttctgacataaacacagctgtcataagagctccttttgaaaccatttctgagtacaaactcatcaaaccttttgtaccactgccttggtgattgtttcaatccatacaaggatctcttcagctgacaaacataatcttcctttccctttacttcatatcccttaggctgcttcattagtatattctcctccaaatcaccatgtagaaaagctgtcttcacatctagctgttccaattccagatcattgattgcaacaatactcaacaacaatcttattgatgtatgtttcaccacaggagagaagatctcattgtagtctatcccttctctttgtgaaaaaccctttgcaaccaatct

SEQ ID NO: 55144 - DNA, 788 bp, Cannabis sativa
tagtagtgctacacaaaatgttatatttaattaaatattaaattttaaatttaataatattataaaaaaaaatagcaatcgttaacaaactaccatcccataaaaatgatacacattacctaaaagaaagttgagaattgggaatgtaatatggctagacgtatcaaaaagtgcagtattgggcggcccagaaacttttgtaggccctctaagtaaatgggccgattatacgcatgatcagacccttgaagacgaagactgggtcttagcaggtttaataggatgagtcatacatccaatccatactcaaattaattaacataaataacaaatattttaatttttttatacattattatactaaaccccaaactttaatttcataataaaataaattttagtaattaaataaatattatatgtaattgaaatttatcaaaaaaaaaattattatactaaaaacacaccacgtcaaatattcacttaatatgtaattatgtatatctcactttattagagtgaagtaaagtgaatacatatatacattaccagattcttttagctcaaatttttacgttatattacattttttttcaaaaaaatatatcattaattttattttaaattttttaacataatttatttatatttaatatataatattaatatatatatccacatataaaaaaaaaataaaaattaaaattattaataaaatatgttgacattaataaataatattctttaaatatgtagatgtattatgtgaacattaaaattttaagaaa

SEQ ID NO: 55145 - DNA, 877 bp, Cannabis sativa
tagcctactgataatttcatctaaagcttcatcaggaaaatcatgatactctagggaaaatttcaaagcctttgcttcaatgttaaacaaaaaagtgaatctggaccagaattatcactatttatacatacatattctagagagatcatactaatctaaaaatttccaactcatagattgatatacaatcaacataatgataaacaaaacaagtaccatatataaaattaatattacacgtatatatatacattacctggtgatgttgtgtgaaggaggaaggactgtgattccggcgacaaaggaagatctacgaaaaaaaagtcgaaagagcgagagagagagagagtctggtagtggtagtagcctatctccagagagagtgtgaaagaggagagacactgtattaaggaggtaatattttatcttcttgagaagctttgggatggaatacgtttaatgcctgaacaaattcaccaaactcaattaccccaatatttctcttatgatctaacaaatcaaacacctatttatatatacatatattatattatataaaattagagaattacaatatagtttagctaataagtccaatagaagaaaattaaggaataataataataaaaaaaaaacttttgtttacatgtatctataattgattaattgcgattatacatttgttggaatttttaaaccaaaatctacttttgttttgtccaacatacttcaaagaaaaaaaaaataatagaatatgcaaaattggtaaatttattattttatgggtccacaaaataattagtattattaaaaataacaattttcagacccaaacacaaaaggttcggtcagccaaagtaggggtgttcataaaata

SEQ ID NO: 55146 - DNA, 972 bp, Cannabis sativa
taatggttaaatttcattaaactaaatcatccaaaaccaaggatgcaaaaacaaaaggtaaagagtctctactaaaagtacggccagcctcagaaaggacagcaactcccacaattaatataatttgtttattaaaatatcataataatttcaaaaatggaacaattaagtttatttatttattcatttaaatgaatgctttaaataacacttctattttttagttattaaaaatatgttttaaaaaataaacgaaattataattaaatgtgaccttatgtataaacactatgtttatattattattgataatgtttattaattattaatagaatatatttattatgataatgtttgtgatgatatattttttagatatgttaatataatgtgtttattaaaattcaaacacaaatttttaaataaaatatgtatgtttattatttatttttaccatatatagtttgtatataaaaattaagaatatgtttctcatagttaataaaattaatgataaattgtaaataattttttttgcacatataatataattaagtactataatgtatataaaattgtaaattctcctattattaattggttttaagattaaattttataattttattatagtatatcagaattatatctcttctgaacattcgagataaaatcccataatttttgtcacaaataagttagattggcatcgaaatgtctctctcaaattagcttttaagaataaaattttaattcttaatgatttttcagcaaatgacctatttttcaaagatattttgcacttagtgcttgagatgtactttaaataatcagttagagttttaaacatatgttactatacaaataagcctaattaggatttttctcctaaattttgacatgtaccaaatcatacctcctgaacttttaaggtcgctaaaaatgccccctgaattgagattgttgaattta

SEQ ID NO: 55147 - DNA, 572 bp, Cannabis sativa
atagggtggagttgagttttttgagagaaattatgagaaaatttggctttgcgaaaagattggttagtcttattatggattatgtgacaacctctggatatgcttttatagtgaatggaaaactacaaggatgtgtaatctttacttgtgggttaaggcaggtgtgtcctttttcaccatatttgttcatattctgtgtagaaatattatcgtcactcatataactagctaagaattttataattagctagcggttctttaattttttgttttttacaccacatattgaaattttcaattttttttttacttttttactgtagggcagaattttttttcaaaaatactgtgtaagttttatactgtataccgtgttaagttttcactgttgttccacggttgttttttagttgttctactgttattttaattattctgttttgttgttttacgattgttttataaaagacattattttcgtaaaacatttcgtatgacggtaaaattataaacttttacctaaaatttaatatttttgtaaaaactcttataatttttatcaaagtaaaata

SEQ ID NO: 55148 - DNA, 813 bp, Cannabis sativa
aaaaatgtgcaggcaaaagtgacattttttgtagtgcctaaagcttatgggggtttaggttttggtgaaggtgctaagtggaacaatgatatgatttcaaagtatgtttgggcaatcgatcatcaacaggagaccttgtgggtgaaatgggtaaaccatatctacttagaaggttaatatttttggcaataccaactcaagtcaaattcgagtaagtataagcgcaaaatctatcacattcgagatgcctttactcaaagtgacatagatatataatgcatgtcatgggagattcaagattagcgttctctacaagagtaacctctgctcgatttatgagaaggaagaagagaatcatgactatttattttttatttgcgatttctcaaagcagtgtgtggaacaaatttagaactggctgattgggtgcaattagttttagctttaggagtggagaacgaaatctttattgattgaatctcaaaacatagaattaagctcaactgagcttatatacagttgaagcaaatgactaaaaacccataacaaaaccagtaacagacaaatcaatacaccagtaacaactaacagccttttactaactaacaaactcaaccaactataactaaccaacaattaacactccccctcaagatggagagtagatattgatcaatcccatcttgtctttaacgctcttgaactgttcaggaagcagggctttggttaacaggtctgcaatttgttctttagttgagatgtgagctgttttaattatcccttgctgcactttttctctatcaaggtgacaat

SEQ ID NO: 55149 - DNA, 1349 bp, Cannabis sativa
  modified_base (874)..(874): a, c, t, g, unknown or other
atctaacaatctcaatagtttcaaggagaatttttaacagcaaaaaaaattcaagaggcatgatttgatacatgtcaaaattcggagaagaaaacctcttttaaaatatgtatatacataaacgctaaagatgaacaatccatatatgaatgcaaaggctaattgtttagttttcttttcttttttcttttttttgttttttctcccgtttttatttattaactatgaaacataaaaatattcatagttttctttaataataaaaaataaaattttctctacttttttttcttctaaaaaaaagtttaaaatatttttttaatagtaattatttgagttcaaaaattataccatcattatctattttttaaagaaatcgttttaacatataagaagcatattttttttttggatttttataaaaatattgaattttggatcaaaatttacaattttactgccatgcgaatttttttaaaaaaatactatctttttataaaacaaccataaaacaacaaaatagaacaatattaaaaacaattctagaataactaaaaaacaatcgtaagtatttatctgcgaatataaattagacttagtatttttattgtaaattactctaaatataaacatcaataatatcactttacccacttcctgtataaatataaatattagtggctcgtttggaacgccttactaggtctattgtattgtattatatcgaattgtattttatataatacttttatgtaaaattatatttggtattaaattttatagacaactaaactaaatatatgatatttaatttagtataaattaattaaagtttaacatagtattatataaaatatgatatataatctaattnaatataatacaatacaatataacctatataccacgttagaaacaagcgacttcgttaattccgtcacatatgttatatacaagtatacaacacaatattaatacaagaaaatatgaccaccaacaaaccaataggaaccatctcagaaaaattagagcaatggagaaaatagaacattcaaccatcaccaccaacggaataaacatgcacgtggcatcgatcgggactggtccggagatcctgttcctccacggcttccctgagctttggatctcctggcgccaccaaatgctgtctctttcctctcttggttaccgctgcattgctcccgatcttcgtggctatggagacaccgacgcgccaccgtctccggcgtcgtacacggctctccacgttgttggtgacctggtagggctattggaccatctgggtatcgagcaggtgttgttggtgggccatgattggggagcagcca

SEQ ID NO: 55150 - DNA, 855 bp, Cannabis sativa
aatggttgaatgatagtggtgaagtgagagttaccaaaaaaattttggtatctttctgaattggcaagtatgaggataaggtattgtgcaatgtggtcctactgcaagttggacaccttcttctaggaagacctttgtaattttgatcaaaaactccaccatgacgacttcactaacaagtactcattcatgttcactcagctaacagtaactctagctcctttgacaccaaaataagtgtatgaagatcaaatgagattgaaatatttgagtgaccgaaagaatttgagtgataaaaagaaattgagtgataaaaagaacttaagtgagcaagagaatgggaaaaaagagagtccacgatagaaaacaattgaagcaagtaagagagaaaataacaaaaagagttctatcaatgagataaaaatagagaggaaacaaaataatttgtttgcaagaaaaagtgagattacgcaagcttggcgtacaaaacaaccaatgattttgttcgtttaccaggaggctcttttaagcactaaccaacttgattctttgctgcctagtgttgttgtttctattttgcaggaattcaaggatgtgtttcccgaggaggtaccacatggtatacctacaaccattgtatcctaagttcttaagttattctttgaaaacattgtgggaaaaactcaggacaaaacttttgttttctactacttttcatcctcaaattgatggtaaaaaagaagtagttaatcgaaatttatccactttattgagggctatcataagtaaaaatattaagacttcggaggattttttaccgcaagttgaaactgcttataatcgttctatgcattc

SEQ ID NO: 55151 - DNA, 1036 bp, Cannabis sativa
aaagtggactggagaagctcaaacttatgaccatttaaaggtctttgggtgcactgcctatgctcatgtgaggcaagacaaattgaagcctagagctgtaaaatgcatgttcttggggtatcctgatggtgtcaagggatacaaactttggtgtcttgaaccaggatttaaaaggtgtatcatcagcagagatgtcacttttagagaagaagaaatggccttgaagcccctaccaaacccaacactgcacacagaagagtctcacagcagaattaatcttgaggtggatcagtcacactgcccagatgaatgttcagatgcagatgagaaccctgatcatgaacatgataatcaacctcaggaatcacaagaagaactaagtgactatctcctggccagagatagagtaagaagagacataagaccaccagcaaagcttggctatgcagatttctcagcatttgctcttgctgctgctagtgagcttgaaaattcagaacccacaacatacaaggaggcactgaaatgcagcaacaaggaacattggttgagagcaatcaatgaagagaaagtgtcactgattaggaacaaaacatggtcagttgtcaacagaccaccagggcagaggttgattgaaagcaaatggctgttccgacaaaaggaaggagttaatgaagactcagtgaggttcaaggctaggctggtggcaaaagggttcactgagagagaaggtgtagattttaatgatatatttgcaccaatggtaaaacaagcttctattagagctattatggccaaggctgcagatcaggatctagaaatagatcaaatggatgtgaggacaacctttctacatggcaccttggatgagaagatctacatgaaacaacatgagggatttgacaatggcaatccaaaacaggtatgtttgctacataaatcactctatggtctaaagcaagcacctagacaatggaatattagatttgacaagttcatgtctaggataaagttcacaaagagtagatatgatcca

SEQ ID NO: 55152 - DNA, 1372 bp, Cannabis sativa
aatcacttcaaatttctaatattgataactaatcagattgtaaagggttttatttagggcccaaaacccaacagtttggtgcaaccttcggccaaccgcctaacaaccaccctgcaaccatcgtatgattcgtctgttgcaaccaccgtgcaatcacgcagcaaccaccctgcaaccatcgtctaatgtgtaagtgatgatagtgtaagtggtattttagtaattaaaattacataaaaggtataaatgttgtctttaccttctggaggtattttttaaaataaaatatcaatttatattttctatgtaataattcctttatttaaatttaattaattaaataattaaattattttcaaaaattctaattaaaaaaatcattttcaaaaaatattaaatttaaattaaataattaatttcaaaattaaatctaaaaatttggaaaattaggttttcaacgaacctaaatatctatttcaaaaaaatgctaacaacttttcaaattttatgttattaaaataaaattaaatattaaataaaataaaatgacaaataaataaaataataaaattttgaaagctagcaaaatatctggttacaatttaaatttctagattcaaataatcttatttttaattttaaataaataattaaataatacaaaatattaaatatataaccttaaattttaaaataagataaccaactaaggaaaaataatagattttatctattttcaggttcaaaaactactgatatctcaaattaattaaaaaaattatttactttaattctgataattagatttgaaacatgaaaaataaaaatctaaatacaaaattacacaaaaaatttgaagttcattccatgaagaaccatgaaaaaatgaaaaaagggaaattagatttggtacggatagtatgcattatataccatccgtgcgcgcacacataggagactggccgagaaacctcgaccaaggaggttgcgtgcagcttgtctgcatgtgaaatgggacaattcagactgcctgggcacattccttcagacatgcccgtgtctgaatgtgcgtgacacccgtttgtcacgtgttgtccgtgagcgcatggggtgtcaccacccctacgatttttccaattttcaaaaaattcataactaattcaaataaaatcaaaataaagttctgtaaaagagtgaattgcttaattttttccatactatccaaaaaaaataattccagagtaaaattctaattatgttacgtaaaaaacatttgcaaacatcaaacagtcatcaataaacacatagatcaacgtgaatcacatccaaatcatacatacatcgttttaagtccaaatttcttgacagtaaa

SEQ ID NO: 55153 - DNA, 1389 bp, Cannabis sativa
actgtctattgttccctgttgctattgttaacgtatggtcggataccctaaaaatactaaaatttaggttaatatttacaaaaatactatcacacggaaatctttttaaaaatactgtagttttaaaaaacaccagtaaaacacaaagtagaataactcaaaacaacagtagaacaactaaaaagcaacttaacacagtatactgtattatgaaacttacaaaaaaaatacagtaaaaaagtaaaaaataccgcatagcaatatttttgtaaaaaaataataaaagttagtatatcatgtaaattttcataatcaactttatgactttttataaagaaggtaaataaattagtaagtattattctctttgtgattagattgatggttaaggattagaacagtaaccctaataatcaaagctttaacatgacactaaacacgtattaatttgatggtgacatgcatacctaaatgatgtcccacaaaccagaatcatgaaaggagtatcaattattaaggctacaaataattatttaaaaatgaaatcaaattattaaaaaaaaaatgaaatcaaattatttatttactatttatatttatttttcttttacttttcttctaattaaaaaaaactatgtttcttttttctttctaattgggggtggagaattccatttgaaacctcttctctgtcatgagagatgtaagatcacgaactaaccatctcatctttactgcaatagtgccaaaatttgacacaaataaatcaacaaaggttagagtttctccaatagtagtgtagtgtattttagcattttttttttaaaaatagttatccaattgtctgctaaattgtgcactatattaagttcatgctaaaagttgttaaattaaccacaagttatagtattgtgctaaattttgcacacaataaatgtaagagcatattcaaaagaatactaaaaatgtagtatatttctatatttaagcacacttaaaaaaaaactactccaatagtattggagttctaaaaagtgtgtcaaatttgacacatgataaaagttatactaaatttggcatacgatatagcattgtgctaaatttaaaccacaataaatcctactttttatttattatagtaacactaattattataatttattgatttttatgtaattttaacttttttatttatcatattacaattatttaaataattaaaaaatgataataatttttgaatatttttataaaaataataaatgatgatcaatactaatttttttatttatttattttacatcttgtgcattggagaacaattataaatagtgggccaaatatagtataaatttattttttgttctaaatatagcacaaattttacat

SEQ ID NO: 55154 - DNA, 3671 bp, Cannabis sativa
  modified_base (85)..(87): a, c, t, g, unknown or other
  modified_base (358)..(370): a, c, t, g, unknown or other
tgatataataatagagagtacataatagtgtaagttatagaaatgaaaagacacattaattatttgataatatataaaaaattannnataaatgagaaaaattgagaaattataagaaatcaaagaagagggtgaaaaactcatacaaattgccacctcaactccttaatgctttcctttatatatagatattgatattgattaagataattatttgattactatatggattattttagaattatttgatattagtgcatgttgtagttaataaatacattgtcaaatgatattcaaaatcaataagtaatattaagagtatgctattataataataattatattattattattattnnnnnnnnnnnnnttattattattattgttattgtgggaaaattacaactaaataacagagttaaatcaactaaaacttaatcaataaatagttagctatagtaggattaacaatccacaaacaataaatggagatatgaatagggactaatagagtattattataactagaaacgattaaagcaacaagacaataaaaaaaaactcaagatatatactggatcaagtcatatagattgctgtaatctatgacttactttaattttggagcaccgccaaatcttctttagtgcttcagcaaaaatagggtacaactacaatcgagattgatttcctgttagattttctcacaatatttttctctcacactcttacctaagaatgttcttcatctataaaaggttctttatacaaaatccaaacccaatctctcacttttctctctacctctcagtctctctctcaagatcacctctcgaaactcatttggtctcattctttccaaagtaataagtgttagtggtatttataggtccatgatatagatcctaaagttggtggttgtaagtgctaagttgttatgttagttatgacttaacaaacttaacaaactccatgtaacagtatctccacatcagcataagataaagtgctttcgaatgagatgtacgcatcctagaagaaataccaacgcatacattgaagagacttcttggataggaaaggcaatagctagagttgattatccaaaactcctttcctagaggaacaactagccatttggactacaactcttttctagaggaagactagcttttctaaagactccttccaagttgacacgatagacatatgagaatgccctttcaaatgacatctatcattccacaagacttcttatagatggtcaagttagacttttgggaatgcccttttgaaagacatctaacttttcataaccggaacagtttttggagatgtttttatttataggaactatactacaagttccacctagtttcttcaaattaaaatattgacggtgatgaagaaagaacacagccattattgttggtgttccagatttctcagtatactaacttcagagatttatcaagttcaagcaatgcttgaacttttttactattaagaccgtagtcccaatatctgtaggattatcttctgatctgaccttctttaattaaaccaatcgttcctctatcttctctataatccagtggagttttatgtctatatgttttctcttttcataataaatcgaattcttacaaagattgatggatgactagctatcctagtacaaagttactccaccttttatttgtttgaattcaaacataattccccaaagccataacactttcttgaatacttccgtagtagccataaatttagcttccattgtggaaagggtaaccaatgactgtactgggccttccaacgtatacagttctggtttgtcatgaaagtataggaagtggttattttctcatatccctattcaaagcatagtcaacgtccacgaaccctttcaactctagctctcctttttctttttcataggccagaccataatcccaagtgcccattaagtaccttaataaccatttgagggtcttccaatgtttaatgcccgtattggttatgaattggcttaggatacttagagcatgcgctatgtctagtgtggtgctcaccatcacttacattaagcatcctaaaaccaatgcatatggtacatctttcattttctctttctctttcacactgtttagacactactccttcgacaaaataaattgtctgcctaacagaacagatgtactctttgcatctttgatgttgaacttctgaataagtttcttgatgtacccaaaatactttaagttgattgtcccttcctccttgttccttaaaaccttaacaccaagtatctgtttaactagtccaagttccttcatctcaaattctctcttaagctaggcttagatagttttgatcatggatttgtctttgctcatgatgagtatatcatccacatatagtaataaaaacacaattatagattgctccagattcttaaaatataaatagtgatcatatgtggatcatttgaccctcatttgttgcatataagtattaaatcatttattccattgtcttgatgactatttcataccatataaggacttgttgagcttacacactaattcaaatcatttcttttccactggaaacccaggtggtcgctttatgtagatctcttcatccaagaatccatttagaaaggaagtcttaacatcaatttgttcaacttcaaactccatttcagctgccgaagacaacatcaatcttatcatcttgaactttattataggttagaggattttagtgtagtttattccttccacctaagtaaaacccttagccaccaacctggctttgaactgcactagttcattctcattaattccctgtttcagctttagaatccatttgtattccatgatctttttattatgtggcttctgtacaactacctaagtatttttcttctaaagtgagtccatctcctcatccatagcctggagccattacgacttgtttccacttgaaattgcctctttgtagcctttgggctcttccaattcagtttgttgtactactgccagtgcaaactcaatcaagtctacctcagcaaacctttccgaagggtgaatctctcttttagttctatcacgcgccaactgataaccttccaaaccatcttgttcaaatccttctggaacctatgttttgtcttcattatcttccagcttagcatcagcttctgtgtgtgcactttgttctggttccacaatcgtttctagttgtgaactctcttctagatgtttcgttttgcattccatttccatgtgtgcagtgttcttatttcctattttcctgcatcacacggagactactctaccttttccaaatctcaagtgaggttattccaactcattgaaaacaatatttctagcaatcacaaccttttatctacccttcttaaaaatgcaaattctatgccccttcgtacttaagccataacctaggaaagttcccttaactaatctgggttccaatttgttaattgatttgtgtacataagttgtacacctaaaggttcttagatgcgttaggtttgagttctgttttaccgtatttcataaagggattttaagcctataactctgtttgggcttctatttataaggtaggttatagtagctagagttccccccccccccccc

SEQ ID NO: 55155 - DNA, 1027 bp, Cannabis sativa
atccggacccgaacccaaactcagacctaaactcgaactccgacccgaactgaaacccaaactcgaattcggaattgtaaatggaactagagcagaaataggactaggaccaggaccaggacctcacccaaacgcaaaccctgatcaaaacccagagagaaagacctaaacccgaaccgagactaggactcgaaccaaaacctagactaggacccaaacccacacaataaccgggaccttgaactagaatcaggataggcacctgggaaacagaactaggaccgggacatagtacccgacctagacccgaaatagaacctaggacccagctcgggacgcggcaccagaaatggaaccagactgggacaagatattggaatatggatcaggacccagggcttggacaaaaatcgtagtcggtgtttggatttggaacccaagcgtggacccgaacactgacaaggacccgaacccacacccgaaggtgaacccagtcccaaaccaaaaagtggacccgaacccgtaccctgtgccccaaaattggaaccaaaactggaaggttaccgggattggaactaggacttggactaggaatgataattgaaattggacctacatcaagaaccctaaccagactaggaccggactccaaatctgacctagacccgaattggaagccgtacccggatcccaacccaatcctcgactcgagacccaaacccaaacttgaagtcagagccaaacatggaaccaaactagggacacagaaccaaggtcgggacctagaatcgcaccccaatctcaatcccgaacacaaactcaaaaatgggacctgggacctaaactagaacaaggccgagacccgtgacagtgatctagatcttcacctgagattcaggtaacgggacttggaacagaccagtattccgtatctagatcagggactcagacttggaccagaacccagacgaagaaccaaacccaaacccagacctagacctgtgacccaaaattagaacttgaacaa

SEQ ID NO: 55156 - DNA, 607 bp, Cannabis sativa
ttctcaggtaaccacttgagtttaggacaattgctgattgtgaattcactcagcttgggagcaataagtccaccctttgggaaagatacaaaactacaacaactatctatctgtaaagatgacaaagatgttagttcgtgaagagatttcccatctgacactgagagggcttcaaaatagtcacatattgtaatagtaagagttttgagattgggaaataaatccaaatggagggatctaaatgatgatccacaatcttctaaccaaagagactgaagaggatggtaggtagaagtaggactcattggctttattgtctggtacaatgactctgtattttctacacttacaatttttatttctctaacacatggtaatcttgggagggttaatgcgaaatgataatgtccttcaatttttatatttgttagggaaggaagaaagtgaggcaatttccctatgagctttggacaatctttaatcacaagttctttaagctttccatatgttgatacctcttcagtttgcattgaatgccattgctcccatgataacatgttgctgaagcttaatgtttccaatgatgaaaatggctttctcccagaac

SEQ ID NO: 55157 - DNA, 685 bp, Cannabis sativa
tcaagtcatagatataaaaaaaaactcaaaaccatgtttttaagacaggaattacttacgtatgatgtaaaatgcagtcgtgttgataggagaaagatcggtagtccagaagaactcctctttgaactcagtcttatttagaaacctcaaaatgaaccttcgatcatttgtgtgggtaccgagataataaaagccccctaagcttctcttcctcgcggggacagctttgacggagtagaaataaactatctcgaggggagtgggacactcccatcctaagatatggtacataacctttaaacttgcaagaatcctgtaagaacttggaatcagctgaaagggggaaattccaagataattacataattttttgtagtactctctcaaggggagaactactctagccttgatgtgctcgaggctccaagcacctatcatagacgagccactagtactagcaccaccgcactcctcgagaataactctttctagagggaagcagttgaattcacctatagcaacggatctaatacaacatctacgcctttgcttgatatcgcaagacattaaaacaccaccaacttattctccaatgactatcaccttggacttaatgagttcagcttcaaaggttatattcggatcctgggggtctttgatttacgaggcttggtggacataattt

SEQ ID NO: 55158 - DNA, 980 bp, Cannabis sativa
ttttaattgttgtatataatttaattactatagtactatacatatattgaaaaattttattgtagaaacaccatttttgtccttatggtagagatatttttctgtcccttgatttataatcttgtggtttggagagtgtagggagtattttaataatagtgggggttaatacattattattttttccaaagatatttaaaaaggacaaatttattatttttttaaaaaaattatacctccactaataaacataaatataagaaaaaaaaaaccactattgtctccgttttcctttctctactaaccagtgaatgttaaaaaaaataaaaataaaaataaaaataccagtaaaagtcttacaaatctggaattatacccaagcatatgagaaacagagtatagcagagaaaaatgtatatgttttacttgttattgaactgaagcttagaatacaagagtaaggtctatatatagaccaggtgagtcggtgaagactctaacagaataggatccaactaactaacttcctaacagaaaattaactaactcttaatagcccccctcaagttagagtgtaaatgttaaagacacccaatttggatacaattttattgaactgagatggaagaagagctttggtaaagatgtcggactagattgttgttggaagaaacatgtagtagatggagtgaaccttgttggaccttttctcgaatgaagtgacaatcaatttccacatgtttggtgcatttatgatagacgggattctcgctgatgtggatggcaacagtgttgtcataatatagcttttgagatgaagagaggtgaaccccaaagtccttgagaatggcaaggatccaagtgagttcgggtgtgacattggccatggcacggtattcagcttcagtagaggaacgagatacaacttgttgtttttttgattttcaggatatgatagatttgccaaggaagatgcagta

SEQ ID NO: 55159 - DNA, 673 bp, Cannabis sativa
aaaaatgtatgtataaagaaatgtttaattttaatttaaattgtatgtagaaaaaattatatataaaaatgaaatatacatttgatctattaaattttgatatataattgtaatatatgtattagacttttaaatgactataatctttccattaaaatgttaattgtatatataattttttaatttttttatgtggattggattagatcagttatttttacaagtgaatcaacatctaattggcacaagtgcggattttgaatttttcaatccaatccgcactttttggattgaattggatcgactattttatgaacacccctattagatagtttaagtgctcaatactatatcaattatgtggtactttgtgagtagttagtaattttttatatatttattaaattaaaatatttggaagcgaatattaaattatatcaacaacaatatattactttttgtgctgtttcatatcttaaaatttagtacatgtcatgtatcaaaatacatattatgtccttctcgttttttcttttctaaaaaaaaaagtaacagcaataataaaacatgacatataatattgtggttcttgacatgattttgtttattttacacattaatgcattatttttaaaaaagtataaaccaaacaacttataattgatgttttact

SEQ ID NO: 55160 - DNA, 677 bp, Cannabis sativa
cgcctctcatcttggactggcataaagaattccaagccatgagatgcatcttccttttttcatcagtatccccccaccagaagtcccttaggaatttgtccacagtgtttacaacattaattggtattggatccgaggcagccacataagtagctaaggatgatccaactgaatggattaagcaggctcgcccagctttcgataggagtctagttttccaacttttcactcgttgtagaacacgatcaaccaagaaccgcatatccttcgatcgattcagtgatctaaagaggggaagccctaagtaagaagcatccttcttcattctcttcatatttagaagatccgctatatctgttgcacatctcgcagggacacccttagagaagaacactgttgatttttggtagttgactgcttgtccagaccaagagcaatagtcttcaaggcattgaccgaatcctttagcttccttcaaggatgctcgcccaaataagattaaatcatctgcaaacatcaagtgagtgacagccggcccatctctagataatttgaagccttccagtcggccctctgcctttctacccacaatcagtcttgagagaacatcagctgcaatgataaagagagcaggggagagagggtcgccctggcgaagaccacaggaaggggacaga

SEQ ID NO: 55161 - DNA, 1914 bp, Cannabis sativa
tgacaataaacaaatcaaacacttgaatgatctttctttaggaataacaattccattcctacactcattcatgtaaaccaaacactatttaatatactacaaattgatgttttagtggttaaacccttcaagcccgcttttgttttgctatttatatttccattaaaatgttattgttaaatgtcaatatatactgctaatgtgcacacaaatatacacacatcagatattttaatagtctacactatttttagaatttaaacataataaaaatcattggaaaagatggaaatccctatgtaaatcgaaacatgaaggtggtatggggtttcgttcttttgttcattttaatcaagcgcttcttgctaagcaagcatggaggatttttgatatgccagattctctcttgagtagacttctcaagcatagatatttttccaatagtacctttctagatgctaatattggccactcaccatcattgacttggcaaagtatctgttggggcaaggagctgttggtgaaaggattgaggtataaggttgggaatggaaatcatatagacagcaagttagatccatggattccgggtttcaatgaatttaagccagtcagttatttgggatccaactctttaccagtgtctagctttatcacagaggaacgagtgtggaatgtacttatgctgaatagattttttcaaccaattgactccgatcgtattctaactattccactaagttactttgctgacatggatcggttaatttggcactacacctccaatggatcttacacagtgtaatcgggttttcacctagcaacttctttggaagaacaactttgctcgtctgcttctaataatcatagtgactggtggaaatttttctggaaactagtgttgcctccaaagatcagaatttttgcttggaaagtgcttcataacatacttccaacagctgttgcattatttaagaaaaaagttttaacctctgctgaatgttctctttgtgcctcgaattgggaatcaatcggacatgctctcttcggttgtaagcatgctagagtcatatggaaagcttctaagtttcagcttgatctttctaaggctcaaaacatgtttaatggtgattatttacattctttatcaaccattttaaaccagcaagaatttgagttactgctatgtataatgtggggcatatggactgatagaaataaagtggttcatggtggttctcctagacagcctgctgctatagtgaattatgcagtccgtttccatgaagatttttccagagcaaagcaggtgccttcacctgctactgtcgacagcaaccaaccttctgcaactcccattcctcccacggttcagcaagctccaaaatggcagcctccaccacataattgttttaaattgaatgtagatgctgctacaaatgtggatcagaaaaaactgggcattggtgctataataagagatcacaatggttttgttgttgcagcttattcaaaaattgtacaaggaagttttagatcagacgaaatggaagcaaaggcacttttccatgcacttaattgggcttcgcagaatagatttgctgtcactcatattgaaacggatgctttgcgagtctctaatgctttatcatttgtttctcaggatttatcttgtttttctgatctgattatggatgttcgttgtcttttgtcctttttccctcaagttttagttacccatgtaaaacgctctgctaatcaagcagcacatggtctagctaaattctctttagggttggatgatgacatttgttggatagaagaagttccctatcctatattctttgttgttgtaaatgacttctaatttataataacattgaataataaaaatcatttaaaaaaatattttaa

SEQ ID NO: 55162 - DNA, 2263 bp, Cannabis sativa
cctaacccatacccatatactctgcataaaaggaaaacagagcaaataaaactgaaaaatgtatatttataaacaaactttacctatttatacaaacacctagaaaactatagaaatcgtaaaataaaatataaaaataaaagaaaataatgattataaacctttaaaaatcgactgcaatttgaattacaactgcaaaaaattgggcgcgtgaacagttgaagcctgcaacaacagaagacgtgaaggacgtgatatcatgacgtcagcacacatcacacacgtcagtcagcttttcaaatttttttctttttttaaaaaaatgaattaaattgaaaaaggtacccaaaacggtacactttggtataaaaatgaaagcatcacatttttgtaaaaagaatgaaattaatgtattggaatgtgaattttccataaatatatttatacacttaaaatattacatataagttgcctagcaaagatttgagaaaaaacaatacataatagagcacaaatcaaaatatatatattgcataaaagaggaaatatatatctacatatattgtgataaaatgcaataaataaaagagttgtgaataagttgaaaggttgtaaaattatgaataagttgaaaggttgtagttaaatatttatcactaattacattaaaataagttgaaaggttgtaattgaatatttattatcactaattataataattttttatgaatacaaaagaaataaaaatataaaattttgagaaaatagaaaaggttgatgaaataaaatgtaaagtgtcatctaacctctctaatactttcctttatatatagatatagatattaatattaatatattaattattgataataaaattgaagtaagtaaatagttaataacaataaactaaactggaaaaataaatgaatagaaaacataaaaaggaaaataaaaaaataaaactaaaattagaaaatataaatctatcaatcacatcattgtttattgtttgtagtcgttggttgtcgtttgctggtcaatattactctctaaaattatttttcattgcccgctttccaaaatctatcataacagcatcgttcatcgccgattaacaccatctttgttggtctttggtttgcatgatcatctgtttttgttcccaactatcacaattttatataaatatataaatatattttcataatttggggctacactgtcatagtcccttcaaaaaaatatataaatatcttgaaattagacagtgtgagagattgaattatataagatatattatttgttcaaaataaatatgaatatgaattatataagatgaaggagaagagaccttgatccttttttttattgtgcaatgcctttgttactgcaactctttttgtttttgttttttttttttttgaaaaatgagagaatgaaaagtgattgagagagtgaggtgctgggaaatcaaatggagagtgaataatatttatatagagacttttaaaaggttgagagagatttaaataaaaagaatttgaaagatgaaaagttgtaaaatctttgaattgtcttcttaaataaccaaattaaatattttaatattcctggtaacttttctaattgagattttttacaaagtaacttatgaatagtttctatagaatgcaaagagttagaaagtgattattattaaattattacatgttaaagtttgtttttaaatgctttacattattattaattaagtgatttaaataataaaataataacaaaaattgatataattgtgaaaaaatgataaaataaagaaaatagaagaaagcttttagattataccacttcactctctttaaatttttctttatatatatactagggacctaagctgcgcttcgcacggtattacctaatttttataatctttttatatatatatattgtaattagattgagtgatataatttaaaatataaaattttcatataggtattataatcaaattaattgtattaaaattgaaaacatagaatttacaaattaagtagcatcctaattttttaataaattcaaaaataaagattatataaataattaagaaaaaaattggtgttttcacatgagcttcttgtgtaacactatgctcaaatcttcaatcaatatatcaatataaaggaaagcattaggaagttgaggtggcaatctatgtgtgttttctatcctattctttattttcttaatttttatcatttatttattt

SEQ ID NO: 55163 - DNA, 644 bp, Cannabis sativa
taccattttccttcaagataacaattgtcccttcattcacggtgggaatagaagccgaatccatttggtgagttgtcttctttaattcaggcaaaaattgggagggagaattaatgttggatgcttcatcttcgggcaccccactgtcagcctgagacgccatcttccccaatagcagccacggtgaggcggtaaggaaattctgcctccgattaggagccttcatccacattccatagggcttcacaatcttatctgctggtgtatcatagagtttaggacgaaaattctctgagtgtccgagcaatccacaaataaatcaaaatgtgggaactttctcatatttgaaatttgcataaaaataggaatcgttccctctgcgtcgaaatttcattctccgtttcagtgggagagtaatattgatctgcacccgcactctgaaatactccctccaaatgcccgtgaagttgttcgggtcagactccaagtactcgccaatgtatcgccctgcctcaagaacagctttctctgttcgaaatccagattggaggtcatatatttgcacccacatatcaagtgtatttagcataacattctcagaattattccctggtttcaatcgttcaattattagttgtttcctg

SEQ ID NO: 55164 - DNA, 822 bp, Cannabis sativa
taaaaagaataataaggataccgaaagaataactttaagatgttgtattcactatatctcacttatagtcactactacatttaaagttgttgttatcagcgtatcttatttgtgcattcaattaaacataatatatttttaagaaattagagcagctttataaatttacacactatagtatgtagatctacataatcctccattaaaacttaattagattttaataaataaatacaaacaatataaaatgttaagatggcaataaaaaaataatcttgcattttgattaaacttgaaatacaataattaaactttcataccatattcttatctgaataattaatatctctaatttatgccaatcaaataatcaaaaaaattaattacttaaacaagtattgtacataaactataaattataatatgacttcaaaattcatgtagttactcttaaaaattaaaataatatataaaaaggttttatgaagatatttagaattgaacatagaaattcttacattagtgtgtggcaagcaaaagaaataatatgcataaaatagatgagacagaaaaatgagtgaccttcaatataagagatacattaaagtaaatgattggcttgcgaaaaatataatttatatataatataagatatataatataagagttgattttagttttagattttagatttaagagttgaatttagttttagattttttataatataagagttggtagtttcaaattttttttaaaaaaattattattattattattattaggctaattaggatatttgctccctgaactttgacatgt

SEQ ID NO: 55165 - DNA, 1290 bp, Cannabis sativa
aaaaacttaagaactaaaccaatttttagtaaaaaaaatgtgaaaaataactctaatttctagagttatcaagggataatcgcggtccttacagcatagtactatttgatgttgacaggtggtcatgtgccgctgatcatgtataatacaagtcgaaagagtagacgttggacaaaaaggtaggttactttttgtgttgtgcacctttccggatctgatgtgggggacaaaaccctaattctatgggtgcgtgttagagacatgccacatcagagtgaaacaatgtcgtggatcgagaaatggattccatgcgcaccaaaaaattatgggaatatgaaattgcacctttagatattatgcccatagggtgtaagtggatcttcaagaagaagagaaatgttgaagggaaggtagagacctttagagctaggcctgtagccaagggctacacacagtgagaaagcgtcgattatgatgaaaccttctctcctatggcaatgcttaaatttattcacattttccatagctgccacttatgactatgagatatagaaaatagacgtcaagactgcttttctaaatggcgatcttgatgaagtcatttatataaaacaaccagaagggtacgtgttaccagggaaagattaaaaagcgtgcaagtttcttaaatccatttatggattgaagcaatcttcttcttgtaatataacatttaataagactattaaagagtatgactttgaacaaaacgaagatgaagcctgtgtatacgaatacattaaaggtaatgtaatggtaattctagttctttatattgatgacattctacttattaaaaacatgtagaaaggttgtcagatgtaaagaaatggttattcgataaattccaagtgaaggatttaggggaaacaagttatgttctcgtgatcaaaatctatagagatagaaagtagagaacattggcattttctcaagaaacttatattaataaggtgatagaaatattctcaagggagaattctaagaaaggacagttactgttcagacatagaattactctacgtaaagatcaatgtccaaagacacctcaagaagaagacgacatgagaaagtatccttatgcatcaacagttgagagtttgatgtatgcaatgttatgtacaaggccttagtcgttaccattctaatccagatttggaacactagatagttgtaaagtacattctcaagtatcttcggagaacgagagatctcatgcttgtatattccggtggagagttgaatcctact

SEQ ID NO: 55166 - DNA, 1728 bp, Cannabis sativa
ttccatatatatatatatcctatcttattacaaagacttaaataacattattcgaaattcaaagaacatgatgaacatgtgatatgagtacttccacgtagattgtacgacaaaggtgcaaatcaacgtagatatatccatttaaccttaattcttctatatatcaaaaacaaccaaaattaattttcttttagaaaacgttcaaatcaaaagagtagtactaaataatataattttaaattagtgatagaattaatcaatttacaggtttgacatagatgccgattgaatcaacaaagtcgcctgattttccatggaatccaacaacaacatcttgtattgagagggagaaagtagtgccagttttacccccgaatggtccatatgttttaagatttgttataaatgataatatcgatgtgatgagtttaaagtgcaaatattttccatatgtcccacttatagatgtcaaatactcttcacgcccgtcaaactcaatctaaaatattaaacaaagtacaacaacattaacattattaattgttaggattaataagttatggttttatatacggttcaatatttatacttactgttgttggtagaccaacattattgggattcttgccaccaaaaggtccgtacttgtggtcattcccgtccttgaaagagagagacttgatatttgaactatcctgatagatagttatgtgttttatccaactcctccccacagtgaaaccaaaagggtctccacccggaccaccctattccccgaaggaaatgcttcgttctggtcttattacataaataccaagagcaaggtagtagccagagcgtccgaaaaacccggctaggacgctgtcttcgcctatggggagggtgaaaggctcgccgacattagggtttccaaatggtccatatgttttgagatttgtttggaaagttagtgaacgaacaacatcatgagctacattagtatactcgccctgtgttccacttatggatatcaaatgctcaacaggccagttcaaaagaatctacaatacacatatataggataggtacatattatatataatattgatgagctaggttaaaaatatacgtatatataatcatataaaaaagaatatatatatatatatatatatatacccttctctcttgacccttactattagggtccatgccaccgaatgtcccagagaagaagccagtggcgtcttcgaaggaaatggacttgatattctctttttcatggatgattatctgacttattccagttccagaactgagtttgaagctccaagggttaccgcctgcaccagtcctattcccatatggccctaatgaaattactccttcctaaccatgcatgccaccacaaaccaattaacaattaacatgcatgcatgcattgcctgtacgtacaatcataatgatataataaaaaatatacctaattaattactatgcataataatatatcatatttattacataccatttgcttcgacagattataatttctcgaatgcactgtgatgagagaaagctatatatagctcccaataatgatcttaataaagtttgtatagttgaaatgaaattctaacacctgtgtatatataggcctaccaccggcatatgaaatccctaaactacccttgcattaatagtctgcccacattaccacaaattaaagaagttagttttgccatgtaa

SEQ ID NO: 55167 - DNA, 1594 bp, Cannabis sativa
tcctctctgaagctaggctgccacaagacaagttcaattgtctcatgagaaaactgcattatccaggtatatgttatgttcctcctcttggtacggcaggcggacttgctctatgttggcggttgggagtggattgttcaatacagagtgtggataaaaatatgatcatgggaattatcgcctctgatcctattgaccatccgtggatgattattggaacctatgggcctccggcttatggggaaaaggaagctttttggaagaatgtgggggatttcattgatcagtgcagccttcctataatccttatgggtgatcttaatggaactctaagagataaggaatgcttgaactatgcaaattcctctagcctaacacgctactcttttgatttgagacgaatggttcatcgcactggattaattgatttgggctatcttggggtcaaatacacttggttcaagaaaagtgttgatcctttggggggttcttctctcaagagagcgcgtctcgatcatgctctagcttctacggattggagaattgcgtggtcgaatgcagttttatctcaccttacagcctcctcttcagaccataatcccattcttttggataccttaagaggaaaacactgcactaagcccctgttcaaatacgaaatgatgtgggaaagggaccaacgtctattctgggtggttaaaagagcatggcttgagacatcttatgaccacccgatggttaacttgtactgcaaaatcaaacataccaaggctcatttaaccaaatggaacaagacccacttcaggttgctatcaacgcagataaatgaggcccgattagctctcagttcgatcgaagaggcgcaaattgttgacgagaaggcacactctgaagctagagaaaaactggtggaggggttaagaagagaagaaatctttttgcgccaaaagtcgagagttgcctggctaaaagatggagatcgatcgacaaaatttttcatggccagcactataacaaggagaagacgcaattacattcaatctctaaagaatgagtagggggcaacaattgaagaagtgaaggacatagcccaatgattcatagagaaatttacaagcatttttctccaagaatggcgctcgaataatgttcaatgctgaggaatggagtcatcttgggatggatatcaggtctatgtaagatctcatggaagtgccaaatgaggaggaaatcgtaagaactctatctaccatgggaatcgacagagcaccagggccggatgggattccagtagcattcttccgaacccattgggacaccattaaagaagatttcatcaaattcatcaaacacttttttcacacggcagaattacctcattacatcaatgacacaaatatagttctggtacttaagaaagaatgtccatcaaaggtaaatgacttccgcccaattgccttgtgcaatgttatgtataaatgcatatccaaaatcatcaccacatggctgcgagatgtccttccatctataatctccccgacacaaactccgttcatcaaagggagatgcgtcactgaaaacactgctattgcaa

SEQ ID NO: 55168 - DNA, 882 bp, Cannabis sativa
gaaaaatagattgtattgtatctgatctaattcatgataccaacttaatcaaatttattggatcaataacctatttactaacaaggaaagccctcattttcaaaaaaaaaaaaaagtattattttctaccttacttcaagtttctatccaatgcaatcgttactgttatgctagtgtgaatttcaccactaagaacaaaatattaaatgtctacgtattggcgctggtgaggtgggagtagctgtcagcgttgtcaataataaaaaaaatatcatagaagtttccatagtttcaacatcaactttttttttaaatgattgggtgatcaataataaacttgaagtaactagaaaccatactactagggaaataattctaagtttcgaagaaaattttttaacgaattattgattagtcttaaaaaatcagataaaaaaatttaaataaaaagtaaaaaaaattaaaaaacttgtgaagggatattttaataaaatataaaaacttgtacagaaaagtttagaaaaataaaaaaaataaatttacaaaattaataaataattaaatatataggatttttttaaggtggggaatttactttagttctcaccttaaaaaataaaaaataatctaataggttcagtaatatgaaattattctacatttattaaattcgtgaatcttaaagaagaacaaacacatttcacattcaatctttaaacacaaaactcgaacattccaatctaaagaatctgacccactagaggaattattaagaaaaaaatgaaatggaaaagcttcaaatcggaagaagaaaaatacccagatgccagaaaccatgcaaagcaaagagatggatagagatgaaaatctaccatttttttt

SEQ ID NO: 55169 - DNA, 845 bp, Cannabis sativa
caacacaggtggctgagccaatttgtttcttcggctcttggaatgcggtttcatattcctttatccactcgattttttttgcctctgagaatgttgaagaagggtacacatttgtctatagacttgtgttaggctatttttagcctaagttccgggtcgatttcataagtgttttctaagttaatgttgccttttcgaatggttttatgcttgattttccttgtttaggtccctgaggcattagacttcaaattgtataaattgttgaaaagacgaggcattctggagaaaaatctgctgaagctgtcaaagtagcttcagtagtcacgactggacttacccatggtctcgacttgggtcgcgactaggagactaggcagagagcatagattttccagttttcctaatggtcgcgactaggctttatgtagtcgcgaccaggggcaaaacacgagatttttggcaagttttgaaattttgtcattcagaggtagcaaccctaatttctatttaagggactcgcgttttatgattaagatcatcagagattagctccgaaagtgaaagaaggagtagagaaagctattgtgacgatctggagcaaaatcaccatctagttctttcttaactcttattttttatgttaatttctgttctagatttgattatgggtgtaaatatgggttttatgaactaaactcctgattggggaagaagatgaatgttgattgatgttttgctttgttaatgataattgctattccttttgtctcgtttgtgaaattatccatatttgtgtgtatttccatgtttaagattgatcaccttctacatgttctatgatc

SEQ ID NO: 55170 - DNA, 1364 bp, Cannabis sativa
aactaatatggaggaactctgctttgggcaccttatcgaccgtacatggaggactgagttgagtcgtcgactaagggatgagcgtgaaaatgtgcgcccacaaaagacgaaaggctgggccagaatcgtcgactattcgaaaaaggaaggaaggtggcagaggttatcgtgttatttggagatgtaattgaattctatttctttttcattaatctaagggtataacgggaacaaaatttagaaaagtgagtataaattaaagactactaaaagaaaggtaaaaattaaaataggtacaataaaggggcctttaaaaagatctctaatggtagggatactagtatttggagagatccttagattcctcattgtaaaggttttgtcctaaaaccgaatggtgctgttgtaacggatcacaatagtgtagctgatctcttattatcaagtggagggtgggatgtccataagttaaacagtctttttgatcatgagactgtttctgcaatcttaaaaggtggccaaggtaaagatagatggatttggacattggaaagcaacgaacagttctcgtgcaaatcagcttacctgacacagactttggaaagagcccctcactgtgaggttgctccgtcactttggaatagcaaattttcggagcatcataaggtcctttggtggtgcatcctgtctaatgcgctccctgttagatctgagagtaggagacgatttcagattgaggatacaagttgtcctttgtgtgggctgagggatgaatctattgaacatttgtttctttattgtgaggtggcgctacatttatggcgatcttcaccttgggggatctactttgtttgtgatactggtattcgtgtttgggactaggtgaaatttatttaggatcttagaaatagggagatcagagttgaggacgtctttctttatgctttaaatgttgttgacaccatatggaggacgcgcaatgaaagggttcagaataattctcctcctgatgtgttgaaatgtattgacaatatttgtacttcttttgtagagttacatgattctctcttgcccaatcctacgccgatcttgagggagacctggtctccacctcctcgggattggataaaaaataaattgtgatgttagagtgggcttagagagtatgtgcagagctgttgtagtaaggaatcttctgggtagggtgatttgggttcacacgacttggttggatttctcagatgtgttatgcgaagaagctgtggcctgctgtttgtctatctcgctggctatggagttagggtataagtatgttattgtagggagtgactcgagactagcaatcaatgctctcaatgggaagg

SEQ ID NO: 55171 - DNA, 981 bp, Cannabis sativa
aggttattgacctttctgaggagctaactgttgcgagcccctctactccaaaagtttctaagtctaaatattctcgaggaggaaactcagacaagcctgagcaatcaaaaggtgggttcgagctggccaagagtggatccgagcagatgcgggctcctactccacctttgtcaatgcttccaaaggccaagaaagaaaaggagatgcttgcccattacatgaaccggttggttcctgaagtgagtgagcaactggccagtgctaacaacaaatcttctctggaattgctaatgggaggagtcttgaagaaattcacaagggtaagtttttcttgacagttccgtccaatcctttttacttgtcttagattctaaagtttttttttctgtgcaggctggtctgaagttcgcttagacttactcccgagctaagtctgccgcctccaagaacgttgctctgtccaacaccatgagggcagagatggacatggccaggaaggatgctaatgatgtcagggtggagctcggagctgtttggatgtagttgggtgaggtcaacaagaagccttttactgctgagaagaaagtagctgagttgactaaggacctcgaggcttccgaccagcttgaggctaccattggctccctatcggcacaagtgaatagccttcaagaggagaggggagttcttcagactgtcttccatcggcactaagaggagaagaagacccaggaggaggagcttacagctgagattgagaagtacaagtcggggatggcgaagcaggaagaaaaaatgcatgccttaaacaaagctggtctcgagattttttatgacttttggaaggctaaccctcaggcgaatttcaattacctgggcgaggccaaaggcatgtgtctcgagtattgtgcttctcaagtggcttatggtgagcctgatgtgactgcttcttcctctggccagaatgttgatgtacctccc

SEQ ID NO: 55172 - DNA, 622 bp, Cannabis sativa
ataaataattatgtaaatatctataaataattttcataattaaattttaattaactgctaattttcaaattaaactaagcggtctttacaaaaatattcttagagtataaaggagaaaaaaaaaagtactaaaaaaataatagactacacacaaaggaaaaataaaattataaaaaagaaactatttttatttttttctttaatgaaaaaaaggaaactattaaaaccactcaaaaaaaatatgtgatagaatatattaattgtataggaaaaaataaaataaatttattgtcaaaaattaatagcatgagttcatatagtttgacaagcggatgaaatatatgtgtaaattttggatttttctttggagcatgacatttgctctcacctatgagagagcatttgttttggaagttgattagttgaactggtggagtgtatatgtttatgatgtggtgtagagcatgatagtaatttctttatttaattattttttataattattatgtttaactatgtcccgaaaggtggtttttcttcatttgaaaattaattttttcttattacttacattttcgatggtcgatggagaatttctttttatagctgtaaataatttttt

SEQ ID NO: 55173 - DNA, 675 bp, Cannabis sativa
tccactagggttctccgaagggtgccatcattataaaatatatatggttaaaggcgaaccagtcacgcctggatgattgtgcatgtattgcatgaatcacccaaactatcgagacttttaaatttaacatttaaggggttacttttaaagttcatgattgttatcctgattgtttcgcctttatttatgtttaaaagttttcacttattttagccaattttttaatattgtcgacattctatcgacaatatgtcgaccaataatagttacgatgagaaattaaaattttaactaaactattgataaagtatcgacaaatcatcatcaatttgtgtgcaaaatatttttttgaatattatgaacataatgttgatatactgttgacaaattttttttagttaaattgttgataatatgttgacaagtaatcgacatcctgtcgatagtggtcatcaatgccctttgcttacatatcatcgacattatattgatatgctatcgataaacaattgataaactgtaaaaaactcaaattttgagagaaaaccaaatttagtgttttagaccaaaaaatagcaaaataataccagttcaaacaaacaccacacacacaatgaaaacatactacatattattcctaatatctaaaaaatggttagaacacaacttacctac

SEQ ID NO: 55174 - DNA, 951 bp, Cannabis sativa
  modified_base (42)..(45): a, c, t, g, unknown or other
taatttagtagtaattagtccaattccctgtggttcgacctnnnntgtgtgagtttactacttgattgcgtatacttgcgtagtgattataatttttagcaacacaaagaaaatgaacgacgattcgatggtgagctatcgaagaacaaaaagacaaaccaacaacgaaaaaaataaaacaaaatcatgtcacaaagaaaacactagtcacaataacctaaacaaaagatactcaaaaattatattaagctaatcaaagcaatcgtttaggatagtttttcttttaggctatggacaatttagttcttgtattagctaccgaatatgagtatattgtctataaatattttactcatattagctggtatgttaattatttgtttaatctctgtttttcattgttatatatattgtaaatagagagtctttgtgtaaaggggagtgtttgactctacatctgtttttatatctttgtatttgtattgagtagtcaatcaagtctacaagtagaaaaataaagtggaagaaggtttttcaagactttagtggaaggactttggttcaagtcttgcctcgagaggaaacaagaactcttcaagttgatcaaagggagttcgaatatacttaaagttttagcaagattcatttgttaagagggtgtctatttatgtataatttaaaagctttttatttttgagattttactcataaatcttatccttgcacgtggctccgtaaacttgtaataatctgcaaagattgttgatattgcgtataaaaacttagtatatttttattttttttgcacttttgatcttcattgatttttccttctgtagttacaatcttaatttgtaattacaaaatatttattttaatatcaactttattattccatatttcaaataaattagtaattataaaattcgaaattcaataacaaaaagtaat

SEQ ID NO: 55175 - DNA, 724 bp, Cannabis sativa
  modified_base (269)..(270): a, c, t, g, unknown or other
  modified_base (503)..(503): a, c, t, g, unknown or other
aaggagttcaccagggtaagtcttttttgatacttccctttaatcttccacacttagctcaatatgctaaagttgacctacacttactcccggactaaatctacagcttccaagaatgcggctctgtccgacaccctgaaggcggaggcagacttggccaagaaggatgctgaagaagccagagcggaagccgaagctgttaggttggagttgggtgaatccaacaagaagctgtttcccactaagaagaaaatcaccgtgctaactanngatctcgaggttgctgaccgttttgaggagaccatcgagatcttatccgcttagctaaacagtcttcaagatgagaggacttctctgtgagcagttcttcatcggatgaaggaggagaaggatgccaaggagggggagctttcagccgaggtggacaggttgaaggagaaggtcaatgcctttgagacagtcggtctcgagctcttctttgatttttggaaggcttatccccnggccaactttgactacttgggcgatgctaaggacatgtaccttgagtactgcgcgacccaagtggcttatggtggaaccgaggcagctgcttcaacctccggtcagacttgtgatgctcctcttgctccagttggcccagaagaaccgaaccaagagcctgggactccagctgtttaaacacttctctttttatctccttttttttatatatatatcttat

SEQ ID NO: 55176 - DNA, 922 bp, Cannabis sativa
aaaagaggtaaaaatgatagattttaaaaaagagggtaaaaataaaagaggacaatataaagaaagtatagagtgtaatttcctccaaaaatatcaagtatgtgtgtataggccatgttgggattgtggcacggcacgatccatatttttatagggcacaattgttgagaatcatgagtttcatcttaaactaattagtgatgagtagagtagctcatgttgttatatatgactcaatatttttacatttaatccatgtgggacaatattctccaatattctccctcaagataatatttatttttactcaataatcttgaatcgctttatcacaggatgtgccattttgctcgctttatttttgtatggatcttaagcatctttgcatcatttgtatcttattttgttcggatctcaaacgtctttgcaccatctggatctcatacaattggctaaccatttggatatgtgtgaatcgaaagcccgcaaacgatatgactctgatactatgttgagaattatgggttccatctcaaaactaattactgataagtgatccggggtagctcatattcttatatatgactcaatacttttacatttaatctatgtgagaaaatgttctctaataacaatacttctcatattttgaaaatacgaaaagaaaatatagaccaaaatagaataacacacgaatttacagtagtaaaacacccctttaaggacctactttaaaatttaaaatttgtaacgctgatatcctcaataaaataagggaaatttgcggcgaaagtctccaaaaaggtcactttgatgtaaattagtccccaacctctaaaaatagcggcaatagtcctcaagtcacactttttatttgtccgttagttctaattttaactgagtcgtttacttttttaaaatt

SEQ ID NO: 55177 - DNA, 894 bp, Cannabis sativa
acagtttgaacatcaagttcatgataaaactgaaaaaggtagcgatttgaatcgagctctttgacatatactcccttacctggctgccaaagagaagccagcgtgtgtctcattgcgtcgaagtcgatagttctattggtgaggaacttaccaaccaaacaccatctgtcatcaaaagcttgctcttctccctcttgttcatccgctatcaggacccctccttcctcctcctctaattgtatctgggcatattgttccatccaatcaccccctgccttactactcgaagccatctcagacgaaagatcagaaactagagacagaacaagaatcacaaagaaacaaatctaggattactgacaacaataaaccaaaatactttcaaaacatgtcaatagacaagacgtacgaataaatcatcttaatttgtaaaaaaaacagatattattatatttcactcaaaaaaaaaaaagatatatgattatataattatttaacttatatttaataatctaatttttttttttatgttccaacccagcaaccatcattatccgaagcatccactaattaaaggtatataagtcaccgtctccgatgccggcgccggagtagaagaagatgcagtcgttgaaaccagtgaagaagatgaatcaacacgtgtgcagcttcgctctataggtacacctttttctcatatttttgtaccaaattaacaaatcaaaattggctttaattaaagcaaaaatcccataaacataaaaaaaatgtttgttagtttgttaaaatttttgatgtcattttaatcatctattatttttccatattatatttaattaagttttagcttctatagtgtgtactacagaaaataaacacaaaaaaaaaaaaaaa

SEQ ID NO: 55178 - DNA, 1534 bp, Cannabis sativa
ggtgtgaccgagtaagagaaaccgagagcaagaagaggaagaaggctcttccaagtgaccaggcaccactggaacgtgctattaggattagggaacctgatatgcttgtccagccatattccccagttgagggaaaggggaaagccatcttgatggagcagaaggaagactcttcagatgattatgctccgtctttacttgttcgggccaatgctcctgcccacgtgcagggtattttttacttgtatttatttacttcataacatgttttgcatcatacttgcttttgacttttttatcttgttttcatgtagtcatgtcccagaagatacctcagggtttaaagaagagaattgatgacagctcgggccaaactccctcacccaagaaatctagagacaatgaggccccatctaaggagaaggtgctggtcggagaagtaatagacctctctgaggtagtgcctaccgtggaccctccatttcaaaatgtctcaaaatctaagagctccaaaggggggatctcagatgggtctcgtcagactaagacttcttcaactactgtggtgttgagcatggaggccaaaaagggtaaagacatgctcctgtattatctgcatcggtcacttcctgaagtgagtgatcagctatccggggcggacaatgagctgtccctagaactggtgatgggtggagtcctgaaggaggctgctcgggtaagtgtttcattctttacttttgttttgcctttttgccagttcaagttttaacttttttcctgtgcaggtcaacttgaagatggcctacacttattcccaagccaagtccacagcggcaaagaaccttgctaccactaacaccttgtaaagggaggcggatgcgggtaagaaggaggttgaagatgtgcgaaacgagctcggagaggtgaacaagaggctccttactgccaataagcgagttgaagagctgacaaaggagacgcaagagatgccatcaactgcccagttggaggcagacaatgatgccttgtctaaagaggtcaatgagctcaaagacgagacggattgtctccacactcttctttcaaagttagaggggagaacgtctagactaggcaggctagggaggaggagctcacgaaagaggtggaaagcctggaaacaactgccttagaggttttctatgagttttggaaggccaacccctcaggaaattttgattacctcggtaattccaaagaggtatatcttgattatggtccagtcaggcggccaaagaaaacctcgaggcaaccacttctacccttttgactgaccagagcaccaaaacccctgccgcccagaatgtcgagcctctggcccccacagaccaagctgatccggataaggagcccgggacacctgccgtttaaaatatttttattctttctttttatatatatttgttcggcccatgggcctttattagagacaaaaatgaccgactaagcggtttttaaacttgggttatgttttttattttaagacaattagcta

SEQ ID NO: 55179 - DNA, 1282 bp, Cannabis sativa
tctcgttgctattttttctgttattttatgagccaagagcacctgaggtagctcgtcaacccatcttcccttagtcgtgttgagctttttctttataacatcttttaaggtttcattaacagccttgacttgaccattagcctgtggccttgatactaatgagaagcttttaacaattttgttcctttcgtagaacttagtgaatcaatctccatcaaattgagttccattatcagacactatttatatgggtatctcaaacctacaaataatattcttaattacaatgtctagaaattttgtcaaagggattgataaaaaaaggtttaaaactttagtctatttagtgatgaagtcgactgcgaccatctcaaactttgctcctcctcgccttgttggtaaaaatccaattaaatcaatctcctatatcgaaaatgggtagggagaggtcatcatatgaagttcattaggagttatcctcggtatatgtgtagatcattgacatttgtcccagttcttgacaaactcatgggtatctttgttgatagtaggtcaatagtaaccccgtcagattaactttttacataaactttaccaccttgcatgatctccacaaaagtcctcatgaatttcattaatcatctctaaggcttttgaagggagtacacatcgcaataaagacatggaataccctcttctgtaaagttttccatcgacaagtgtgtattttagaatttcatacaagagtttacgtcctacgactttatctatcagaagttctccatttagcaagtacttaatgatgggagtcatccatgtaggactcgcatatatcatttctatgtctttcttttcatctttgcaaatactcggctcgcataatacttgtgtttgaactagattcaatttaactaactgaaattgtaatgccaatttcgcaaaggcatcaacattagagttttgttctctcggaactagctcaattttaaagtaatcaaaaatttccaagttcttccaaacattctctaaacatttggccatctttgtgccttttgcctggtactcacccaacacttgattcacgaccagttgtgaatcgctaaaacattgagctaactttgcttttaaggctatagagatccagagtcctgctaacaaggcctcgtacaatgcctctttatttgaaccattaaactggaaccttaatgcatagtgaaacttaatgtttttaggggataccattataacattttcccccaagcccttctcatttgaagcacca

SEQ ID NO: 55180 - DNA, 938 bp, Cannabis sativa
tctttaatgatatcaagcctgcaataacttggacataatatcgatgtatatttgaaccattgattgatgatttaatagaattgtatgagaatagtgttcaggcatatgatggttttaaaaaataattatttaatctaaaagcagttttattatggactattaatgattttttagcttacattaatttatcaggcttaagcacaaaaggttacaaaggttgtttaattttttgcactaacacattgctcgtcacttggaaaatagacacaagatgtgttatatgggtcataaacggtacttgcctacaaatcatcctgatagatggaagaagaaagattcaatggtactgaagaaggagatatgactcctttgccactgccagggaaataaattctccaagaagtagaactagttgattttaagtatgaaaagacacacaaaaaataagaagataaatggttgttttcaaagaaagcaaatcttcttttgtcgtccatattggaaaaatttactggtgcgacatttcttagatgtcatgaatattgaaaaaaaaaaatgtgtgtgagagtattattagtaccctattcccgacaaaactaaggatggtttaaatagtcatttaaatcttgttgaaatgggtatctgacaatctttggcatttgaaaagaaagttgaacgattatatttgcctccttcttgtttcactttgtccaaaaggaaaaaataaatggataaattagatgcattacatgaagatgtagtcaaaacattgtgtagcctcagaaaattttccgccatcttttttcgacatcatgatacatttaatggttcatctagtgagagaagcaagattgtgtgggccaatacgggcaagatggatgtatccatttgaaagaaatatgaaggtacttaaaaattatgtgtaacgtccccgcttc

SEQ ID NO: 55181 - DNA, 1914 bp, Cannabis sativa
tttattttctggtttattctagaattacagaattgtattatgtagctacagaataattgtttcagcatctattttattatttcacatttgattaaggaattaattaaataataaattggtaatattaaaatacaaaatttcacgtggtattaatttatagtacctaagaccacatctttatgttcattaattataaatataattattaagtagaataaactaaatgagatacttttaggccaatatttttgtcacaatacgaaattcgcatgagcctgaatagcacgagcacaacacaacacgaaagtataatatgggattgggcctagaataacgcaaaaaaaaaatatatataaacttgaacataacctaaaaaatatggacttaagtacgaaaatatgataaaaaaatacaaatatattagcacaaaaataaaccacaaaataaatgtacgaactaaattcataaatataaatttaattaataattcaagtgtgttattttaattgaaaaaagactatttataattatacaaatacttttttttaaaaaaaaaataaaattatagaacattataaatataacaatattattattttatgcttcaaaaattaaaaattggtctaaagaatgaaagaaataaataaattttattatatgaaaacaaaaagagcaagtccatttaataaaaatggaagggcttgttaaagcccgacatgacatcctcagtacaaacaattcatacttaatgttaggcctgttatctagactatttcgtgtttccattattataaaaataaacttttgtaaatctcacactatttgtatgcttttataattactaggtgatctagcacgtgcacaatgcacgtgcttagctcttccattttatttatattttaatttatttaatttttattttacaaataattataacaaaaatttatgtaatttaatttttacatcttatcttaattatagtataacttacaaaatacatattttattattatacttgagatagaatagtaaggaacaaacattaaagtggatattgtaaattatttgaacactgctttctgtaatctaaattattttaaatttcttgaaaatttatagaatgtctttaacaactactatgtacgtgatcttggaaaaaaaattagaaagggtgcattagtacattcttttttggagagtgcactatagaatagcttcctacgatatatactatttaatttttaacctgtaatcatttaaaaaaattaagagaaaaaacttagagaaaatttgtaatacacctcttaaacaggtgttgtagtagatcccgttatatgtttttgtatctaataaattttttaaattcaagtatcttttatgatcatgtacatacgatgtagttatttatgaccttctgtaaatttttagaatattctaaatagtttacattgtcaaaataaaaatcaaacaattacttaccacaatgtataagaaaaaaaagtcacacgtacaacaaaatatttgaaacttatttttagtattcaaattttctaaaaattcacaggtcatcctgaataattacaatgtacacaatcatgacaaaaattaaactaaaaaattctcatgtatgccaaaatagataagaggtctaccgaaatattcttttggggtaaattataaatacctaattttataaatagaaaaattatctcaaaattatcacaccactgacttaattaaatgaatatattaaaagatttttgctttaaaaattattatgaaaaaattttgaatctttttaataagggtgtttacggattttgtttggattttcaaaattttcaaaccaaaccagtattacagtttttttaaaaattctaaaccaaaccagaccaattaagtgatcaaaccaac

SEQ ID NO: 55182 - DNA, 4602 bp, Cannabis sativa
catgcataaaatgtcacttaaaattaatccaggttaaattccaagaaaaatgtcgaaaaataatctatatctttttaagtttcatccctatttgaagagctatgaacacaatctatacatacatggcacatagcaaaaaatgaatttcaacaatcaattagaattaacttcataacaaaaaaagttaaaacagcaacacaacaacaagaaaaagaaaattcgggggtttaaagcttacaagagcaagggcttcaaagagaacagcatgtgatgcattattcttgttcacatttttcacaacatcagttcccatcaatatccgttgtaaaacctgaaacacaaaattcaacttgattatggaatgtcgtacaaaaaagtcaaaaaaacttctaaggaaaccaagaataagaagaattggcaagctccttgagaatcaaacctcaaacaatgatcttcttgtatttggatcttcaattgtaggaaaatactgaagagccctcattgccttgacctgtgatgaagatatgccaatgagaattagagtcgaattgtaatattcaattttttttaaaaaaaaatagttgattaaggctatgtttggaagttagattttggcgaggaaagaagaaggtaggaaaaaaaagtgtggagaacaaaaaaactaaatcaatttttcaagtttgatatggaaaattttgtttaattgagtgttttatacaattttcctttccatactaaatataagaatttattattttttatatttcacttttttgttcttacattttccctacctttttctttcctcacacaaatccaacttccaaacatagcctaaaagaatatttataacaagtacaacatgaacaatgcccatctatttttcagtcaccaaaattacccaccataagaactccaggcaccaagagcaaaaaatgggcaacaaccgtcagatttatcaaatgtagtcagccataagcaatgaaccagtacaggataaaagaaattacaaacctgaagccagggagatgggataccgtagtatgtgtactcttgtggaacatcctgatttcttgcaagtcgctccagtattttaacacattttggaagacaactccagtatgcttcatggttatttgcaacaagggcaacgagaaggcttgtagaggatgtcaaaacaccaagatcacgctcatccaaaagctgcgccatacgatccgccctaaaataaaataaaataaaaaagaagctaagtttagaaaggaaaaatcacaagaaaaatagtttggaaatattcctagcgaaaaaggaaaataaaaaacataccacccatctacattgactacatcaggatttttcctgtacagacgcagcagacacaaagcagctttctttcttacaagtggtctggcactgctagatagctaaatcaagagccatagtcaatacttgttactttgtactaaaggctaaagctagtctaaaactatagataatttatctcttacaagtaacttctgcacatcaggtgctaaggactcagcgaattctcttccaccaatattcccaacctacagatatggcaccacatgttcaaaatttaggttaaccctacagcaaatgccacaacatgaagaatggtactagtaaacagtgggaaaatgttaacaatttggttatttatatgaaagatttgagaatcaaacaaaagtcacttcagattaagaaaagatttcctactgtcataccattgtcagcgctagacattggaaagtttcgttgcggccaataatatcattgcgcactgtatttatggctaacctcagaaagtcatggttctcatttagtaaacatgatgtcacaatgtaaccaacctgcagttagtatagcacagtaggaagtcaataaaggtaatactaatatttaacatgcataattaaaataaattataattaacttgaatgtgaaaaaaataaaactatctatctatgtactactacaaaccactaaatgagtggtatctatcactgttatggacatgaaacacaagcacaattctagcacttctttccaggcatcaataaatcataatataattagaaatgttgacatcacaagtctaaacactaccaccaatttaacaacctaatctctgtgaattgttttgtatcattaagaacgtcttaagctatactccagaccttacttggagctattttaacagagccaacaggtcacaaacctaatgtaagatcctatgcaaaaaataaaacgaactaaagaaattggagcaaatcaataaataagatgacacgaaaaaagatatatcttacctgtttttctgggtactttggtgcagatattagagaaacagcttccatgtgaccaaaatccacatcataacccaacatgtaaatgtaaagcattttccaaacatatttcttcttttcataaggagacaaattctgctttaatagacaatagatttaacaagatatggtcatttgttcattggcaagcacagtgtatctcatatgtggaaataatataaaggatgataattcactctaaactgaatttaaggcaaacacaccagatgaaaataggaaatcgctctgaatcgctatcaagcaaaagattatatgagcaaacaaatgattcatttaattattgtgggaatgcaatctaaatttcaaaattcaaaacgtatataaatatatagttttagataaataatcagttccagcacaagtcttctccactttaagttataattcataagaccaaatagattaaaaaccaaaaaatataatatatccagcataaatagggtgattaatgaggtctcagtgcagcagaaattgctaagaaaaaaagaagagcatcatagactcatgattgattatctaaacttaacaagcccacatacagttgtgctaatttccaaaaaaatatgcagtttgactataataattatatgtaattggtactaaaatacttggtgtgtaactaaattaagcaagattcaaaaagcaattacataaactactttggaaaactgaaattggtggccttttatgagcatttatcatggacaaaaggacatttccatcaataatcagataacatatccatggaaacatcgatttgaaacctgttcatattcaaccttgataaaactctaacaagctggacggatttaacggatctaacaagaaaaacgaacacagataccacgtttttcaggaacagcgtgataaaattatagtcataagcttgagccaataacagtgccttgtatccttcaaactattaactattatcacagaagctggtaagaaactcctattctcatatgcttttctaagaaggggtcagtcagttttgcatcaacaataataagtttaataactaatgtcaaatttcccaatatctaagtacaacttaaataatatttacttcgaagttagtgaaacaaaatgtccctcgatacacatgtctataaagatacacaagaattgtagaaacaaaaacttatattgttgtctaaactgggtttgcaactgaacaaacaactaaacaattggtatttcagtcaaaaggatccatgtagaattgagttcttattctctatacctgctgccgaaaacctcaacattaaaataaaaatgaaattagctcttgaatttttaagctcacaatcagaatccctaaaactttgcacttaaattcatccaactacatattactatttaagtacccaatcagacattcactttcaactacaaaatcatagaaaattcaaatttaattcccaaaagtcacagaatacccaattgaagctacagatcaaaacctccattcacaaaaagagcaaaaaatcaatatgttcaacatcaaaaaaagctaaaaccctaactagttcgtattgcaaaccttttcgttcttgaagcgagtacgaacattgccaagctccttatctacccttaacctctcctgctctttgttctggcaattacgaatgtcgctgatgaagaccgagaggcctcgcataccggacaaagccatctccggtcagatccagtcccgagaccaaacgcttcgattgccccctccttcttcttcctctctcgaattctagatcctcaggctcgcgatctgagacaacaaggctttggtatctcaaccaagatcagctccaatttcttcgaagccagggaaatggcagaagagaatttgaagtgcgtaacagaaaaagaagagagagaagtgtctatgatctagagcgagagagaaatggttttctagagagagaaagtgaacgaaggtagactgagaagaagaaaattcagaaaaattaaaattaattagaaaaacgacacaaagcttaagccagagttatcgtccactaggcaatgagagacaatatttatttaccattttgtctattttccacctaatatatctaaattgtttatttaaaatattgcctaattaaattttttctcttccaatttgatatatattaaattttattcccaatttttaaattgttataactcttttcaaattattaaaattattggattaaagaatttgtat

SEQ ID NO: 55183 - DNA, 525 bp, Cannabis sativa
ggtttcgatcatttcaaacttagtattttgataaattattaattttgattatattcgaaagataatatataattacaaaatacaagttcaaaataaatttttgaaatatgtaaggacaaagttgataatttgtcaaaatacatgatctagatactctattttcccatttattttatttttgaaaaaaaagaaagaagaaatctgcataaaaaaagaagaaaacatatgtgaaaaaaatgaagaaaacaaatccaaaacatcaattttgtatcgtaaatcataataaacattaagaacaatgtttttgaacatactctgttcttcccttttctcttttctgctttgtttcttcaagtacaatggctcccgtaaaggcattgcaaaaagaaaaaaaaaaaactgaaatagggaattcattaagaacaatgaaatgatgaaccccaaaaaaatcttactgtatcactttgatcaaagaaagattctttctatttttaatcataacattaaacatgtttattttgtata

SEQ ID NO: 55184 - DNA, 761 bp, Cannabis sativa
caaataaccattttaatcttcaaaaataacatattaataaatgtttactgagaaaaaaataataaatgacattgaatgcatcaatattttttcagttggaaactaattacatcaatttcttcagatcaactaattttcactatgatttatgattaatttgattttcaaacactaaaaaaaatattataaccatgaagaaaacactgaaaaacaatataattaggaagaaaatcactaaaaaatttgttaccttgtattttttgtagattcgtttttgggtaagattcgatttctctttgatcttgttgtattcaaattatctgcacaatatgattcgaattattgctttttggttatttttgtgtatttttgaatcaatggaggtagaaatctctgttttcgtattttttttagtttaccttttgatttgaatttgttgagattagatcatttttttgattgagatctacattgtgcccatagtattacacacctttgacgattttcgttggatgctgaattacctcgggtgagaaggaaaatcgtgaaaatcgagatggatctgattcaattgggaaatgaagaaggagcaagtttctcatactggttgttcatttcgtatttttgaaaaaaaaaaggttttactttctattttgtttaatttttcttatcgaaaaaaaatgtaaaatagtaaccaaaaattaggggtgttcataaaatagctgatccaatccaatccgcacgatccaatccaatccgca

SEQ ID NO: 55185 - DNA, 1107 bp, Cannabis sativa
tggcacgacctgaagaaagagtccggaaggtttttttctaatacgaagaaacccaagccgacttcccctctttcaattcgattcgcactttccaaaaatagaaattaattaccatcacatctctgcaccccctgactttttataattgtcctaggattgtttaaggtttcatcccctctaggctttctttggagattttagggggcactgacagaaatccacactcaagctttgatcccctggcttgaagagacccccatttaatgttttgcatattgtgataattccatctctgtggtgcttgattaattccttttactaccaatctttgcattcaattcccagacctctttttcccttgtttataactgatgcactccacaatctctctatattatccctttataagcatccccccaattagtttactcttacctaacccatattacctatcattttactgctgctcgtgtgcttcatatccttccctatcatatacttctactctggtttttcacttcatccttgattgaattcgcaatggaggatctttctcaaattctcaactttgctctcaacctcactaacacagaaaccaaaatccattccctcactgagataccttatgagcctaaagaagatgcaggggaagaaccctctgctttccttacaatcaagctgtcaactaattgtcattttaacgaagatgctttcaagaagcgccttcaccaaatgtggcctgaacggtactatattaatgtcctggtgaaggaaccaaatttcttcactgtggaatttggctattttggggatcacaagctcgttcttattggccagccttggcattttgattacaagctcatagtgatgactccctttgaatctagatccactgtcactgtcgatatgcttagttcaacacctttttggattcaagtcttcggaatcccctttcttcatcaatcacgggctttagctcgaaagctttgtgaaatcctcgaccgctttataaaagtggacaccgctcacttaaagaaacttatggcccttatcttcgtgtccaaattgaaatcgatgttacccaaccccttgttggaaattatttta

SEQ ID NO: 55186 - DNA, 1248 bp, Cannabis sativa
ttaaaaaagaagataaaaataaaagaagacaatataaaaagggtatagagtataatttcctcttatgaattcatataaatttaggtgtttgggctgttcaatcagatatatttttgtattactttttttgttggaagttttataaaaatattggattttgagtaaaagtttacaattttactatcacaaataattttttacaaaattactgtctttttataaaacaactgtaaaacaataattaaaaataatagtagaacaactaaaaaataaccaacatttataccatcacttataggctagccttactctcaacaagaacaacaatgggactcaggacctagccccaacctgtccattcttttctcctacaaaagtcactggagaaatccatagccaaatcaacatttaattggattattctattatcattatgggctgccaccgttcaagatcttttctcccatgagttccattttcttttacaccatcaaaattttgggcctttatttcaaaataattatgatgttattcaatataattatataaaagtggtatttttgtaattaatttataaatagggctttatacgaaaaaaatatgggaaaaagaattatagtttacaaatatatggctgaagaaaataggaacaccacatattgaaattgttaatttttttttcttttttactgtgagatggatttttttaaaaaaatactgtatttttttttttaaaaaaatactgtgtaagttttatactgtaaattgtgttaagtttttagtgttgttctacggctattttttagttattttactgttgtttttaagtattctattttattgttttacaattgttttataaaaagattgtctttttgtaaaaaataattatgtgacaataaaattataaacttttattcaaaatccagtatttttataaaaaccccatatcaaattggtaaaggaaataaactttactcaattcgatagtcttcggttgccttttcagtagtaatggttgataaaggcagaaatgttggagtttatgatgtcttgattaaaaatatgttggttttattttctctcatacaaatgagcctgcccattttattatggtcaaatatgctttgtctagtaaagcatcaactacttgaaagaaggactatccctcttttttttcttttttctttttttttttttatgttttttttttgttatttttaatgaagtttattttctgtcaatgtt

SEQ ID NO: 55187 - DNA, 1283 bp, Cannabis sativa
aaaacaatcgtgtattaaacacatatttaattgttgtatctggagatgtctcgacagaaacttggttacagtgatcccaatagcaagctggggcccttctcccttctgaggtcgacaatgcatgtctgatgtcgattgcgattcttaaagagttcttcgaggctcatttgaatgttatcttctggcttaccaggattgtaggcctcggtaatgctcactggatgaagcttataggtagtcttcccatagcgagacgggcacctcgcttactcggttttgagccgaaacggtcgttgcacttagtttgtactctaagggctttcgtaattgatatatatatatatgttgctttcaccttccaatgtgttctgtcctcgatgtcttgctattcacaataagtgacatatggtttctcgctaatatactaagtgcaagtttgtacattgattcctcgcctaagacattacagtcagcgtggtacaaaaatactctgatacttacataattaatgagttattctataaaaagtaattacatcgattcacatttcctttatcctgacacgtgtcctttattgagatagtagccgaattttgggtgtaacactaatcaacatcaaatttttttactaagaaaaacatagaaaatttggtaagtaattaagcgttcatggagatctgcatcaatcgtgatcttctctcatcaacttttcgtggagatatctatcgttggtcgtgctgtcatatggctgatcggaaaaagctttttgccggagttcatggtgattggcaaaagttttctcgtcggcattcatagtaatcgcaaaaaacttttacattgtttgtggtattgtttggagaagctacctcgattattgagtaaagtttaaattgtttgggtgagttcacgatgatttcagatttgaaatgtttgaaaaagctattttggaaaagttactgtagaaaccgtattttttttaaaaaaaaaattaagttttctttatttgtttaattttctataggagaacaaaaaagtaaatttttatcagctatatgagaaaaaatgccactatgttttgtattatagtggtcaccataattgaccagatcagcgagaattttcgtttgtacactgtcataaagactctagagagaaattaaaatatggagtggacgtctcaaccacctcataggacatatcactactacagtagccattactgtgcttcaaactatagctagctattaaataagacatgcattatgcataataagcaaagtaaa

SEQ ID NO: 55188 - DNA, 1566 bp, Cannabis sativa
atagaaactcctattgcaattagccctgcaaccactttaaaaacccaaaccgtaaattaaaaaaaaaaaggttaaaaaaataatatacgaggtaatttctttatttaataacaggttgcacataaatactaatatttataatttatcttttatctaataattgtataaatagatactgtactaaaaatatattatattattacaaaaatatactttgctaaaaaaataactaaaaaataacgaaaaattaatcccataacaactataaatcaactataaaacaataaaaaaaaatcataaaaacaaccaaaaaaaaatgtattattatttttattgaaaaagtacttttataaataaaataatttaaagagtaaaatttaaaatatgatatgataatataataataatatgatatgatttccattttccaccaagaaaaaaaaaatgaacttacccagattactcctttgatattgtcaagggttaacccaagatttgccttgttatgatacttgagaagaacatcaaccaagtcttgctcttcttcacttttctcattattctgattaatcatatgttgtttgatgatcttttccaatattctagaagacctctgtttgaggctttcatatttaggcctactggtccaatcaagaaatctcaaagaaggaaacaactccccaaattcaaaccctccagctacctttatatcttcctccacaatcgatatgaactcatcatgatcactgcttttttccccaaaagctgctcgagatacgatgctataagacaaatttgtgaccatttgagtaaaattgagtttggaattagcaatgatatgttgtaacgtattaaacacctctttctctctaatgggttccaaagattgaactcttttgggactaaaaagagcttgcatacaaatctttctgagctgtctccagtaatcaccatagggagcaaatgcgatgtccgtacaatcgtatccaatgatttgagcggcaagagtccgtggcctagacgcaaaaacgacgtcgtaggttctcatgatctctttagcgtactctggtgatgacactattacggttggaacttgtccgatttcgaggtacatgaagggtccatgttttttggctaagtcactgaagacctcgtaagatgaggatgatgatgaataccccaataaaagctggtggagatttcccactaagggaagtctccatggccctggaggtagttttgagtttcgagctcttttcatgagtatggtaactgccataaggagagaaaaaagaagggacaagaggactgggaaagagggtagttggagatccatgatattgttatcaatttcaattgtgttagctagcttgtttatgaaaaatcgagtcatgaacacacatttatataataataataataataataatattgtactcaaatgataggagtaattattatattatcttatttttttcttctacaacaacaaatgtcttctgtctttggcttgattactaatgattgtaaaattttattgtcttcttcacctaatactagtttacg

SEQ ID NO: 55189 - DNA, 1791 bp, Cannabis sativa
  modified_base (48)..(53): a, c, t, g, unknown or other
gccaaacaagccaaattgttttgaaaaaataattttctgtttttaaannnnnnaaacagttttttagttatgatgtcaaacatgcagtaagtaaccatgcactaagtcacccgagaagttctggtcaaaaggaagtgtgaaatgcatgttttagagaaaactgtacaatgaaaatgtcgcttggaacatttttaaaattacgaaacgaaactatgtcaaagtctcaagagatatgtctcctggtcttgggcaacatattgcctatgaggcgatgcctagtgccaagtgacatgtcatcttgagcatgacaaaaactaaacagatgtctagtgccaagtgacatgatacttagtgcttctatttttattggctatcatcatacattagaatggtctttctttctatttcaaaatggaataatcattccaccaaaatggtggaaagacccttctattgaaatgacattccaacactttaatatgcaaccaaaacaaaacaatggaatgaaaattattttctttcctttccattctattaatttcattacctccaaccaaacgtcaccttaattatttatcctaactaactcttctttgcctcattgcctatataaaggtctcatgtaaacaatgcacagtttagttgagaagaatccaatttcttgttttcacttatcctctctttctctctttcccttatatgaacttgaatgattagaagctttatgcacaatgggggaatcacctaggtgaatactcattgatagtatttttgatgataatatatacctttatcagtcgtgctcatctattgaacaaataatttcaaacacctacatcatcaatctcttaaaaagaattgataaacgtctttttcatctctaatgacttttccttttagctaggctacacattaacaaataacaatttttataataatataaatgacaaagttaaaggggtgacaaggaattagtaacaacaaagtgtttaaggaacctatacacagttaactaattatatttatataaatagagcacgtgttttttctaaaaaaaaaataaagaaaggacatagagagtgacagaaactatttaagaaaattcaatgtacatatgaagcgatgtcacattttcataattacataataaacaattactaataatatcggactgctactctactagtactctattatatatataataataacaaccaaatcaaagcattacaactggttacaaaatcatgagtaagaaactgatatgatacattatttaaaattaaaataatttaatataaaacatgcgaattcttttgtagttggatttgatcaaatccgctcaggaaatatagatcagccatggacagtctattgagagactttttgttttgatttgttattaaaataaggctgaattatgatttattataaaattagattatatttaaaataggtttattaaatttatgggaatttgtttgtacacaaattatgtatatatttttttgtgaaaggtagtacacaaacacaaattatattggtgtagctaattgaggcccaccacaccagttttattctatggagaatagaaggacattgtttaataatgggatgtgtttaaatatctctattggactcttctaattatcgtccgaggagttgttagtagttactttctttttttgttcgtaaagtgatgagaatcaagtattcttattagtgaaaactcataattattccaggtaaaagttaaagggcttttttcataaatgtacaacaaaaacaaaa

SEQ ID NO: 55190 - DNA, 796 bp, Cannabis sativa
atcaaagataacatgctgatgagtgtcatcagaggtcacacaagccgggcagcagcgagagtctaagctcatgaatcttccaagagggtcccttgtgagcagatgattgttaatcgcttgccaaacaataaagtggtgcttgggaacactaagtttgtgccagacgggaatatgacactctatcacaagcaagaagagaaaggtagaaatgttttactttaaatcgcccttgtctctcagcctccatcaaggaatgatgatccaaggaattcctcagcttaagcagctttctaaaataccagctaaagtcacttttgagagtaagacaccaaaactcctgatccttcaagtagatatcattaatccatctcacccaagacagtcttgtttcgttaagagagcccaaatgtacttagcaatgagagccatattcaacttccttccttctctaaatccaagaccaccatactttttggataagccaaaacatgctcccaagaagcaagatgaactttactacgatttcctttaacaacccaaaggtaatttctacaaagtttgtcaatcttagttgtcatcttatgaggaaggataaatatgcccatctagtagtttcttattcccaacaaaatcaaatgaatgagttgagctctgccagcaaacgaaagatttctactagtccaattatggagtgtcttctaaatcttttcaataatccctccacaattaattgctctccacttaataggtctcaaatttacaccaaggtatgtcaaaggaaaggtaccttcctcca

SEQ ID NO: 55191 - DNA, 1069 bp, Cannabis sativa
tctctctctaactctgtttacttatcttttttggtcctcgagatgcttctctctctaattgaagaagatgaactgatcaggtagtttctgaacttgggcctctagcttttatagtgttctatttatgttagagtagtaaatcgataagttaagttgtatagtttgttatgattgttttaagttttgttgttgtagccttttcgattctatttgtaactgttgcctaaaatttctctcaaaatacatggtagttcaggagtaagccatgtggcaatggaacccgcactataggacataccatattaaaaaatccccaaagcctggtaatttgcaagggttttgagagattagtcacctccgaaagtatccaccaagagggtaaacagttttgtctctttttctccacaaatgaactcgactcggagaagacatggaaggataggcagagcatgggtgctgcttgaggttaaattactgtgcatgcatttaatgcagcatggggaagaactttctacacatttttgagagtttaagcctataatttcttgatttcacaatgcctcataaatcatttgacggttatattaggagctatcaaatcattaacaagagacaagtctatgctcattgaacatatattgcaaagcctaagcacatcacagagaatgggcaatcatgccctatgttcaaatctgagaaattacgcaagacgtggctcatacaaacacgataataatgaccttttcaccatcattatgagcctataaatacctcaatgatggatggaataaagaaaggactttggggaatttccttgtaagagaaacactcattaataagagtaattcgcgaactaagactcattaatgttccaactacgtaaaaattcaattctttaacttctattactacaaacaactttaattaattgttgctaaaaattttgatcaacatttttgtaataactaattgatagagttgtaaggatttcttatatgagaatttaacaactcccaatatataaatatatatatataactgtagggtaagtctatatatagtacacttt

SEQ ID NO: 55192 - DNA, 1035 bp, Cannabis sativa
agaagagataatctcaaagatgatgaatgtgttatatgtttggaaccattattggaagataataaagtggttgttgagatgaagaagtgtaaacatgtgtttcacttatcttgcattaatgactggactcgaatcaataaaatatgtccagtctgccgtcttcgtgtgaatactgtctacattgttacttgtacagatgtttccacaaagtcagatcgtgatactgtagaaaatatggtttaaattaatatatttatatattatagtattgtgttttagttgaattttgctatagaggttagttttcattttttttattattaattagtatgttttctcaaataattaaattaagaatagtacttcaagcattctttcaaaatattcttgacaaacacgtcaaaaataatattaattcttattgttgttatttagttttatgaaatttattgtatttactacatgagcttaagataaacaattcatatataattaatacatcatttatttaactcatgttactaattcaataaaataattgttaagaagtagttcttttaaaattgattatggtaaatattaaatatagttttctccaatttccaccatgtttaaccaattttaaattatatatgatataaattataatttttatttaatgatattaagtaataaattgtatcaaattttaattttattaatttttcatataattttatataaaaaaaaatagtatacattttaaaggtcgtgaccaacaaagccgataagcaagaattgtttgtgtctgaatagaatgtacgtaaatgtgaaaaattatgtagctaagttattgttatcagtgatatttttattttttaattaattaattaatatttataaacttaataaaaaaaattaaaaatgagggaattaaagaaaaaataaataaatgtatttaaaacaattttatgatgttatgtggtagtcttatacctaaactttatatatatagatcttttgctaaactacaattaataataagataaataacgt

SEQ ID NO: 55193 - DNA, 980 bp, Cannabis sativa
attacaaatttttttttgaaaaatgattttatttttattctgaaaatattttatttggaattcttattaaattttaagcaagtttagtttttacaaaactcgattcctaaaaatgagagagttatgaggttatcaatttttttggtgcattgggtgccattcgttgagcctcatgcgcgaaaaaattcggacaaggagggtcattcccgcgcatgatccctgtctcaagctcctcgctgcgtgtctgaagcccttgcactgttgttttcagaacacgaaggctgcaagtagcctcctgtgcgcccggatgaggctgcacataatctaggaattcggacagggtgctttgcacccaaaaactcgatttttttttttatttttcacccaatttcgaatttttccatttcaaaaccctaaattttaatataaaatattaattttaatatatgaacctaaataataaattttgaaattattaatatttaattattttaatagtttattattattttttgatattttaaatttggttattttatatttgaattatgcttagattataaaaatttgttaattttttaattttacagattatttaacaataagattagatattttaatattagaaatattttaaataaaaagatatttttattcttttaatttaaaatgttatattataaattatcttatatgataaattaaataacaataaatttgaaattaatttagatattttaaccataataatttcaaattcttaaattggttattttatgatataatttattatttaaaaatcataagttggaaaaataatatttattataatattatatcattttacttatgagaaatttataaataatattcatatatttaaattattttttgtaaaaatttgaaaaagacttaaaatgagatattttagcatataattttgaaaattatcgttagtttattattttattcttgaaata

SEQ ID NO: 55194 - DNA, 1598 bp, Cannabis sativa
aaaaaaaaaaaaaaaaatcaccagcttatacattgtacattataaagttattaatttcatttgttaaatgatgatttggattccatattttttaaaataatattctaagtgatttttttctcaaaataaaacttaataataactaatatgaaaatgtatgattagcttttattgacttcaaattaaatatattaaaaaaaattgatgaaaacaaaataaaatgttaaaaatagtatttaatttaattttctatcacttttgtaattatttataagataatatatttctttttaaaatgactcctcattagtctcatttcataattttggtaagaacccccaattttttttagcaaactactacacatcaatctagtttgtttagtttagataagacaaattaaatatgtctttatatattgcgattcaaaatgacttacattcttaaagtatcatcaatattgagttatgcccctaaattatacttgaattgttgagttttatctcattatcactaccaaattatactttctaaattctggattaatcaacatgattaaataatgacaataattaagaaaaatttaaaacaacttaaaatttttaagaagcacgatcacaaaataggtattgtttggattggcaataattatatttaattatttacttaaagaaattatattttttttgctaaagaaataaattatatattcaattgagaacatttatttattattattagagtaattattattatactaacattaattttatacaattaatctcatgattttttttagtgacaatgcacgtatatttacaatgacaatcccaattaataatcaacgataaaattttattggcgcttcaaatttacaaaacaaagtaaactttaagggaattagcataaaaaaatcaagaaattaaatatataagaattaaaatataatgtgtttcaccgccaataactcttagtattagagtattgttattggacactaatgatgtctagcacattctagacgtgtcagtgtgtcaccttgcaattgattagtgatactccctaaaagttatcatgttaaattatatgagagtctatacttaattataccaatagcgatattgacacgtaagaaagtgttaggcaccactcctgccttttagtatctcttttagagcactgctattgggtactattagtgtctagcaccttctatagatggcgtctcacgattggttagagatattttgtaaaagttattttcttaagttatataggacccgatacttaattacactaatagcggtatgacactgaggaggctgctaccagtggtgcctttagtaattctatttcttttacgagcattgtgcctaacatcttctagacgtgacatcttacaattagttagtgatattctctaaaagttattacattaaattacattaaactcgatacttaattgcaccaatagcgatattaacatgtaggagagtgttagacaccactagtatctttgagtttttttaataaatcatggaattttgttgaagtcaatcaaagaaaataatagcttgcaatccaatcgggatatctcc

SEQ ID NO: 55195 - DNA, 899 bp, Cannabis sativa
aaatgaaatgaagttaaagaacactctcataatatttttcatacaattcttgccattgaatgcaaaaattccacacaattttcgaaataaccgaatgttaagttatgaattgttagcataagatttgaaataagtttatagttgataaaatcccactgaaaaataaggattttctaaaagttacacattaaaatgaaaaacataaatattctttaaaatgcataaaaaaaatctattttaaagcaagttttttcttagattttgccaaccatttcaaaatagaatactcattacaccaaaataatgaaaatgccattccattagaatgaaatttcgataatttagaatacaaccaaataaaagaatcctttaaagatacaacactactcttctcttaggcatttcgtcgaacacaaagccatagaagtattttcaactcaaaataagagatacttctataatctctatctaacccaaaacccaatttctaaatataaatcgatttccatttacctaagctaaagtttgataaaactaaaaacaacccacaaacaataataaataagaattaattacctgaagaatttccaatgacctggaatggtgtctgagaaaagtaacaacagcccagaaattctgtttagtccaatctccatcttgtttaagcaattgcaaagggcatgagtcagtcttattgagcttattgaacaagtttttgagaatacggtgctcatggaaagtgtccactagaagggttgtgtgttgtgtgtttttgttgggagtgttagaagttgagagtgagagacaatgaaattgttgtatttgggtttggatttgattgaattgtttgagcttaagaagaagaagccattaacagtggttgttgtagtaatcgttat

SEQ ID NO: 55196 - DNA, 659 bp, Cannabis sativa
atatagaggccaagagaaaagaaaaaatgaagttagggatttgagaatgaatttcatcaaacacgtgataaaatgagaagaataaatgaatactataatagtgaaatgtaataataataataattaacaaaaaagaataatcaattgaataaaaaaaccacaaaaataaagctttgtaagttgattatagttaagaaaaaattagccccaacatatgtatgaattttgagaaatcatcataatcttcaaacggaatactcaaaattttgatctcgatcaacaatgaagaagataaaagggtttttcattaaagaaaagaaaaaagaaaaccgacttacatttccatcggttgagcttcatagaaatgacaaggctttgtgtgagacgaagagcttgggcgactgaaacaccaaaactctgaagcacaccggttgttgtagaggttaaaacggtgaggaaaaaggaaatgatgcatctgaactttattatgagagagaaagaaaattggcagaattaaaagagagagagagaacgaaaaagagagagttatcaatattgaccagtcaataaaagcataaaattatcaatttctgcttttattaagggcaaaattgtctcccagatgggctttaatgggagataccattgtttctggtaca

SEQ ID NO: 55197 - DNA, 1626 bp, Cannabis sativa
atatttgttaatcatcaaaacaaggagatctaaaagtttgagtttacatctcttgcctccttctgttcacctcttgccattgtaactccccgggggttgggaacttcatggccaactagtaagtgaataaaatggccttcaagcggtagagcgagggtctcccaagcactacgttgaaaactgttagactttcactataatgaaggtggcaattggtgtcacttgcctaggtcgctctcccacgctgagtggaagctcagtcatccctaggggatgcacaaaatccccagtgaaactatatatgggcgttgtgcaaggcttcagatggaccctggcattagctagttgcattatctaccgaacttccattatctacgagtacccaatggaccctggcattagctagttgaactgccagtacgagtggctcgttatggggaaaatgaatccctcatgcatcatcttcagtgaattttatggagtaactttcgtatttcgagttttttagcgatctttgttccatgctcattgccataggtggttgtctggcctccctggcgtacctgtccctccccttgcgagtgtctcctcctatcccaggtcctccacagatagtccaaacatctcttatcacctttagagcctcgcgagggttttctcatccttactcttctcgtcccctctcttcggggcgtctcttctccctctgatagcctcccaggtaccccctttgtatcaagtccttaatttccattttgaggtgggtacactcttccgtggtgtgcccgatgtctttgtgaaatttgcaaaacttgttagggtctctctttgacctatcttttctcattggggccgacttcttgaacgacacccggttttcatttgttaggaagatgtgctccctcgagcatgtaattttagtgtaataagtgaactccctacatcggggctcctcgtccctcctaactctcttatttcagttattcttacctttgttaaactctcttttccttcatggttcttcatgggcacgggggttggccgacccaccgggctcgctcttccccttagtgagattttcgtgagcgccctcaacctggatatactttttggccctttcatagaagtcctccaagtcttccaattctctcttaagcatgttgttccacaacttactttttggaccgacgcctgcaacgatggccatcttgtgctcattcttagtcagccttcctaccctggttgcttcgacattgaagcgttggactcttaaggctttcaacatctctttgctcaatactttccatgcttgttctagagatagtatagtttctagatgcatgatgttgggccaggaattcatcagtgagttatttccaagaggtgatagatccagacaccagccttttataccatttgtacgctgcccttttgagcgtcaccacgaagcactggcacgtcgctttgcttatgaccctcttcatttttattatctcgttaaagccatcaagatggtattttaggtctgttaagccctcatatggagcatgttgggctctttgaagttcacgggcaacggctccgcttgaatctctcttgagaaaggggattcctcattgaagtctt

SEQ ID NO: 55198 - DNA, 3048 bp, Cannabis sativa
tataatacttctcctataattttattttttagccgttattattaatttgttttttttttttaaatcttttttaaagttaatagaagtgtatcctatattttattaataacttttcttatttatttatttatttattttgagtacaagtaacttttcttatattaatatcacaaaattattaaaaaaaataataatatgaaaggaattaattaaatgttggtattaagtgtaagagtgacacataatataaaaaagtacgtttttcatgactctatctaagtattttacttaattatgatagatttatttatactaagctatataatgagattaacaatgatcattagtgagattaaactcatggaagatatatatcaagaatcaatgaatatattctaattacaaccaatcaagcacagtgttaagcgtaattcaatcaaccgtaattgatgcaaaatatacacacctaatttattaaagtttatgatttatatgatacaataatatacaacttattattaagaggatatgatagctacggtttgtttgtctctggaaaaagaatgtgttaggtttatttgaagcttcgttctatcttacatcaagtgactgcatactatattaaatagacgaagaattgaaaattacttctcaccatagcatgataacaatattatagtatgagcttaaaatatactaagtatatatgcctggacaatatatatgcctgaaccgacaaattattgtttccaaacatgtaccaaatggaaactttcttctaattcaagatatataatatttttttgccaaaagtatatacatataataatttgaccagtgttttatattgactttttctcgaaaacttgcaaagttgtaaacctaatcctaataacaaaatgccatttttccacaaccgcgtgaaaaataagggaaggaagaatcttcgtgtagaatctcttttacactttgcttattgtgatatgatatattatactaataatttgtaattgcctaaagcaaaagacttggttatctctcgattagggagaatgacgtgatattttcttatataatgactggaggtgatagccaatagacacataattaagataatagaaagctaaggtagccaacaataattaaaccaaaaccataatgttttccttctcttcttcttcttctgtttcaaattactattccatactattggtatttagtattgtagcaacgactctatatgaatctaatgctcaactaaacactacattttactcttctacatgccccaacgtgtcaaccatagtaagaaatgcagttcagcaagctttgaattctgactcgaggattggcgccagcctcattcgtcttcattttcatgactgctttgtcaatgtaaagtcatatagttatttttactctttgacatgtccagatctagatttagtgtcaagttttgttgttgatcaccgagttctaattctgttgattaattatgttagggatgtgatgcttcattactgttggacaacagtggcagcatacagagcgaaaaagatgccggccctaatgccaactccacaaggggttttgacgttgttgacaacatcaagactgccgtggagaattcgtgctccggtattgtttcttgtgctgacattctcgccctcgccgccgaagcttctgtatctttggtaagtaaaaacaatcagcagcatacaaaaccccttgaagagacataaattaacttttattgaatactcaaagtttaggacataaatttgcatatatataaaataatttagtgttaactattatgtgtttgtagtcaggaggcccatcttggaacgtacaattaggaagaagagacagcttaaccgcaaaccagggcggagccaacacttccattccaactcctacggaaggcttaacaaacatcacttccaaattctctgcggttggcctaaataccaatgatcttgtggcactatctggtgaatacaacattgctagattcatctcacatggcttataatctaagcccattttcctatatgactcaatacttttacatttaatctatgagataatgttcttcaatatcctctctagatggtggctatttttgttcaccaatcttaaatttaactatctaggtgtggatcgaaatcccgctagggatatggctctgataccatgatgagaatcatggttctatctcaaaaccaattggtgatgagtggagtagcccatattcttaaatttaatcttttttttttttctattgtccaattcaaagttttattcttgacgcattctatcgaataactgacaggcgcacacacgttcggacgagctcaatgccgaaccttcgtgaaccgtctatacaacttcaacggaacagggaatccagacccatcattgaactcaacctacttggctactctgcagcaaacatgtccccaaaacggcagcggaaccactctgacggacctcgatccaagcagtgccgataacttcgacaacaactacttcaacaatttgcagaataacagggggcttcttcagtcggaccaggagcttttttcgacatcgggagcctccacagtctccattgtcaacaacttcatcagcaaccagactgccttctttgtgagctttgctcagtcaatgattaatatggggaacattagtcccttgacgggaagcaatggtgaagttagactcgactgtaaaaaagttaacggaagttaaaaataaataatgataagagttgtaagcctttgttggtcaaattttataaaagataatgataatcgtgctttaattaataattctcttaaacaaaaaagtaacctgtttaatttaattatatcttatgctaaaatttaatatgtattaaatttaatacacttttttaaaatgtaagaccatctttaatgggagatgtaaaaattaatctatgtttgacatgaaatatagttttgtgatagagcattgctattgggcacccgtgatgcctagcacccttaagacgtgtcagcttgc

SEQ ID NO: 55199 - DNA, 2524 bp, Cannabis sativa
catggaattgagccagtttgacatccactacgttccacatatttccataaaggggcaagccctggcagacttcataatggaatgcaatgaggtagaggccagttcaaatataccagcctcgaagacactggcatggaaggtgttcgttgatggagcatcaaatgaaagtggatttggtgttgggatagcgatgatatcgccagattgacttcggctgcaggccgtcctacacctctcattcctagcttctaacaacgaagccatgtacgaagccctaattgcaggactaaggttggtaaaggttgtaggggctacaagggtagaagtcttcagcgattcgcagttagtggtcaatcaagtgtcaagagaataccagacgcgtggagaaaaaatggccgcttacgtagaaattgttagagaactgctccataggttcacataatacagagtggaaagaatcccacgggaaaaaaatgctcacgcggattgtttaaccaaattagcctcggataaagaaatagagaaactcgatgtggtacccgttgaaggtagctacaaatgagccaggaccggggtggatggattccatcatcaaatacataatgaaaggagagttgccttaagaaagggctgtatccgggaggttacagtattaggcgcatcgatatgtaatgatggataatatcctttacaggagaggacccagcatgccgtacttaaggtgtgtgtcggatcttgaagctagacagatcatgcaggaggtccatgaggggttctgtggagatcacattggatgttcaagtctctcaaagaaaatactgagacaaggatatttttggccaacaatgaagaaagattatgtagactacgttctaaaatgtgattcgtgctaaagatttgcgaacataccaagagcgccacccaaagaagttactctagaatcaggggcatacaaatcaggtaagtatgacgaaaagatgcaactcattctagtaccaaggtattggaacagggaacacctaagaaaatactaccactaaaagtcccaggtcagatgaccatataaagtacgaaataaaagaacatttactcttaagtgaatggccttttgggcgaatcacgcccaaaggttttgataaaattatcaattaccttggtcggatgaccacctttgaaagtacaatttttattttttgcaatttttttatgctaagctaaagatcagatcagatcaacataatagctttgatgtaagttactacagtaacatacatattgtcgacaaataaatgattaaagatgtttatttaaattcaaactgagttgagttcattagcatgttacatatttaacgtccaatgcgtacaaaatgtctgctcgtacccaaaaccccgaacaaaacaaaatacttgtgaaaaaaacaagtgactaagagtcataagtctgctcgatcacttggggggcacctatacctgtataaggcatttggcaaaaaacaaaaacaaaacgaacacaattgcacaatgattataaataagggatgaaatccattatgaataacaaaagcattcaaaccttggattaatggctgcctggtcagccagatgttcaaaaaaaatgaaaaataaattccaagtttaaagaccgcttggtcggtcatcttgtcttaaaagaaggccttttggccgaacaaacataaaaaaaggatagtaaaaggaaagaaattaaacagcaagagtgccatgctctttgtacgggtcaactggatttgaaggggccggaggatcatcattctgggcggaacactctaatcggtaggagaggtggaagttgtcgccctgggagtcctgtgagctgcctgagcagcgcagtagtcgagaaacatgtatttggaagcacccagataatcaaagtttccctggagattagccttccaaaagtcatacaaaatctcgagaccagttgtctctaaggcattcaccttttccccgagcctcaccacctcgaatttccagttcttaacctcagcctcaagttcctcctccttagctttcttctcatcctccaacctacggagaagtgtccggagaccctctcttttgtcttgaagactggtaatgccccaagacaaagaagcaatatcaacctcaagctgttcggttgacgacatctcttgtagttccctggtcagctcgacaaatttggtctcaacatctagaagtttcttattgacttctccaagttccgtacacacagtctcaagttgagtctgcgcatctacagcttcctttctggccaagtccacatccctttgcagtgtgttggaagtggcgagattcttgatagcagccgacttagctcgggaataggcaaatcccatctttgaaacagtctgtgcggaaaaaaggcattaaatatttgaactagtcaaagaggaattaaaaaaaaaacaacagataggacttacccgcgaaagctctttcaagactcctcccatgaccagctccagagacaagtcattatc

SEQ ID NO: 55200 - DNA, 1260 bp, Cannabis sativa
tataaattattaatttttttcattttacaacccaaccctacttaatacaataatatagagggtgagttgaattagattcatcagagataattattttagaatttaatatttatattacaaacttgataaaattatttaacttagaacttagtgcatacacaaaaaaaaacgatgcatataaatatatatatacatatatgtgtgtaatataatgcttaaaagaaagttaaggtggtagtgatatcattgtgtgagtagcaaagttaataataatgattgattctcacattaattagctttgttagtagaaatagtatgataactatgaactacatgttagtgatgttttttggttattatttcacattttaaagttatcacaatataatttatttatgtatgaaaatgtaatatgtatatttatatatattttgtgaatgtaaaatatatttaatgtatgaagatgtctcaaatttttaatatctcttaagaaatgagttagtttgggttatatagagttaaagtgcgtctaataaccaataattatatggtctatcactttttagctcagtgagtcatgacctgcttttaacataattatttactacaaaaaatagattgagttggtcgggttgacttaatggtttgacccatattttgtgcaatcctactagaggtgttcatccaatttaatctgcattattttgttcatagtacatctgatccgcattaagtgcgaattttatttttttgaatccaatctaatatgcacaatagcttaaaaccaatccaatccaatgcaatctgcaaaagtacggattggattggttattttgaatttgttattttttaatataaaattatttaatatttatgaaaaaaaaatatttttttttcatataactagcaacaaaataaaataaattattgtttttttttatgtctttcatcaacaaactaaaataaataaaataacaaataacaaattcaaaggaagaaaaaaaattgtatgtataaattaagaaatatttaattttgttttaaattgtatgtagaaaaaaaaaattatataagaatagaatatacatttgatatattaagttttaaaacataattatattatatatatatatatttatattacacttttaaataatttttttctttacattaaaatgtcatttgtatatataattttttttataaatatgtgtagattaaattaattcggttacttttacatattaatcaacatctaat

SEQ ID NO: 55201 - DNA, 819 bp, Cannabis sativa
tgttcacgagctccgaccgaccaaatctttcttcagccaagaccaagatgacccacgaccaagacaactcacgacagagacaacccacgatgactcgtgacgacccacgacaacccacaagaagcacctaagatgactcacgacaccccacgacgacccagtgccacccacccacgattctcacaatttctggtaagtttgtatttattttgtattagaatgattcttccaatatgtaggttttttgttgaaattttgtgttggttttgttgattatggttgagattaagaaatttgttcgattttaagttaattttttttgtatttgggcttgaattttaatggtggcagtttgattccattatttttatatttttcgacgtttgtcgacattgattgcaatattttgcgttatcgtcccccaatggcgtttatgttttgtttattttttttaccagtttgtatctattgtgcgacgtctcgcgacattccatgatatttgatcttatgggtttactcattatgacaactagcgacatatgccgtaaaatgtcatcagtagtatcgctatatgtcgctacttgtcctgatgcgtaaaaccataaaaacataaatcgttggatatcatggaagatcgcgtgacatcgcacaattgatacaaactgataaaaatgaacaaaacatagatgccattgggatgatatcacaaaatatttccatcattgtcaataaacgtcgatatttttgtgagtatctgttggaattattttaccaggatcttagatctactaacaagtttgtttattaacatcctaaata

SEQ ID NO: 55202 - DNA, 865 bp, Cannabis sativa
  modified_base (29)..(32): a, c, t, g, unknown or other
  modified_base (811)..(816): a, c, t, g, unknown or other
aaaccaaaaattctgttatataggcacannnnatatagaatagatatatatacatgttcaattgataaactttgaatttgctattgtaaattgttcactctttttttttcaaaaatatatatatacatatatataaaatacacactaattaaaatgtagattgttcatataaaataaattggcttatgatttttctaaatatataattaagaagtgttccatatataagactttttttattatacattaactaaaatataattataaagtaattttaattaataaatactttttttataatcgtatcaaatataatctcaaattacttatcaaaattttgagtctctaactcaatataatctataaaactaaataaaaattaaaaaataataaaaaaattaaaagtaaatacactgtaatttccttaaaaaaaactcaaaaattataacttatttatttattttctgaacaacaaaaatttatctataaaatctcatggatcaagatatttgagctatatgtctctcagtccacacattacatggcctaattgatggcccacaaaagggtgacttgtggatcattattgggttacggcagaggtacacaaaaggccccacttatgagctcaccacactggtccattcattacagcatttaataattacataaaacacaaattttaatatatttttacgttcattttttttatattttataatattttataaaaatacaaaaaataataaaaaaatccgtaataaaaaaataatatcaaaataacacgaaaacaacataaaaaataatatannnnnnataaaaaatcaacaacaaaataatgagaatacaacataaaaaaaccgta

SEQ ID NO: 55203 - DNA, 925 bp, Cannabis sativa
cataaaattcttttctatattatttctaaatttactttaatacttaccacaacaactaatggagagccatacatagctgtggcaacgaagaggcctacagtgcccacaaaaatcttccgatggtgatgatcatggaatacaaatgatgagacaagagcaattatgcagaaggctgtgataacacaaatagttccaacagctacttttatctgcaaaatgttaattaattattattacttaataattatactatgcatgcatggcataattaacttggattgtaagtaagtaataataagtatagtatagtgtacttgcctttctgttagaggatgcaaaccagaaatatatgaaaatgaaggacaactcaaaaagaatcccaaggccattgattgtcactaatgggaaattttcccatttgttacttactatagggaatccgtaccaagtgtaaagaagacagtttgagagtgaaataatgtaaggaacacatgaaaactcttctgtgcttcttttctttatcacccttaagaatgttaatctgaaataataataaaacaatattacaacattaattattataagtatatgtatatttgccatgtaaagtatagctagactatagttttaattaatgaaattacattggggcagcaaaaaggagcaaagaagcagcatttcctgaaataaataaacaaattaacaacatttagaccaaaaaataatataggctaatcaatattatagatatgtgatataaaattaatacccatgattccaactgccatgtgtagtttttcagccatgtttttctctcttctcttgaaaaaatggtccaaagactatgatatatatttagctagaaattataatggtcctatgagtaagtttattattataggtactttaacaagtatatatatgg

SEQ ID NO: 55204 - DNA, 668 bp, Cannabis sativa
ggagtgcgccttgtcccgaatgcagaattactgttccgcggtggcaaagcaatacaataagaaagttaggcccaggaatttcctcccggggaactagttctaagaaatgtttttcagaacaccgaagaagcccgagcgggaaagttatccaccaactgggaaggaccgtaccaagtaataagcctgacgggaaatggggcgtacaggctgtcctgtatggactcgccgagatcacaagaggctggaatgcaaggtacctaaaaaattctatgtataaactaaaagctaggaactccgaatttcatggtaactgtcgtcgtactttctctttaaataaataaaaaagggattcggaaaaatatcaatcaagtcaaaaacgaaagggataaacactttttacgaaaggcaacaaaaaagaccttttacgaaaggcaataaaaagaccttttacgaaaggcaatacaaagaccttttacggaaggcaatacaaaagaccttttcgtcaaaggcatgactaagaccttttacaaaaagaggcgaaccatgaaaaccatgaggggatagtcagcaagtacaatctatgaaataaaactcagttcgaagtttaaacgcatgcataagtaagtacgcgccaaaaacaaccaaagattaagtaaaattaatattaa

SEQ ID NO: 55205 - DNA, 671 bp, Cannabis sativa
aaaaaaaaaaaaaaaagagatttgagattaatttttttaaaaaaaagttaataagttcatttcttttcttcttcttcttcttcttcttcttccttgttcgaaccctaattaaggagccagccacatctaaatattgataaaaatacttaaatatgtataattaaaaaaaatcattaattattttttacaaataataataaaataaaaaatatatttcaaattaacataaaaataaattaaagagtgtaaatataaaagtcaacagtttattttttttaaaaaaaaataagttaacaaaactattcctattcaattgtacaaacataaaattgataagaaactaaagttgagacacccctttatccaaaaaaaaattataaagttagggacaaacatgttaaaacttatgtatttgtagatcaatttgctaaaaaaacaaatttagtgacaacttatcaaaatgtatatagttaagggacttacagtacagataagacaaatgtgatggtttccttaattttttattgtgttaattttaaatatttttttaaaaattgttagaatttgaggtaagatgaatggggttctatctcaaaaccaattggcaatggaaggagtagcacattcatcttatatatcacaatttaatttcacacattagcaatgtggga

SEQ ID NO: 55206 - DNA, 834 bp, Cannabis sativa
attaacaataataataaatagtaatgcggtaatattatggcatatattgtcatttctgtttgtctcgtgattattcgttttgcacatatatataaatactagtcattgtaaacatgccataggtacatacacaaaattttcaatgtttaggcttgaaaaaacaataaaaaaaagtttaattcaatatacatatatacttgatgttacacattgtttattttatatttgttaggagtatttttttttattattttaaaggaagatttaattagttttgttaataaaaaaatagtaaaattaatatttttgttaatccattaatgaattaaaaaagtaaaaaaaaaaatctttaaaaaataattaatgacacatttttcgtgtcgtgtatcatgccaatttatagcatcgtgttgtatcgtattgaaattagtattttttcgggcataatcgtactcgtgcctttcagactcatgtcgatttcatgtcgtgtcaaaagatctggcacgtatttacaacactagttggagagatgctctaagtcatcattgctaaaaattcttttatagtatgtctttttttcttttttaagtaattggctttcgttttagagtgtgggaaatagagaagaaataggtgagcatgtgagaaatagaaaaaaaagtaagtgagcacgtgagaaatgtgacgagaagtaggtaacggttttttaatggacccttatacccgacggtttaaagccaatctggcgagatggcgagaagtaggcttcaaagccaatttggcagtgattctagatcttcggaggtgtcgtctgacatccaattcaaggtcatg

SEQ ID NO: 55207 - DNA, 717 bp, Cannabis sativa
agaatctcattcttttcaagagagtgagatttataataggaaggtactatttagatatgtgtagtgtgttcaactttgaatcttaatgtttaaaaaaagataactctttctcttttataaccacatttaatacaagagagataaaaaaaatataattagtgagattataatttataatttactataaatatgaaagtagttaaatatatgtgacaatagtaaagaatactaattatcacattaagtacgaaattatcagactatctttaatgagtggtgtaaaatttgtgctaaagttggcccaagaaatgagtcaatgttatatttggtccaaattttactattgtgttccaatgcatcagagtaaattaactttatttttaaagtaaattgtggcaaaatctcaatactttcacatcgctagtatttagctccccaaatctaaattttaatgtcaaaatttctaaaaccacaatatctttaacaatttacagtttctatctagatttggttgttaactatcatgttgaattgttcacatggacacagtgtacacacagcacaattttattggtccacataaataattttatattattttttgaaaaaaaaataaaaataaaaaaaatcatacaaataaataataataatatttttttccttctaacatatcatatttttccttcagttttttttcttgagttttcattctttttc

SEQ ID NO: 55208 - DNA, 1118 bp, Cannabis sativa
aaaagacagatctcaaaaagttgaaccggaggtcccaaacaatccaactcaagtatgagatctattactaataaaattacaatatattatttctaaagttgattttcttataaatcggcatgatctctgttattaataaattacaatatatgttaatcatatttaaaaaattattataatatacgattatctattattttgagacttgaaaaccagattacggaaaaaaaaaaaaaaaaaaacaaaagtcaacgattaaattgccaaagaaaaaatccaagaataagaacaacaatttgtgttcgcgggtcatgttcgtgtcgtgttaagactctatattaaaggtatataatcgatccaaacacgacccgcagcagggacggagctattaagcgactacgagggcctttccccccaaatatttttattttcaatttttttagttataaaattgtaattttttaaaaatttaattaaaaatttatttattggccaccttaaattattgtttttgcactttgatccccttacataaactttttacatccgtttctaacgacccgtttaataatcatgacgaaaaataaaatctaaaaacaactcgtttataaataattgatacgagacgactggtgtaaccctttataaatacattttgtttaaatatatcaactcattaatttattaataacatttaacatgtttatgatcaatttataacttgttaaactactaaagtaattttaaatagatgattaatgaattaatttcctattagtcatgttaatctgaacatctgaacaggactcatttgttaaacaggttagatgaattgaatataacccaaacctactaaaaaaactcaaacccattaatttttatctgagtttcgaattaaaataggatgtctgatctgttttactagccctaattttataattattattttttttatccatttactttctcactttgctataatatttcacagtgtcagtataatagtctttcgaaacttcaattttgtttccaccctaaacaaactaagagttacgaacacacaattaaattaaatgatattcaccaacttttgtcttcttcttatctgaacatttttt

SEQ ID NO: 55209 - DNA, 1352 bp, Cannabis sativa
  modified_base (384)..(405): a, c, t, g, unknown or other
  modified_base (1032)..(1039): a, c, t, g, unknown or other
tttattaattgattttattctctgagcgcgactccatggattaagagtgtttgaaagaatactgatatcacatatataattatcttgtgttaagtttttatgttatgcattattatttttataaagttaatgtaaatttgtgttctgcagtaacaaatttctaatctatattattgtagatctttacagtcttatttgttttttactgttattaaaaaaaattattgaattatgtcaaaatacattttttcataaataattacatattgggtgactactcaatggttatatttttattgtaaccatcatagttacttttttcttttatcaataatagcaggttactaataggtaaaattttattttttagaattaattaattannnnnnnnnnnnnnnnnnnnnnaattaattaaatatttaacaagatctcttttagcaatttatttttttttttacaaaaattagacttctttttacacaatttataattctcttcttgtataataaattcttaaatatttaattatttttaaatgatattaaattatttttttataacaagaagaactaagtatgagttattctatttgagtttgtggttgctttgttttctgagggagcatgactttgtttttttgactctggtttggtttttttgagtaaatgactccttataaaaaaagatgaaggagtttagccattttttttagaaaatacattcaacatatttcactttttactttttgaatattcaaataaaaaactaaataattaagtgtaataattttaaattaaagttataagtataataaattttaaattataaagagttttggtataaaatttttaataatttaagggcaaaaaaaaattgttaaaagattcttatttaatacgaaaaaattaattaataattataattaatttaattatagaatataattaatttacattaaagttttataagcaaataaattattaggtgactattaggttacaagttaatcattatttatttttatttaatttnnnnnnnnatcacaaccattcaatagtaatttaatggttaaaaaatgtaaccataatgttacaaatatgtaaccattaaaacctcctccacccttatatattatatattatagtgtacaatttgaaagttaaataaatcattattttttttcacaattgatatatgtatgaaaaatactaaagggtgttcacgagtggtgctcaccaccaccgcgaagtattgtaaaattaagtatgaggtcttatttattttaatttaataattatttttacaaaaattgtatattattcataaaacatcacatctcatgaagattaaac

SEQ ID NO: 55210 - DNA, 1574 bp, Cannabis sativa
acaccagcaaccatgtatatatctttattgatatcaatgtttacaaagttacaagaatctccacaaacttctcagagattacgagaagaagtttctttctctagtttagactctacctcacactatcacaattttcattcaagcaaatctggtttgattctcacacaggttacaaagattttcagctatcaatagatttgcattatagcaaaaaatatctcctaaattatcgtgacacatttatgccgccttaaatgatctagctcatcaccagctacaaaaaattcacgtcatcttgaaatacacgctttctgtatggacaattcggaagctttataaacacacaagttttttggatacatacaagacttcattcccggatgaaccttcaagactgatagtaagctgtccaggagtgtacctccagattaataacaagctacatagtacaagcttatctagaagcaccttctagattttacaagacctttcgcacatggcttttcgaatccacactaagcttccaatatcttctctccagattcacaactttcaatttcagatgacaaaacttgtaaccataacttacaacctttatttcctactcatttcaatgagattgtatccaaaatgggtgtaaaattattttacactcctccttgaaaggacctattagaattagttagttagtaataatggaataaattagttagttattctgctaattcactcagtactgaatcatcttagttattctattgcttatataaacaaaggcttgatctatgtatcaaataattaattcgagtgttacaatgaacaaagaattaaatagagctttatttctcttcgtatttttcttaatagtagcttccaagttttaacttcgtgatacttttagtaattgtataaaagttatgtaactattcacattatagtatatttttggtatgattaatctaaaaacaaaaattataattacaagtaactattcacattaatgattttcacaaaatttgtaactagaaagtacaaagtatactataatgcaatgtgatgattatgcacctatcaacaaattcaacactatatattcttaaatcaataaaatcaaaatgtatgtgtgccattcgaataatattctttcatattaatgattttctttatggttgcggtgtagattcattttcttatttctacttttttgatgttttgcggaatattacttttattattcaaaatatacacgtaacaaaattttgactatctctcaagaaatataatagtaaatatatttatatatatatatatatatactagccggtaactacgtgcagggcacgttgtctgttctttttgtgtttttcttttagaatttttttttcatattaaaaaattacataggttaagttttgattatagtttttaaattattacttatatgtaatttatactcaaagaagaaaatttagcaatcttttgtttcgattcttcaatagagtatgaattaaagttcttgtacatttcaattttcattttctctttattaacttaagtttgtagcatccaacact

SEQ ID NO: 55211 - DNA, 1372 bp, Cannabis sativa
ctttgaagatttttgcaaccaaagagtcagcctccacccttgttttccaagcatagacaaattaaaatctctcaaatagcggaaactcatgcctcctttagatttatgcatacaaagccgatcccaagagaaccaatgaattccatttctcgcattgtcgaacccttgccaccagaatttattcatagttttctccatatcccgagtgatctccattggtaacaagaatacgctcattgcatagcttggaagagattgtgcaaccgttttgatcaacacttctttatcggcgcgagataggaatttcgtctcccagccttcaattcactttcgaactctttctttgagatagcccaaaactgctaacttgttcctgcttaaagtgcttggcaaccccaaatacaaacttccttcccccgctatagacatgccaagaaaggtactgatactatcccgagtagcaagattagtgttggtgctataaaaaatcgatgatttcgtaaagttcactttttgacgagatgccgctttaaacttgtgcagaatttcgtttattcttaaagcttccaacatagtggctttacagtagaggtagctgtcatctgcaaatagcatgtgagaaatatggggagctccattagccaccttgcatctgtgaatgaaacctcttctttcatatttctgaagcaaggccgaaagaccctcagcacaaaggataaaaagatacggggataacagatccccttgtcgaatacccccggtaggaacaatcggccccatctctttatttccatgaaccaccatataattagccgaagttacacatttcatcaataaatgaatccaccattcctcaaaccctagtttccttagcattgcttccaagaacaaccattcaatcctatcatacgctttgctcatatccaactttagcgccataaagccttctttgcctttcctttttctttttaaatagtgaagcacatcaaacgaaattaggatgttgtccgagatgagcctacctggaataaaagaactttgagtgtcagctacaatggcattcatgaaaggcttcatacgaccatgacctttgtgattgttttatacacaacattgcagagcgcaattgggcgaagttgggtcatgtcttccggattcttcttcttaggaatcaacataatattggccttgctgcaaccattttcaaagtcccctacagagaagaaattccaaaccacacctacaacatctcgaccggctatactccaacacttttggtaaaatgccggcgtcatgccatcaggatcaggacttttatcgggatgcatttggaaaatggcttttttgacctcttcctaagagataggaaccc

SEQ ID NO: 55212 - DNA, 964 bp, Cannabis sativa
agttcgatttatataccatgtacatgggtaaagttgaaatttgaaagaaaattacttatttgccttttattctatattttcagattcatttacttgtaatagaaatttcttgtaaaatgtttggagttcatcaactaacttgcattgcaggatagcatgaagatttcttttaattagttattttttttaggaataatattattgagccaaaaattgctgacccgtgatttgtttatagccaaaactttaatatacacccacacccactttgtaagttgagaacgtagtacaaaatttttaggctagaattttacctacagaacattgaaatttaccaaattatgcctcccgaatattttaggttgttaaaaattccttcgaactattgtgattgttggatttaaagctttttgtccaattttactaaagaaaatctgacatgtatgaaaatttaagggtacaatttgctacatattaaagtttagggacatgatttagtagatatcaaagtttggggaacatgatttaatacatagacaatcgccacataagaaaaattgaatgaaattgaacaaaagtctttaaatctaacaatttttataaatcagggggaattttttacggtttgaaaaattcaaggagtatgatttggtagatgtcaaagttcaagggccaaaaatcctaattaatcaaatttgtattgctattacttactttcttagaaaagttcagatgatcatttgcttctaaataatgagataataatcaatatttaagtatataaaaatcgacattagaaaccaaaagttagttttgagactttgagttcaaatacagttgttataattgcaaatatgctatcacttagcatttagtttggttacatgatatttcatatatcagcatctcattggaagtattactagtttattgagataagatatagtacacatgaacccaaaat

SEQ ID NO: 55213 - DNA, 1644 bp, Cannabis sativa
ttgaagagtaagagtgggtcgtctgtacccaaagatgtcaaggataaggttgaggattcttgttctaagaatctcgaatttggtggcaatgatgatgagttacccgatccattgtcaccggaggtattttttcttcatcttgttgcttttctgtttttataactggttatttttatttacatttggtctttcatgttttcagttttttttttatgttatataagcagttattttttttatgttctttttttaattctttctctttttagaaactagttatgactatgttttttgttgttcttttgtaggtagtttcaaaatttaatcttcctgattatgatgatgagtctggtgagttgcaattgtcagttgttcaggaagataaggttgtttgtttgtttcttgttattagttatgtctttattataattgattattttttagcttttatgcttttttaattcatgtttgttttccaggttcattctagtttaggtgaggggaaggatgaggcctttgtgttttctgatgaacacattcttgtcgaccaatccattttgggtttggttgacagcctcactcaagcatatgcctcggcaattagtgtaaaaaatgatcaatgagatttggtatcaattcttgattttgcattccctattgtggatgatgatgttgaagtactagaagtagtacctttgcaatcaagggttgctatcaagagataagcaaaacctggattgcattgtagatctctttttgtcaatgagtttggttcttatgaaccaaaagttcaaaagaagaaggagaaggagccatctggtgaagtagaatttgatcctaaggagatgtttccctttgttcaagagattggcatgaacacagatactgacgattgcgaggattatgttatgtggatcgaaggtgctcgcttgttgaagaagaagtatgtgttttagtgttctgtccttcttcttttttttttttagttactgaaatatttttttaattggtttttttttttggatttttttgttgtaattacaggaacaatgaaaaaacatctggtgatattgagcctccatttgattttagcattgctcaaatcgatgacaaatcttggtttgtcatcttacagacttgttgtaaagactgcttagctttaatttggaaattaacagataattaggatttaattatgtaacttgcagattagtttggaattatttatttgcggagatttatttgaattcaaaatgcattttatatgtcatatattgaatttcataattttgcatgttttgtgcccgacaacattagaacgtggtgtttggctattagaatcacatcttagtttttatcagtgtagcggggttgtatagttagacattggaaatgtcgagaatagtcgagattttagacttgacaaaaatacccctaggagattttatgattagttagtgagggaagggcaaaatggacatttggcctatttgtgattttgtttttatgtgggttgaattatgtttattaaatctaattttgtatttatgttttggctgagatttaattaaataaaaacctattgatttattcccattttactaaaaaaaaaaaatagataaaacacttatctctctctctctc

SEQ ID NO: 55214 - DNA, 1427 bp, Cannabis sativa
attatcagctagatggaattccaaattttgacaaaattatcgcgattgttgattctgagaggaagacgagatatagagatcgtaagacaaaaagatacaccatttcaaagagtattaataagaaccagaagactttgaattagctgtctatcacccccaaaaataagccaacatagaacattggaaaaagatatatgacttatatacgtctactgcatttattgctcgttcgaaaaaatatatggagaactgaaagaaaatgaagtacacaataacacaagggacaaaatcaatcgtggaaaggagattcaaattagtaagttatatatatatatatatataaatttaataaagtatactaaatttaaaattttttaacattctcttatatttattagaaaaacttgaatatattgagatattgagggaagttaatgcaacaaaacttttgtcaaccgtaaatctcaagaagattaagtaagttatttaattttatttttattctcaagaatgaatgaatagacttatagttagttctctattaaaaactgaaacaatgacctcatagagaattgaatttataaataagagataagaaaagagaaataaacaataataattctaaaaaataagagatgagatggatgataatatacattgtgttagtttgtaaggtctcaattggctccaccagatttcaaaagatatgtatggattctcccactcatctctctcttttgtattttatttcactatctatactcaatattctttatcagaaaaatctaaagaatttatattttaaattttagtctcatcttcataatatagattttatttaattaaatactttatacttgagctatattttagttttgttgtttatacttaatagatgacatttgtggtatgtgtgttgttctttcaatataggaaagattgaaagaagtatatgaatcataatttgaatagcaaagtaatgactttagttctcatacttcttcctcaattgatcagatgcaaatactttaacaaatgcttggggagaggagcaattacaaccgaggagtgggacgctaagtgaagagtcaattaacaactagtcatagtcagtactaccaaacacagacgatgcctactcaagatttttcagaggaaatacaatgattggagtgagttacaattaaattggtccaacatataagtcaaaagaagcgtttgccaccaaacaatgagatagatgacttaattcagaagcactcaactaggaggcatgatcctcaaatgtctagagatggttctagttcctcttttcaaccttcgggaagcaactccaatatgcactcaacttttctatgccagtggcgaattccactaccaccaacatcacaataatctactcctacaccctatcttccttacatgta

SEQ ID NO: 55215 - DNA, 1619 bp, Cannabis sativa
tgaaatagattagtaggatcacaatcccacttattacctgattaactcataatataaatataaaccctaattatttatcattaggcttatcgagatattacacgagagtactgggtgcgtggaagccaggcgcacggagtctgggtgcacagggagttgggtgcgcgaggagatatgacagagagaagtgacgagggggacaaggacaaaaagggtggggtccaccctttgtcctttttctttgttttgggaatcttacattatttctctctcatacatgttgtctaatagatcattcatttattgggattcccatgattaacacttgtcccctagtctagaagagcacttttaagcagcttttttactgtagttgagtcgtcctttgggctctttgtggtgcacctcgtttggtagagcatctgacatgacgtacttaaatattgataagaccattcaatgaggtaggtgagtcacatgttgcttctcatgtgtgcatgtgactaaccccatccattgatctcacaatgatccaatggctaggattcacttcttcaccttataaatagacttccaatcttccaccttaacctgtccctttcttattcttacttctcatttgttgctatccttctttgctttctatttcttctaatctcttcctacattccaagccctttgacatttgttctttcttcaggttctaacatcgcgagtcctttcttactcaagtcaatcttgtcaggtatcttctttctccattcacaatacttttcttgtatatttatacacctaccatacttgtgaacacaactctggtttataataactctcgttaaaggcttattagtctttggcctcccattaatcttatccattcgtatgccctcctttttatttttttatcgcgtgactaggcatgtgtctaaggagaccaccttgtgattgagttatagctggtattgtgtcactgcactcagtcagtgggagttggtgcccacattcacttttctcaaacaatatttctaccttgtcctctttctccgtctctttttttatagaaaaccatagacatccttcgttccagagggggtttcccccattaagctctcatctgattcggatggggacattgtcgacccttgggcatggtatcaccaactaatgtatgagcatttgaaatgtttagaagaaatttatgtgtttcaagagtggctatttaggctaaaggaggagattgagttcttggagggtcgagggagtgctaatacggcctcttcggacagttatatggtgacatagcagagaaacttgctcacttggagcacatttttctgcttgagttgtctcccccttgcttagctcccatgcctttggctatgaagccagctgtctgccagtcaggcgaaggtggttgttcctcctactatcgctctccatctatcgttgcctagggtcatctaagtgatgatgccttggttgggcttagattgggtcgcaaggctccagctcgtcgaatgaagaacatgaagtgtctcacttcttgttctaactctttttatgattttgtagatagggataaaccacgtcgcttaactaagcccaatgcgccacttcca

SEQ ID NO: 55216 - DNA, 1304 bp, Cannabis sativa
tatcagaaaacttgttattatcatagtctgcagtaccctcttcactcttggaaaactcggtgtttagatggtcttatgtatcagcttcatcatcgaattgtgacagttgattccttatgtaggatcctctaaacaacgagttttccaagagtgaagagggtactgcagactatgataataacaagttttctgatacatgctatctgtcctgcattggcaatgtgacggggttcgaagatgctggtgtggaggtgaaatgggctaatggtattacaagcaaggtacacaatttatggatcccttaattgtttatacaaactttgatgcaattggttataagataagagccaatgctaactatcttgtcatccttacaggttgcgccttatgaaattgttcgggtggataaacatgatggtgcagcttcaatctctgtggatgaagaagttgaggacttgagcgaagatatgatcgaacatgacaaacaattttcaagagacaaaaaatggtaaaaatctctaacttgctctaaaagtttatgactttgcatttttcaacgaaaatttatgagattgttatgttcaggattcggttatttcaactgtggttgatgttggctgcaagaaacacctatgggagactgcttccttttcccttccacaagctgccattggttttttcacaaacatagctgcaagtctacttggaacccttgactcgaacttggatccagattcaacaccattagttcaagtccccgaagttcaaagtgaatctaagatgtctaatgcaaaagaagtaatggaagggaatgatctttgttctgaatcagaactagtaaccgagttgggtatatttggaaacagacatgtaaataaggcagataaacagattcaagaggataaagatctaccccatgtgaccaaaaatgataatctagataagtttagtcagtttgatatggttgcagattgttccgaccaccattttcttgacaccggtgcagggttcacattgtcacaggttagaaaagaatgttaagagataataaagttgtgaacgttgatattgtcaacaaaatcctttttttaacttcctttgctttgcatttttgttccttataggccaaaagaagttggttaaagaaggttcatcaagaatggagcatactagagaaaaatctccctggttagttctaaaatcttattcatttgatcatcacttaatgattttcatgacatcaaaaattagtgataaaatgtgtttgttgtgaccataacagaaacaatctatgttcgaatctt

SEQ ID NO: 55217 - DNA, 995 bp, Cannabis sativa
tattctatcatcttattctatataagatggccccactgcctctgttgtctttacataaccgaggaggataatgccattaatgttccgagatagaaagtcattgtaccttattgtagtgggagaatttcaaggaacccaccctgttatgacttgggagacactggtgacaaaatccatttttagttttaacaagtaatggataggcagaatgaggaactaagaagaaaagccaagagaactatggctaaaaccattcatatggagtaaccaaatgttttctattacaaggaaaagaaagtaaattatgataataagtctattcaatggacttgatagaacttgatgatcctagtattataggtttgaaagtatctaaacatatggcttgtggtatacctgatgatttactttagtacaagcaacttacttttgtaagatgctgaagcattttttttctaatggctaaatctataggaagctttttgacttctagacttagattttatttatctaaggaaaagtgtcaactattctagagaagatgaaggccaaagaaagaatttcttaggatcaacagtgagaggtctcaaatatgctttgctatgctttagactagacacctgctgttgagtgagagatatgagtaggtatcagattaatccaaaaaaggaacattggaagataattaaatgaattttaagatcaataaaaggaaatatatgttagtcgataaggatggccttttaatattcttagactacaccaaatcaggtttcaggtttctagacttacgttagtgctagaaagtctactgatgagatggtgattactttgggggtggaggagtgattttggataagtgtaaaaaccaatctaaagtctctaactctaccagtgataccgaatgataaagttgtaagagagatacttattcagcctatggaaagttctatacaatttttggcattgtaccaataatttattaactactagtg

SEQ ID NO: 55218 - DNA, 1057 bp, Cannabis sativa
  modified_base (138)..(149): a, c, t, g, unknown or other
  modified_base (176)..(181): a, c, t, g, unknown or other
cgacgtaaataaaatcaaaaaatgaaaataaaaatgaattttacaaaacacacttttattttctgtttttaaaattaaaaaacaaaagtgattacagagcgcatttttatttctcaaaagcaaaatttttaaaaacannnnnnnnnnnnttattttgtgattaaaaaattagaaannnnnngtgttaccaaacggcaccttagcaaatcaaaatttattaagggtgatcttacacctcacatatcacccttgaaaaataaaggctataacaaaaaaacttttcccatgggaacaattgtagctgatattaaacccatcaccagtgtgtcttatatgtatagattagctaatagagttgcacattcacttgttctttttgctttttcttctcctattgtattccaaactggttgactaggattgtattagccgatccttcttgattaatgcaatcctttattttctcaaaaagaaaaaaaagtaattaacacaaccaaatatgcataggttttgtttctattttggagagagcgaaatttcctagcattaattatcaagtcaaacacacaaagattgaaattataattgagacaaatgatccgaagactaccatgaagttacgcatgcgtgattggtcctgcattcttttagtttttttagtgagagattgagccaaatataatattttttatgtctaacttaatagtcatttttctttaaaataaaataagttatcctttcataaaaaaaaaataagaaagaaatagaggagtaagttgaaagaggcattttttttagtattttcaattattagtttatttgtacttaatcttccaaacttaaattttggtggttaaataaaagcctccaaacgtctaaactgttagtaaatttaaggtgtcatatattttttacagttaactgccaacatatactacttatatgtacactcttgtttgtacacgtagcacatttatatttgtacacctaatattattatttaaaaattataaaaaattatttcaaaatttataatattttttaaatattttatttt

SEQ ID NO: 55219 - DNA, 1496 bp, Cannabis sativa
ttgaaatataaataatatatttttattttttaaaatttaattatttgaatgccagaaactaacaataataatttttaaaaaaaatggaactgtttggatgggttaacctgaccaaaccgacgaaatcattagacgggttgaactttttttaatttttaaatatttgcaacccgatatatattggattagaaaaaatgtgtcataactctagcaaaccgaccgacgtacacccgtaagtggtagcgttaattttctacaacagcttatcagagttaagaaaatagataactgcattcgaaacatccttcccggttatatcccaagtatctttaaagaagaaactattaaaactattagggccaagagctttttcatctgggattgagaaaaaagcatgcttaacatcagcttttgtataatcttcaatcaatttggccacttgaaagtctaaaataacaacccattctctcacaatcttctcgttcaccttagttctactagcattccttgtaccaggaagagtttggtagaaatcaagaaaggcatgtattactttatcttgctcctctacctaattgcctcttatatctttgattgagtagatggtgttttgaactcttcttttccaaatactatcatgaaaaagtttggtgttgtcatcaccattatttatcgaaggtaacttcgctttttgacttaagaagaatagatagttctggtgagtctcattgcatcgcaatctagcctctttctccttctttaataactcctcattaccatgttggttttgaagagcttcttgaaccgaaatcaactccctttacgcgatgctatccaatgtctcaatattcccctttctatcttgaataagagctcttaacccaatttttatcttctttagcttggaaaccaaattaaacatgggagttccggtcacatttgtcagtcactacgagtattattaatttctggataaactaaaaccaacatgggacaatgatcaaagtctctttccaggaaaaaagtgacttcaactgtgttgtaaagattgacccacaaagcatttgctagcacacaatcaagttctgtaaaatttctatcatttccttcttgcttgttattccaagtgaagaaactttcattaaatttcacatcttctaaactacaattacaaacacaaaagcatccctaatataaatagtaataaattcagttcaggtccatctttagcaaatataagtaaaaataaaatgactcacactaagatcattcttattcgttactgtaaagaattgaaagattcaaaggagtccaacaagtttcgtccattaaagtaagtcttatatatatacattattgttagtcttaatattactacaactacaagtactattataccactaagtattagctattactaatgtaaaatattttttttctggatgatataattgatggttcggtttattatatactaaactacttttttgtttttt

SEQ ID NO: 55220 - DNA, 1196 bp, Cannabis sativa
ctaagattaactagattaactaagtgtagaaaagatataacagtaagtttatgatatctatttaactgtcaataacggtccaatcggatgtatacacaatacatccgatactggtatactttgctaataccttagaaagaatattccaattatacaagtataagtaaactttgtagctgattatcacgttagtataaatccagtgcactcataaatcatgggactaaagtactttgaagcatataatcacaattactttctattgtgatgatatcactattattgtgaataactatatgttttggatttaaataaaagttgtatattgaaaccataatcatgaaaacgacatgtaaactttaatgacttctaatcttctattgataacaaatattttatttagggcataaaatctgaacagtacttagccttcaacacattacaacacaaagagttacaaccagttgtaagctgccacccccatttggccaagaaggcaagattcatcttcgaagtctttcaaaatcccaggcctccttgagatttcggaaggcacatcttgtcgtaagccttcaagtaaagaccaatgttacccttctcgcaagctcaccagaagttacgaactaggctatcaatacaagaggtcgagcgagtagaacacttagttttttgcattgaataaattgtaagagaaaggccaaccaattttataagagtcgctttactttttttcacttgagaaatttattaaaggataaaatctatatgtatgtatgtatgtatatagtaatagaatatatatatatagacgactgaccaatatatataagggtggatttaaattaatacgtttatggacatttttttttaaaaagtatacgaacaatttaaatagtgtgtggtttggtaacacttttttaaatagatttttatttttaaaattaaaaaagtgaatttttcaaaatcatgttctataaaactgtttttacttatcaattttttaattaaaaatctaaattttaaaaacaaaaaacatcacttttaaaatgtttttaaacaatttttttaatcaaaattttagactacgaccccaacttaaactttgaaaatcaaactcagacccggtcccagagttggaccctccccttgtcccgatctcggacccgacctcagacctggtctcggtcttgatttta

SEQ ID NO: 55221 - DNA, 777 bp, Cannabis sativa
tcggtgactttgtcaattccttctgattgttttcttcggcaaaggaaacctgtaaattgatgcatacataattgcttagctagaaaacacaaattagaatcaaaacagattatacaccacaacaatctctcacaaccattctcaaaaattatcaaatcaagtatatacactcaacaattaaaattatatataataataatgatttatgaacttaggatatttgaaaatatatatcatctaaagaaaaatgaaaataaaaaatttaaacttcaatataataatgaaccttgaaattttttctaaaaatataaataaaaaaaagttaaattaacaaatagaataaaaataaaatatctaaagacatccttatatatagacaaaaaaaacttatgcattcatatataacactattagaaaaccagttataaataatataaatgaaatatgatataaaaattcataaatataataaacaactagaaaaaaaaaaaaagataaccatctaactaaaaaagtgacaaccaaaacaactagttctaacgataaaataacaatgagaatcagatcaaaaactgaaaaataaaacaattatacagaaaatttaaaagaaaccagttctaattatcaacttatactcacattctaatattactcttccttttaaaatgcaaaaatagaacaaataatatttgtgatcaaatatggggactaacaaactttgttaagttgataaaaatcgaaataaaatgcaacaataatgacatagacatatcatac

SEQ ID NO: 55222 - DNA, 996 bp, Cannabis sativa
  modified_base (602)..(608): a, c, t, g, unknown or other
  modified_base (744)..(754): a, c, t, g, unknown or other
cttgttcattgatagagatagagaccttattctccaaattcaattgtccccatcctctaatattgatcattggtattggattaaagaactaccatttgcttcaacaattaaagggtaactcgagttttgattaacactcaactttttggaaagctttgtggcatttgcagctgccacctaaagttaaaattcaactcaaaacaaagcatgtcaatattgatataccttgcccactatataattttgctcctgaaacaccaatccatctctttactggttgtagctgtttttttttggatctataaaagacaccattgaaggtgcttttactaccttttttgattatggcattactcactagttaaagcaagacactgaaaatatctcaatgttatgttgggctttatggaaatattgaaataatcttatttacccttaaaagaaaaaaaaaaaaaggtaaataggcatatttactaattaataatttttcccatcgaattttgacatgtactaaatcatgttcctgaaattttttaccgttaaaaattctcctgaattattaagattgttagatttgagaacttttatctaattttagtaannnnnnnctaacatggatgaaagttcaaaagacatgatttggtacgtatcaaagtttgaaagacataatttggtagattccaaagtttggggagcatggtttaatacataaacaatcgctaaaacagtaaaattgaatgaaannnnnnnnnnntccttaaatctaacaatctcaacagttcaagggtaatttttaacggtcaaaaaaattcaggggcataatttggtacatgtcaaagtttgggtgaaaaattcctaattagtctatattaaattatagggtgattctacaatgcactcccttaaaatggatgtattgatgcaccatttacttgtttcggcatccagaaaaattttttagtctaatttttcttatattcatatacgttataacta

SEQ ID NO: 55223 - DNA, 867 bp, Cannabis sativa
gtcacattactcactcgcattattgaattaaagttgttcaaatgcgagtccggatcagtggttccatcatacgatgagacgtacgggtttttgaatcccgaagggagaggggtattcatgatgtctgggtgatacaactcaagctcctcatttgagtcgtatcaagattgtctccctagttctcccacttgatatctcctgaacttgtcctccaactcgtctattcacaattggatgggatcctcttgctttggaccgagttgttagcgaagatcaggtttcttttgattcaagtgctctcgtagattcggttgagagtaattgctgataaacctcgtcttactcacagattgcgtcctactcacagacctcgtcttgctcatggacttcgtccttgagtatctcgcggatttgcttgttcccatgctttctcgatcattaactcgttgagtactttctcctcttcgagttgatcaactatgggtccttgacggcctcgaggtcacacttgcttcttcatgctctattctttcctcctgagtgtggtttgtcgtattaccccattaggatctgtacgagccctcactctatgggttcgggaagaacgctggtgatttctcccaggtgacctacgttctctaggttcagtcccgagatcttcctcattgtcatgaggaatttcccgttcatcagtttctggttgcctaccagtctcatttctgtgagaaggttatgactgatcattttgattttcagggggtatctcattttccctgggttgttcttcccatgcattttcctatctcttggttcgtgagccacgaggtctaccttgtcatcttctcactccaggttcatgttgatttt

SEQ ID NO: 55224 - DNA, 863 bp, Cannabis sativa
  modified_base (26)..(33): a, c, t, g, unknown or other
ttgaaagtgattttttttttttgttnnnnnnnntttgattctcaattaaaaatttgaaaagtaaaacaattttagagaacatatttttaaaaaatagtttcattttttcaattttaaaaataaaaaactgattaaaaaaatgttaccaaacgtcacctaattaactttttcaaatcttatattagaataatctttcggtctttcattttattttaaaatgttatagtcattttactaaaatatagtgttaaagtcattctataaataatatttcaatactttaatttaatttcactgaaattatttatcttaaatctacaaaatgttacgtatatattatttcaataattgcattagttaattaaattaataattaactcttgcaaaataattagaatgcatgtattcaaataatgcaatgtataatctaaaataagatttgtagaacttatatcttatatattattaattttgtttttatacaatattatcttattatacaattcaaaacatataaaatattatattacataaataattaatttgactaagttataataaacgagacacatgcaaaaaatttctaaaatatatacagaaagagtactagagaagtacataattttatgctacaacaaattaattaaaataatataaatgatattttcagttgtaatatcgaacgctatatgtacgtaaaaattacagaaaagaaatagtacatagatgatgaaagtgttagactataatgtaatatatgtaatatagtatatacaaacgatatgaaatgcggaaaataaactgtaatcatatcgataatatatgtaatgaaaggatcaatatacctccagccattgatcttt

SEQ ID NO: 55225 - DNA, 1150 bp, Cannabis sativa
ttttttttttttttttacatattgtgatttttttcttaatatttatttttttctccctctttgaagtttgagataaaaaatcggtggggaaaaaaatctcagtaaaacgccagtcggagtatcactgtcgggagtctaaaaatttacaagtcagttcttacaatatttgtgtatatatgttttcataaaaaatattttttttttcattttatatgtaaatatatgatatatatgtattataaatatatatatatatattatattgatatagagatttaggatttatagtttggtataattttaactgttaatttgtgtatttcttttaaaatatatatgtttttaaataatatattaatttataatacatgtatataatttatagtttatttaattttgttagaaataatattgttatgctattaacttaatagtaatattaactttatattaattaaaaaaatctgtaattatttttttaattaatatagtgttaaaatgaacataaaaatatattaatagaaaaattaattaaaatcaaaatataatgaaaaaaatatgtaaataaaattatatattatgttcatttatataaaaaaatataaatgcgatctctcttaatgaaataaaactaaaaataaaataaatttctatgaataatcaaaaagtaattttttaataattaaaataagttaatatttgaaataataaaatatgtttcttgaataaaaaaatataatataacaaaaatataagcaataattaaaaaattaaatataaaaaataaagttaattatttaataatatagtagcttatatataaataaataattaatattaaaattaataatgttatttttgtaataataaaattcaatagaaaaacttataggtaatatataattacttgacattggcactaaaccaagtttgcatgtcaatgaagaggaccgcaacatggacgacgaagatgcttctgaagaatctgacgatgaaattttagttgacttttgtgaagataatgtgaatgataatttaattaataatgatagtgatatgcataattaattttcaaacactttattttgtaatacatacaattattaatttcaagttaatattttttatttcaagttaactttattaattt

SEQ ID NO: 55226 - DNA, 1040 bp, Cannabis sativa
ttacctctgacccgtggctccctgttcttgacagaccaactccaaacccggttgttcaggggttggaaaacttcaccgtaagcatcctttttcaagctaataatcgaagctgggatgttgacgttgtgcgagactttttctctcctgaagacgctgctcttattcttggtatacctctaaatgcttcggcagttgttgattcgtggcattgggttgatgagaagaatggtttctactccgttcgtagtgcttacaacatgttgcacaacaagaagttcacaccagatttgtcaccttctaatggtctatggaagattttgtggtctctcaaagtgcctcccaaagccaaagatcttgtttggagggcggtttcaaattgtcttgctactaaatctaatttgtgtattaagaaggtgttaactgaaaacctttgtccattttgtggcatctttgctgagactgaatgccatctttttgtgtcatgtaactttgcttgggcttgttggaattatgctggtttggctgccaccagcagagacgctacctcacttcggatgtggttatcggatacttttcagctggtttctggggaggccacgggcagagttgtaatgttgtgttgggctatttgggctgctagaaacgatctcatatggaagcatcaggttcgtactatgaaggatgtagtttcatttgctacaacaagtcttgatcaatggttaaaagttcaaggaaagggtaatatccctttgttgtctcctctcaaagatggagatgttttggagctttgggtaaaaccggtttcaggtatcaagcttaatgtagatgccgccatttttgagcattcttcaaagcatgggttcggttgtgttgtgaggaatacagtgggagagttagttgctgcctttgctggtttaaagtttgggagagtgtcacccgaattggctgagatcatgggcgttagggaggccctcagttggctgaaaaatcatgcccattcccacgcaattgtcgagaccgatagcctggtttgtgctgaa

SEQ ID NO: 55227 - DNA, 1163 bp, Cannabis sativa
  modified_base (916)..(926): a, c, t, g, unknown or other
  modified_base (1000)..(1005): a, c, t, g, unknown or other
tattttattaaatgttttagatttaattatattttttataagataatatgtgtaaatattaatattatatgtttgaaatgaataaaatatattaattattttttaaaaagaataactaaaattttagtaatgtattttgaagaaatttatgtaatataagtgtttgtggtaaaatagatcaaatgtgattttaatggtatatttttaaagataaagttgagaagtttaaaaataaagtgtaatgatttcgattctaaactattaagacaagaaagatgaaagtcatatgaaatgtttagtaaagtacgaaccaagctaataatctaagaattgagtcccgtgatttcagaacactgtccaataattaaaaataagggcatccttatatgttttcttttgtttctaatgcgtcgaagtttgtaaactaatcccacaactaattaaaaagtacttttatttatttatttatttcttttgaaaaacaaaagtaattacattctctatttcactaagttataaaacataattagtgtacgaatataataattctcttctattattttacaagtagataatgaatgcatctttctgccaacattgattttttttctttttctttgaaaagatctttatgccaactttgtacaatgagtcaatgagcaatattaaaaggtaatagtagtgtctagtaattttatacatattaataatattattattagtataaattaaatattaaatttaatataattattttaataatttttaaaaactattactaaccaattaaaatataacacaactatatatataatatatataatcacatcaattttctacaaataacccccattacataataattacaaaaatcaaatatattaaataaccctacatgtattattattattattannnnnnnnnnnattattattattattattatcagggttggtcctaaaaaaatgggtcaaagattatcattattattattattatnnnnnntattattattattattattatcacggtaggccctaaaaaaatgggtcgaagagagttttcttaaattaagaaaaaaaatggaccttttagatatgtattttttttgtatgtatgtaattttaaataaaattaaattaatatttagtaatataaataca

SEQ ID NO: 55228 - DNA, 2192 bp, Cannabis sativa
aggtaaccatttaagatatagtaacacttcacaagcttcaacttacttcactatctccaactccaagggtgtataccattttggtccaacgttttcaccaatttgtgtatatttcataacattttcaataaaaacataaatcaaataaccaaatattacactagacagaatatttttcttcaaagacactaattctaaacttggagattttttttctttttctataaacttaatactttttagttatatgattatccttgtaaatatcttcaaaatatttaaacaaatataaattgaaaatttaataatcaaattaaaggtaacatgtgatcaaattcatttgaaggttattttttaaaacaaaatgataattaaaaaagggggatcgtgtagaatttggtccctcggggcaaagcttccgcaccatttagtgttttgcaccaaattggtgcatgtttggagtttgaacatgtttattgcaaatgaaaataaaacaaacaagcattactgctcagtagagagagcttcaaaattggtgattactgaaaatcagtacagcgaaatggcacaaaatctgaaactctccagttcaacagttgttttttaggaattttcttcgtagctagttttaagagccacctacccacttatttattaaaagcaatccacacatagatatgtaacttatgagaaatgctaatggacaattaaggtgccaagaaccataagaggtatcatactgctactggtgtattttaatatcggatccaccacattggtgtgttgttgagttccttaagttgccaaatggcaatgctcataacttatcatatactcccataatcgaactcatgtaaacctttgaacaggacaacatgaactgattaacccgaaactaaaggtttccagtctcgagttaagttcattacacaaaaagcaaacacagtatcggtagtgattaaaaataatacctattgaataattttcctatttatatatatatatattcaagagttctgacacacttttttaaggattaatttgtcattggtaaagcttcatgaacaacaacgactaattcaaatatatactaattaataatactcacagaagcaaactcatgtcccggaagaattccactgatctctcccaaagccgaactaagcgtcatctcgggacaccggcgcaagaactcgcaagcctcggttgccttagctatggcaataggctgatcctcggccgtaacgaatggcaaaattggggcctcaccccacccaacgcacccatttttcaattcgattcgaatcgcaacattctcgaccttttcaagccgacatgtcgcgatcgtaaaaggtgcgatcagaggaacattcaggggcctattctcggctctgtggacgtccaccatgatagtctccatcaaatccttaaaaccaaagttcgtcggagccgccacggccattctgggcccgaatctcaatgtaggactgagctttctcggtttggaatcggaatgaaaagcagaaatgggaaagggagcgtcgctgggtagtgtcaattttagagagagcccaatcgaagacattaggcgaatagaggtttatgaagggttcttctttcactactcagatgagtgtgacgttctgagcctccaattgggtcttcacaagtgacggagatgtcgagaactgccattgtcgttggtttctgtagtgaacagttgatagagagaattttttattgtcaattttttatatatttttctaatggctggaacctcaattgacttttgagatattacatacctcaacacatgagagtccgttggataccaaaaacaaaacatttattaagatctaacggtaggaagatgtcaatcaaaaagtaaaagtaaaataataacaaaatgatacataaaaaaaaaaaaagtaaataatttttatgactttgactgttattaattatattttcattaaggatagttatttcattctatttttatcaactaaaataaagactatattactatcaaaaatcttttctttttaaataaataaattgtattttattaaaaaaatatagaaatagtccttacaaagtaagggatcaaaattttaaatcctaatgcaatatcgtttaagatagagttatctttatcgtgcatgcgtaaaaaatggcgatttctagaaccc

SEQ ID NO: 55229 - DNA, 1244 bp, Cannabis sativa
gtagatgcttttaaaatcacctttacaaaataagagtacatcatccgcgaagctcaggtgatttagtttaagatcactgtatctctcatgaaaaaaaaatctgtcttttcacctactctcttcatgattctactaaggtactccattccaaggacaaagagcaagggagacattcggtctccttgtcttagtccccttctagcttggaagtaaccattcatagaagcattgaacataagtgagaatcatagtagctataaactttggtgggaagttgaatgttgtcaaaacttcttcaagaaaatcccaactcatggtatcatatgccttttgaagatccaatttaatcatacaattggccttgtttgatttccttccatagtgccttatgaggtcttgacagatcatgatattattagttatgaatcttccttggatgaaaccgccttgagttgaagctactaaatctggctatatacttttaagtctattacagataagtttagtagcaattttataaagtacattgcagcaggcaattgggcgataatcacttaccaaatttgggcatttactcttagggataagagtaatgactgtagaattgatctcctttagtagatgcccagaatgaaggaagtcaagaattgcatcagaaatttcatctcccacaagctcccaattgtcttgataaaagtaactgctatatccatctggacctggagcattgcctcctggtatgctaaaaactaccttcttcacatcttctcttgtgaactgagctaaaagaatctctcttgtcctcccctctatgcttgaacccaataactgctgataataggcaagaaaagctgttgtaatacccttagagtcctccactcgaataccatctgcattaatcactgataaaatcttgttttgattccttctctcacggatgctgaagtgaaaaagtgcagaatttttgtctccgtcttttatccaagccattctagacttctattgtagaaaagagcaatagtttttatgagtttcagcatataccttccttgctttagcttcttggttcttgcaactcattgttcggaggatctttttgaagctgagtttgacactcgactaattcctgctttgctttgaaatctgctacttgtatatctgaaaaatggcatttgttaagctccttaagagcaggtttaagagctttcaacttagcaagaatctgttgaaagctaggatgggag

SEQ ID NO: 55230 - DNA, 668 bp, Cannabis sativa
aggctaacattgtagtagtgttagattgctaatatggttgatgtatgagattagattattgtaagggtggctgacatatttattatataatttagcaacaactttatctcatataaactatcttaagaatatgtttattagtaactcaaaatccttgtaagccatttcatgtggctataatgcaatcgatttaatattcatttaattttattagtttaggaaattaaatttataagccaattgaagcttaagctaacttactaaattttttacataaatttgaatgctgaactcattaaaatagttgcagaaaatgattcatggttaactaattattgtgctgagttttttaaatttaatccaaaattgattgatatggtgatctgaattttaaataatcaattttcagcaaaactttgacttcgagttgttaggatagaatagttccttaaagaagaaagaaaaaaaataaagaagttatttgattataataaattagaccgtattattgcatataaaatttaaatttatctattttgaattattttattatttaccgtaaaaatgaatataaacttttactttatataaaaaaaaaaaacttcaaaaaataacatgtaattattgtctataataaacaacacttcacagcaacttaatctaaaaaa

SEQ ID NO: 55231 - DNA, 945 bp, Cannabis sativa
  modified_base (63)..(66): a, c, t, g, unknown or other
  modified_base (260)..(276): a, c, t, g, unknown or other
acataattagcaacaaaataaaataaattattattttatctccaataacaaattaaaataaannnnataataaataacaaattcaaaggaagacaaaaaaaattgcatgtataaggaaatgtttagttttattttaaattgtatgtagaaaaaaaaaattatatataagaatagactatacattttatctattgagttttgaaatataattgtactatatatactagactttaacttactattttctttacattaaaatnnnnnnnnnnnnnnnnnttttttaatttttttataaatatgcgtggattggattagatcggttacttttacatgacaatcaacattcaatccgcacaagtggggattttaaattttccaatccaatcaaatccgcataagtacgaatatctgcactttacagattggatttgattagatcgtacaaattgaattagatcagttattttatgaacacccctaatggcgacccacataatttctcttagtcttaaattgaagaaaatccaaaaaaaatcaataagatagtacatgatttaatgaatttcacactgtgggatgcgtgaattttggctatttttaaaatcaacgtacaacttttgtaatttctcaaaccgtaatcgcaccacaagagcttgaaccacaaaaaatataatatcgtgtcttacaattttaacatagtattatagtcaaaaatcaaattttaatgagtatccaatccaaaaataataataacaaaatcgatggaaaaatagtagagcctaaaaaagccaccaaaatcttttgattcggagatagtgagccaaacagagccgcttgtaatcaaattgtccaagattgatgaaaaaataatcatcattttgaggaatgttagagagtctcacattattaatgtgtgaaaattaaataccatatattaaatttatg

SEQ ID NO: 55232 - DNA, 651 bp, Cannabis sativa
cttcttttctttctttaggcatttgagctaaacttttgcttctgaaagtttggcaagaagggccctattggcaacatgtagctcacaattctcagcattggtttgctcaagctccacgacaaaagcgcctactttctcaacggctctttctgccagcaaagctacgggttgtaataaagaaaaatgagaagcccatgtacaatggtgggaacaaagatggaaaatgtagaaacttaccctaaccgcttattttttggcagcatgggataaagaaaaggcgtcaacactacttcaagttccccatgtctccaagggcagcttggacgcactactacccactttgtccaaaagtttctccgcaaaaggtgtagcttccctccctactctgggtgccagacgcttggcccaactaggattgagttaaagaggctgcgaagtctcagccctcttcacggccgaaagcacattggccctcctgcacagaaactacctttcttcgtcaaggtattctttcaaggcactttctatttccctcgctctctacatagcagtaaggtcgaggggaacggtcttcatggaaaatgtgaaacccaaagaaggaattttcggaagagaagaaaagggtttgctttgaaggggctgactttgcag

SEQ ID NO: 55233 - DNA, 860 bp, Cannabis sativa
  modified_base (439)..(441): a, c, t, g, unknown or other
gtaacccaagccgaagtgagtatttgagtagaagaggaagcttttttatcccaaactaaggtgtttcttgctttccaaagagcccaacaaatcataaccacacagcaaataacatcatcatcatcatatctattaaacacactgtcaagccagtgtccaatagtaccattcgaatcagcgtgagggatcaaatcagctttgtgccaacaacttaaagcaagacggcagctgagaagaatatgagaagctgtctcaacatgttgaaggcaaacaggacaagttggggaaatacttacacacttagtaactagctggaggcaagtaggaagagcatcagatactgctctccacatgaagttcttcactttaggtggtattttaaggtgccaaagtttgtgccagaatcccaaattattcacaccaggccgagtatttttcnnnaagttgcagcatggaataagcagattttacggcgtagacgcctgttctatcaccagtccatgaccaacaatcttcgacaccagcagaactaagggggattccaagaattaaatccgcatcccgagtgttaaacatatcttggacaagagagacatcccagcttcgagtagaaacatcaaggagagaactaaccacgtactcatcaaggcccggtcttgtagtagagacataggggttgataggatcaggaagctaaggttgtttgagaatgtgtgttcaagaccaagtaccgatagttattctagccccaagacgaaccaaatgttgtgcactccaaatactatgccagacaaaactaggattattacccaattcagcatttaggaaatcaatgtgaggatagtattttgctttataga

SEQ ID NO: 55234 - DNA, 758 bp, Cannabis sativa
  modified_base (35)..(40): a, c, t, g, unknown or other
acagtatttttgaaaagatttccgtgtgacagtannnnnntaaaagttaacccaaattccaatatttttgtaaacttcccaaacagtattattggctttgaggctttggttcataattctaatggctttccattagaatattttgctaaatctttggctggttttttctctcttaaagaagttgaagcgttagtaatctcgcatgctttaaaatagtatttgcaattagagtttatagtttcttttgtgaagattgatgctaaaattattatcgattcatccaattttctccttgagggggtctcccaacaaagttgtattattagatttattaggttatcgttatatatatttctgggcgtatgtctttaagatataatgtgaaatggtaatattacaacatatgggtcaataagatatgcactccatatgaaaaactagatttctcggttgaaagaaattcttcttaattatctaatgaccaatatgttatttattagttataatagtaagaataataattttttctacataaattttgacatgtatcaaattgtgttattgattggttgttaaaattttttaattaacttattttttttttttaaaaaaaaaaacatatatatatttttcaaatttcatcattactattatgatttaactccttaacaccaactatttaagggaaatttgattttctatgcttagaaaatcaaaaaatttgatttttaaaccaataattaaaaccctaaaaaaac

SEQ ID NO: 55235 - DNA, 823 bp, Cannabis sativa
tatagtttaattaatgtgatcagtgtgcgatagtgaaagtgagctagagggatggggtgtgatgattgtatggcggtgtaatctcttggggtcttcagtttgtctttgttccaatttgttttgttgtctctagaccctttttgtcacttggtttttccctgttatctggtgggaggtaaaagttgtgttttggcgtttgtgtttattcctttgggtatctcctactggttttgtttattctgtgtgtcgtgtggttggtgaagactcttaaagtttcatttgattgctttgtctgctttctgtcgggtatttatggagtcttttaatgcttccaaatcccctcttaaaggcaaatgtttttcttgccttgaaacttcggtcaaactgtctcccagtgtttcttcacttaaggctctatctacttgctgcctttatgggaaagtcattgctcccatggttgtggaagagtcttctgttttggaatttgtggacaaagcttggaataaaaaggttgctgttgtggcgatggtggatggatcgagagcatccaacgtgtttaggtttggctttggatcggccgaagataggaactgggctttggtcaatggcccctggtgtatacggggttattctcttgtgctccaagactggactccggcaactgatgggccagtggttttcaagcatttgcgtgtatggatccaacttcataacctcccccatgaatatttttctgtcgagaacggcaaactgttgggaggtttagttggaaaggtggtgaatgtcgacttggaggaggacaaacctgctttgtggggaaaga

SEQ ID NO: 55236 - DNA, 2363 bp, Cannabis sativa
aaaaagaaaagaaaaatcctccttaaaacaccatatagaaaaaaattagtgtgcttgtatgatgatcatattggttttcacacataataattttattctaaaatctcaattagtagctagaaaatcgaaattgtcctaccaagaaaatagaacaaaatctatagttgattgttacaaaatttatacaagactacatacctacaaacatggggcaattcttctaagtttggaggattgggagccattcgataagtaaaagtatctctccaatcagcagatggagaggtatacaaattgccattggtgttatacaacacagctttactggaatctcttgtgtaaaacgctttcttcaccttagtttcttgctcgaaaaaccgacgaacaccttctttcatttcttccataacacttttcgaaatgctatggttgataatttgaaagaaccctccattttctgaggcttctctcactcgatcaacaatatcttttcctttaagatctataattggaatattaaattggagatctcttaaaataggaatatgatcatcagatatggatttgtgaaagaaatgaggaatttgagtaattccagcatcaacaaggcctttcactccagctttagtctcgtcaaatgctttaatctctttccctcgatcataatattcttcagccattctatttttctttcttgtaatgaattaagtcttttgttatagattgaatttgatccaattttggtaaacgtgacaagattgtaattaaaaattgtactacaatattcattgtaacttgtgtaaagtttgtcagattatattcaattggtgccaaaaatattattggtgattagtaattttgtaagagcattcttattaggcactagtggtgtataatactttctcgacatgtcgctttacgattagctaacgatattctctaaaagctattatattaaattatatatacttacttgtaccaatagcgatattgacacataaaatattaaatattactattgttacaattaaatattgaattctatataatttaatatataagtttttagaaaatatcacatgacagtatgatctctagaagatatttgacaccaatattaattaatgctattttttttattaattgtgtttaatggtaggaccaacactctttaataagtcctactaacaggtgtactaccattagtttctatatatataatatgatataataattttatttgctttgtggacccaaattttgaatggatctattattgaattgcgagtcacatttattgctaatgacataattttcatttcaactctttaatttttttaattaacttaaaacaacaattcacaacatgatgagttgtgagtgactatataatagtcattaataattataattatgatgttatattttgttatgatttattataacaagttataaaaaatttatttttaaactacttaaattaaattatttttaataaaaatattttagtaattaatattcataaatatctattttttttttgaataaaaggtaaatttttattaacaaatacaatcctctattacaataaacttaggagtgaaatctaactcccggataactcgacttggcgagaaacaagaccttctagcaataatatggacaactttatttacaaatcactgaacaaaagaaacaacaatattttgacaactgagcaataaagctctacgatcttcaaccaaaatgccaaatttagaaagcatagaaacatcactataaagtgcttggacacacacaagactatatgtttccataacaatatttgaccacttatttctataaacccaactaaaggcttccttgactccaaagatttcaacaattacgggatcaacttgaccagccttgccacaagaaaacacctccaaaaccttcccattgctgccccaagccactaaacccacaccaaaacgacaatctgcagcaaagagagccccatcctcattgattttcacctagttttttccaacgctcatctccaattgttgcagtcgcaacaaacaaggcatcatgcctttttgattgagaaaatttccattgttcaagtgaaattctagcagataacctgttactgcattagaagttttatcattccaaattttctcatttcgggcactccgaattccccaagctaccacaatagcttcttcaaccacaccagtactcgaatgagacatcaaattcgcctaccagtctctaaaatttgaaacaacattacccagagaaaatgatgatctaaatcagcaagacctagcaaaagtgcatccaacaataacatgaaaaatagattcatcataagc

SEQ ID NO: 55237 - DNA, 805 bp, Cannabis sativa
agtatgggtcgtggtcggggcaacggctaaatgtgcaaaaatttgcctatatttttctggtatcacggcccgtgatactcaattggagattgtggatcggcttgggtttcgcaagttggggactgaggataaatttttgcgtaacaagattctttggacaaagaataaggtgaaggatttcatgttcttagttcccattcttttctgtcctctatgctgcctagcaacgcctctttcggagatcgtggtattttggctacaagagatctgattaggaaggagacctgtttcattattgttgatggaaactcgatggatttgtggaattccccatggattccttggttagattggaactctttcaaagctgcctttaatccaatgataatgccaacttcgttgaaagtgtcttctctgttaaaggcagatggggaatgggattctctgggcccctacaggtggttggttcctaagcggggagagctacaattattagaatggtggcccagaccatccctctttactcgatgtcttcttttcttctccctaaggttctatgtagagaacttgatcaagtgatttgtaaattctggtggataggagaaggagatgaagatcgttatttggcccttgtggagtgggatgctttgtgtctaccggtggaccagggggtctatatttcaagcaatttgaggacatcaatttggctctcctgaagaaactcaggtggaaactcgcgtcgggtactgagtcctctctttggtgtacaatttttgaggagaaatattggggcaggagttcccat

SEQ ID NO: 55238 - DNA, 1961 bp, Cannabis sativa
aagatatgtacaatcatcatcagatataagcttgactaacggtttagtaagcctttacatgttttagtagcttattataattagaaaaccaagatggaaaatgttagtgatatattgattaattatgtgcgtgtctaagatctcatgtatgcagtcttaagtttattatgttgaccactacctaattaagctaacttatgggttcataggctactatcatatggatactaggagaaatgtacgaagttagggtaatgtagtcagaactagtggcggtcaaggccaccaaggatcacctcctctccgaggccaaggtagaggtcgtggataggctcatagtctgggtaattttaatccaccactagctccacaagattgggagcaaaggtattctgagttgtaggctagaatacaacatgatgaggagattgttaggctgaggcagcaaggccttcaggttgctcctcttcctcgggttggtattgctccagtaccaatattgtcagcagaatatcctatagctggcaacaggttagtaccactgtatgagtgatttcggaattagggacctccgatctttctaggaggccctgatgttatgaaagctgagtaatggctaacaactatgaattagatactcaattttatgggagtcatcggtagcgacagagtggcctgtgccacatttcagttccagggatatgccttgatatggtgggagttagtatcgctcacacatgatgttgctgttatgaactgggacgaattccaggatctttttacctccaagtattatcatgaggctgttcttagtgcaaaacggaaggagtttacacaattggttcaagaagaatcaatgtcagtgacaaagtatacgaccaagtttgaatgactagccagatcagcctcaggtatagtacctatagattacactaagaaggaaaagtacctgggtgggcttaatgccaagatccgtcatgatttgacaattatagccgatgatgctaccccatatgcacttatggtacagaaggctcttcgagggactcagggttcttgtggagtcactgctttgactccttctagtttgggtaggagtagtagtgattcaatttttgattcaaaaaggaagactcctttcacaccaaggaattctaggcagaataagaggttcgcaggaaccatggtcggagtggtggtcgtcggcgtggatttatgtacccagaatgtcctcgttgtaagaaacatcagagaatgtaacaagaattcctgcttccagtgtggtaagatgggacactttaagagggagtgccctcagttgacatggggagagccaaagaacgagttcatatccactcctgctcgggtatttgccattacacatgctaatgctgaggctagtcccatatcagagttgttataggtgtcagcttttcataaataactcctattttattgtattgtttgactatggggctacacactcttacgtggcatcaagagtaattgataaacttggtaggccctgttatagttatgaattattttttggaacccttttaccgagcggggagttagttatctccaagaggtagattagggctataccgatcacagtggatgatagggagttaagtgttgatcttatcgagttatctttagtaactttgatatcattttgggtatggacttcttatccaagtatgcagctagtattgactacaagagaaagatggtaacttttcaaccggtaggtgagaaaccatttgtatttatgggaagagttaaaggttctcgaattccaatcatatcagtattgagagctaaagacttattacaagatgggtgtataggttatctggaagtagtgattgataccagtaaatcaactaacttattaattcctcattgcatccaccatacaacttggaattgcactctcagttatataaaacgctcta

SEQ ID NO: 55239 - DNA, 721 bp, Cannabis sativa
ttagtcacaacaagtattgtaattaaaaatacatttagtaacaacaaattataatttttgtaactaatattttaagccatgatccttttagtcagaatatagaaattataatttataattagtcacaattttttcacttttagttataataagttttgttgtgactaaaagtaaaattttttgtagtgttcatatcctagttacttcttgatttgtaccaattagtatcaaaatcgagctcaagactagttattggtgagtttgtacattgggtttagttagggtgttataatgtataattcaattgtaaagaatttattaaaaataaaaataaaaagtaagaatgagaaatcaatcaaaaagaaatatgaaaaataataggaatatatacatttaaattatacatattttattacccacaatactgtataactaatctcaaccatataaacaaataaaagtgatctcacttaaaaatataaatagtttatatttattatatattaatgtgtgtaataagtatttgtaatttaagtgtgtatttattatctcaaaaaatatttggcttcattttagacaagattgcaaattgcaaaaaagacgttatctcttttatatatatatatatatatacatgctagttataaatatatatataaaatgttataatgtgtgtgtgatttaaggccatatgtatatgatgactctgaagacttggtag

SEQ ID NO: 55240 - DNA, 846 bp, Cannabis sativa
gtccattttgtctcttatttttccttaaatgatagacataaaaagttgcaagcaaccccaatacaataacaaatgaacctgtagatatatatattgaccaattaaaaaaattagcaactatagtgatctcgacatatacttgttatttattaaactagtgctgcaagagataatgctagaatttttatatatatatgtattatgtacaaattaatactcacctgcagtcaccaatgaaacttttgacagaccacctattaaagtaataataaataaaaaaatgaatacatttttgcatcaataataatcacattttaatagcatagaactatatatcatggaaatagaaaggagaagttgaaagattgaggaatttcaaattttgtttggggatacaattgggattttatgccctcaagtattgatataattcatagtttatttctgttacaagtaatttcaagtgaagatttgggaggtgaagaatggttcggatggaattgttatgagagatcaaagccagggtattgcttctttccacatctagcttctatgcactcatcatcatcatcaggcctggttgctttatcagcaagaactagggttatcataaataaggaataatagatatatgaagtgatcatgatcatcacctttacttaacacattcatttctatgatatgtatagatagcactatatagctttagaaaattatgtatacatagaaattacttttcttcacgtaccatttgtaattattattatatatctaccaaattattttaatctaatgaaactatattttaatctttctcacgactcagctaaattatatttatatata

SEQ ID NO: 55241 - DNA, 1123 bp, Cannabis sativa
gatcaacaaatcaatagtagatttgttagtcgagtatggaatcttggattggatatgaaggatgtttctgataggaaaaggatggtgaatgatttgatggtaaagaggagggaagagtttgttaaatcaacggctgagatggctagattagccaaaatgagtgtaaatgaaggcgggtcatcttattctaatttgaaaaggttgatagaggatataagagttgtgggagcaagtgaaaacactacatgatgaaatgtatttatgggcaattcctttggcaattatgtcataagtgatatgtatccttttaatttattcatgatttaggcatatgagtgataaaataacacacacacacacaaaaaaatgtaatattatggtaaaatatttgtgaaaataaatgtgttatgaaactatacaacgttttaaaacgaccacacctctgaggtactttaaatctctttctcattggtgaagcatgttggaattggttgaatagacttaaggttgaaacatgaagattagtagaaactaatcaatgggatatgtttaaactaatagttcaagttgaaaggtaaacacattaagagaatgtgtacataatgaaatttgttctcgggtccaaaaactttgttttgagtaaactaagttgcatgcccaagaattaagttttgggtctaatgaaaatttcaaaatgcaagttttagaaaaactgcaaagcatgttgcttagcactgggcgacatgtcacccggaacatttctggattcatgtaaatgtaacatgtcaaagttccaggaaacatgtcgcctaggtttgggtgacatgtagcatgacggaaaatcatattttgcatttttatatcccgagcatgtgacatgcatgccgcctagtgagtcaacatgtcgcccaatgagaaatttcaatgtttctttaaacacaagaaatgatctaaatgaaatacgggctgacacaaataaagcgtacagtacaaattcgagggcggtacaaaaataccgagcctataagccgtgtcggatctatcctttaaaaataatagcaagacatggtgcaactcatatttttatgtagcacagcacgacacaggtcgttttttgaaaagc

SEQ ID NO: 55242 - DNA, 1965 bp, Cannabis sativa
aatctgtcagtggacaatggttttgttaaaacatctgcagcttgatccaatgaagggacatatcgaaccgatacttgcttttccagaatctggtcccttataaaatgaaggtcaatttcaatatgcttagaacgagcatgaaatacagggtttgcagcaagtgcagaggcgctttgattgtcaacccaaatgacagggatttgaacaatcgagacttgaagttcctgcaacagagagcgaacccacttgagttcagcagcaacattagcaagtgctctgaactcactttcagtgctagaacgagcaactacatgttgtttcttagtcgaccagctgattaagttgtcaccaagaaacaccaaataacccccagtagaccttctatcgtcgacacagctagcccaatctgcgtctgaatatgcatgaagtgtcatggcagttgcaggccgcaaccataacccttctcggatagtgccttttaagtatcgtaatagctttttacatgcttcccagtggacagttgttggggcatgtaaaaactggcataacttgtttactatgtatgccacatctggtctggtaagtgataggtattgtaatgccccaagtgtactgcgatacaaggtaatatcctgaaacgactcaccttctttaagagacagtttgacgcttgaactagcaggattaggacaggcctttgcaccttccatgtgcagcttgacaagcaaatcagtaatgtacttcgtctgagatagatacatcccagtgcgatctctataaatttcgactccgaggaaataatggacatgaccaagatccttcaaagagaaatgagcattaagatccgagatgagtttcgaaatgatggatgaattagggcctgtgatcaatatgtcgtccacatatataaggagtataactagactgttgccgtgtccatatataaagagagaagagtcggcctttgaactgtgaaatccccaagagatgagagtatgtttcaatttgtcattccaagcccgtggggcttgtttcaagccgtagagtgccttttgtaacttgcaaacaaagtttggatgagtagaatcttcaaaccccggaggttgagacatatagaccgtctcattgagaggaccatttaaaaacgcattactcacatctagttgggacacatcccaattgttagtcacagccaatgataacacagtcctgactgtagtgggctttacaacaggactaaaggtctcctcgaagtctatccctgcttcctgtaagtatccctttgccaccaaccgtgacttgtacctatttaaagaaccatccttgttaagtttgactcgatgaatccacttgcaaccaatgatattcatagaagaatctgggggaacaagcacccaagtgttggccttttttagagcatgaatttcactatccatagcaccatgccagtggggattagctgaagcttctttaaggtttctaggttctctaggtaacaatgactcatgaagagggtgtttggtggcaatgtatgacttaggtttggttatgccatttaaggatcgtgtgcgcatgctatgggttcgggttacagctacaggaggtgggatagttgagttcataggattgttgttggaaacattttgtggtgggagagaagtaggaactggttgtgagttattgttgggagtggagggcaagtgatcaggggaaaactgaggctgactattggggtgagtggattgtattggtggcacaaggacacgtgggctatgtatatggggagaagctgacacatgttgggatgagtcattgttattagtggtggtgttaaggacaggtgcaggtacattatgtgtttgaatagtcatacgtgaagacatatcaaatgctgcagtggggaaattagttgcagagggggattgtacctgagatgcagaattgtgtgttgtggctgggaagagt

SEQ ID NO: 55243 - DNA, 1195 bp, Cannabis sativa
catgaatttacaattcagatattcacaatcagcgcaggatattttctcgatctaggatagctcattgtctaaccaaaaaatatgttaacaatgagctgctaaattctcaacgcgaaccacatgggacaaaactgctcctcgaatttagacaataaagctataacgtctttgttgtcggaggaatttggacaacaccaaaaagtaaataaataataaatgattaaaagaaaaataacaaataccctgcttagaatagcgagtattcaaaagagactgcccaaacgatagaacaaatagaaaagtaaaatgaacacaagagaatatattcgttcagtcagatcacggtctacttagtccattattgcaaaataatttctgcttagtttattcatcttggatcgcccctttatatacaaagtaaatgtcattttagttacacataattgaccgattataagatcgttttacaattaataacaatattaaattagaataaacgtaaaagaataaatggagaacaatttaatctattctaataagtgttatgtgacctgtagggtgcaagttgcatgttcatattcctacacaacctcgcaatttttgggtgcgttctaaaaggctaacgagcctcgtactaggatgtttgcattctattaagaattgtatatatggacatctcatatgtgtcgacaacatgagacacacgagtccctatcgagttattgaacacgctttgtcatttggactagtcattacataaataaatgatctttacttagtcccaaaagaaggctgcatagtcatcgcatatgtgtcagtatatgcgggacttatataaatctctctcggtcctacttatcttattctatgtgaggcatagtatgcgactagaccctatcaaggccgcatcatctcgtgagtttggttcaagcgagatcaaatcttggtgagtcattaattaacagctcatccatccttgaggattggatccacgtgtcaattttataggggattgatctcaagtttctaggcaagaaattcgcactataacacatgcccctagtttcgcgactgaaaaccgtgtcattagggaaactattcgagagaggcaggcgagttgttgtcatgagatggtgacttttggttgtcttgtcgaggttctcagaaagaagattgtaattattactttattcct

SEQ ID NO: 55244 - DNA, 944 bp, Cannabis sativa
tgcattaaatctatatgaatctcttcataattatatttagattcatttagcatcgatttggtcgtcagaattgagagtttcgatcggttttgggttaggtcagtaagacccgagttgcaaaaaataaaaaaacaggtcgaaatcctagtttgacggttgaagatgggaaggacaacatgtcattttcccagtaaatttttcaaaaaaaaaaaaggaaaattccaaaaattttaaataaatttatatgttatttgaactattaattaatttctttatttatattagtttagtcaataaattgtatttaattaatttttcaatttttattaaaaatatatattcagaatttatatgttatttggaataaattaaaattaaaaaaatataatttgataattaattacataattttatttagacatgtaattttaataattgtgttgactttaacacttaaagctacacaattatcatatttatttaccaaattaaataatttaatgtctaaattatttatttttgaaaaatatttactactaattgcaaattatataataattatactatttcgtattaaattttataatttattattagtgtaattaattaatatttatatgatttaaatattgtatatatattctataaatagtgctagatatattaagaatatattcaaaaattaagataggttgaatattttatttagcacattaattttcataaaacattcataaaatgaatataatatgaataaaatataaacaaatttttttgtggtatgacataagaaagtatgaaactgcaacaaatgctcatatatagaacggtttttaatgatcttcggatgaccacactagaagcacaaatctcagtaattatctattgtgttaataacgaaattgcttttaggtgttacccaatacttaatgtctaagtgaaaa

SEQ ID NO: 55245 - DNA, 549 bp, Cannabis sativa
gcggtcagatctggcttgaatccagtcaaatctggactgggacaagtcaaatttgggctgggtttccttgcccttcttctcggctccaatggcagactgacccacaaaatcgagatctcaattattctccatagagatcttaattgtcctccctcgatttgttttttagatcacaacttggtggatgaattttctaaatttgtttttgatttttttttttatacttttagattttaatctgagaaatataatagtgttggtggtgatggttgcattatagtttcagtaagatggtgtaatggtggtggtttcgatatgctgtaatagtgatggtggttgtggaagagaggagttgggtggtggtggtttctgtatggtgtatttatggtggtggttatgggagagaggagttaggattgagttttgtgtggtggtggtggtggtgggctcggggagagtgggagttacagttaggggtgagcataaaatttaaaaaattgaaaaaccgttcaaatcgacctaccgaacatcgttggaaccgaaaccgac

SEQ ID NO: 55246 - DNA, 2896 bp, Cannabis sativa
ttccaacttcaaacacaactcactcggttgcaacaaggtgacaattccgtcactacatactttaccaaactaaaatccctatgggatgagctgaaagaatttccaccgaatacaacctgtacctgtggtgccttgaaggtttttcttgatttttataattaaaatcaagtccttcaatttcttactgggcttaacgaatcatactcctctgttcgtgcccaaattttactcaatgaacctataccgaacctctcgcgaatctttgccatgattattcaagaagaacgccaacgcacacttggttcatctgaaaaccctcctcttgcttcatcggttcgaccaccatctaccgatccctcaagaaataaaaaaccgagaccctcttgttctcatggtggtaagcccggtcacttagttgacaagtgcttctttatccatggatttccacctggttatggggacaagaaaagaactgataagggtaaagctcaagtgaatcaagcttccaccagcaacccaaaacaaactgagaatactgctactgcacctactgttccagatctcacttcccagtgccagcacctaatttctctactaagccaacaacttagtcaatccacccgtgctgaacctgctgcagcttcaaaccaggctggtaatctctcttctaattcttttcaatgggttcttcatagtggtgctacacaccacatgtgttctaatttttcttgttttacttccttcaaagactcaacttttcctaaatatgttatattacctaatggtcacaaaatttttgtctccaaaattggtactgtgtgcattaatcataatctcactcttcacaatgtactctacataccagattttcgaatcaatctcctctccatcactgctttggttgatcaattcccttactatatttttttaacaccaaagattgtgttatacaggatctttctcggagtgtggtgattgggacagctaaacgtcaaggaaagttgtatctcctacaccaagaatctcctataacagttgctggtttttctggtttagctttcaataaatcaaatgtagatcaatggcatactcaccttggtcacccatctttgtatgtttcaaacattttcaataaaaagattggctcttttattgttcacaatcctcatactcactgtcatgtatgcaatgttgcaaagcaaaaacgattgccttttgtttttcataacaactttccatctcatatttttgacttaatccatatggatatatggggacctttcccaataataagtactgaagggtatcgatacttcttgactattgttgatgataaatcccgatatacatggacatatatgttaaaaaccaaatctgaagttcaaaaagtcattcctaattattttcagatggttaatacacaattttctcatgccatcaaggctgtaaggtcagataatgctaaggagttgaatctctcttccttttatgcatccaaaggagtgacacactatcactcctgtgctaagagaccacaacaaaactcggttgtggagagaaaacactagcacattctcaatgttgctcgtgctttaggatttcaatcccacctcccagtggtttattggcctcacctcattgctacagcaacttacctaataaatcgaacaccctctattctacttaagaccaatacatcttttgaacttctctataacaaacccctacttatgatcatctctgatcctttgggtgtttagcatatggttccactttaccttctaaaaggcacaagttttctccaagaagtcgtgcctctgtctttattgcctatccacaaggaatgaaagcctatctcctacttgacattgaatctcaacaaatatacacttctagggacgttatattccatgagaatatttttccctatctctctaccacttccttagatgagatcaacaattgtctttctccattggttctcccataccaacagcctgttgcaccagcaacagtaccagcaacttccaagatatcatcatctcatatcaagaaatatgttgcacccaccccagaaataatttcaatcggttgtttctgcacctgtctcaaaaaaaccagcagttaactcagtgcctggccagcagcctcttgcaccagtttatgaaccagacaatgcaccgacctgtgcacctgattgtgcatcagatcgtgcaccagcttgtgcacctgatcgtgcatcagatagtgtacccaattatacaccagattgtgcaccagatattgcaccagactgtgcacctgacacaaacaaaaccagctcctcagctgatatttgcacaacaaaaacaggtcgacaagttgtcaaacctgctcacttgaaaaattatgtatgtcatgtggcttctactaatcatcctattgagcctttcttatcctacatcaaacttcatccctcttttagagctgatgtccttgcagcttatacacagaccgagcctcaaaactatgctgaggcttcccaattcaaacattggcttgaagcaatggataatgaaacccaagctttagaaaaaaataaaacttggatcattaccaagttgcctcctggactggttgcaaatgggtgtacaaggttaaatataaccaagaaggtgaagttgtaagattcaaggctcgccttgttgctaaaggctatagccaaaaaccaggtattgatttttcgcaaacctatgcacctattgcaaaattcaataccctcaaagtttttttggcacttgctcccattaataattgggttattcatcaagtagatgtcaataacgcctttcttcatggggatctccatgaggaggtctatatgaaaattcctcctggttataatgctcctcccaat

SEQ ID NO: 55247 - DNA, 2546 bp, Cannabis sativa
aatattgctacacccccactcctacctctcggctccaccataaacattccatcaaactctagctatctacaaatgcattccatcttatctttcttgcatgaagtttcacaaagaaaaataaatacatgcctcttatgacgaatgatgtcttcaaggaaatgaacaatccatcacttgccattcatggtaaaaaatattaaaatatagtgggttgaattcaagttattaaagtctgaacttccatctcggagcttccaaactcaacctgggcgtagggctagggtcccctcccaggttgactactataacttgggtctactaaactccgtgacattattcttcttgccaaatgtcaacgttgatttccatgtcactagaaaaagttcttgggctagcatttgccccctaagtagactttacacttgtgtggagttgacttgatgacgtgaactaagcccgtttcccttgaaactactagatttgcatcaattttgacattcttaggtaattgtttctacttttcaagcattcccaattgaattaggactttgaattctcttgcttagtccttgggaactctcttgaaacttatattattttttacttatctcttacctttttctttggcaattttaaattttcttatttttttcgtggattttggatttgaatcctaatcctattataaatttcattcgaaattagagagagaaataagaagaggaaagacttttgatcttttgcttatattttatctttttcttttaaatctttaatttttccttaatcttaatagcattaggaattgaagttacattttaaatttaaaaaattctactcctattgtttagaaattttgaatttaactttaaaatagaagggaaatgatataattgtatcttttacttgtcatttacctctttctttaaagctttaaatttaaaagactaccattagctttaggattaggagattgagctcatctataaataagagagttgtcaatcaaatttttcacacttctcattcctattccacacgcccaagccttttgttgaccacttttagccaacgacagtgagtcaaattaaagcaattgagaataataaaataagggaatataaataataaggtttctctcttgagtattctctctttgaatatttttgtatccctgaatagtgatatgaacccactctttatagggattaattatatgaaattggtttccctaaatcaatgagaaataaaatgggaaacttgtttatttctataattacaataaaaaaaagtaggaaacttaaacaagtttcctttcttctttgaagatacgaatcaatcccatgaatgtagggattatgctgtgacttgcaagcttggagatatgtgagatatatttttaaaattgctaactcacatcccccagtcagtacatgcaagctacctgcttaatggagctagtcagatgtttatacatgacctgtccagacatcccatcttctatttatgacttcaagtatcgtaacagtctgtacaactcatttggagtaggattgctcgtccacgtgataaaatatgctccatgtgtcacccaaattgatgccacatcattgtgccaaaatttggataatattcgccccaagtctgtgcgggatcttcatggtcgcatatggacttacctggccatgaagctgatcgaatgggtgacacatgtcttgttatcacctttgatcgaacatctctttaatctctgggacacttaacgcttgtcttgaaagttgtacgtcgaattgcgcactcacggttatatggtatagcatgcatgacgtttatactactgtaatgagtgctaacattccttttcaggagaaaacccatccctctcaaatacctataaaagaggtttaaagctttttagggactcttttagccattttagctttcaaaaaagcagaacaaagaattttttcttttgtcattctttaatttttgaagaaaccttgctggaaactccattgctaaaaccctctgagcatgttcaaaaaccttcaaatagtgagtaaattttcttttcctcatgtttatgcaatttctattgaatacatacattattttatgaatttcttgctgtaatgtttctatattcttgaactattcttgactaatcatagagtagaagacattagggcttttaactttgactaacatatgcttaggccttttgattccctaatttcgcaccacttttggcttgaaattgttcatacacccattgatggggtttctaaaactttctagatattcttcgtgattttgaacttctgggtttggggattccattttgaaatttaattccttctttttatcttgatcggcctggtcgacatatcaaacatgtttttctcctttccctccatccaactctcaccctttgtctcccatgttttgtagatgaaccctgtgctggaatattttaccaggatctagatttactaacaagtatgctgaattaacatcctaaacatgaattctctaaaacaatgaaa

SEQ ID NO: 55248 - DNA, 916 bp, Cannabis sativa
aatgagtagccatgctcttgtagtagctgatataagtactcttacccctgtagtagctactctaagtcctccccaaacatggtttctaaattataaggatgtgctttggccaaatggaagaagagctattttggggagttagatggggtgattcgtaacttggaggaacgaatctcttatccaacaacagcaactatctcatggattaattgaagaactggtacttattgttggtaaacttgcaaacgtgtgaaaaagcaaagaagacatgtggagacaaaaatctcatgatatttggttaaagctcgacaatagaaacacgaggttctttcatttatcaactgttgttaggagaaggagaaatcatatttggggcctgagagataagcatggtactttgtcggataccaaagagaaggttttaggtaagatcaacaactactttttgaagctttattcttcaaattgtacggtgttttctgaggatttcgaccagttttttcagaagcgaatcagtaatgaagcgaaccaagttattgctgctattccgtcctgtgaagaagttaaagagacggtgttctggcttcatccgcttaaggcacctgggcctgacgggtttttgggatgtttcttcaggaagtattgggatatagtaggcccaacggttaccaaagctattcaggaatttttccaaaccgatgtttagaatcctattctgaaccatacctttatttgtctcattctcaaggtggagcatccaaagttgattaaacaattcagacccattagtttgtgtaattttcaatacaaagtgatagcaaagattttatctaatagatttcagccttttatggaggatttggtgtctcctgttcagtcagctttcatcccgggtcggtggattgctgaatcttca

SEQ ID NO: 55249 - DNA, 1120 bp, Cannabis sativa
taaacgagttactgctgctctctaccttcttctttggacttaaaggttgactagctgttgatactagtattgttttcttcggaatcacccattcctggtgatccttgtttgctacctttgcctttgattccttcttctgtggctgtttgtttgtcttttgctggtgttgctgtttttcttccttctgttagctatctcatcatgtctacagttagctttagtgtgaccaaacttagaacattgggcacactttactggtagccattcattttccacattcttgtcttggagctgcccaaattcattaaagtaaggaatgaatcggggtggagcatccgtgatctccatctcaactaacactctagcatattgcagtcgtgttctgtcttttgtatgttgatccaccatgattggcttcccgattgtgctaacaagcgcatttaagcttttggtaccccagtattgaagccctaaatcatgaagcctgatccacaatggaacagtgcgcaccaggttcatagcatttaagttcgcagaccagggtcgaacaatcataggttttcgatcgaattgcacaactcctgcctccacaacctgatcacgagttgcttcatcattgaatctcaccattattagtcccatggatagtttgcttacctgagttacacccaaatggccccagatccttttcacgaacctttcaaaaatagtcacaggtgggttagctcccaggactttgcaaatgactgttgaattccagtatttttcctcttcttacacttcttccatatcgacttgagcgattttgatgccatccctaattaatggttctgtgaataagagacgttgatctcgattcactgttttctccttcgtgaacgtctcccatatttgttttgcagatcttggaatttgctggttgttcgagcctaacttcaattcatcttcaacctcctccgcgcagctctgagatcgattactaccagacctgatgaactgtgtctcaagaatctcctgatattgagccatctctgcaattaagctcagcccctcggttgagtgagattcatcaacaatgacctcttcgatttcttccgtaccttctctttctgcatcaatc

SEQ ID NO: 55250 - DNA, 1060 bp, Cannabis sativa
attggcttcatttgtttcctaaagttgttctttgctcttctccaacgagcaattcggaccataggccgttatgtcttgattctgggaggactccccctaagtttaagagatgtttcaagtttgaagaggggtggacgagagatgagaggagtaaactagttgtggcaaatgcttggaaaacggttgagcatccttgggcccctgctagtgcctttaagaaaattggagctactcatgtggctcttcttcagtggaatagaacacaatatggtaaattggactggatcattaaagatgtggaacagaaacttgacagactccagaagttacctgctggagtccaggactggaaggaggaatgtgatattcgtcagtcgttgaatgaatcattgactagaaagacgatttattggaagcaaagggcgagaattgattggctcaagaatggcgataaatgctctaaattcttcttcctcttagctgctattagaggaagaagaaatgccattgagagcattctgagtagtaacaatgtctggatcaatgaccgggagtcaattggtcgagagttcattgagtttttcaacggaatcttctcggggtctgatcctggttaggctatggactgtagtcatctatttttggatagaatttctcaggaggttcaggacgggaccaccctgtgtccttctcgagatgaaatcaaaagtacgttattttccatgaataaccacaaggctcctgggccggatggtatgtcagtcctctttttcaaaaattactgggactatgttggtgatgacttctgcaatgcggtatccgacttctttgtatctggcataatgcatagaggtattaactcgacaaatgtggttctcatcccaaaaatttagaatccgaaaagacctaaccatttcaggcctatatctctgtgtaatgtgttgtacaaggttatatccaaaatagttgcaaatagaattaaacctatccttccttcgataatatgccctacacaagcggcctttgtcctgggttagaatatacaggataacaatgtgat

SEQ ID NO: 55251 - DNA, 755 bp, Cannabis sativa
tttccttttctttccattccatttcataacctccaaccaaacaccacctaaaattttaaagaattgctaaaagtattttttttttgtgtgtgtcatactgatactgttattgactattgatataattaagtatcggatcccgtgtaatttaagaaaataacttttagaaaagatcgctaactaattgtggggcgccacctaaagaaggtgctaagcaccactaatgtccaataacaatactcaaattttgatgctctacttataaaagtaaaagatacaaactcagattgctcgcacttatcacacacaatgatgtgtaaaaagtgtctgtaatttaaatgtgttctattttaaaaaattaaagtgaccccactataaaattaactcttttatttgtatttaatgttagcatgcaaaggcaatgaaaatagtggttaattaataaacaaattactcatcataatgaatatgcatataatacattattatgttttatataggccaccaaccgtgtggcatagggtttccatcattgctaagcttgattatgttgcgcacttaataatattccattgccctacattaaatttaattgacattaaatttcccaattctacatcataatcataatcaataatacaataataaatacatttaatacaaagtgatcaaatattaattaagaagagtgctttaagttgagctttacgaggttgatacttgccaccatggattggattggagttgctcttaat

SEQ ID NO: 55252 - DNA, 905 bp, Cannabis sativa
atagggatttctatgtagaattccgtaaaaatgaaaaataaaaactgttttgaagtgtaaaaatgaaaaaaccctataatttatttagttatatgtgtaatttatatttttgtaaagctatttaattatatgtccatattataatatcatatatatatatatgtacgtactatattataaattaattattttataatttaatttataaattcaatattattaatgttgaaagtagaaattcacacaaaaattattctaatatttaatagtgtgaatgtttcttttctcaaaaaaaaaaaaaagtttatagatccgctataggggtataacagtaattacatcgactttgaatgtagtggtaggcggtagctacaaatatgtgataacaataattataaaatcataagatgagttttatatagatttatcaattatctttttgtcaaatctctattttcttttaattctttaatttttattattttctccattataacatttgtataaaagtggatatttaatttattatttgattaatttattttatgtatagtaaacttattgtgaatgatagaggccactataagtaagatacaataatgatatcgactttgaatataataatgactagaaatgaaatacggtgatgacaatggtttcgaaattattaggataattttttttatatagatttattaattatctttttttcatagatctttatttttgtgagaaattttcaatttttattattaaaaaaattatattttaaacaaaatctaacaacatgcgaaatgatatctgtttcctaatttttatataattcttagatagtttccaaataaataaataaatattcaagaatataaaactctatcatggtcatagttttggagaaaaaatca

SEQ ID NO: 55253 - DNA, 659 bp, Cannabis sativa
ttggaagatggatttaattaactaagatgattattgattagttaatacttatccaaaacgaagaaagtagtcaaggaaattattccaacttcaactactctggaattttcctaggggtttctcccttctcgtctggttcaatctccagtttacatttcttgttttaacttctagtctgattccctcctcttttctctttcgttccctcctttcttttcccctgcattaattgcttatgctctctcatcatttccttaccatcctatctaccatttattattgttcagagcgacaaagaggatcttttggatttgcatttaattttggctgctaatcctcttttatcgagtttcttttctctgcaggctctattctttggctgttattaaccctgaaatcccattatccatttaattaccgtcgttctttcttctttgggctctgtcagcagttttaattccccttccaggtgttgggctacgtttaggctccctcttccaggcctccctagccttcagatgaagcctttcttctccaggtattttgctttttttgtctatttaaggtttcttcttcaggttatttctgcacaacccttttattccctgcattcctttctcttttatattgctgtctttacctaccaaccactagcaatg

SEQ ID NO: 55254 - DNA, 1175 bp, Cannabis sativa
aagagaagaattggaaagagtcattctattattgttatttgattacagacaatgagtgacttatatacttgtcacttgagagaagcaacaggcttaacagaatataactgaaaaaccagttggaacagttcagtaataacagaaataacaaacatcagtaacagactaacaatgactccttaacacctccccgcaaactcataattggaaggagtggaaattgtgagtttggtgcgaaatcgaggaaaattctggcttgagatggattttgtaagaccatcagctaattgatctatggcaggtacatgtttaacttgaacttggtgacgaaggactttttctctcacaaagtatagatctaattcaatgtgctttgttctggcgtgcagcacggggttggcagcaaggaggacagtactgaggttgtcacaccagacaacaggaggctttggttgagagagatgaagctcagaaaacagtgactgcaaccatgtgagttcagagacaacattagccaagctgcgatattctgcttctgtgctcgatctggagatggtttgttgcttcttgcactgccatgtaattagatttccaccaagaaaaataagaaagccagatgtggagcgcctgtcatcgggatcggaagcccagtcagcgtcacaaaaggcaatgagatctgttgattgggttctatgaagatgcagaccatggtcaactgtgccactcaaatatcgaagaattcgttttacagcttgccaatgtgattgaagaggattcttcataaattgacagactttgttgatgctaaaagctagctcaggtcgagtgatgagaaggtattgcaatgccccaacgatagacctgtagagttgtggatcatcaaacggttcatggccataagctgagagttttaagccagtcaccataggtgtagggagaggttttgcctctgtcattttggctcttgtcaggaggtctttaatgtactttgcttgagataagtggagccctgctggtgtactttgaacctcaatgccaagaaagtagcttagatttccaagatcctttagagaaaacttggaattgagtaattggatgatgttggcaatgacttgagagttgctgcctgtgatgacaatgtcatcaacataaaccaatattatggttgttgagga

SEQ ID NO: 55255 - DNA, 791 bp, Cannabis sativa
aaaaaaaaaaaagaatatttgaaatttaaaggctataccattgtcaagtaagggtacataaaaatacaaactggcaaccggtttgtatttttgtgccactatctaaattttttcaaggaaaaaaaaggagtaaagtaactctggttatcatcttcttctcttctatcttattatcttctatctgcatataattccttttgtttttttttttttggtgtaatctccaattttagacagactattagttaccaaaactccagccctccacactcatcacctccatcttcttccctttgttctcatggttgaggaaacttgcttccaaccctcaccatcggcaatattagctccagcaccatttcatagaaaaattcatggcaccaacgcatactcattagttttcctatatttgttagtatagagatcattattaattctctctatataattatagattgcttagttatatttcactgactatactcttacttttatgcactacatattttactgttgttaaaatattatcttaatttttgtatttgtttgcttgattcatttttatctctatattgattcatttttctttatagtgatccagtttaagctcctcctcttattcaatatctgccttggttcacatatttaatattattgctaatccatatatataattaatacttaagcaacatataatagaacaaaatccaaagacaaaatgaaagctcatccaaaactaatttttttgtagctcacaaaatttttcttagcttactcatatccttctttac

SEQ ID NO: 55256 - DNA, 1005 bp, Cannabis sativa
  modified_base (588)..(588): a, c, t, g, unknown or other
ggctcttcctggggaagttgaagaaagtgaagaagagcaagaggttgctctcgtgcgcaagcgcaaaggcaagatggttgcagaggagtcctccaatcagccgcggagggtggacactccggccccgagtcatgattctgggatccctcccgaggcggaggagtttacggtgcctcacgacattgtgctgactccggtccccggggatgaggcgaggcaagagcttcagattgccaagtataattatgcccttgacgagtacacccgggggcacgctgaggcggacgccttgaggaggattttgtgagaggaagtgcaaaactctcttaacgatgagaacttccggaatccatgggatctgaacctggaccccctaacggactggttcaaccgtttcctcgggcccaccttggccccttttgacgccaagatgatcggtgagtatgtcacccagctgactcggtgcatgcctaaacggtacgctgcttgtgcatccttgaactccgtctaccaggctcaggacctcagccacgccttggccgcggtaagcactttgtgacttacttctttcctcattattttacttanggccttcactcactcttgcttccttttccagattgctacagaggccggccgcctttccaaaaccataattaatcatggcttcgtcttgtccgaattcgggggaatagacgaagtcgtcctgcaggacctgtctgctgagaggcgggcgttccaagaggaggctgagtggaaggaggctcttgctaaggcaaagttcgaggaagaggccaagcaaagggaagcccaggcggaggcgatgatccaagaggaggtccttcggggggataggctggaggcgaagcaccaggaagcgttgagggcatagggcgaggctactgccaagtcgaagcgcgagcttcgagaggccaaggaggccttagatgagatggccgccaaggtgaggtccttagaggaattacaccaggcggacttggagtc

SEQ ID NO: 55257 - DNA, 1656 bp, Cannabis sativa
gtgtcagattagagtcaataatactaataataataatcatgcttctgcttgcttgtgtttgaaattgaaaaggaaagtttacattgttataaagtttgtgtttctttgttagaccccatgattaatagggtgagagagagacaatatcaaataaaaggatatatgggtctttgtattaagggtagagtttgagagggaatacaacagtgtatatatatatttatataaaggatactaaagagaatgggaaggttatgcaatgaattgagaggttatctatgtctatggatcatttgtctgtaatttccttgctacaatatcagattacaatacaaagctttctctatttttgtgctactgcccttgtacattctctattgttcttgttagtctctatcattcttaaggtggggtttggttggttttatgtaaagtatttaaatgtcattcttattctagctatgttttcatttcttccaaccaaacgacacttaatgtgatgtttgtcacgtgagtttgagttagaggggattaacattactaccattttaacttgaaagtttgtcatttccattcccatcaaatctaaacctcatatcaaacgtggagtattacccatcgggctatatcattcttgttctgatattaggctagtgatgccattgatagcttaagatcatataacttaacaataagtatatatatacacattattctaattaatgatggtatgttgaaaatgcaggcttatccagacacacagagagagacttgtaaattaaattaatgtagaagaacttttttaaaaagaaaaaaaaacaaagagagaatgagaatgagtagatgctgttattttccatgaaagggaaggaaggtctgttgttgttgtgtacagatggaaactggtggtgggttcagattaagaagcatgaataatgatatgaaatgtgtattttcttaattaaaaaaacatagtaagataagatataatgtttgatgctttttgttatatattattattttgaactcttccttccctattttaaggttgcttctttttatatatatataattaattttgtagttgaatgtattatttcatttattcaactttttacattaaaataaaataggtgatgctccttctataaggagttataatatgatttttattttattatcattactattatttatttatctaactgataacccatccttttcatttgatcactttggtttactcgattagttaataaaattaatggttgaaattgaaactataaaaatcaaattgtaagaaatggttcttatattatactaaaatgaaaatgtataatcttaaataaatttgactaataatgctatgagatttttttatttttacattttaaaatattttttttttttaacatttttacaaaattttacatagaaactcctactgcaactaatgttgcaacctaaattgcaacaaaaaatcctatagaaatttctattgcaactggtgctacaaccactttaaaatctcaaaccttaaatttgaaaaaaaaattaaaaaaatgatatataagataattctcctaatgctattatcattatttatttattttattgttaagaatattgtaagcagttttttcaaaaaaaaaaaaa

SEQ ID NO: 55258 - DNA, 1084 bp, Cannabis sativa
tatagaacatatttttattttttgcaaaaattaaaaacacaaattttatttttatttttataattaaaaaattaaaaaacaaaaatattattactaaatgaccccttagctatttgtaatatcaattttttattataattatttaattaaaatacatgacacatgatattaaattataatgataatgatatagtattagtaatttttttaatattttttaaaggtgataatatgtacaacaaaaatatataccaaattagtatactaattgatataataatatttttttaagaaaataaagttgtgattattaattaaaaaatattatacactacaaaaagttatacttttagttacagtgacaaaaagtaaaaaaaaattgactaattataaatcattatttctatgttgtgactaaaagacctatagttaaatgtattggtcacaaaaatcacaatttgttatgactaaatgtaattttagttacaatatttattgtgattaaaagtaaattagtgataacttgtatttaatactatgtttaattataggtaatttttttattgtgattaaaagtcacatttaatcataaaaattttatattataattaaaaaattatgtattttgtagtgatacttgcaatattttgttaactgaaaaatatagtattttagcatatatatatatatatatttgagagaatattttagtatatattttgtatgtagatattattgcttattgtttatagttatttttcatctaaattttgtatctttatttattaaaccacttttcatctttaatttcacaaatatcactccctaaaccttgtagttttcactttttatttattaattaatatagtttatttttttttttttgaaaatgtattaagtaatatagtttaagtggataatttcatcactgtatattatattttaatttgtcaattgtagtataatgctcagtttcctttgttcaaaaaaagctaattaggatttttgcctcctgaacttttaagatcattgaaaatgctcatgaactattgagattgttggatttaagaacttttttctaatt

SEQ ID NO: 55259 - DNA, 1077 bp, Cannabis sativa
ttttttttttttttttataaaaagctcaattttaatctttcacacaaggcccccaaaatacttgggtcggccctggtggtatttagatacaagttgtcgctaatttagttttagtcacaataagtattgtcactaaaactatatttagtcacaacaaattgtatttttgtcactaatacttttagtcatggaccttttagtcacaatataggaatgatgatttataattaatcacaacttttttacttttagtcacaagttttgttgggactaaaagtaagattttctgtagtggtacattgtttactttcgatacgaaccatgcacctcagatgtcaacctggatgctgggtcccagttctagcccttcgaaaattctctttggtccccagaaatagttgaatcttaatattttttatttttagaaaagatgctcaaaagaaatcttggaaaacaccatcgaaaatgcagggccagacccaagtgtcaacttgggggcagggccagtcctaagtgtcaacctgggtgcggccctattttggcacccaagaagtactgtttcttctccaaaaatacatatttccctatttttgatgaagacgaagaatatgcaaaagtaagatctctaatctgatacttggaaagcgcctagattgatagattgtcaacctgggtgctgggtgctctgggccctgggtgctcaaaattgaagttcaattttaattctgatgcctcaaacatgtccgttgtatgtctagtttatgtcccaatgtaagttttgacccattttcactaagacggtcctaaagactgaaatcctagttgaggttatcaacctcggcactgagtgaaaccgtaggtgcccaggttggcttccgggttacaagttcgtgtaatttcagctctcagggcttggattaggttgctctatatcttcatggtacaaagtcaagctgagtgcagggctaaggacccctcccaggctaacttgctatgactcgggactactcaactctgagatgttatcttttaccacgtgtcaaaaattgatgtccacgtcatcaaggctactcttgg

SEQ ID NO: 55260 - DNA, 1187 bp, Cannabis sativa
tttcatgtaaaaatttcaataatttttagttaaattttttctcattggtcatgtatgttatatttatttaagacattctgtaaaattttaaaaaatttgaaaaagtttctcaaaattttgtataaaaaaaaattagactaaaaatttttctagatgccgaaataagtaaaggatgcatcaatacatcccttttaagagggtgtattgtaaaatcacccaaaattatatatataagaaaatagagaaacaaccttttttttaaaaaaaaaatagataaatcactgtaattaaatttttttaagtttgaaagtaaaataaatttttaatttttagtagtataagtatttaatatttataaaactatttttttttttaattttgccattatagattttattattatcttaaataggatacataggttcaaattctaaattatttggtctatataaaaatcgatagtatcaattatttttaaatattttttgataaatttaaaataaaatctgtattaataaaattggagaaaaataagagttttacaaaataccactaaaaataaagaatgaatttatgccgtttacaagcttaaaactttaaatatttatatcgttatttattctataataaataataaaataaattaaaaaaatagaatagtattggataagtaaaatagttaaaattcttcaaaaaagtaaagagttgaattaataataattaaaaatattttagtaatatatttatgtatgtataaacatatgcaaatgctttaagagaaggaagaatttgcaagtttttaaggagggctaactctaaaatttagtaaattataaaaaatatatatgtaattttaaataactacaatatatataatcataaagaaagaaatacttataaaataaaagttaagcttgtagcagattgtttaaatttatttttagtgtattaaatttgtttcaaatttcttaaaattttgctatatattttaaataggttaattatgatttttgttattgaattttaacgtgtaccaaatcatttttttgaatttttaggtctcgtttgcaacgtcgtattaggtcatattgtattgtattatattatattgaattagattatatatcatatttttatataatacaatgctaaactttattttatctaaaatattatatatttaggtg

SEQ ID NO: 55261 - DNA, 1120 bp, Cannabis sativa
catgcacaagaaggagacacaaggccaagcatgcttaaggccatgtcactcagcatgcacaaggataactcactcggcaagtatacaagtcacttggccaagacttgcatgcatgtcacttggcaatgctcttctcgatgacacagaaattcttagtgaagttttccgaagtgttgaagatgaatgtagtggaagtacgatcacgaggacgaggaatgcatacaaaggaccagacgtgcatgcaaagagagtacaaccacgcctcctgcaagttttgatgccaaggatgtacaagtagtggaggcaccacacctgcaagtgctgacatcccgaccaagagtgcacaacaaccattgcccctgcaacttgggatcacctaacaccagacaaaggtacaaggcgtgaggccaccacctgcaacctgcagctcttggatgtcaccttgtcccttgggaccacaattgtaacgctctaatgcataggcatgctacagtgactttctaattacagtgcacacctttgctaatcaaagggttttctcaaaaatcgtgataaattaaaattttgatttaactttaaacttttataaacatatacatatatttatacacaaaaccaggatccaatttttaactttacattcaaaataacttttatagacatgtcacaagcgactacaaaatgaagtccaagttatctcgagaccgaactctccaggtcgcaccgtctcaacatgtacaattattcccaagctctgaactccttttgttcagcattggccttccctttacctacacacaaaagcagtatatgtgagtcgacaaactcagtaagaaaagcatataacatacaatatattactaacttgtatttaggcgcacatacacctatccacaaggcttatcaaataagtaagaacgttcttaactaaggtacgactactgtaccatatgcactacgtaccactaatgtattagtgttggtaggatttacaccgtaccttgagtaccattgagtgttgtaacacatgcactacgtacttaactgtactagcggtggtaacaccgtattgtacttgttgaacatcatacactgtaccaatgcactcagcactgctacc

SEQ ID NO: 55262 - DNA, 1446 bp, Cannabis sativa
ttcttttaattatacaggtgccatatgatatggggccttcgtacaggctctgcccctgatatcaattcgatctcaaagttaatctctcgctttggtggtaaacccgataactcctcaggaaagacatatagaaactctcgtaccaccagaatatgtttaggtcctattggtacttctctcgtagtatccactacactggctaaataatcaatacatacatctcataacaaatcgtgtgccttgagcaccgagatcattagaattcaggatccttgaacacttcccacaaacacaaatgggtgctcaccctcaagttcgaaagttaccatctttctcttacaatcgatggtggcattatactttgctagccagtttattcccaatattacataaaaatattctagattcaattcaattaaatctactgacagttctttaccttctacatgtactggaagggacctaacccacctgctggatataaccattctccagtaggcagtaaagtaccaaaaccacttggtaaaacgtcactaggcttattcagttttccaatcactctacttgacacataggatgcgtagcaccagaatcaattaaagcagtcaacataataccatcaatagaaatctgacctgtcacggtagaaggaccaacatcagcctcttcctgggtcaaacaaatacttgagcaagaactagagtatcatctttctttgttctgatctttgcaactgtggataatttctcttcaaatggcctactatcccacactaaaagcacgctcgagcttgacattcactgtgatggcgtctcttgcaccttgggcacttcggataggttctctagtcctcatttccacctcggcagaaacccaaaaatttaaatattttcaaataataaaatataattgattatatcataatacaatcctacatttattcttaataaagttaattagggttactaagtttagggtattacaattgtattttgcaaaaattattaagtggaacctctgttttgttaaatgacaattcaaatattcgattttttgaaatagtacaaaatagacctggagcttaatttttgtcaaattaaaacttaataataatcgaacataaaagtgttatgacaataatagttataatttttttgtatttgttcgtgctagaaattaatttcaagttggttatgttaaaaaaattgacgaaaattgagattaaaatcaattttgtaacttgatgaaaaataaagagtttaacctttcatttaataaaataaaaaatttaatctataacttttataaaatacattattcaaatcgtatttatccttagtcacattagagatttttccaattttttttggtaggaagagatttgtacaagggaaatttgattttatatactttaaaaaattaaaaaattttattattaaaccaaaa

SEQ ID NO: 55263 - DNA, 1484 bp, Cannabis sativa
  modified_base (452)..(458): a, c, t, g, unknown or other
  modified_base (1437)..(1443): a, c, t, g, unknown or other
ggtaaaataaattccaacaatctgcacgcacaacatctgcttatctgagcagggtaaagggcagattatccgagtagagaataagtttggttttcgaagttgtgtaacaagacatgactacttcagaatggtatagtgaagcccaagtatgaaggcaatccctacaatcatgggattgaatcaaagggatatggcaggctgtctccatcctccatttcatgtattctaattatgtaataaatgttctttccaattatagatattgtaattgaaagggaaaccttccctcatgcatcaaggccctataaatagtgatctagcttcactgtaaagggtatcaaaagaatcgctttagagagagatcttagagaaatacttagagatttcattgtgagagctttgagagaggaagcactgtgttctttgctctcaagttaatacaatctaagggnnnnnnnctattaccgaactaaaggggtcgaacctcttcaaaacctaatgctctttattgcttattggtttttgctctgtttttattatatttctaatcgcttcataattgattcattatcattaaataaaagcgaggtcaacatatataaatatatataaagaatgtattgtgttctgaataaaaaaaaaattaaatgtatattatccatattaaaatttgaatttgggtttatcaaataatcataaaattacaatcccaatttacaaatagaagatcaaatccctaatttttagattcaaaccaaaacacccaaatattataaacatgaaccctgaaatctcaaagaatcaatcaaaggtggctcttgataccacttgttagagttttcatcactcataaaatatgcaataacaagattcaattctataaataaacgcattacatataattataagtatgaaaaatataaatctagagagtacctttattgatctgaagagaaaaactcaaatagcggaagcgtaccttaatccataaatagtgacgatcttaatccatctttgtggtgattttgggtaacgatcttccaagaaaacaagatttagcattttctaattttctctcttaaaggggaaatatgagaatagaaattaactcttgtttcatggggaccactaccaatttataacctcatagctaggttattaattttaagtatttctaatttgacacctcaataaattagaaatatcgcttagggtatctacacatttagtccatgatactttaatacccaatgacccacaattactaaaatgatcactttatgttagggcaaacttcaaacaacaatacactaatatacatatgagcccatattgaggattttaatccaacatctaaatccaatgaactaacaaatctttagaattaaacttttgaacataatcatgattatattccactgtgctgacgacactatnnnnnnnaacaaatatatatatatattttctggacttaatagaattta

SEQ ID NO: 55264 - DNA, 752 bp, Cannabis sativa
atataaaatatgtattaaagaaaattgattattaccaaacatattattattgtttttattttaaagaaaatagtaaaaaaaaaaaaaagaatagtgaaactatcaaatgatctcctacttaattattcttcaaaaaaaagtagatcaataatttaatctcttatttcgtttaggaacttttctctcttataaatcatgcaagttaatatattcaatccttgtcaatatatcatgcgtcacatatataaaggttcacagtacgtggagaagttgatcgaataaaagttagaaagtcatgcaattccctgatctataaatataagattatttttcaaagcactggttgagaagctataatagttgaaaaagaagaaataaaatctttcttataaattgaaaaacatatgatgtggttatagaatctaattcatttactgctggattcaagctggactcatctttctatagattagtagttatactttttgagtcaattagtgacataatcttgctccagactttttagggtataattgatatgattatgccataaataaaataaaataatattcatgtttaattaagacggaggcatagatattataaatttataatcatgtttgtcatgaatctgtggagcacagtgtgaagcatgacataaagtgagtttcgaaataattaatttattaattaataatatcggcattgtgatgaacaaaaacaaaattatgaagggccagcactactaaata

SEQ ID NO: 55265 - DNA, 1315 bp, Cannabis sativa
ggtaaaataaattccaacaggctctcgatctcgcagctccagatttagctccttctatccctacacacatttagacagttttttttattagtagcattcaacattatatttgtacaacatagaaaatattttcatgttttgcatcgcctgtgacttgttatggtcggtggccttttagctttagaacattacttacttttacgttccatgtggcctgtggcctttttagaacactactttattttcatgttctatgtggcatgtggcctttttagaacactactttatttttagccctaggaccttcatgttcatatctttggccataagccctctatctttgaacactactattatttggccctattgctttttttatcatggattgtttgactgaccgacggtctttaatcctaactatctcttatggccttgacaagttagggtctaaatttactttaccaagccaaagtatgcctacacgacttagaggcgggtttagtagcttatattaagcattagaatttctctgcataagtcctttgtgctagtttgatgcatggtacattataggtgcccctcaaatgaccatgcagacaagtctcttggtcacttgctcatcaccaagtttcacagactttgcttgggttctatcttatgaaggtgccatagtatgcatatggaactaaaagaataactttacgaagttaatttgtaagtaactggtttttagacacaataaacagaatatcaacattcttattgattcattaatttgtctttgttgctgtgaaacttacttaaattgaatctgcaagcttacattacataaatatagcttctagatgttaagtggctaccgctgcttgcgtagtaagcaaaagccaccattgaagaacagtgggagtccacgccaaaaaggtcgtgggtgctagtgctttttgtactctaatgttgagtaggtaaagcttctactttggagtagagttctgttagctggttactaatagtatttgcaaaggtgctctccattcaagtatcttggtaggagaatgagctccatgttctcgttgtaccttcctagcttgtgggctcccttactagctatctctataacttgataagggccttcctagttaagctcgaacactcctgctgctgaatctttagtgtttaaaaacactctttggagcaccaggtctcctatgaataattttttactcttgacttatttgttgaagtgccttgctacctgttatagtgagatttctctcacctagaaactcgagacaagactcctatttaaaggacacgt

SEQ ID NO: 55266 - DNA, 870 bp, Cannabis sativa
tttaatttttttaaaaaatttatggttttggttgttttggtggtttttatgtgggctgttagttgttatggggattttcgtaaaaatatataaaaaatgaagtgtaaaaataaagaaaaaaatccttatttatttatttatttttgttaaggaggataatttattatttatatttgggatatttgtggcaaaatcttgttaacatttgcaattattatagatataattattaaaaaaaattggtggtcatttaccgtgattgagttgggtgtttggttatggcatagtcgctcgaaactctcaaaaaaaaaattagtgatggttaagtcggacaattttactggtatagacgatcggaatttgattaaagtaattctacccaagaagtcaggtaaggaatttttagaaattcacttaaggacaaaatcaataaaacttaagcaaaagatttatttattctttatttaacttctaagaaatctttaaggttaggggtaaagtggtcataaccaattattctgaaatcacaccgatttaaacaacaccaattattcctggcataactaaatctcaaactattatcgtcgtgatattttttcccaacaaactagggtttcacaactgccgaacttaaaaatattttatttcataaatgacatgtataatactcatatattctaataaaatttccgtaattgatgtttacgcttatttatttattcttattaaatctctaaacatcacataattagcttagtaatcttactcatatatgtccagggccggccttaggtataggcgagctaggcccattttaactcatggtcggccctatatatgtcctagatacacataatactccatatttaa

SEQ ID NO: 55267 - DNA, 984 bp, Cannabis sativa
acacgtgtcttcctttgatgtgcttaccgaatttcgggtataacaccacaatattatttttatctagtttatcaaatatgtcaataaagaattttacaatgttctttttattggctagaaaagatagaaaagatgatgttttctaaaaaaaaagatagcgaatttgtacgaacgacgctatagtgcacttcatacacaacactatggagccaagcgagattctccaaggtttcaaattcacgcaaaaatcaattttttccagtctcggtgctatagtgccacaagctattttccatcatttttctttagtacttcgaacttgctcagtaaaaatacataactctcgcgtctagacttcaaattagatgatttaacatgttttgaaaagctaagaaagaattcttttattttggattttcacaagctcttaagaaaatgatgggaacatagttaaaaattagctaaaagatctcagtatatcaagatcatcttttaagcataaacttacacacttagagaaaacacatcaaattcaaaaaaaacaacccaataaataagagtaaatgacaaatgcataaaataatcattcatcattcaacactccgcaccttttatttatttttttgaaaaagaaaatatcattattgagatttgaagcacctaccaactgtaaggtgaaaatataaaataaaaattactttaatataattatgcattattattttactttttacattttattatatctaattttacaatgttattaaaattttgatgtctccacctattataaaattaatgtcgtccatttcaattatatttctaatttcacctatatatacttatagagtaataatactgcaggacccttagttcgtacctcatgacatgaggtagtttttttggacaataaaattaaagccaaataaaaattacatagtatggtagtgtgtacatccacatgtgattattttttctggttaa

SEQ ID NO: 55268 - DNA, 1237 bp, Cannabis sativa
agagagagagagccactttttggaatgagaggggtaaaatggggttttagtaaaaattaacctattctacaaatgttgaatagatttggtttaatggattaattttagttcaataaatgcataaatattcaaattttccttttcgaatttctctttattttttattatttagaatttttatccattatactatgatatatatatatatattattatgctcccgaaccttttaacttgttacaaagagtctttaaactagctattcataatattgtaaattttccttctatcaaattttgtcaatcaaacaaaattaatgataaacaatgccacgtgtataatttaatattagaaatataaaagtgttgcatttttaaaaaattattaaattaaaattcaattaataattaaaaaaattatagaaaactaaattaaaaaatttataaattattttttttttcaaattaataacacatgtgttgttgacatagtaccggcgtgtcagctatatcattattttgtttgctacgtgtaactaaacttgatagaaaagccaatttataatattgtgaatagtaaaaaattatttttgatgggctgaaaagtttaaaaagacaataataaatatattatagttcggggcaaaaatctgattaaatagttttttttaagaatttattttccgtgtattttatatgtttaggaatattgtgagttttttttatctatatatttaggattactaagtaataaatatcatagttttaggattactaagtaataaatatcatagtttggagatcattaggagtcaataagatccaatttttgtgtttccatcatttctaaatcaaagaacaagcaattaatcatgataaaatatataataaccatatgaatatatcaataattacttgttcaaaaaaattagtaacaaaattcttcaataaatttctatacaaattatatataattttcaaattaaattagccgagcgcgtaatcactgcttccatttttttatttaattaaaaaaaaaagaaaaaaagaaacatagtaattagttatttagctagtgactaaaccactaaatttaattttacctttttataggacaagtggataatatatatttcgtattaaaatttttaatttttccataggcatattattaagttatttggtaacttgatgataggcaagtggaaggcataatatgtaggtgaattatcttaaat

SEQ ID NO: 55269 - DNA, 1198 bp, Cannabis sativa
ttttgtataatcttcttcccccaaacttcgccaaacaaatgacgcatgattcccactttttgcctcaatcaccccaccatttggataatagcttgctttcaacacccgactacataaggaatctggaaaccgtatgcaccgccaaacctgcttagctaggagagcttggttaaaaagtcccaaatcccgaaaacccaacccgccttgctctttgtgcttacataagacgtcccatttacaccaatgtatctttgaatctttctccgatgagccccaccaaaaccttgccgccatactatgaatactattaatagttttcttcggtaagcggaaacaactcattgtataagtgggaatagcttgaatgactgcttttataagaacttcttttccggccgccgagaaaaacgaccctttccatcctttcaacttgttccacaccttattcttaataaactcaaaatgttgctttttcgtttttcccacaaaagatggcagcccaagatacttcccataattatctaccacctttacccccatgatatttgctaaatgagttctaactggcagtgtaacattacgcccaaaacacatctctgacttatgaaaatttaccaactgtccagatgccttagaatatttttccaacagctccttaaagcccttacactcatcctcatcagctgctagaaacaccaagctatcatccgcaaaaaataaatgtgacaccgacactccctgtcttccaaacccaatcccatgtaactgccccgaatgttcagcatgttgtatcaaacaggaaaaagcctcagcacaaagaagaaacaaaaaaggcgaaagtggatcaccttgtctaagtccccgttgtggcgtaacttttccttgaatttcaccattaatgagaaaagaaaactgaaccgaagtaagacacctcataatctttgagacccacggcacatcataccccaacttcaacatcattgcttccaaaaatcgccactccactctatcatacgccttcgccatatccagtttcaaggctacttttgtaccattgcgaaatctattcttcctcatcacatgtaaacattcatacccaactattgcattatcatgtatgagccgaccctttagaaaagcactttgtgaatcagacactacttggtccaaagagtgacgaagccgattagccaaacac

SEQ ID NO: 55270 - DNA, 1012 bp, Cannabis sativa
atcctagttggctgaatatgtatctgattgctgaagcacttttcttgcaggagggtctctttgatcacacccccgtaatattgacggtttatccctcacttccaagtggtaggaaaccgtttaaatattttcgaatgtggtcaagttcccctcattatcaaaagcaagtcgctgatagttggaagggatcggttgtgggaactaaaatgtatcaaatagtcaccaaattgaagagactcgaaccagttttgacagcaatcaacaagcatggttttgctgatgtacaaggagaagaaatgagggtgaaggagcttatgatcgagtgccaacaaagactgaaccaggatcctttaaatgtaacactaatgcagcaagagaaagaagtacgcgagcagtatgctgagaagcataaagtactaatttcatttctgcagcaaaaatccaaggttaattggattaaaaatggggattccaacacatcagtttttcattcaagcatcaaggacagaacaaggcacaatagaattctctccattgtcaatgctcaaggtgaaagagttgatgaccaagagaagatcactaaggctttttctagattattacaaggagctattggggacaagcacgataggaaggcagagggttaaaaattcagtcatgaaggaggggccattgataacaaccacacatgctgaaaccttgatgaaaaatttctctaaagaggaaataaaagctgccatgtttagtattcctggggtgaagagtccggggccagatggctatggaagttactttttccaaggcaactggatctatttggggatgaaacctgtgaagctattgcctccttcttgaagtcaggtaatctactaaaagaaattaattcaactgtcattaccttaattcctaaaataaaatgcccgaataaggtgagtgattttcggcctatatcctgctgtaatgtgctatataaggtggctaccaagttgatttgctctagacttaaaaacat

SEQ ID NO: 55271 - DNA, 813 bp, Cannabis sativa
gctgcactttctaagccgacacaaggttgcttttgttcagacgaaatggaagcaaaagcgcttttccatagccttaactgggtgctacagcaacaactaaacatcaccattatagagagtgatgcccttagagtttttcatgctctaacttctagatctacagatttttctagtttctctgatttaatcttggatgttcgttgtcttttatcctttttccctgaagcacgtatctctcatgctaggagaaatactaaccatgtcgctcatggtttggctaaacatgctttacagttggatcaagacgtttgttagagaggaaaaattctctttcctattttcagtattgttgtaaatgattattgacttataataatagtgatattttctccaaaaaaaaatcgttattattatatttttaaaaaaatcaatatctaatttaagtaaacagttatcatatgtaaataacaaataaattaagtaattaaatttatatatatcattaattaaagatggatttggtaacactttttttaatcaggtttttgttttaaaattagaaaaataaaaacaatttttaaaactatgttctataaaactatttttactttttaattttttaattaagaatctaaatcttaaaaataaaaaaaaatactttcaaaatttttttaaacaatttttttaattaatattttgaactccgattccaatttagatcttagaaacagaatccgggcccaaccccgaatttaaacccatcctaagtcttgatctcgaacctaactttgaattcaacttaaataaaataaa

SEQ ID NO: 55272 - DNA, 717 bp, Cannabis sativa
gaccgggagctttgttagaacccatggcaaaaagagttcttcgaatttcatcataatcaggggccttgactaactcctccttctccataggggatagacaatcatttatcaagttagagcaattaagacccgacccagatccagtatcagtgaaaatatctttcaagaacctggtgaattcattgccaatagcggtacgcctagtaagccagacattattactatccaatatactctcaatagcgttgcgtctacctctaatagtagcggagagaaagaaaaaattggaacatttgtccccctctctaagccatgaaacacgggctctttgtttccaatagatttcccttctttctaaggcctcattgagggccttacgaacctcacactccaccttccagtctctagagccaacaggcagtctttgcagagtattaagcttatattccaagtttttaatagaagcatcaactttaccatactgagtcttatgccagtgaattaaagccacccgagtggccccgatctttttaaacattctagtcggggcccaattatgcaccacagagttccaagcttgagagaccaccagcttactcctttcatcacgggtccaaccctcttcaaatctaaaggttcttctgaatttttcaacatctcctccaaagaacaggcaaagaggtctatgatctaaattacaagtctgtacagaacgca

SEQ ID NO: 55273 - DNA, 1356 bp, Cannabis sativa
  modified_base (1246)..(1259): a, c, t, g, unknown or other
aaaaattagaagtcagtggttctttttttggattgtctagtggctgttaaggctgaagaagagatgtatgtcgaattggcaattagcctcgtgcttttatgatattttggaaaaaatagatacatttgtgtgttgtaagatctattcgataaagtgtgagtttctggtttgtgtgaatgatcttgctgtccaagctaggatccaaagagttgtagactcttgtgttgttggggaaggattgccctgtcaatcctactttgttgatttgatcttaatgaactattgttctctttcaaaaaaaaaattaattgattaattaacttacttaaatgactaactgtctgtaatagtccctttcagatggggtttaaaaaattttacatctattttggaaatatttattgagatttttagaaactgtataaataataagaactgaagaaacaaataactaaaagagaaaaagtaaaaagagacatagttttttatgtggttggggcgttaactagcctaacattacgagtaagtattattcaatagttctttagcttgaaaagcctttgcaagtacaatgaatatatgttctccagtttgcctgagcaagttttgcaagagaattcgacctttaatccataggatttgatatgtatatatagtagtttgagaattacatttaatttccatttttcctctattggggtgcttacaatgaacaacaaacttgggctgcttcatgaagtccaacccatgaaggagaggatttactgactaggcaaattagatttagttggatttggtcaacaccgtgtactttgattatgggcacttgactatgaattaattgcttgatatctattttaagaagtttccccatttagcatgatacggtcctctatcgagatctgtcagctattgtttccttatttatgtgtaggaataaaaagggaaattagatcagtcttctgggaacacactgtctcactcctctagcctcacggtaccggacttgctttcggcgtgagttgtcaatgaaggaaggctctatggtgacggagctggaatacatttctggaagggcctgtccaagtgggcttggcccaatttatcttctttgaggggcctactagtgggtctttgatgtcagcttgaatttcatatgtccagtgccagaaacgccgataacattttccccccaagcttcccagaatactacatatggtggaagctgttggaaatattttaccannnnnnnnnnnnnntaccaagtatgttttattaacatcataatatgaattctaaaacaaggaaataaacacataagagtttaagaaaaccttacattgtgtgcagcggaat

SEQ ID NO: 55274 - DNA, 890 bp, Cannabis sativa
cagcattacatcacttaggtaagacaaataaaatcctaccaaaagactcatttgcccttctaactaacataggtagctacaacttcccaagggtaaaattggtcaatttccaaaccccgaaaattccaacacatccaatattcaacaatgataccccgacaataaaaatctaaaacatataaaatgcgactctctaaaggcccaatgtcgctttccacagcttccaaatacaaatacaaaaattgagaaatttacataaaatagcataataaacatatatgaacttaaatatatttctataatatacatttataaataataattaaatctcattcataaatcctaattatttaataatcaaatgtgttaatcttaagcggtctttacatggtgggcgtgtaaagctgatgatcatgaatattccaaattgtggatatttgactagtcttgagaattgtttgtttcttgtgtatttatatatatatatctatctcattttttttttatatattttgatagtatgtataaataattatgtatatatatgtgtatgtatatatacatatattttttaatttatgattttttttgtctgaaaaaacttatggggttaaaaagaaaagtttttgttggtatgttaaatgattgatgtgatattgtatttattttatttggtttcaatttttttttattatttttttaaatatttgcttcatttcatagctgaagcaaaaacaattagcgttagtgtacttgttttttgcttcggttcataaatgaagcaaaaaactaattaacgtcgtctcataactgaagcaaaaaaatcagtatttgcgtctatggctatagcgtcggttacaccaactaaagcaaatactttatatgtcact

SEQ ID NO: 55275 - DNA, 850 bp, Cannabis sativa
  modified_base (282)..(282): a, c, t, g, unknown or other
  modified_base (427)..(428): a, c, t, g, unknown or other
cctcgttatttgtattgacttaagaacaaggagaaaggctgcgctcttacaataatatctttgaatatgaattcttagataatatctttaggtaaaatctctcgaccctttgcccactatttatagggctatgaacttggagaggaagtatttcccttcttgttacaatggatataagtagaaatattgcatgataaatacagaatacactgatcgtgggatttggacagcttgtcatatctctatgatctgatccctaagttatagggatttctttgatgnctcacgatgcgaaagctgaattcactaactgttggtcgctctgtgcggattgccaatcgctttgcttcaggcatgcctatgaggcatcctgttaggactatactcaaagttgattgcacgtgtcaccatcatgtgatgccacgtnngagtgcaaaaattaggataacagacgtgctacatgaatttctaattagtgtgccaactttgctaatcaaagggttttccttggaaattgtgccaaattaaatttttgatttaaactattaaacttaataaacatatttatatttacataaaccgggatcatgtgtttaaacttttacaatcataatcaaaatacttttataaaaatatcacacaacaactacaaaatagagcccaagttctcctgagatcaaacactttaggtcacaccgtctcgacatgtacaatcatcccctgagctctgaactcactccaattcaactttcgtctttcctttacctacacacaaaagtaatatttgtgagtcaacagactcaataagaaaagcatataacatataatataatattgacttgcatctagg

SEQ ID NO: 55276 - DNA, 1419 bp, Cannabis sativa
taagcaaattaaacaaagaacaaattaagcaataaagtaaaataatatatatgtatgtaaaaagttgagaagaaaatataataatgtacccaatttgcagtccaagataagctgtactttcttggtttgtagattgagagccacataatacatggaagctgaaaaaaaaaataaagaaagaaattagaaaaaaaaaaaaaaactctaagttattattatttatgattttgaaaattaattttaaatttcttacaaagtaggttgtgggagcaaaaacaaatcctccaaagaatccaagaaggccaccgaaaaatggtacagccatagctaccaccatagttattactgcaaaaacagtaattatattattgttaatataattagtaataactctatagaaatttatataataaaaaatttaaaaaaaacacaaaataatgtatactcacaaacataggtggtacgagtgaaaaatcgaaggcgaaaactgggtgtaaagttcaacttcttcaccaacacagtttcaatcatgtcgaacactggcattgcatatatctataataaagagttaattagtatccaaaaaagcaatatgtaaatgagtgaaaattaaccattgttaacatatagttgttagtagtacctgataacttccaataacatgaataacaacaaacaagttagctgtagcaataagccaagctggtctctctagagtaatgagaatgttgtcatcaacagagttaccaaacacatagtagccgaccaatgcaactgggaaataacagagagccacgactgcgtaagccacaagcactcccttccacattggttttttggaaggtttttcgggagtggatggaattgttgcttggatctcaagcaccacgttgtgacctgcataagcaaaggccacatctcccaatgccgaaaaaaaattgagagttttaactcccatgtttgatcctctcagcgcataagagacatcgggttttactcctttgtgtagtgaagttgaccaagcaattgtggagtaactgaaatatatgcatagataacatttagttactctattgtatacaacataggattaatcaatgaatgaattaaaatataagtatgtaaccttagggacatgacagctgcagctaaggatacaatggcaatggaattgaagttggggagatgggagagaaccaagtgaagagaagcaaagatcatgatgaaataagtggttctaatgggtttggagttaggccaaacagtgtcatggactttctttaaggattttccaccagtcaccatgtagactatgttgactccaacctcaacgatcagctgttggggcacaacaatccaaagccctagtttttcaccaaaagcatgttgccctagctcgtggtacctgtcaaatctctt

SEQ ID NO: 55277 - DNA, 1647 bp, Cannabis sativa
aattttagatcttaaaatatggccaacacgtgtagggtgacatataaagacccatgttaattttatttgattattttattggttaaaataattcaaattaaattaattaattatcttttaattatggaatgaaatttattattggataatttgtttaattaaaaagataataataagataaaagaatttaactattctattaatcagttattagatatttatatttgaatttaaattatgaatttaaatcaaattagatatttttttagtttaaaggattaattaaaaatttttgttataacactatatatatgatatatagtattataaactaacaacttgagataactagaaaagagcataacaagttcaaagagatgaggaaacgatttttcactcccatctctctctacacaccaatatctctctctctgtcctagtctcacacgccacacactgtatagtgtggtgtaagattgtgatcaaccctatctcaattatagtatctcatgagttgagaatacattgtaatacataattatgctcatcttatagaatctaatagcccactctattcctaattgttgaggctggattggaagattgtggtgtgaactcttcagcaatagttcttggattagatgatcgtaattatactaaaagatagcaaggatccccttataggctacaagaggtattgtctctcttttcatagtctagatttaatatatatatatttatatattatgttgagatccttgggcttatggttcatattggataaaactattttttatcaaaccttcttcaacttttataactctaatatggaccataaaaaccaacaaaagacgtgaagcatccaagtgcaagggtcgatagctatacagaaacaacaccacaaaaatcaacttaggtgcctagggtttcacctagtgccaaggctgacaacccaacttgggtttcattttctgggaccatcttagtgcaaataggtcaaactttgtgttggaacatgaattagacatgtcatgaatatatttgagagatcagcatcagattcagagcactttcatttgagcacccgagcaccaggtgccctaggcacccagcgcccaggttgacatattgtcaacttgggccacttccaagcatcaagctgaagatctatctcattcacattctttgtcttcaccaaaaataaggaaacaagtactttcaaggaagaaacagaccgacctaggagctagaaatagggcccagtgcccaggttgacacctagtgctcgcccagcacccatgttgatattttgacaaccagagccaattccaaggagttttttttgggaggacttctgggcatattctctgtttttatcaaagattaagatacaagtagttttaggaatcaaatggaaccatttggcagcatgaaaattgacctagcgcccatgttgacacctggtgttgggcctagcgcctaggttaacattttgtgaatttaggctatttccaatcatgttttcgaaaaagtgttccaggcattttttttcttcatcaaaaataacgaaaatacaagtaaactaggggtgaagacaagaattccaggggcatgaaaactaagccaatcgcccaagttgacctggtg

SEQ ID NO: 55278 - DNA, 786 bp, Cannabis sativa
tatatatatataaatgaggttaaatgcttatatttttcatttcaaggttaaattattttcattttttaaggttaaattatttggattttattgtttctattttcaatgtgagtagtttccattatgatatttgttttcatataatatatgtatatatgaagtaaaatactagttgtttctatttcgaggttaaattgtttctattttttgtaacatatcactagagcaccctcatcagcttttctactctattagcttctctactctattctttaaaatacatcaccaaaattttatttttttttattttacctcaaacttttacattacaatatagataatttctttaaaatacatcatcaaaattttacatttttaaattataatagattttatttatttcaagtatataatattattatttataaatatctccatataaaaagtaaaattaaaatcataaataattaataaattatatttagtgcaatgaatagtattttataaatgtaaaacatgagtaataaattttaagaaagttttaaaatagaaaaatagtttagagcatgtaatgtttttaatttacttctttaaatattttaaagctctaaagactttattgagtaactaatcacacagaaactttcgctttgtaacatcattgctaacatcgttgtttgtgcgccaagacaaatggactgcaaactattgaccatctacaatgatgatatatggtcatttcaaatgagtgccttaaagcaataaaatgacaaaaaaaaaaaaaaa

SEQ ID NO: 55279 - DNA, 951 bp, Cannabis sativa
  modified_base (512)..(513): a, c, t, g, unknown or other
atacaagacattgcacaaggatataggccgaaggtcacccatcgaagtaggctgtttcttcttcggaatcagtacaatattcgtgtcattcagtccatcaggaatacggccattgacaaagaattgacaaacttggttcacaacatcgatcttcactatttctcagtattttcggaaaaacttggggtcataccatcgggactaagagatttatcaagatgcatgttaaacagagctcttctaacttcttcttccaaaactggcctaagtaaagacaaattttgatccacagtgatcaaaggagtaatctcatctaccacagttgagtaatcggccacatttgaagtaaataagttagtgaaataatcaaccataacattcgacaactcatcctcccaagtaatcatgtttcccacatcattcataagtcgagttatagtattgtgtttctttctagaagtagctttagtatgaaaatacttattgttactatcaccttcttgaagccacanntgtttagagcgttggcgccagaacacttctcgttggttcataactttacataactaacaacaaaataaatcactctaacaataatttaaaataaataaacaaaaaataacaaatttaaaataagagaaaaaaattgtatataagaaaatgttaattttattttagtttatatttttcttattaataataatagaatatatacatttaatttactatattttaaaatatatttatattaaatttttaaattaatattttttacattaaaataatcattgtatatatacataattttttaaagagcaatttacagcgaaacccccttatattttaaattttatacacttaacccccttatcttttttttttgtggtaaaactcccttatgttttaatttttatacacttaacccccattttttttttttgtggcaaaacc

SEQ ID NO: 55280 - DNA, 939 bp, Cannabis sativa
acagcaataaccttactctaactaaggtcaagaaggaaaatacctccgggcagagtttagacaacggaaaaggcatcgcccaataggaagtcgccgaaggttgggagaaagacatggatccccgacttggggaagaaaataaaaatgttgggccaatagaaaagttcgaagaggtggagatcaatccagatagctcgaccaggttactcaaaatctgttaaggcttgctgctcaaaacaaaattagttttaataaaatttttgagtgcaaaccttgaaattttttcctggtcacatgaggatatggtcagtattgactccactgtcatgtttcatgccctaaacattgatccaaacttttgtcctgtctaccagaacagaagactatttgacaaagaatgggcacaagcattgaaagaagaggtagaaagactacgcataaaaaatttcatcaataaagatttctgcccagcttgggttgcaaaccccatactagtagccaagccaaaaaattggcgagtatgcaatgatttcaccgacctcaacaaggcgtgtcccaaggactatttttcacttcaaagaattgatcagctcgtggatgcaatagtcggacatgaaatcttgagggttatgcttggagcgtacggtctttgggacatcaggacttattttatataatcactaggcaacaaacttttatatatgcacagtaaaacttttgtaaacacttttataaacgggatcccgggttaatataagtattcgattttggtatttataattagttaactaatattttaattaatcgccattttaaataaactcgtcgattaacaactagctgcatagttaagttaaaaatcacgttaacacgcctaaactagtagggtgttacacagatagtgggttggtcatggcactcaaattcatcctcgtaccg

SEQ ID NO: 55281 - DNA, 1040 bp, Cannabis sativa
aacttgaaattgccacctaaggtgaagaattttctttggcggggtcttactaattgtctccctactcttgtgtctctgcggtctaaaagggtgtacgtgagcggattgtgtttgatgtgtaaccgggaggaagagataatttttcatataatggttagttgtgcttttactaagagttgtcttgacagagggctgggagggacggttggaggggggaagttgctgtgtttggcaactggtttgataatgtttgtaaggttcagcctatagatcgtattgagaggcttgctatgattctttggggagtttggggagctcgtaatgacttggttggagtaataaggctttgtcgttagagagggcggtgaatactgcaattacttaccttgattcttggaagaatgctcaactggaaaatggagttgtttcgccagtttctggtccgaatataactgggtgtgagcaatgggctaaaccttattttggtgagataaatattaattgtgatgctgctatctttgaagatgacaatagtcatggtataaattcaatacactaaaaaaaaccctaaatatccagtcttgacatttcaacacaaacaattcgttacaaattcataaccccggccttgaatattccatagtttttaattcctctattagtataaattaataactcgttatggcaagtaaaaagtaaatgaatattcattgtgtgacacttaaccaaaatcctaggtcccacgatgattgttttctttttttttttttttttgttgctgaataaattagtgaaagccccttgacaagacaaagaatttggcctaatttatatttctttatttttttattgtgtatgtttattttttattaattttgcaatcaagtgattttatgtaactaatcccacatcaaggaattaaagagcattaagatgagcaaagtcaataaattgaatatgtgatcaacagagaaacatacttacctggacggggtcaatgggcgatcaagaagacccatggcctagtttggtggcttcca

SEQ ID NO: 55282 - DNA, 1356 bp, Cannabis sativa
ctagttattcactcctaaaaggggtttcgaatagtctactccagctggctttgtatccatccagaacatccttccaggaacaagtttcatctgcctgggacttccgtccaagaagcgtgcttcacgtatggagagctctttccagagctgacgatgagatcttgttccaaggcgtttgttaagtcataactgacttaacaacttagctgtttcagccaccgactttgggatccttatcccagatctataaataccaccatcctcatatttagaagatatagaatactagagataatttcaagagtgatattgagaggtatagagagagaggtacaaagaaaagagagagattgggttttgagatttgtatgaagaagcttcttgggtaagagtgttagagagataaacactttgagagaaaccaaatagagaatcctctcgactgtattgtacccttgttcttactcaatcaataaagactatttgacggtgtttcaaaattagagtaaagccataaatcccatcgatctataggacttgaaccagtataattctttgtgttgtttttattattttttcgctttatttgtttgtggttttaaatactccattctaccctattttttctccagtacgttctcagttcgtgatttgttagtcttgtcattgctaattttttgttgatatattttaagttgatttgattttgcatattagttgtaatttccccacaaatcagagctacgttattgatcaagatcgcagaatcaagattcttttcgttgcatcatgaaaaaacaattaacgccatcaaggtcgagattcgaattggagaagtttgaaggaacaagagatttcgcactatggagagaaagtattaaagggatcctagtgcaccaaaaagtctccaaagtccttagagatgagaaattactggccaagaagaaactagaaaagatagttgaaatggaggagatggcttattatttacttgtccaacagtgtgaggagaaagcttgttataaaaaacatatggctcaaggaatttggaacaagcttgaagaattctatatgaagccatcgattgctagcaagattaagttgctagaaaggttatatgattttagaataatttcttctttttctttagatgataacattgacatgtttaatgagatcattgtaagattggctaacataaatcataaaattgatgaagaaagctaggccatcattttgttgagatctctcccaatttcgtatcaagaagtcaaggctaccatcaagtacgacggagatgtgatttcattggaggatgttcttgctgcactcaactccaaggattttgatttgcaa

SEQ ID NO: 55283 - DNA, 1240 bp, Cannabis sativa
  modified_base (1169)..(1175): a, c, t, g, unknown or other
  modified_base (1213)..(1214): a, c, t, g, unknown or other
ttattgtaaatcaatgtataaacggattgataatgaatgcaatccttgtgtaaatgataggacacttactttgtatataaaggagtgatctgctgtgaaataaaggacacagaatccttgcaacaacagtggacgactactaagcagactgagatatttgactgaaccactatattcctcttgtgttcattattttctagtcttttattaagtatttgtgttcctgctttgaatactcgctgttctaggtcgagtactcgtacttattacatattgactattattattataatctatttttgatgttgtaaaatttcttcaacaacatttggcgccgtctgtgggaacgaaatactttgctgatttagaaggaaaattacgatggctggaaatcagacaaatggaggtcttaacaacgaattaatcaacattgggatgatgaatgttccactgtcaggaaatagggtacctcccgtggatactatcaacggcgccgtgggacggacaaacgtaacacctctcaacttattcccggagactgctgctccacacgtcggggaagcatccacaccggcggctacgacatgacatttttcgcctattacgcatgcagtagcatccgagggcatcattcaactaaccactgatcagtatactgcaatacaggatcagatacgtgctttgtaggccaaaatcgagggacggaataggactcgacgtcctcctcgagtgcccactactcgctcagataacccccgtgtaacaaattctagacgtcgaaatacccgtactcgtagggaacgaaggacagatcaagaagggctcgatttgaatcagccgatgtcgagagaccaatccgcaagaaacttcaaccgcgaggcgcaaacagaggaagatccagagcgacgtaatcctcgcagtagaccccattcgcgaaacaaagagaatgatattgattctggcttttcgtcttcgcaaagtcgtactcccagcaggtacaccaggtcaggtacggtggaaacaccgcaaggagggagataccaagttcataagggcaatctttgtgatcaccttaacgctgttttcagggtgtgttctcagatgcctcgtaacgatgaagagcctcgtgatccttagttgggtgatcagtgttggaattattttaccannnnnnnagatctactcacaagtatgtgttaggttttatgccctnnataaaactctttacaatctgattagt

SEQ ID NO: 55284 - DNA, 1343 bp, Cannabis sativa
  modified_base (302)..(305): a, c, t, g, unknown or other
tttgtacattatttgctaagtgttatcacaatcaatatgtgtcgctttcgtcttcccagatataacagagttgatgtctccctttatgcattcaatgacatatggtttctcgctaatataccaaacaacagtttgcatatcttttcctcgcataagaccttatagtcagcgagtggccagtatgctctgctacttatacaattaatgagttattccattaaaagtaatttcgtcgatccatattccctttatcttgacacgtgtcctccactgagatggtagccaaatttcaggtataacannnnccccttaaaaagttctttttttaataaaagtgctttttaataattacagagggcatttttgtcataatccctttagaaaaatgtgtcccttgattctagcggttgtacggttttgagggtcattatgagccatatgtttatgttctggcccatcccaaaccgttagatctcccaacctttggccttcttgtccctgtactttgagtataaaatggtggcttaagcttgccatattctacacacctttggttttttgtctagtttcatcttgagaagggattgtcattctctcgtcaagatgccccatccgagtttagaaatttatccctccaaattcaatacaccagaatgcaccaaccacttttcttctttatacgttcccaaggacttcaaacctcaatttgaattggaaacgtaggattccaaggctgaagagcttccgatcaatccaaaccaagggaaccccatcgatcgttatgggcgatcctcacaagtgattcttgaaggtaagtattatctcttgtgaatggtggtttgaactggattgtacatattattattttttattgctccattgatcttttatctgtatctccacagcaatggacatagatcttgcgagggatcttagaggtcctcctcaagctgacaaggaatccaggagaaaagttggcgtggtttcggatgaatacaggaggaaagttggtgtggtttcggattctattaaagaacccaaccaacccaagacccaagcctggacaagaagacctttatgctaacctctctctggtattgagaaattcttgaggctgggaatgaggtctcggctgcaggaaatggaatcctctgatgaggagaatgaggtctatgcaggggtcgagaccttctacgtgtagatggtctttctcgagctatgtgtagccggtctttctccaagctatgtgtagatggtctttctccgagttatatgtagacggtctttctcgagtttatcaaccccccttgtattctttatttaggaaaatgacttaatggttt

SEQ ID NO: 55285 - DNA, 1358 bp, Cannabis sativa
  modified_base (55)..(79): a, c, t, g, unknown or other
aaaaatcataagaaaaagggccctgaaaaaccatcaaaaatctaataagattgannnnnnnnnnnnnnnnnnnnnnnnntgcaaaaccacgtaaaaaaatcctttgcgctcatactttttatttactatttttatttttgtgtgagattatcactattagtctcatatttcgttaacaaaaatttgcgttaatagtttagtgctttcattgagatccttcgtgaaaaagctcagaaaaaaaaccctccttttttaaagaaattctctttcatggcttaaaaccaagaaaacattaatactccacaggaagaagctcatcaccgttctgggaaagagcccatgggctccagaaagttgtccaacccacattctaaacagaccacccgctccaggaggactcaacctgacggtggccccagcactcgcaccactcgatctcggaggacacaacccgatgttggtcccagtacacgaacgacacgttcgaggaggacttagcatgggaatggccgaaatccttgaatgatggatgaaggacccaatagtgaaggtgctcaaactatgggagaacgcacttatgaaatggaaaactatcaccttagacgcgacctggaggaggcacgatggcggaacactgaattagagtgtgatggagtcgtagctgggcagcacaggggactaacactcaaaatcaacctgaacctggagtgagaagaccacaggtcagacctcgtggctcacgaactaggagagaggaaaatgctcaggaagaataacctggggaaaatgaaattcctcctgaaaatccgaatgatcagccagaaccctctcatggaaatgagaatgggaggcaactagaaatagatgaacaagaaattcctcatggaaatgaggaagaccttgggactcaacctggagaacgtaggtcacctgcgaggaatcacaagcgttctttgcgaacccatagagagagggctcgtacaaaccctagtgggggaaatacgacaaaccacactcagggggaagaacagaacgtgaagaagcaagtgtgacctcagggcgttcaaggacccacagtcgatcaactcaaagaggagagagtgctcaacgagctaatgatcgagaaagcatgggaaccagtaaatccgtaagtcactccaggacaaggtccatgagcaagacgaggtccgtgactaggacacaatctgtgagtaaaacgagatctcccagcaattactcctcgccagatctgcgagagcacttgaatctaaaaaaacctgatctttgccaacaactcggtccaaagcaagaggatcctatccaattgcgaatagacaagttggaggacaagttcagga

SEQ ID NO: 55286 - DNA, 2013 bp, Cannabis sativa
gtgcccgaacacagtgaaagattttaggcctattgcgtgctgcaatgttgtctacaaggtggccaccaaaatgatctgtgctagattgaagaacatcttaccaagcctcattgctcagaaccaaagtggttttgtaaaaggaagacttattgctcacaacgtaatgatatgtcaagacctcatcagacactacggaaggaagaatgccaaggctaattgcatgataaaactggaccttcagaaggcttatgatacagtggagtgggactttatagaagaaatgatggaagccttacaattccctagtcagtttataaagctggtgatgaattgtgtaagaactccaaagttttcattgatgtttaatggttccctgcatggtttctttgagtcaaagagaggattacgccagggggatcccatgtctcctctcctttttgtgctgggaatggaatacctgtccaggattatgcaaagaattggatccaaagaagagtttcggtttcatgaaagatgtgaggaaatcaagctaaaccacttaagctttgcagatgatgtgctcttgttgagtaaaggtgacttcaaaagtgtctacctcatgctacaaggtctgaagctattctcactatcctcaggtttgcatcctaatcctaccaaaactgttgtctattttagtggaatgaatgacagggaaatacaacgaatattagatatgtctggttttggtaggcactatgctcagtttagatatttgggagtgccgatatgtgccaaaagaatctcaagcacagattgcaaagagcttgctgagaaaatgacttcccgtattaaagtttggagcaccaggaatctctcttttgctggaagggcggttctagtgaattcaattctcttgaccattcactcttattggacccagataatgattttacctaagaagacagtgaatgagatagaagctatttgtagagcgtttctatggaagggccagcatgcaatgaccggttcaggtttaataccttggaattttgtttgccaagctaagtcagaaggtggaatcgggttcaaaaaggtagaggaatggaatagagctgcaatgttcaaatatgtatgggcgattgctaacaaggaggataacatgtgggttcgatggatacacagtgtatacattcgggaagatgattggtggggctacaatgcccccattcaagggagttggtactggaaaaaaatagtagaggccaagaatcaaattgcaacaatggtggatgttcaacaattcacacaatccaggtatcatctgtccctcggttataaactcttagttcctacacaaccaaaaatgcattggagtaaggaagtttggggaaagtttaatactccaaaatgtagctttattctgtggattgctattcagggtaggctaaggacaagagagagattgcatagatttggtattatcaatgattcaggttgtgtgctatgcaatgctcaggaagaaacttgtgatcatctttttttctcttgttcgttctcacaacattgcttgcagatgattgaggattggttgggatggaaggtttctactcaaaccttatcaagactcttgaggtggattgaaagaagcaaatacagcaagttcaagaaaaacaccctttcggctgtaatggcaagcctagtgtaccttatatggaaaactaggaatgacaagatatggaatgggaaagatgaggatgtaaatagagtaagttgtacagtcaaagaaatggtgaagcatagaatatatagcacatggccgaaacaggttgagacaaaggacttggagtggtttagaaatttatagatgtaacaacaattgtttggaaaatagatatacaatgtacaaatcaggtgtttcataggtgaggtccctttaatcgggatgctctttgattgtaaatatggtttattggagtgatgaaattaaagctgattcataaaaaaaaaaaacttttcttaagatttcgattaggt

SEQ ID NO: 55287 - DNA, 812 bp, Cannabis sativa
aaagtgaaagtgaaagtgaaggaaaaataatagaaattattccaatattattgaacttgaactaatttctatatagagagtctaaaacatgttttagtatccaaattaataaaataaataaatggctttatacttaaacaaatttatagatgaattagttggaagaaataaattaaatttccatgaaaaaaaattaattgaaaactgataaaaaaaactattaattctttgatacatttaaaaagaatgaaagactataaaaaaaacgtaaataaattttgtaaattgaaaatttagatatggcgatgtatatggcatgtttactacataatatttagaattagaataaaataataaaaaatgtaacagaataaataaaaaataatcgaaattaatatttgtaatatgttgtttactaaaactgcttggaaatagaataatagtgatttatcttatttactttatcaggaaatataattaaaatatttaaacggactaaattattcttttgagttaaactatagtctgtttgtaagaaatattttaaataaaaaattgtcattataaatttaatattaaaaaataaaaataaataaaatttattaccctacattttttagaaaattagtaggagaagttctcctattttttactcccttatttaattaagttctccattttctaaattacataaatgaatgtaaaaaaatgactttttttctattaattttcattacttattaataaacatgtaaaaaaaagttaacataaaagaatagtaggtgaaggtgtaaaggctgaatcatccccta

SEQ ID NO: 55288 - DNA, 2646 bp, Cannabis sativa
tattaaaatacggaatttcaatgtcgtagtatattgtctatatagagtattgtaattgtcattataatcttgtatttatcaattatatatgtgtgtgctaaatgttaaaaatactaatttagttgtatttgctcgattcaaagcagtataatgttgagaaagtgtggcccaaatgagctgttgcacccaaccattcaagtgaaaaccttttctgatattgatgacaaaaactattataaaaacaagaacatgttgctcctaattttaaactctgtgctcatagtgttgttgcaccgatcatcatcattgaaaaactttgatggagcaagatttgaatctaaacaaagttgaagtcgactccttgattgcaacaaaaacttgttgcttccatggtagataatatgtttcatcaaaagcgtagagataatgaatgagagaagaatacgagattggttttaggaagagttggttgttgtgtggatgatgaaggaggaatcaaagaacctccattgctaggattcatagctacgaacgaaaaaactctgataccatatcaagttcaaggagcaaagaaagaaagaaaagtgtaatctttattgattgaaaaagaaaaagttacaatgctaatatatacaataagctacagctaaaccaaaacagatttaattaataactaactaactaacaaagcagacaataacaactaactaatcttagccatcatcttgagctaaggaggacagctctagttagattagtatctctaacactaaagacatttgtcaaagtggtcatattagattggtctcttacacttaggctgcctattaattatttgactaattaagatttttgtccattaaattttaacatgtactaaatcatgcctcctgaacttttatggccattaaaaattctccctaaactattgagattgttgaatttaagaatttttgtctaatttcatttaattttactaattcaatgattatttatatactatcatgctccttagattttgatatctatcaaatcatgcccctcaaactttgatatatatcaaatcatgcccctgagttttcatccatgttagagttttcttactaaaattagacaaatgtccttaaatctaataatcccaatagttcagaagtgatttttaacgaccttaaaagtttaaaggacgtaatttggtatatgttagttcgggagacaaaaattctaattagcctaattattgtaaatgtaattgtataactttaatttttgtattttctgaaagatcacttttttgtaatgttatgatatgtagaatttaaaatgagcatgaacaagagagaaactaagagctagagagagagagatttgccagaaaagagaagtaattactaactaattagctaatgaactaattgttagtattgatttttattaattttcttattattgctagtttgctatctattttgttttagaattagtcgtcatgtacatggtgaatgaccaactaatttggatagataatttgtcatttttatttgatgatgtatttaactcttaattatttttaatgaatattcattgttagaaaaatatataattataaattaaaatatttgaatttaaatatatattatagtataaaaatgataaatatttataatataattatcttgaattactaaatttattttcataaagttaaattcatcaaaaggaatcttaaattctatttcttttgataactagaaaaattatttcatttggtaatcattaagtttgatattaattataagataatttacggtcaaactctataaatttttgagtttagtacaatcaatctccattattgaatttttgggataaaatttctcaaatttcaattctgttttagtatccactttagtttgttaagtgtcaaagtgaattatcactgtgtacaaaaatgtatacgtgacaaatttttgttagtccacctaatatcaataatttaaatattataataaataattaaaaaatattataaaatttaaaaaaatcaaaataataatttttttctttttttttttcctttttcttttcttcttcctcaaaccctctctctctctctgcttgcagcgccagtgacgggccaggaagccctcccctttcaccttaagtggacctccgatcccttttctcgaacctgagaaccctgaacccaacttccctttctccctattggtgctctcgttatcacgtcatcaccaacaccgccaccttcggcaacgcaacctgagaactcacagaactcgaaggttccttcccccttgcaaatcctaacgtcgagcctggtgtgaagaagaaaaagaggagaagagaagagaagataaaagaaaaagtaactattttttaaaaaaattattttaataatttttataatatttaaataaataaaataacatatactaataaaattatgtcacgtgtaaatattttttttaaatgaaaaaaatttctgattaagcataagtcaaaaatcaagtctgaagacttacattaacttcgataatcctaaccaccaaactctcctatcatcaagagaaagagcaagtttggcaagactatgaaccataaaatttattgagcaattacaaagtaaaa

SEQ ID NO: 55289 - DNA, 1837 bp, Cannabis sativa
aacttcgaccacttgatacggtccaagtacacctaccgtactatctatggtgtttaggaatacccttctcaggaccatatctcccacgaagaagtttcgagcctgcacttgtttattgaaatatcgagctacttttgttgaggggccatcaaggtcaagtttgtagtggctcgtctttctttgatttcatcgagtgattcggctaggagtacgtgattggtatcttggttgtacatcaatcttctgtgggatggtggctcaagttctacaggcagtaagcttcatatccgtacgccatagcgaatggtgtctgtccggttgctgttttctcagttgtgcgatacgaccattgaacttcaggaagctcttctggccaatttcctttgccatcttcgagtcttttctttagtgtatccttcaagttcttgttgactactttaacttgaccatttgcttgaggatgggccattgctgagaaacttttaattataccacggttcgcacaaaagttagtgaaggattggctgtcgaactgcttgccattgtgtgaaaatatcttgtacgacagtccgaaccggcagattatgttcttcacaataaagtcttgaactttctttgatataatggttgcaagtggttcggcctttgtccacttagtgaagtaatcaaccgctaccactgcgtattgcactcctcctttgcccttgggtagttgtctgaccaggtcaattccccaaatggcaaagggccacagactttgcatctaagtcaactcgttaggtggagctcgaggtatctttgaaaatctatggcatttgtcacatttcttaacgtaggcctttgaatcttcaataattgttgcccaaaaatatccttgccttagaattttcttagataagctttgcccgacggcatgatttccacaaaatccgtcgtgcacttcaaataggtgtcgtgctgcttcttcttgtgtaatacatctgagcaatggcattgagaatcctcttatgtacataattccctctactatgatataccgtgcagatttccttctcatttttcgagcttcattttgattatatgggagtttcccagagtcgaggtaggctgctattggtgtcattcagtttggggaggtatcgatcatttcgatttcttccgtgccagtgatgctaggctcttcgaggaattgaatagcgaccaagttcaccttgtcacttacactgctgcttgccaatcgagctaatgcgtctgcagttgtgttttcttcccttggaatttgtctgagaccgtagcttttgaattgtgcgaacagatcatgtattttgctcagatatgctatcatcttttatcctcgagcctcgtattctgtggatacgtgatttaccaccagttgtgaatcagtgcagatttcaatgtgttcggcttttatctcacgggccagttttaatctagcaattagagcttcatactcagcctcgttattagatgccttgaatccaaccttgactgtagcgtgcaagtgttgtccccatggtgtgacaacgtcaattcctacaccagatagctgatctgtagccgcgttgtctacatgtagtttccaggtcgacttatcttcattgttacttggctgaggtgtttctatcggcttggggttgctttctggtatgctttctttcttgcctgtgcattctaccaaaaagtctgctaaggcttggcctttaattgctgttcgaggttgaaaagtaatttcgtattggcccaactccactgcccacttgagtagccgtccagaggcatctggctttcgcagtatttggcgtaatggttggtcagt

SEQ ID NO: 55290 - DNA, 1449 bp, Cannabis sativa
tctcagaaatcaaggctttagagatcccttcaaagttcagaaatcaagtgcgacatccatacactggcaaagaagactctatctctcacatagacaagtacaaagtatagactggcgtgcaaggcattaaagacagttctcattgtcaaatatttctagccacgctacaaaaagtagcacaataaaggtatctcaagctttctttgggatccatgaatttttgggaaaagctcaagcaagcattttataaccaattatccccatcaaggcacagactaattgagcccaacgatttggtctgcatcaaaaaataagaagacgaacctccaaaggattacctaatggttcttatgttaggatttatgccctaaaagcaagtaattaatagataatatgtttgttttatggtactaaatcacgtacgcatcggacgggttttgtattatttgattatcattgtaccatatcccaatgaatctccctatgtgtgtacattaaataaaataataaattaaatgtttagaataaatacctcttgaagactatcagggtattctcgaaacttctcgtatatagtatcctataatctagataatgcaatttgaactcacaccagtgtcttccaaatcgttccaccacacacaaggaacagtgtgggctattacgataaagtgtataatatattcttgttgatttctcaacacatgagcaagaacactttcagagagaaaactgatttatttttctcttaattttgaaaattacaatgtaaagtgatgttctaatttctcaaattaggcttctatttatagtagttaaatttctttaattaaatcatatttaattatttaaataaataaatatttataaccgaatttggttattgatatttataagggaatctctcaactacttgagagattatctcaacaagcttgaaatatctataatgactttttaaaatagatatttacctaactggatcaattaaataattaaataactgaaaaagacaattttcattatacaaaaataaataattactatttttcctatttaaaatatattttttcgagcatcattatactactatttatccctacgtgcccttgacattgtttcaaagtggcgattcgggaaccatggacctataattctaagccccaataaactagcttatttattgattatcatcaatcaaataatcttcatttattaattctatgattattccactaaaaatatagaattgaactcttattaattatagagttatatttactgagttttactgtagtgtccattgatataattaatattccagtaattagccctccatgcattggtttgtaattaattttggttaaattaccattttacccttctaattacttctttatcctttagtactattaagtcactagtggaagtataatttagatcccatct

SEQ ID NO: 55291 - DNA, 730 bp, Cannabis sativa
ggcagcaactcagttggaacagtctccaaactgcaagtacaatcaggatataatctagcagctctagcaaaactatgagccactacattaactgatcgcttaacgaaagaaataacaacattattaagagaagcaagcatagttttacaatcttgaatgacgctaccaaacaaggaaatcatatcagtggaactatgaatagcttgcaccacacacagagaatcagtttcaatgtagacttgaggccatcgattctccttcaaccaactcaatactttccgaatgcctatagcttcggcaacagccacccctacttgaaccgctgtgtatttcatctttcccgcaatcaacaaaccatcggagtttctagccaccatacccaaaccgaaactccttccatcattaaacattgccgcatctacgtttattttgacactagtaccgttcggaggtgtccactgctcactcacatcagcagccgttagaatcggccacgatgaatccgaaaaggtaggattataatttgttagtatgtatattatactgaagtctcaacactcttccagaattattgcagggtcagggtattaattaaaagtttaaaggttcgtttgaaatgtcgtattaatttgttttgtattatattaattaatatatatgaaatgaaatggtaccgtattgcaccatttcatttcgtaataataaccatgtactgtaattaattattata

SEQ ID NO: 55292 - DNA, 1762 bp, Cannabis sativa
  modified_base (528)..(529): a, c, t, g, unknown or other
cttcatatagcttgagaaagactgcctgcacgtagcttggagaaagactggctacacatagctcgagaaagaccggctacatgtggagagccttgtctctgcacagacctcattctcctcatcaaaagatcccatttcctgcatccgagaccttattcccagcctcaggaaattcctccatcccaaaaagaggttggcgcaaaggtcttctggtgtaggtttaggtcttgggttggctggattctcttatagaaaccacgctaacttccctcctggattcattcgaaaccacaccaactttattttgggattccttgtcaaccttaggaggaactctaagatcaatcacaagatctatgtctattcctgtggagaagaagaaaaaaggtcaatggagcaacgaaaaacatacaaaaataatgatatgtataaactgactcaaaccaccattcacaagggatgatactcaccttcaagaatcacttgtgaggatctcccatagcggctacggggttcccctggtttggnntggtcggaagctcctcagccttggtccattgtttccagttccaattgaggcttgaagttcttgaaacgaatggaaaatggttggtgcatcttggtattatgagtttgggagagtgaacttctgaactcagaaaggacattctagcaagaaagagatgatccattctcaaaatggatctcaccaaaaagccagaggtttgtgaaaaatgataagcttgagccgcccttttatacacaaagtccagtgacaagaaatctaaggatcgggaaatctaacagttggcagtagggaagaatacgaagggacgattcataatgaccctcaaaatcatacaaccgccaaaatcaaaggacgcattttttccaagaacgaattttgacgaaaataccctctgtaattattaaaaatcactttttaaggggcaattgttatacccgaaattcggctgcaatctcagtggaggacacgtgtcaagataaggggaatatggatcgatgcaatcgctttatatggaataactcattaattacgtgagtatcacagtatatttgtaacctgcatactgtaaggtcttaggcgaggaatcaatatacaaactggtgcttagtatattagcgagaaaccatatgttgctgaatgcgaatagcgaggcatcaagaacagtacacgtaggaagacaaaagtgacatatatcaattgcgaaagcccttagtgtacaaattaagtgttacagtcggatcagctcgagaccaagtaagcgaggtgcccgtctcgctatgggaagacttcctataacttcatcacgattagcgtcagcgaggcttacgaccctggcaagtcagaagctaacattcaaatgagcttcgaagaactctttgtaaataacaaccacgatcgacacaagacatgcatcttcacatcggaaggaaaaatggccccggctcgctattgagatcactggaaccaagcttctgccaaagataactccgaatacaataattaaagacgtgtttaattcacaatcattttgacccagtaaaagcgggaaaatcacagctgtatgattttcaaatcataatcacgtgtacattacgtgatatgtaatcaaatcctatgattttagggacgattgttgtaaacatattacagtcaactttgtaattaactgcccattatgtaattataaatagtggcaagtaagatgaaaaggggggacgaaaaaaactcatacaa

SEQ ID NO: 55293 - DNA, 625 bp, Cannabis sativa
ccaaggcaagatcgaagtaggtcttgtagtggggagtctttccccaaccttaatgaggacggtgccactagtcgccccagtagtgagcgagctaactggagaactcacaataccaggcgcaacaatgacattccaccctagaatgcgcaaacacattgtaaccctaggcctagggactctgtgtttgatagagtgggtcgaagagttgatggggatgtttggaatgacttaaaccgaaggagagctaattaggataggaatgatccactctagaataattaaatccctatcaacccacttgtaaggctagctggataggggttggcaagataggagtttgcaggacaagtgctggtcggacaagggttggtcggagtgttgtgcaagcacaaatggatcaactcaagaacctgatacaggcctgtcaggcccaatgtttttcaacctggagcttgataagactcgagggtcacctttctctgcacacataaacgcattgcctctgcgaacaaagtttaagatgccaacttggaagatgtacatagggaaagaagatcccttggcccatatgaaatatttgaaatctagaaggattggaaagatgttattgacaatacccgttata

SEQ ID NO: 55294 - DNA, 813 bp, Cannabis sativa
caacaaaaaatcatacagaaacccttattgcaactagcgctacaaccgtaaatttaaaaaaaaaaagttaaaaaaagtagtatataaaataattcccctatacaataactatagttcataaaaaaaaaattaaatatatatttttttaaaactcacaaaaagtgaatacattaccattatagaattgtatatacaatttacaataaaattgtgaaccaaatttttttactaactgtaaagagcactaaaaacaacttctttactctattctttaaaatatatcataaaaacaacgctctattctctttttaaatacatcgctaaaactatattttttctattgcacaacaaacttttacattataccatacattaacttctttaaaatacatcaccaaaatatcattttttttttaaattttagtatattttattcatttcaaatatataatattaatatatgcacatacaaaaataattattaaaatccaaaaaaaaaataataaaatatgtttatagcattgaatagtattctataaatgtaaaacatgaatagtaaattttaaggaaactttaaaatgaagaaggaatttagaacatctgctatagcgtatttttagtatggttctttaaatttttttaaagtttctctattttagagaaactcttgtgagtgttttacattacaccatacattatttctttatacttttctctacattactaaattaatattatttttattttctaaactattttttttttgaatgaaaataatctttattagacagaaacatccgctaaaataatgga

SEQ ID NO: 55295 - DNA, 811 bp, Cannabis sativa
atttcaagtttgttctctacaacttgctctctaatgtagtggacatcgagctctatatgcttggtccttgtgtgaaaaacagggtttaaggccaaggcttgagcactctgattatcacaccataatactggaggtgttttgagcaacttgatgcccaattcagtaattaaagagtgcatccaaactaactcaatagttgctgaagcaagggctcgatactcagactctgtgctggatcgagccattgctttttgttttctggaactccaattaacaaggttaccccctaggaaagtgcagaatccactggtaggttttctatcatccaaactggaagcccaatcagcatccgaataggcttcaagtgtaaataatgtagagggtttgaaatgaagaccaatgtgaggagtgcctttaatgtacctaaggattcttttgcaggcattccagtgattaataattggggctttaaggtattgactaagcttgttgactgaattagcaagatcgggtctggttagagttaagtattgcagagctcctattatgcttctgtacaggtttggtttttcaaatggtggactgtcattgagagctagtttgttggccaaaatcatgggagtagaacattcttttgcatcttcaaaatgtgttctatccaataaatcagcagcatacttggattgtgtcaaatataaaccagaagaatttttgtaagcctcaaatcctaagaagtaactgacggatccaagagatttgagagcaaatttgttgttgagagcctaagtaatcttgatatggctgctgtatt

SEQ ID NO: 55296 - DNA, 1047 bp, Cannabis sativa
aattaagtatggaaatttaaatttctcttttaatatttgctatcgaataaaaatataatgatgtaagatttttaaaattaatatctatagtgaaatttgtttagtacccataattgagtaatacctattgagaagtgttatatatataatcttattcatattgagaaaaatataaaaagagtatggactataggaaatagaagagcaagaagtttgacacatacaatttttaaatccaataatctcaatagtttgtaaagaatttttaacgacctaaaaagtttaggagcataattggtatatgtcaaagttcaggagataaaacttctaatcagcctttattttattttaaagataaaattatattttcttttaaatttttgaaactattacaaataataaataaataagcagaaaaagttaaaaaagaaataatttcatacataaaaattatttttttttatttaaaatccattttttttttattaaaagtaaacataaagtatttacaaaaatatattattatactcaagtattatcatacaggaccccatataaattttactaatggttttgaaatttttttaatatataattgtctaaccaactaaattacttattctatttcaacaaaagggatatatttagttcaagtttacaaagaataattaaattatgaaatgcacataaatataaattgacactttatttacaaaaatacctccataaggtgtggacaacatttatacccttatataattttaattaccaaaataccacttacactatcacttacacaatcaaacaatagttacaaggttgttgctgtgtggttgcgcagtggttgcatcagacgaatgtttcaatcagacaatggttatagggtggttgctgggtggttcgccgaaggttgcatcagacgaaggttacaatcagacgaaagtttttgggtggttggctagaggttgtatcggatgaaagtttcaatcaaacgaaataattgttagcaaaatatttatgcagctgtaatgcaactgttgtgaaaca

SEQ ID NO: 55297 - DNA, 1728 bp, Cannabis sativa
aataaatataatttatttgcataattaaaaaaatattttataaaattgtaaagttaaaaaaatgaatgtagtttttctctatgaaaattaagagaatgttttgttgagagaatcaaataaaatatttaaatagttattaaaatataagaatgtatataagacaaaactaataaatactttcttaaaataaattaaaataaattaaataattaaagaaaacaaactacggtacccaaaataaaaaaataaattacttacattttcaaagctgtgatatttttttttttgactaacaattccaaaactaacataaattctttagttaacgtgaaataaataaaatggacaaatgtcaaattttgattgttaggacaataatggtatagggagtttgggacaaaaattctttactaaatctccaaccatttacacttgatcggataatggtaatcatgtctataggcagtggggaagttagaggtaattcgaaacgtcttctttgtccatttggaagattatgaacttcaggacttcaatttcgaactcaggatgcatgagattggttcccagagtttctagatgagccgttgctattactagatgaaccgttagttgcagtattatttttcaatattggctactgatatatagcagatgatgcatttgaaaaatgcattttatgtttatgatgaaaataatcaaagcataacacctttatatagctgtcctcactgcttttactttcaaaaacattgataggaataatttattatttagtttttttttaatttattacataaaaagaaaacatcagttgcgtacacatgtccactatgacttaacatttattatatgataattattttaattaaaattaatatattgtttatgacaaagtaatacatcaatataggttaggctgtagattgtaatcatttcttttgtagcttgtttcattcggatcacatggggacaagatgcaggttgtggggccaagaggtgatgttcagcatgtgttagggcatcaacacgtggcacgctagagaggggatattttgggccatttgtgcctttgtgcctttgagatgaaaaatttacatatgcccacattaaatttaaattaattacaaatatattaggtagtttttattatacccatattctataattatttatcgtaaataacaaactttcaaaacttaattatcaactatattaagtagtaaattatatataattaattatatttatattctactaaattactttattttcttaaacaatcgatttatttccttatatatataaatataaaagttcaaggcgtttaattttttttttaaataatgttattacttttgttgttgtttaaacatagatgcttttgtttttaatcacaaatttgagtttatataattttggtatttagatatcatatggtattcaataaaaagagaaaagaaaaaaaaaagatgaaaaaaatttaaaattgttatatgaccaaaattgatagatgtttctttattttgtttttagatacaatttggtatatttttctgtgataatgatagatgtttctttatttttgtgtaaaaatccccatatttttcaattttttgggatatttttttttttaattttttttttcaaagaaaaacattttattcagccacaagagcttacaactggtcaggcttttctgcctttaaaatggcagcagcacaagag

SEQ ID NO: 55298 - DNA, 1687 bp, Cannabis sativa
aacaaatctgagttaggcaagctaacccaccatcaaatagtttggtttcacactatatataatccaaccggactgcatacctaaacctataaaggtaaaactattttctttagttttatatgcaaatatgatgtctattaatataaaaatgtaaacttaattatgtaagcaaaacacacttcacaaaagagtattcacagaaccccggatttcaagaagttgctctacttttcaacggaaggacttaaacagctaagctaaccttcacactagaaccccaccttcaacaatcatcttcattcttctgccttgtcaaggctccaagaaggcaaaactaaaggactataaaaaccaaactaacttctatcattaggcctcagctctatgctccaaatccgagcttatagttttcccttcgcactcgattgacgatgcacgcaacttaaagttatttatcttcttcacttcctcacttgaatatatgaagatctttttcaccattttctttagtttttagactaagaaatggttgaataattaagtttcttggatctatatgtattatttgtatttatacatgtatataataataaagaatgtatttttagtgtaatttttagtgttatggttggaatagaaaataaatttagtgctaaaattatacccttttggtgtaagtttaataccaaatttaagtttcatcattggagttggcctacgaaaggacttgagccgatgacactctaaataaaataaacaatgattactcatttgtttactagagtagtgttaggaattaagaagacccttaaacttatttgtgagaggaaggcttctcttaattcctcactctactctagtaaacagtgtgagagtttcaaatggactgaaaaagtaaacaatgattaaactatcaatcaccaaacttataaaatgaaattactcagttaaagaacaacataaaatggtttgaatttccaaaaaaaaaatcacaaaataaattaaaaaataagaaaccccaaatctgggaataaacaattaagagatttcaacattcaaatcaagacccataaactatcaaccgcctacaaacttcctctccatattagcaatcatccataaactatcaatgattaaaagaaattaatgaagtaacatataacaacttaccatagacgaagaagagaacccaccaatgacagagatggccgatgaataggaaaagggatgagggaaaccgaagttgtacggatcaaggagagggaatgagagagaagggcatcgattgagaagagagaagaagaagatgacgaagacgaaggctcaaagtcgttgttttgggagtgtgtttgccttttagatttctctatctaacagaatctcttgtcactaaacagaatatttcaaaaattctgttagttttaacaaacatgtcaattactatgcaaatgaataaacgatacttattcataaagaggttattcattggtaactattcaatgaagtattgcctattttgctctcctattaaaattgtgtctacaatcaacaacacaacattatcccaggtaacttatttgtcactatgagtagttaaaaacttaaaacaattacaattcaaattgcctagaaacaccataaattagattttatttgaagagaagtttctcaatgtcaccaaacactt

SEQ ID NO: 55299 - DNA, 1703 bp, Cannabis sativa
ggcatggattagttttgagtatatccccttttaatgataacacataaatattttaacataatatatgtattatacatttaagggacttcgcaaacatgacaagtgtttggtattttttggacaaatcataccattcaattttggcttctttttcttttgtcatgtgacatatttcatacatatatatatattagttagaagttacgtctcggcacgtaaatattagttttatttaaaatttagttctttattgttatttaggtttttataactatatgtatgattatgcttaaatgaccaaacagccgtaagtcttaattgtttcaatcgttacatcatgctgcaagaagtgaacaattcgattaaaaattctaccaatcttcatatatgcaactggaaagacaacaatatttggtgtacaaaattgaactcatatgcagtaaaatacatagcaagataagtagtaaaagaaataggaaaatagcttgtttgttgttaaatatgttacacatggaggacgacacacttgtcatccttttctgttttgataccttggaagaatctcccagtaagaaggttgacaggaaatcaacctaaatctaaacaatgttgctcctatccagatctttattgtctatactttgagaggttactttgtatcactaaaacaaaaaattgacgaaacagattgtaaaacatgcctgattgtttgatataagctgaattgttctattgactggtgtaatgatatgaaatgttatgaacattatggtatatatgcaaaaatttgattcctcgtcctcatagtcacttacatcgctgcaatacaccaagagaataattgtggtgagagccaaatcataatctgacaaaagatcaatagaatattttgaaacttaagccaaatcattttaacatttttcactaatgattaaattctagaaaaatttacacatttatacactcatcgccaacatcttgagccctcagtttcctcatacctctagttgagtattcaatattcacacctgatgaaaattctaaatagatgttgccttagaaaagagataataaattgattagtgccacatgaggacacacccaagagggaagtgcttgattgtttgtatggctataatatgatttcaattcaatccttatccaatataaattaaattgatacatatgaacgactgtaatctaccagaaggaaataacagtttcaatcaccttgaattgtcttggttcggatactcgcctagttgttccatctgccagctttcaagagatgcaatgggttcatgggaaggagcatattgctggaaaagaaaaaaaaaattacagattttgtcacaaaaatttcaatttctagaccttggttaactttatcaagcatgtaaatcagcttgaagttattttaaagaacattcgaagggatgaaagataagaccatgtgaccttgtctacatttcaagctataataacaacaacaacgaataaaagatttaaatcacacaattatttagttcgttaattataaattttatatgattcttccattgaaagtaaaatgcgactaattttcttattaaattagtaagtttttaaatttggatagattgttatgatgatgtgcaaagaagtggtcttgataatttattatttttacaagcaacatttctaaaatttaaagcaaacaaaaa

SEQ ID NO: 55300 - DNA, 2351 bp, Cannabis sativa
gttgtaaccatagttgttgttctgaggatagttcccaatggctttagcttaatccattggcaaactatttacatccaccgggcaagtgtcatatctgtgaggcccctcacatagctcacaagtaacttgagcctattttacatgagcagacatcaacttaatagggcctccacttgggctatcaactttgttatggcgttaatctcatgcatacccgcaacttatttcgattagcttctctcagttggccattattggttattcatgatcatctttcaagcaagtcatatgcctcatttgcacttttcctcataaaccccaccaactacagtgtctatgattgtttgagtattacaaaccaacccgttgttaaaattatgaaccaacatcaacttcttgatcccatgatgtggacattttctaatgagatccttgaacctctcctaagtctcatagagagattctttgtcgaactaacaaaaattattaatctcccctcgtagcttggcagctttagctggatgaatgaactttgataagaacttcattgctaagttattcgatgttgcaatagagttaggtggcaaagacaccaaccaactcttagctcactctctcagcaagaatgggaacagtctcaggtgaatggcattatcactaactccatttaccttaaatgtttgacataactccacgaagttaaatggatgtaggtttggatcttctgagggaagtccacaaaactagactaaagattgtaccatttaaagtatggctagctttatttcaaaattgcaagcttctgcagcgggtggtcttatacaagactgagcccccattaatgttggaagaacatagtccctcagactatgatcatgtggattacgaccatttgtctagtcttccacgtcacccccattattgtcgttattggccatcacctcttcttggtcaacccttagtgtaactccttctaacctcttattccttctattttatctacaggccttttcaatttcatgatcaacaagcactcttgaacttggtccttgacgtcgcattaaccaaaagtacctgagataagataagaaaaattgagacgaaatagaagtaaggaagacaccaaagtagaatttggtctaatttttataatatcaattttacaattctctggcaacggcaccaaaaaattttcacaaaaattataaacagctacgtaagtgcacgtaatcaagtagtactcatacatgtgaggtcgatcccacaagaaattgaattgaataccactaaattaaacttgtatttctatttggaataataattttgatgaaagtaaaagtaaagaataacaagaaattaaaatttagctataaaattgtttaatcaaggatgagaaattaaaaaaaaaaaagaatcatgttgtttcaattacccaattattaatgttaattatttttcttgttttctttaagtgaatgatagattataaaattaacctaactcttttcagatcttttaggtcctaaatcatatgttatttactgcatctctgagatagactaacatacaatccacattcaacaaaaatctcaatgtcacatatgctatgtaaatgctttcgttttacattaaaacttagttcatctaattttagcattctcagtacgacaaattcataatcaagaaagaaaaaataacaactatcattaactcaaggcataatttcaatcaaatttattatctccccaaataaggagtttagttcataatctccataatcaaacttaaaataacgaataacatagaaaaattaagagagaagaaagaattggttagagaaatcaattcggatcaccacaaaccgctcttaaagttctctcttttgtttccaagtctaaaattctgaatatcccttcaaaaattgcaagtcccctttacaacaaaccagatttcccatttaaaaattgtgagagtacgaaactgcccacaagttcgcaatgaagatgtcgccgcgaccataaaaacctagttgcggcgactgattgaggcttaagaataccatgttctaccaaacttcgccccagccataattcatgctcaccgcggtgaactttgccaaaaataacttgaaaattttcttatttctttcatggctttttctaatctaattctcatgaatattttcgttaaacatcctgggaagctgaaacaaagagaaataagcgtaaagctgtcctaaaagtagaaacaaagagcagaaacaacactaaaaagtgacccaaaatatatgctaaaaatagcctaacgatccaactgttagcactcctagaattaatactataagagaacta

SEQ ID NO: 55301 - DNA, 1260 bp, Cannabis sativa
aggggcgggccgcggcatgcctttcctgggtcgcgaccagtgtgcacttttcacacgcagattgcatggatttaggatacgggccgcagcctgtgttgcagtttttgcatggtatcttttttttttcctaagcacgaccccaattttgcacagttatctttagatcattatctttttttttatcttttttcatcttatttttcctttgatatttttcaaatcttcttctattttaaatctgtaaaaataaaagataacaagcataaaattgctccaaacacgagcaaaactaaattaaaaatacactaaatttaatctgaaaataatactaaaaacaacctaacaaattccccaaactaaacatttactcaacctcaagtaaaacactaaaacgaaaaacaaaacttaaacaagtcaatctccagaacataaataattttcaagtagactcaaaaagggacaaaagtatttgattgtgctctgacatacatgatatatattatatacacatgtctcatataaatacatagaaaatatttatttctacatatttaatctcactattatatattatatcacatactagctctacatatatattatatatattactcatatatacatgttatatattatatatctcacatctatataacatgataaatatcatattatatatcactatgtatattaattaatatgatataaagacatgatcacatatatgccacatatatatataactcacatatatatcatatatatatattactatcatataaaatagtaagtcataatatacaccactatgctcacccatgaatggtttccatatgaaatctcttatccttgtattctctcctcttccattgaaaaggaataagcttttgattgttagagattttattacaatgaaagaaaattaagatattgcaactctattgcaatataatacaaggatcaacaaagagattaaataaatgttacaacacataatatacaatatatgtacactatatattagagaggtagaagaagatatacaacacatgtaatataatatatgtatatacataacaagagaataatatatatgtatacattcactcacaaccttaagtgtagaatagtggggatcaccatgacttgagcaaggtataatacatttgtccaaaagcttattttcccttatctctaagcactaagggaactctcatgaaaatagctttagaaattatcaagtcttttagggttttctag

SEQ ID NO: 55302 - DNA, 1822 bp, Cannabis sativa
agtggttgggcactttgtcaatcacttccacagttttacggggagtcaaagttcaactacaaccaggatcaacacgcattatgttgagactggaactaagctttctttagctcaacaactgcaacttttgagaccattcacacaaaaggagatcaagtcagttgttttcagcattcaaaacgctaagagcccgagaccagatggatttggagcaggcttttacaaaagcttatggcctgaaataggccaggaggtaagtagagctattcttcatttctttgagactggaattttacctgctgaaattaaatgaaacttcaatatccccttgttgcctaaagtagaaaaccccactaaggctgtggagtatagacctattgcttgttgctctacaatctataactgtatctctaaattgctttgtctgagactttctgaggtgttgcctttcctgatcaaccaaaatcagagagcttttgctaaaaatagatctatagctcataacattctcatttttcaagatctaatcaaggcttatggtagaaagaatgtctcagctaggtgcacgataaagattgacctaagcaaagcctatgatctattatttttggaaaaggaacactacaagctgttaggcatctaaagaaggccttggatgatttcagcaatgcttctgggttacaggctaataaatccatgttccaaatctttttggcatgtgtccctgaagtagagaagctggccatattgcaagaagttaagtttgaagaggggaaatttcctttaaagtacttgggagttctcctaaggccaaccaaatggaaacttgaagactgtgatattatcttgaaaaagataaaactcaaacttcatacctgggcaacgaggcacctatcttttgctgggagggtgcaacttatccattcagttcttttaggtttaaggaactattggatgagtatatttgtgcacttggtctcttgagaaaaagtctgtctccccaaagtgtttggagggattggatttagagatggagctcaatggaaggaattagttttggctaaatatatatgggcgttaatggagaagcatgacttgttatgggtaaaatgggtcaattctatttacttaaaggacactgatttttgagttatactctaagacaaagacacaagctggtattggaggaagctttgtagacttcaacaaaccttttgtaaggggatattgttgttgctggtgtgtttgggaaatttagagctgcaaaactctattatagctcagtgcagcaataaaaagttgagtaccaaaagaatgtgtggtgtcgtttaagtgtcccaaagcatagatttattctttggcaagcattgaataatcacttgctaacccgagaccatcttcccaaatttaatatctttgttgaaaacttgaattgcccagtgtgtgagcttgaacatgaaagccactcccatttattttttgattgcaatctgtcttctcaggtttttaaccaactggtttgttggctttgagctatcccttggcctagcagttacaatggttggacagagtggttgaacaacaaagggaaaggccttgttgcagcagttgctaacttcgttttggttgctgcaatctatgggatttggaggaacagaaataggtgtatctatgagtactattcccattgagcagcaagtttagttgctgaaataaagaatctgttgttgtttagattacatagctatgctaagaggaaaacgagtactaatgatcaagtgtatttactcaaaaaatttagcctgttgagaacttgaggcag

SEQ ID NO: 55303 - DNA, 712 bp, Cannabis sativa
ccaacccaccggccaaacaagtcagacaccgagaccacctggtacctcggtatttaacaaattgggtgcagcccatgacctcagggctgacctgaacagaagaaggggtctggacgaacagtacgtccaaccaactgtcctactaggtatccgcatccaggacccagctctaagagatcctgatgtgacacaggtcggtcaacaggctgaaacagtttatccatttgtgcaagcacaattggattaattgaaaaagatggtacaaggcttgaccgacccaaaagtcattaatttcgagctggaccgagcacgcggatcacccttctccccaaagatcaaagaccttgaactaccccttaaattcaagatgtcgacatggaagatgtatgcaaggaaagaagacccttatcacatcttaaatattttgagatgcagatgggtctgcaagggtacgaggtggcgtgcggtgtagaatgttccctgctacactttccaataatggtacttcaagctatcaccaggaagatttaatttgtggaaagccttcccctcaaaattccacgcacagttctcctcctcccgtcaactcccctcgcacctagaagacctggtcgaggtaaaacaagtgtcaagagaacccctaagagcctatataagtaggttcatgacaaaagctacaaaggtaaaggggttaactgaggagggaaggctg

SEQ ID NO: 55304 - DNA, 1001 bp, Cannabis sativa
ctttgattattgattctggagatgcctcgacagaaacttgattgtcgtgatcccaatggcgagttgaaatcattcttctgttcgagatcgacaacatacggcgatcgcgaatataaggaaatctactgacttgccagggttgcgagtctcgcttctgctagttggatgaaactataggaattttcctcttagtgagatggtcgtctcgcattcttatacttccaagcccgttcgacttttatacttagtctgcttatttgtgagccaaggtatgtgttattcttctctggggcctcgctattcttttttagccacatatggtttctcgttaatactctaagtactagttcgtacattaattcctcgcctaagactatacaatcagcgggttgcaaatagactctagtacttaaataattaatgagttattccataaaagatacggcaccgattcacattccctttatcttgacacgtgtcctccagcagaatttcaggtataacaattgccccttaaaaagttcttttttagtaaaaagagctttttaataattacggagggcatttttgcccaagtcctttcttagaaaggacacctcctttgattctagcggttgtgtggtttcgaagatctttatgaatcgcttcttcatcttttggctttgtgtataaaaggacggctcaagcttgtcatttttcacaaaccttctggctcttttgtgaaatccattttcagaatggattacttccttcctatcaaaatttcttttctgagtttagaagtttaactttccagactcataataaccggatgcaccaaccaattttcattcgttcctacagacttcaagcctcaactggagcatgaaatgatggattccaaggcttacaagcttccaaccaatccaaaccaggggaaccccgtgacctgccataaccaatcctcacaagtgatcccaaagagtatagatcttgtaagcgatctcaaagatcctcctcag

SEQ ID NO: 55305 - DNA, 1921 bp, Cannabis sativa
caaagaaccacccaaaaggaccaacaaaactactaccaacaagaagaagtcctcaaaccagcttaccatcgagccagccaagtctgtagagaaagagaatgaggtatttgctgcagggaatgctgtcgagcagccgactgggtcagtgcaccaggtgaaactctcaggttctcatctagagatggttctcctcgagccctcctatcccgtacccccgaggttgggactgaaggctcgcaactctcctcggagcatgctaccaacggtgggtgtaacatcttgactcttgggtccggcaactgggatcttctcatgcgaggcagttttaagaatctggctaagcagagttatgaacttctgcatcagattaattttcttttcttcttgttctcacttttcctcaatttatcatttttactaacttcgagttgccttctcctcggaggcttctcttctctcctctcctatgttgcccatcattggttgtctaagtaagttgaaatgctcaagactgagcttcaccagattagggagcatagggataccttagccaaaaagtagaatgactcgatggccgaggtttcttgcacaaaggaggaggcagaaaagcagcatctagctgactaaaagaagatcaaagaacttgaggattctctcaagtccctctaggttgatcatgacaaaaaacttaaggaaatggaggctgaaaccaaagacagggtcaacagcattggcaggaggaccatctaccaaatctggttgactaaccctaatttggattttagcttcttggtgataatgttgatgccatgcttgccttttgcgagaagacaatgaaataagagttgggcaaggaagaagaggtagaagtggaactagaagattcatccaagtatccttcaatgtaggcctggtttttaagttgcatttttttttatatatttatttaggaaaatggccatatggtcgagacaattgtttttcccttgtggcagttttgtaaagacaaatttgttttgttggatggccaactttactttttatcttatcttttatttattgccttgtatttctgcattcgaacttaatatatttgcttacttgcatttttactcataatttaagcaattatactttgatcacatttaaaatacttaaagcctttccattgctcttattttcctttgatattgtttaagtagttagtaatctactatgtgcgcgagcaatttttatctgcttatgctttcaatttgcgagcagttatcagttctgcttcgcgtaaacagttatcaaagtttgatggagggcttggttttcgaaaaatcaaagatgttaacagtgctcaaatgctcaagtgggtttggaagctaattttggagcctcctagcctatggagctcgattatgaaggataagtatttaaaaggacttaacttctttgatgttgagatgaaagtataaagaccacttagctttaatttggaaattagcaaataattaggatttgattatgaaacttgtatattagttatgaattatcaatttacggagatttatttgaattcagaatgctttttatatgttatatatggaatttcatatttttgcatgttttgtgctcagcaacattggaccgcggtgtttggctaatagaatcacatcttagtatttttagtatagtaaggaaatatagttagatattgggaatatcgggaatagtcgatattttagaattgacaaaaatacccctaagagatttttatgctttttagtgtaggaagggcaaaatggtcattttgcctaagtttatattttgtcctttagtggacattagtagaattattatgatgaatattagatgttattaaattaataaaaccattttattaacttcatttttacaaaataccaaaattagc

SEQ ID NO: 55306 - DNA, 1453 bp, Cannabis sativa
tagtagccataaggtcaaagaatccttctctagtttctctctttagaaattagagcatccagacttagctatttttctgtaatccatcttgtgagaaataaaacttgaagtagacgtaactccattaccgtcgcgacacggaaagtgaacaactataaattattgtctctctacttatacttaacttgtaattctcgctaatctagtgagcgggtgtgacccagagatctatccagattactgagtcaataagtgtcaagatcaatgtggatgcgtctctttttgagaaagacaaaggctcaatgtgagggtgattgctcgtgacgataaaggcctcatgttggaaggagttacaaaacttttccaatggacaatggaaccagctcttgctgaagccatgggagtaagggaagctttgagttggttgaatatgaaaaaatggcaacatgtgacagtgaagacttacaagcaatttgaagttttgttcgtatgatatctttgtttaattttgttattgaggactgtaaaaagcaacttattgatatgagtaatgtctcgttttgttttgttaaacgattaacaaatatggtagctcataaacttgttagagcttctattttatatcctgattgtaattttaatttagaaaatgtcccaactgatttgagtcctctattgagaggttgattctaattgttaaataaagctgactttcccattaaaaaaataaaataggacagtcagacaaggaaaaacgcttcctcaattcctttccaccaagaaaacaatataagtatattcatccaattatgcttttagcaaaggataaattgcggcataaatacctaatatttcagattttatacacttaaataccttatctttatttttggaggcaaaaatactcaatgttacaattctcttacatctgttactaccactcccgttaacacgtaaatatggacacgtgaagggttcagatgcattacatttatttttttttaattttaaaacttaatattcttaatatcagaaactaaatgctacttgtttaaaaaaaatcagttctcataataattttcacatgatattgacacttcaattcgataatcatgttccatatactgcactggttcactcagttatggtaatttggtattgcatctctcttattattattttttaaacaagtgtcatttagtttttgaaattaagaatattaaattttaaaataaaataaagggatatttcgacataaatactaatggcacgtttactaaagcataattgttatcggaataaattaatgagagaaatgaaagggaataaaatgttatgaaatcaaaatcattatttcgacatgttgtttactaaactgtccgaaaacggaatcagaatcattttattttgtttacatcaataaggaaaggtaatcagaatgctttaagttgac

SEQ ID NO: 55307 - DNA, 1098 bp, Cannabis sativa
gttctaataccttgtttttgtcaatttttgtaaactaccttttaattttgttgaaaaagagaaaacttaattgttccaatatatctttgctttttcatgttctacctttggattaaaacaattgattaacttttcttattatacgttgggctaatgggtctgaagagcaattatatctcaataaccaaatcatgttgtaaccacaataatttttctctttaatttaattattctctttttttcgtttatctgcaatgatttttctcttttgtcccaccccctttcttttcaatttatcttttatgcatgatttgtggatttgggatttagacactaagaacaacgaattaaattccttattattattatagttggtccaactcaagggaataagatcaaaaaattagaacaaaatcatattacagtgagataaaagttaatcaaacctgatagaataaggaggaaacacaagtcacactgagagaagcttgacggcgggataagcttgatgaagatatttagacttcaaagggaaatcggagcgaatgatctgtgaagaataagaagaagaaaataatttagggtaaaaaagaattcttagtttttttttttagggaaagaggagccaatgatctgtgaaaatgatgtattttcattattttttcctttaatctattgacacataatcttaaggtatacacatgtctaataaattacaggatgaaatgtcattttttatccacgtgtgacatctccttcctatgttggcagacatgtcatttttatttaattaaaaaataaaaaaaaatctaaaaaactattcaattgagcggcaacttgttttttttcataaaaatttgagcggaaatttttggctccaaatcaaaataacactcccacaattatatttgtatggaaagttaattagctacacatatattcatagaaagtaaatataactccacctggaaataattctcagtaagtttacctacagatattatgacgcataaattattggtatgtgaaacatatttttatgtacaaatatgtatttgtaggaaagatatttgtagataaaggtctgatttcttgtag

SEQ ID NO: 55308 - DNA, 891 bp, Cannabis sativa
ctaaccccattcttgagaagcgtatagcacgaatagggtagataagtacttaattcccttgggattgagttggggttggactgatgtggtaatagttggcaatctccttgaagtacggatgcaatggcaacattgcaccctgcttggcgtgaggacccgaccacgcatagtagccctctctaaggtccgttacaagtatcccaggagaaggaaggaaacactcaacctgcccaaggaggccatcctaaaaaatattggtcaatctcttgaatgttaggacggatggtggagaaacccattgaactccccttagacccctcctatttatggagtgagccttggtgtactcctcctctacgtagtcctagatagcttccaagaaatctcccgttttagaggtaggttctcccttatcattaaagccaccaaaaggcagcactcagactaccccctcttcctcctctccttcttctccttcagcctcagagggagtaccaggatggaccttgccttggtcctcaacttattggacctcaatgtctccatcagtaacattttcttcttcgaccgcaggtcaggcttgttccactccaactacagcaaacaaacgagcaatatgtgggccagatgttgaaggctttctagtggtctactttgttcgtgccatcattttatgtctgggcagaactttttcagtagtgtgcattgcaacagtcacagaaaacttgacaacaaaggttcccttagcagttggggttggacaaccctcgggaaagtgtcaacgacattatctttggattttgtatgtccattagcaggaagataatgcctccaacctttctttagttcctatatgaaacacctatgtccctcactaggtatttggtcggg

SEQ ID NO: 55309 - DNA, 699 bp, Cannabis sativa
agccctaaccgatttactaaaatcatgggatccagtgaaaaataagagtttaattagtcaactccaacgattaattaagaagcttctcattcgcaaaaattttgagaaagattaattagtcacattttgaagtcttagggttgcatagttcgtgagattgaacccatctatccacctgaaaatcagattcatgagtttgccatatttggaatgtaagtatataacataaacatatattatatatcatgtctatatatacttatggttaattactacttctttttcatgttctaatatgtatatatatagtttgaggagtaaaggaagatgatgtatttggatgtggatatccaataagtgttcgaaaacatagatcatctattaatttgacatggaagatgggtacttctacgctatatatgatggattgcttctgtgagaaaacatggagccactcactactccagttcaagctcggatattgccaacaatgccctgatactcgggtcaaatggcggtgccatcgatgaatgtgatggttgccataaggcctacagttacgctggagaatgtggttttaggacttgtttggcttgcaatgagaaaggtctcatcaaatgccatttctgctctagggtttccctgcaaaagccaattgaaggaggtctgagcgccgccgcgccggagatggtaggggtg

SEQ ID NO: 55310 - DNA, 1355 bp, Cannabis sativa
gttttcatgagggaaggacgattgaaggggcgaatggtaaacagacgcaggagaaggttaatggagggatgagagtcatcaggaatatcaggaagggtgaagacatcgctttcatctggagttagggacaaagggacatgagtggaggtgggaatcatagccatagctagaagagaaagcagaaaaaagtaggcaagaaaagagaataaggaagaagatacctggatccgtagcctaggattcaccttaaatagaaaaaaccagaaggtcctcagatcgacacctctccaatcacagatcatagccgcctcttctctaggagtaggtctcatcatggttagagatctttgagctgcacagtgaccatcatgcttccttgccgccataaatatgaagtaaaatggctctttgagaaatgggatgatttgatagccaaagattaggaagaaaaatgagggtgaagagggagaaaatggaggctgaagaggatttaagtgattagaagagtaattaatgtggtcagaggggaaagaaaaaacaaagcaaaaaagattgagaggatcaaaagcattaaagatgcatttaatgctctgaaagtaatcataatagggttggattaagggatcggggcaccataaaccaccacacaactccggtgggtggaccaaaaacccatttcgggtaccagagcaggaaacacacgcaggagtcttgaacattctagagagaaaaagcctttacatatgttctatgatgatgcaattaatattaattattattaggtcaacgccaaaaacaagttaaaggacttacataaatgtcggtaacctcgaacttacataaagattataagcaataacattctcagtgcaagtacaaaataaaaagttagacacattaaggcttctacaaatcaaactaatatcattcaaaattgaaccataagttgtcatacaaaaatccttcttactcaaaagcttcacaacaacttgacaatctaattcaacctttatattatggtaaggccaataacacaattgaagtgcaactaaaatagtcatcacttccactacctgtggagaaagtagccccactgttacagaagtcactgaagcaacatacatgcctttgtgatctctaataacgatcctattacatgataaaatattacatatataaggatatgattttatttcgtgattgtactttcacggaatgcattccatgatatacagcagtcgtcagatggggaatttatttgatctgacggctgagattgatttaggggtaattagggttaaaaagtagaaacgtaccctgacactcatttaatgtaccccgagacccatctaatg

SEQ ID NO: 55311 - DNA, 1144 bp, Cannabis sativa
ccttctcggcatcttcaaggctcttcttcatcctcttggcttctttggtgagacgagtaatttccagttaagcatcattccatttcttgaccatgacctcatgttggcctagtgaaatttggacctcgctctccaagtatttaatcttttctaagcctcgctgctgggcgacaaaatagatgaaagaagcctcgagattcacaaacgaaaatgtataaaaaaacaaggaggaaggagaagaaaaatacaagaagtgagtagattaggacaaagaaacttaccaagaggatatgagacaagcccctcgtaagcattccttccaaatccccatgattgattaaatcccaatcatggggaaggagagccttgaactggcgccaggaagcagctccaaactcctgggtgaattctgagccagtctttcctgcctcggcaggtagtgtttcaatggcttggctcaaagaggcagaggcgtgagttgctttaaggagagggtcgccggtacttgcaaagactagaggaggaatcggatcctggattttggcctcagggaccttgaggtaaacgctttgggaggccttcttcttgctactagtggttttcctcttcctttaaaggggctccacttcgacatctgaaggagcctccgaattggtcatcctcttcttccctttcctctacattaggtcctcgaagtgaatttttgcgagacaaggtaaaagtattagcattaattaaataccagtgaaaggggagtttagggtataattttccgcctaaggaatttaccgtagtcgctagaagatgaggtatcactagaagatggggtagaaggaacatagtatccactaaaatccctacaaccagtgatcttgaatatatcaaagggatcaactggttctaaatcccaactcgcgttcaggtgacttgccctatttgtcatggtcccatgttgctcggctataccgtagtacgactcattatagctaatttggacatggaatctgggataccaactatgaaagctatgttttatatgatctacgaggagggggtgccaaatataaaagttaaagcgactatcttggaatgtaactagagtgttacgctcagccctaaacaatgtgggtgaccaaccacattg

SEQ ID NO: 55312 - DNA, 1102 bp, Cannabis sativa
tgttagtaaatctagatcctgtaaaatattcccaacagagtttgccttggtgactgggcttaacatgttacatggacctactgagtttgaagttgaagagaaggcgatgtaagaccgtttgatagtagaatacttcaatggggatccatccaccaacattggtcggctgcgcagcgtctttgagagttgcactgagaaggatgatgtttacaagttgggtatggtgttatttgtgatgggtgttttgattggaaaagaggagaagaccctagttccgccatttatcatgagaatggttgacgaccttactttttctacgagtacccataggggaagattcctttcaacttgttaaaagaaacttggaataagaacttcgtagaaaagaagaagcatatggataggaagattgaaaagggaactactcaggagttgaagtactcagcttatggatatgctgtaacattgcagtattgggcttacgagtccatcttggagcttgttgagaaatttgtgataaaaaaatcgcatcgctttcccagaatggtgaactgggagagtaagcaggtgtcacttaacaagaatgaagtcataagattgtttgcgaaaaacgtaagttttttaattcattgtatttgttcacgtttatttatttatttcattttaatctaagtctaataatctttttattcttatttgcaattgacagtctactccattttatgttcgtggcctaatgagggggagtttttgagcaacgtcactggaggtgaggcgcctctatttgtggatatggaggaattggttgctggtagtgatggacaacctactcaggataatttgcgtagctaggcctcaaagcttgcacaaaccctagaacaacgagcggaggaagctagaatctttagagaggatacaccaccacactctcaaccattagcggccaattctattccaccgtctacatcgatgccccattctgcatctatgccgcagtcagcatctattcacaacacttcacaacctcaagaatcaatatcttttgccatattggcaagattggagagtgttgagagagacaacttgcttcaaagcaaggcca

SEQ ID NO: 55313 - DNA, 626 bp, Cannabis sativa
ataaataaatatcatgtcaaaaaaaatatatcattcaactactctggtagtatatatagctaagtaagtttcgcaatagtttacattttcctaatggtattgaagtccctagatgtggtcaaagtggaggtctcctatttctatggaaatctcatgtggcaatagctataaacaattactcaacaaatcacattgactgttttatagatgaccaagatggttcctcactgcactttacaggattctatggccacccaaataataatttatgctctcacacctggttattacttcgtcgatgttttgatgtagcacctctatctctttggcttgttatgggagattttaatgaagttcttaccaatgatgacaaaatagggggaccacctatatgtccagcccaaattaaagctttccaagacacaattactgcctgtgttttaacacctttgtcttttgatggagaggttatcacttggacaaataaaattcagggcgttggcaatgttcgagagagactagattaaggttttataaatgatcattgggctgatactttcgttacacctaccttgcaacatctggacttttatcattctgaccacagagctttgaaagctgtaatt

SEQ ID NO: 55314 - DNA, 1208 bp, Cannabis sativa
  modified_base (402)..(417): a, c, t, g, unknown or other
caaggccaatcttcacctttcaaacacaagactaatggctcaagacactctttatagctttgaatcacacaacataagtcaagtttagttagaaagaataaaaacataaatatattaattgtaataaaaataaaaataatgcactaaatattgataaaaaatattattatatatattttttttttcattttgcattgaaacgatatttctttctattttaaaatagaatagtcattgcctaaaataataaaaatcattccactagaatgacattacaatactttaaaatgcaaccaaacaaagaaatagaataaaaattatttccattctattttattaccttcaaccgaacgccatctagtgtcactaccataaacaattacttttagtgacaactttttnnnnnnnnnnnnnnnnttttgtgactaaatgtaacacttttggtcacagcaaaaaactacaaaaaactacttaaaactacttgtgactacttgtgactaaaacatattatttaaacataagttgtcactaatttactattagtcacaacaagtattgtgactaaaaccatatttagtcacaacaaattgtaatttttttaactaatacatttagccacggatcttttagtcacaacataagaatgctaattaataattagtcacaattttttttttacttttagtcacaaattttgttgtgaattaaaataagattttttgtagtgcgttttaggcctttgtttaaaggaaatgcaaaggtgacatttggttgaaagaaatgaaatagaattgaatagaaatgaaacaacttttattttatttatttttttggttttattctaaagtattggaatgttatttttattttagctatatttttataccttctgctatctaatggagtctctattatgtgagtttgagtttgagagagtagagttagaaagagtagacatatataaaactcatgcctatgaggagattaatattttacactattttaattaaaaaatgagactttcttggaaacacaattctattatcatttaaatttaatttaaattttatattctcattttcattaactctaaacctcatatgaaatgtcacataaaagtcactttaagacaccaaatataacaaaatacgatactattattgatgtattttaatgttataagcttttaaatattttaatttaataaa

SEQ ID NO: 55315 - DNA, 889 bp, Cannabis sativa
ttttgattatgaatcaattgcttgatcaaattttgtttgtgaaggttgttggctccccggacattccaagctagtattctatccatttgggttgggaggcattcctcctcctcttgtcttatctcaggttgctgctagtattcctgtgcactcattttctttaggttccctttgttcctgtaagagaatgaatgtgtttctagtcctggtgctatcagcctgtgtagtaccattagctttcggacccttatgaacttatttaaacccatcatcatctgcaagtcccactggtttcttccccttgtgactttcagcagctgtaacaggaagattcactctcacatcagtggttaaattcacaccagaattgttttctgctattgcacatccacctgtatcaactccagacatcacctcagtatcctctttcaattctccctttttgtttttcacaacccactgctgtttatgagcagatggtttcctccttcattcatctgtactatgtcccaaaccattgcaatttttgcaaatgattggtttccattcatatttaatcccaactgatgtaatacagcaatgctcatcttcaaacgcaatagtcgatggtagttcttattccatagaaacttcaacaagtattctagggaaagtgagtttttgcctcattagtgacttcatctaccattataggctctcctatctgccctataatcttgaacaaagtgttttggccccaatatttcagctccaggttttcgatttgaatccaaattgcaaccttaagaatatccctttttctgaaattagtatccggttcccatgctttcattatcagcggcctcttggaaccttaagaatatccctttcttatatcaacagtgagagg

SEQ ID NO: 55316 - DNA, 1840 bp, Cannabis sativa
gctataagtccttcttgaatgggagcctaaggatcacaaaaggttcaattgtgatgaaagaaaagaaagtacatgggttgtatgtatttgaggttgaaactgtacctgtggtcgaggtatgagggaattgcacagaagggagtcattgaaaagcttcagacatgtgcattaccattctgtgagacttgtgtttatggcaagcaacacaagatcaagtttacagcagctactcacaacacgaaggcgcagtcttagagtatgtgcatgctgacctttgggggccaagtagaatcccaacacatttgggtaaacgctacttcctatctattattgataatttcagtagatgtgtttggacctatttacttaagaccaaagatgagtgtctagaaccatttaagatctggaaacctcggatggaaaacaaaataaatttaaaggttacttagaatcgataatggtctagaattcatcaacactgagtttgatagattatgtaatgagcatgggataactaggcataggacagttttgatccacaatagaatggagttgctgagcgtatgaataaaacccttttgaataaagtgatgtgtttacttcttagtatgggattgggaaagccttattggggagaggctttcgctctcgtttgttaccttgttattaggggtcctaatagagtcatagacttgaagacaccttatgagatgtgttatgtgaagataccaaacctgaaacacttaagagtgtttggatgtacaacatatgcacatcaatccaatgataagcttgatgctagatctatcaaaggaaagttcctaggatatcctatagacacaaaaggtagaatctgcataaaccagaatggaaaacctgtggtgattatttctagaaatattgtgtttaatgaaaataattttcctcacttgaaaagtcgagaaggatagtgtgttacctgatgcaaattcatctagcaagagggaagatttgggagagtttgaaattacgcttaaaggattttaaccaagtcatgagaagcatgacagcacaaacacagctccaaatgagacttaggaaaaacaaaatttgtctgactaccagcttgttagagatagaataagaagagaattccatataccagcaaggtttgctgaaactgatctgattacgtatgctttatcaatagatcattcatgtacatggccagctataagcatgtgcaacctggtctattacacaaggcccaattcttcgctttcttttcatgttttgttttttttcttttattttaatgaaatgatactgtaaacaaaaaaaaaaaatagaaacaattattactttccactttttaagtaaaaaggttgttcccaatcccacatttaatggtaatccataaccattttgtcaaatttttcttattctattcatttatttttctctaaatgcatattttattcattccaatggtattgttttctatgttatatataattctttgcaattaactttcagcattccaaaagttaaaaattaagagaaaaaaattatgaataagaaaataattaggctattcttttgcacataaaaaacaacagtgggtgaatgagctttttcttttttgttggctctcttctcctagctcccaaagtctcaaagaaaagatgataattgataaatgaaggatgatcctttttaaaaagaaggttgatgttagcttacagttttaatgggatagataacaatttcaataaaataatttaaattttttgttgtttaattttgtaaattatataatcgtaacacaataatcactactacaaaaaggactattcccaac

SEQ ID NO: 55317 - DNA, 1079 bp, Cannabis sativa
ctcgtgatgccacgtcagagtgctaaattttggataccatatctaaacaactataaaataataaaaagacagttatgaatcaatagaaaaataacaagatatcaatcttgttaaaatatgtaaatcatttataaattaactctaaataaactagaataaattaaaaaatatatatactatttattaatgatgtaaaagataaaaaaaaaatataggagtgctcttaatttttttgtattttttgtaagagagagaaagaatattaaaaataatatggaaaaaagataaaaataaaagaatcatattgtaataaaagttaaagaaaaattaattaagataatttataaaatgtgattaattaaagaaaaatagtttaaaatagttacagtgagaatagtaagaaaatgaaaaagagagaaaaaaaaaataaactaagtgtttctatttaattcttttttaaaaaataataaaataaaatttgtgagagaatgcaaaagtgttaaaaaaaaaagagatataaaatgtacacttcttatgtataaagataaaaaaaaaaaaaaaaagagtttgagataaaaaaaaaagagtgaattagaaaaaaatgaaaagagaaatagagagaaaaaaacaagaaagaaaaaaataataaaataatatcagcaacttaattaaaaaaaaaaaaaaaaaaactcaaccaatgacatataaaaaagagaaaaggtattttttttttgaagctgtaataagtaaaaaataataaaatagaaaaaaattagattgaaaaaatataaatgtaaaattattttgccaaagtataaatataaaatttaaaaataaattggcaaaaggaaaaatggcactttctaaaaagaataactaaaaggttttttgaaattaacatcaaagagtaataatgctatttcaaagaagaaatttttagaaaataaaaatatgatattatggtatataagaattgagtaattatgatatatttttatttcggtgcacttttaatgggtattacccatgaatgggtaaaattagaaatttttgactttttatgcttaatttttctatct

SEQ ID NO: 55318 - DNA, 2049 bp, Cannabis sativa
ccctcttttcagatcgagacaaaaggatgctgactttaacttcattctggataacctgacttcgaaattacatggttggaaagctaagactctttcaaaagtgggaagagcgatgcttatcaaatcggtaggtctctctcttcctatgcatgctatgcaaactattaagctttccaaccgtcttgctacgaagattgacggcttggttcgtgacttctggtggggctctgagaagggtaatcatgggctgtacctaaaagcatgggacaagttgtgcctccccaagtctttaggggggttgggtttccggaaatcaaaagaaataaaccaggctttcttggctaaatgggggtggaaccttctgacaggaaaccaatccttatgctgtcggatcttggaagctaaatatcttaaaggcagaccctttttggattgcaatccgaaagcctcggactcgtggttttggaagaatgtgactaaatcaagagcaattattcgcaagggtgcctgtaagcgaataatggatggtaaggattctaatgtttggcatgacccttggatagcccataagaaaggcttcttaccccggccaagaggtcccttgctgaatgaggatttaaaagttgctgatctcctgctgcccaatgggggatgaaatatccaaatgcttaacagcttgtttgataatgagactatttcggctatcttgaaaggaggcaatccttcaggcataggagaggacaattggttctggaccttagaatctaatggttacttttctagcaaatcagcttatagggcccaagctgcagatcgagtgatttcttgtgaggtcgccccgtccttgtggaacaagctttggaacagtaaaatccctgagaggctcaaggttctttggtggtgtatcctctctaaggctctccctgtccgtgtggtcatagcaagaaaatttcctattgaggatgacaagtgccctttgtgcggagcagcagtcgaaaccatggagcatcttttcctgtcttgtgactttgcctctcacttatggaggtcaaccccttggggtatctaccctatttgtgatactggtattagaatgtgggattgggtcaagttcttatgggacctaaaaagcaaaggcattaatgctgaggaggctttcctttatgcttcaataattattgataagatttggcaaactcggaatgaaaaggtacacaacaacagttttgttgatatttttaaatgcattgacactattcgtttttcttttgcagatcaccaagcttacttactcccttgccccaagttgtgctcgtcggatgtttggcgtcctccccctcaggattggttgaaactgaactgcgacatcagagtcgggttggatagcatgtgtgcaggtgtggttgcaagagatcacgttggcaaggtgatctgggttactacttctaaactggagtttgctgatgctctgtgtggggaagcggcggcgtgctgtttagccttagaggcggctaggactctaggtttccattttattattgttgagagtgattcgagggtagtgatcaatgccctcaatgagaaagattcctgttgggagcttgcgaactatgtctctttttgtaacagaatctctccctcttttatcggttgtagttttgaacatgttagtagactttgtaattttgcggcccataatgtggccaagtgggcttttccccatcagaggtttggaactttgtctccgacttccttgcccgacaatcttttctgtaatgaccgacatgtctaactgtttttatgctaatatattgctttcttaaaaaaaaaaaaaacaaattgtggacatgtaaacataataagaatagtattagtgtcaattgcttgttgttcctaaagaaaagcttaaatatacatatgaattaattatcaagcctatgcaaaaaatatggtcgaacattctaattttttttttttttggaaaagtcgaagatataagaatatttttatttaaggaaatatatttctatttaaagaaataaatttcta

SEQ ID NO: 55319 - DNA, 662 bp, Cannabis sativa
  modified_base (237)..(246): a, c, t, g, unknown or other
ttatcatgtcttcatgtgggcttacagccatagagcttgtctctgaaccgcattgcatctgtgtttcatcttgcttattagcttcatgaacttttttgccctaactcaagaaaacttttgtgacttcttgagtttgacttttctttagacatagccgttctttaatctgttgagtactcctgatcggcatattttcttgtttatcacttgatactccgtccaacactcatcttgtgnnnnnnnnnntgtagatgaactcaggtgagtcttaggaactcgggcatcaaatcgaccaggatctgcttcaacttctgcacgaagatcatcctcgtcttcgtgctagtactccttctagtgaaggacattcttctgaccttgtacccagccatagaaggaaggctcgtacaaagaaaactacgcgtttggccgacgctattgatcctcaagtggctgggcttaccactcttcccgacgccgaacaggattcggccctcccaatggaggaggatcgtgagggggacgctgaggtccacgaagttgaggagctggacgaggtgcgtccgggcagtccttccgaggcgaagggagaggttgaacccctaaacttcggggagtacaaagaggctgggctgcaagtggatgctgacggagacgtcctggtt

SEQ ID NO: 55320 - DNA, 863 bp, Cannabis sativa
  modified_base (343)..(343): a, c, t, g, unknown or other
taataaatttaagcttttacagaaattaatttagatttttattaaattagtaagtgaataaataagcgtaatttattaattacagatatttatatagcatgtgttaatataatatgaattgtttgtggagtaaatatttttaggtttggggaccatggaggctcgatcgagggccaaaatgtcataacaagttaaattagtgactttgatgggaatatcatgataagtcgatagtatacatattgaggtaattagatgtatttggatttgacttaatgccctagaagtagagatttcttagtggctaagaaatagtaaaataatttttattattattattatnattattattattataatttataataaaacttatacttatcagtttaatatatatgttttaagtttataaaaatcaaaagaaaaagagaacgaaccccactctcttcgaccgcgacgaaaccctcactcccaccatctattttctttaattttcaaccaaaaattgagtgatttaattctgatagtaactggatagtgaacgattgaagagggagagcttaaggtaagaattggtttttgttttaagttgaaaatgtttggttctatatgttaactttgtgttttggaatagttgtggaatctgtgacttcatgattttatttttgggttgctacgagattaattacaatgtttacttgctgaatttgagatagttttgagatgataatagtgtttgagcttttaaagctcaaagctcaagctttaatgatatttttcgtttaaggactcgtttttaatttttttacgttgggactgttatatggatgatctatatttgtcttgtgaagtttggaatgatt

SEQ ID NO: 55321 - DNA, 1518 bp, Cannabis sativa
tgacttgggttcctcgtttactacatgatccacttgagctaaagctgagtaacatgagtaacatgaggctatatacattgttcttgtgatattgacattcatgtattcataattttataataaaaatgtaatacactaataactcgttaactctgttatgtagaatgcactaattttttctgattgggaagatcgtgtgggaatagtcaggtaattattaggtttcttttatttttgttcttagattttttgtttgtttgtactataattatgatttgtaataatattatgttgtttcataaactaagaatcttatgtttcataagggagaaaacaaagtttacattaatattatcaataaacatcaacattgtttttctatttattctatttaattatacatcaatattgtgcttatgttctagagatcatttcttaaattatctggtttgtcaaatagagtttgaatttggatatttgtaatatattttttttgttaatttatctttaaatttgattttagattacagaggattggaagaaaaaaatgaaaatggtaaagtaaattgaatttaatgcaaattgaagagcttcactaaaggattagaattattcaagccttgtaggtgatgttgctgaagccgaaggtcaccatcctgaccttcaccttgttggatagaactatgtcacaattgagatctaaacacatgcagttggtgagctttgtcattgatcaaactggcttaaattatgaagtttaattttgacttgttgttttttctttttttttttggggtttgaaacttttacgtgataaaaatcttttggctgtaaactttgggttctaaatgtgtttcaaatatgtgctgcttcagttacaatcatatagttctatgcttttgtttcagtttgtaatatgtttaatttagttatttgtttcgttgattttgattgcattattgttatgttatgttctttggtttttcaacacggtttaaagctttctctaggccttggatacgaagtggatctacttttggtttcttgtttttggttggtggtcttgaattttatataaactgtgttttcgatggttcttagcttgggttattctctttgtcttggacatctattgtctcaattttgttctcatcactcatcagcctatgcatatattatatcagtgttactaacttggcttatgagggtaggacttagatttatcttttttcttttccaaaagaaataaaaataaatctcattcttaagaggaatcattaatttgttttgttaacattcaatagtgatcaagatattcaggtattttatttttgcagtacttggtaactacatattggatcagtgttaattagctaggaaagagatcaaatccaattgtctctctttttaatttcgatgtatgacaattttttttaaaaaaatctcctaaaataaatgcatattagccccacaaatttatcgagagaaattctaacaatgttaagttttttatttccg

SEQ ID NO: 55322 - DNA, 1830 bp, Cannabis sativa
cattatatgctttagtgactcgcagataataataaatcaagtcttgggagagtaccaagtgaagggcttgaaaatggccaaatacttaaagaaagttcagaggaacttggaaaagttcgattacttcaaaatagaataaattccaagagagcaaaactctaatgcagatgccctagtaaaattgccatcttagtttaatcttgataagttggaactttgtcctggtggaggtactggacgagccaagtatatgtgaagaggaagatgtgacatgatagatgtgaggcctacatggatgacaccaatcatcaagtatctattgcatggagaacttcccatagataaaaccaaggcacaaaaactcttatattcgattcctcgctacacaatggtcgagggaaaataatacataagaggatattctatgcctctactgcgatgtgtgttaccaacagaagctaatgaaattatcagagaaattcatgaaggcttttgtgaagatcatgcaggttggcaaaggctgtttaaaaagataatctgtcaaggatattactggccaactatcaataaaaacacacacgagttcgttaagagatgcgacaaattccaacggttttcatatataccttgagtaccacctaccaagctgagaatgatgacctcaccatatccttttgcaatatggaggattgatttgattgggtctttacccacagggcgaggaggcgtaaaatatgctattgtggcagttaacttcttcacaaaatggatagaagtcgaaccactcgtatcaattacatgcaagaaggtgcttgatttcgttatcaagaacatcatttgtaggttgggtatttcaattaagatagtatctgacaatggtactcagtttgatggagagttattcactgagttctatgagaggaataaaataattaaaagcttcttgttagtatcgagacctcaagtaaatcggcaagtagaagctgttaataaaaccttgaaggatactatcaagaagaagttagacgccgccaaaggaagatgggttgacgagctggcacaagtgctctgggcccatagaaccatagaaaaaatagcaacgggacacactccattttcattagcatttggatcggaggcaatgttgcccgtagaagtgaacattgtgacccataggcatgaattttataatcaagaacttctgagtatgtccttagatctttatgaagaaaaatgcaccgagtcacaagtaattaaagctgcttatcaacaccatgtcactagatactttaataaaagagttcgaaagagactctttaaagtaggagatttagtgttaagacgtgtatttgcaagtacccgagatccagcagccagagtgtttaacccgaactgagaaggctagctcgtacatcattaaatctgtagttggaaccgaagtttacaaattagcttagattaatagcttgctaataaaaaatcactgaaacagtgagcatctacgaccttattaccagtagtttattacataataaatataccatataatttttatatgactttaattttattagtcaaaaaaactaaatcatgaggcataaataagaatccattagtaaaattacccataatatatataatgttagaataagtcaacaatgcgcctacaattttacccaattttctttatgaaatatttactatatataggggtgtgcaaaaagtcatccaatccaattccaaccaactgatctaattccaaccgatccaatagaatcggctatccaatcataattggatcggatcggatgtaaattttaaaaatccaat

SEQ ID NO: 55323 - DNA, 5689 bp, Cannabis sativa
tgttacattttggcaataaaacttttcaatcctttgaagacagtacttttaatttctatgtagttcatttcattgtagttgaaacttgaaagatgtgtgtttgtgtttatttaggtggcaaggcaactctgtgtgcaaatatctcctgaaaacttgcagctaccatcggatttgtcgactgtgggagagtatgaagtgccactccgattgccaaagtcaattcctttgcctgctggcaagattaactggacgcttaatgttaaagtcagaaccaaataaacagtgttctgcgtgttgatgatgcgtactttgtgttcgatgacaacttttgctttcatatttttttctttggaatttcttgtagcaagaaagtgagattcaagcaaccccatttgggttatgattttctcaacgagttggatattctgttttggtcttttctggttttggcaaatctgccaatctttctttctgaaggcatttgtagtagaaattgcttacttggttgatagactctttaatgacaaatgtaaattaaataaagattttttggggcctttttttttttttttatatatatatatagttttatttttgattgcccaaattacaataatctaatattctaatgtaggggcatttaatgtcggtgtattttgtgacttaatgtatgaaattaaacagatttacaaaaagttggtctcagaaggggagataaaagagagtttcagcaaattttcttagacaataaatttaacctttttttattttattggtgaaatggataataaatttagttaaaactctaacatttctattgggtttactatatatttaatactcttaagtcgactcaaaaaaatggcttctttcaataaaatggtcgatgaatgatgtcaaatatgttcagaaatgtaacatttcatagtgatttttttaaaaaactatattttttcactataagtttttaccttattgtgtgttttttttttggctaatatattgtgtttttatgttaattttaataggggtttgtatggattggtttagtctgaatttttaattttttcaaactaaagttgcattacattttcttaaaaatttaaaactaaactaaactaatccattcaaaatcgtattagtttgtaattcatgttttttttttacagtaattgtttagtttttggtaattttttactaagtcaatatcaatattccacttaaagttattcttaaatatatattttaatattttattcaaaaaatatctataaagtatacataaaataattatacctaaaactatggccgaacatgataattttaaaccgtccggattgaccaaatcattcacattgtttgatctcaaatgatttggtccgaattgattgggattcagaatcacgaattgcaaattatatgaacacccagttccaccaaaaaagataatttaagatattttgtaaaatatttaaaatttattttgacaatacaaatattaaaattagaccaataataatagtttgtgaaaaaatttaaaataaaattatgaatgggctgaaactttggtttgggtcataagcccacctacgactcgctgagttaactcaacaaacaagtgaaagcgttttctgattatctcttgctcactctcactcagactcagcccctcttgctttgctatactcaactaccaatcttccatgaaaaaccaaccgccttaactactctcccttccctccaatggcggcagcttcccgtgttctacctcctctctctttccattgcttcaggtactttctctctcttcttcttactttcctttaatgtctggttttctgaatagtttctctgattaagtttctggccttctagccatgtatagatacaaaagttacattttttacaggaaccctttattgaatatttgtttttgtttaaaaaatttgaagaagaataagaattataatactctttgactacttacttgagaattgagatagaaaagaagctttcttttttcctatctcttttatggtcttttgataatttgaattattgtattaggccccttttattggttatttgttttaatgttctttctcaaccatttaggaggaacaaagtttgtcaacacatggagtcacttcttatgctgaaagacacaaattcattatttaattctgttaaaaagtatagctttgatttgaagctctcttacatgaagcctgttcgagcttttgcttcattgggtcctgtagaaacaggttcagctccaaacaacagtcaaaggtgtgatttttaactatatttgctgtaagattattgagcttggtagatggcattttagatgtgtataactactgtatattcatgtcaataggtctagtaaatcttctgaaaggggtaacactgcggatggagaattgggatttgagagagagttacaggagttttttgatgaagttaaaatgatgattacaatgggaaacaaaaatgatgccgcggacctgcttcgagctaattatgaagctgtaaaggaaaggataaatgcaggtgccaggggcatggaagaagctgctttgattgacatcatagctctgggatatatggccttgggagacttgaaattcgtcggtacccttttgcgtatggtaagttattttcttcttcgtttcattgagtgttcataactagtaggcatataatgtatgaacatttcttattgtgagttataaaatcactaccctgtttatggaatttaacatatacaccttcatgtttttgaagtattcgggaaagaattgtccctgaatgtgttgttgacatgaaattgtagtacttatgagactattttatagtaattgggagtcttatgagcattgctataaggcactatggtgcttaacacctttatgaggtggtatccaataaatagttagcggttttttataatcattactaaaataaaataagtgggacgcgatatagaattgcaccagtagcgataagatacttcataaaggtgctaggcacccatggtgcctttttgcatttctcaatccttatctatcgctattattctctctgaccatcgatccagaaaatgtttcttactggtcaaatttgttggaagatcagttaattgaggtggtggacaatctaaaagatgatgaactgcttctggatcctgtacttgtgcatatgggaagtatgtactcaactttagggaagtttgacaaatcagtatccatgtatcaaagggccatcaatattatggagaaaaaatatggtatcctatttctctatctctccactttttacttttgctttcctttccaatgtgcaacagtctttctgattaagtacatatttggtaatttaatgtgggaatctgaaagtattagtaaatgctcaactgagtgttcttttcactaagccagctaagtggaggtcatgtttataaaaattcatattggggtgtgattaccctcaattctccttatatttgttaagtatgctgtcaaaatctgctgaaatctattaccacaataagaatgtgtgtcctgaattagaaggtggaagatacaatattactgttggttacttaactgaacatcctgtcatttgcttcttgttgatgaattccatcatctttttcgtggggatctgctgttttgttcttcaaccgttctagctaaaggggtcgtttcgattgatataacatgttgctttctggtgctgtttttaaattattgtgattgctttcagtgctatgctgtaatgtcaaatactcttttgtctgttttcttttcccttcaggcaaaaatagtgtttttctggtaacaccatttctaggcatggcaaaagctcttgcttctataggaaaagctacaagagcaatagaattttaccatcggtcaattactattttagaatcaagcagaggccctcaaagtgaggacttagttatacctttattcggtctcggtaatctgttactccaagaagggaaagctaaagattcagaaactccttttcttaggtgaattttcttttcttccttaatggatgggctacattgccttgagctcatgagtttcggtttgacccttttatcacttttcaagaatggtttctttctgtcacagaatcttggatatatatacaaagttgcatggaaaatatgatggaagagttggaatggctatgtgctcactagctcatgctaagtgtgctatgggtaatacacaaaatctctgtctctcttaagtttttaagccacacattgggccttctatcattagtcttgggacaatgaattaggatatatgtttatataagcatttatcttaaaaagcttcaaactttaacttcaagtggggttacacattataattcttatataggaaaagcggatgaagcaattcacttgtatagaaacgcgcttcagctcgtcaaagattcaaattttttagctttagatgacagtacagtggagaagatcagaatagatttggctgaattacttcatgttgttggaaggtaatgctagcttcataatcaaatttacaattatatttcaatgaagaatatttcgcttcgcttgttcacattgtagttctgattgtttgcagaggagaagaaggccgaaaacttctagaagaatgcttgataatcactgagaagagcaaagggaaagaacatccaagctcagtaacacacatgatcaatcttgctacttcccatttacgctcgaagaatttcgtggaggctgagcgtttactccggactagtatacaaatcatgtctaaaacagtcagttccaatgatcaatccatcacattcccaatgctgcatctcgcagtggctctataccatttgcaacgagatgaagaagccgaacagctcgcattggaggctttagacatccgcgaaaaggcatttgggaaagactctattccagttggtaagttaaatccatcttctttgctatccatttaaaaagtttccacatttttcccaatggggtattaggcattaaggcactaaagatcagatttttcttttgagtcttcccaattttagttcctttttatatggttttcttatttactatgatatgtgtgatttgtatggcagctgaggctctagattgtttggtttcaatccaaaataggttgatagaggatgatggagtgttgttggagaagctgaatagagtgttgagaatccaagagaaagagttgggttttgagagtgaggaggtttgggaaactttgaaaaagattgtgttttatttggacaaattaggaaggaaagatgagaagttatctattcaaaaaagattgtcaatgcttagaaagaaattcaagcaaagaattccatactaatatttatataaatatatatccagtcagatcaattcattttcttcttggttccatatttttggataacaactgctattgagttgagtcggtgatttattcttctcggactcttcaaacgatattgccaaaaattattattactgcgtagcatcttcttcgttgttatattattattaatgtaattaagtgtaaggtcttatataatttagggtaaatactatttggaccttctgttttgcaaaagttaccaattgaatcttgtgttttgttaaatgacaaaatggatcctgtatttt

SEQ ID NO: 55324 - DNA, 842 bp, Cannabis sativa
aagaagaaactcccggccacgcccaggcccgttgaacatgccattcgcataagggagtaacaaaacccaacaggttagtagatccagaataaacaatccaaatggatttgccattctctaaaaaacgtgattgaaaaacaaaagtgataccttcgttttaattgtctagaagtctaggatatctttcttgttgatgttccttctcatcacaatacaaacatagaagagtacgactgtccattgtttcaatatttgaacttgaagaagcagcattgttagaagcatcattcttacttactctcttcctctttcgcatgtctgcaaaactggatggtggcctccttgtaggaaatttccgttcataagctcgcaattctgcgtccagcttgtctaagtcagatgagttaaaattgttgataatgtaggatacaacaaatccattatacttgggtggaagactattaagaattaattgaacccattgttctcttgataaatcaattcctagcagatttgctttctggaatttcagactcatcataagtgtgaattaatgctcttaccaagagacattttcacatgatagagtttgtttgcaaatgcatgtagaaggtgagaggagggaggagggtagtccattttgacactacaaatatcaataaatagaaataaattatttggttcacttaaattcatacataagtttagaaaataacaattaagtaaacatgtttgcaaaaatatcaaattaaaacatattcaattattttccaaggtttccaataaactgacacagtgtcccgtttaagcgagagtcaagagtagtcaactaatctaaaatg

SEQ ID NO: 55325 - DNA, 1692 bp, Cannabis sativa
attcaaaaaggagatagtaacacaacttattttcatgccatgttgaagaagcggaatgaagaaaacaagatagtttcgtttattaccgagcaaggtaatttaaatgatcactttcctaatgtcatgcaacattttcttggccattttaaagccataatggggaaagctaagcccacctccatggagatacactctgattgcatagccatgggccccaaactcaacctcgatcaacaggttcatctcttaaaaccttttactctcaaagaagtcagagctgcgatgtgtagtatctctaatactaaatctcctcgccttgattgatttggtttggggttttttttaagtcagtttggcctgaggtggggaaggatatccacattgcgattactcattgttttgacactaatgagttcccggaagagcttcaaagtacaactctctctcttatcccaaagattgatggtccttctaaagctattgactaccggcccattgcctgctgcacaacgttatgcaaatgcgtttctaagtatatttgttcccggcttgctaatgctcttccttctttagtaagtcagaagcagggagcttttgtcaagggccgatcaattgcttacaatattcttatactttacgatgtattaaagaacaatcgaaggaagaattgttcccccatatgcactatcaaaatcgatataagtatatcttatgatacggttaattggaattttcttgaaaagcttctggtggcctattgcttccttgcttagtttgtcaagtggatcatgaattgtgtgagaaacacgccttgttctttactgctaaatggtagagttcaggggacttttaaaggtgagtaggggctaagaaaaggggatcccatctcgtccctcctctttgttctagtcatggagtatctgtcccgaagaatccaaaaagcagccagagaaaaggatttcaagtaccatcccttatgcaaaaaaatgaaactcaaaaatctttattttgcagatgatttagtgatcttttgtaaatgggaatgaggctctttaaatgctatcaaggtcatgcttgatgagtttagcaggacctcgggtctctccatcaatttcgctaaatctgaagtgtactttggtggaattgctcaacagattcctctcgctcaaaagataaatctttctatcggtgagttccctcttaagtatcttgggatccctctcaaaccaactaagtggagacttgatgattgtggttcgattttgaagaaaatgaaacttaagctccactctttaataagcatttatcctatgccggtcgagttcaattaatccaatctacattgattggattaaggaattattggatgagagtctttcttcttcctcagagtgtgattaaagagattgagaaattatatcaggctttcctttgggggttgaaagataatcgaactagagcccacttgataagttgggagagggtatgcctcacaaaagcctatggaggtcttgggtttaaggatggaacaaagtgaacaaagcttccttaacaagatttttatgggacatgatgaatagaaaagacatgctttaggttaagtggattaagtcgatttatctcaaagggagtgatgtttggtcttataagtttagcatggatacaagtcggtattggaggaagctttgtagg

SEQ ID NO: 55326 - DNA, 1452 bp, Cannabis sativa
gatttgacattattatcttttaattttcagattccttggaacatcaggtcagaatattgatgatcttgagaagtattcagaagcgaaggataaacttgagtttatggaaaggacattgaaatggaggcatctggcacctacagcacctaatactctcggtacaaattaacttgcatttttgtctctatgtaactttttgccaattggacctgtttgacttggaaaatttctttggttctctagccagttttttgcattattattttcccaagaacataaaaatgaaaacaggccaatcaatccaccttttcactgattgtagtagaatgtcataccatcccttgcaaaggctatgtcataagctattatttttatctttcagggtgttatcctttcactgatatggacccctttctgattgagagctgtcctcatgtttactttgttggtaatcaggacaagtatgacagtcgcttaataacgggtattctcttgtgcatttattattatattttcttacgctaaaatgtagaaatataatttatcttacatttgtatattgcttctgcttctcatttgattacctttttgactgtaggatctgaagggcaaatggttagactcatttccattcccaaattctgtgagacaggcgttgctgtagtggtaagctgttctatctttacagtattacccaaaactgtcgtagttattattaatttatttggtgtgaatcaactaaggcatgaaactatcatctattggcctcaatgtaaaatttattgcactacttttggctcttttgttcgtagtttacagtacatgtaggatctattatattgaattttatggacgagtcttttgtcacaatctgagattatggtcattttcgtttttttagctatttttattaagacctcaaatgatatatattttttttcgatttattattatttttcaatactaatgttagttttatcattctcaatctgtagctaaacatgagaaatctcgaatcccatgctctctctcttgggactcaattaatctcatgataccataccaaactacgatatggtaagttttgaaaatcaagtaatgcccttttaacaagtgatcatcaaaggagtaggcaaaatgaaaatattatatagtttaaaaatttattaaagtagtttgaaaaacgatctccagtgttgtaatgggttctcaaatattattcaattgatctggatttttcttggtaacttcaggccttagaagtagaaaaagtttcaaagttagattaaggaactggtgaatggtgatttgattggatgaatctatggagcatttgcttgccttgtcatctgaatatgttatttacaatactcggtattaagaggaggcttatgatgttgtattttcttaatttttgcttttgactgttaaggtactacgttgacatatttt

SEQ ID NO: 55327 - DNA, 1366 bp, Cannabis sativa
agcctatcttgcaaccaaacatccacttcctgaatcacttttgcccactgaacccaagtccttgaaagcagctctcacagacccaaaatggctacactctatgcaaactgaagtttttgcattgaaaaaagcagggacatggacccttgtacccaaacaacctgggatgcacattatagacaataaatgggtacataaaatcaagttaaaggctgatggttcattggatagatacaagtcgagattagtggcaaagggttacttacaggcacctggaatagactatgaggagactttttccccagttgttaagccagtcacagttcgaactgtgttgtctcttgcagtctcctcaaattggaaggtaacacagttagatgttagtaatgcttttttaaatggagaattaactgaaactgtgttcatgtctcaaccacctggcttcatagatgcttccaaacctgatcatgtttgtcttcttcataaagctctctatggcttgaaacaagctccaagagcttggaatgataaactcagaacaagtctagtacagtggggttttgttgcttccaaatctgacacatccttgtttgttcatggctcgggaaattctttaatcattttgcttgtgtatgtggatgatattctcatcacaggtcccaatcaaagcctcatctctacactcatcactgatcttaatcacaagttctctcttaaagaccttggtgaagttcattactttcttggcatagagattttcagagattcaacagggatgtttctctcacaaactaaatatgtcacggatttgcttgtaaaattacatatggagggtgccaaagtttgttccaatccgattagcaactcaactaaactctcactcaatgatggagagttattcgaagatcctactctctacaggagtacaataggggccctgcaatatctctctctcacgaggcctgatgtggcttttgttatcaataaactaagccagtttcttaaggctcctactgttcctcactgggaagcatgcaagagactccttcggtatcttaaagggactatttctgagggcttacttctcacaccagcaacagacatgactcttcaaagttattctgatgctgactgggccagttgtgtcgatgatcgacggtccactggtggctatgttgtctacctcggcaacaacttaatctcgtggtctgctaagaagcagaatgtcgttgcacgctcaagcactgagagcgagtttcgatcattggccaatactgcagctgaattgaaatggattgtgtctttactcacagaactacaggtccagttatctcagtgtccggttatctgggttgataaccagagt

SEQ ID NO: 55328 - DNA, 1163 bp, Cannabis sativa
atatacccacttttataaataatacccctattatactttttaggttaatgtaaattatgtgctagacttaagtagatggtgaaagtatattaggcaactcactcataaaagtaggtatatacattttaataaaatataatttaatgatatttttattaatgaataagaaaaaaagtatttttcaccttatcatttatttaagagctacataatctcataatacttttgggcatttggggtttgttattatttattaactatattatttcaaactcatcatcaaagtcgctttggccgagtggttaaggcgtgtgcctgctaagtacatggggtttccccgcgagagttcgaatctctcaggcgacgttcttttttgtattttatactttcgcaaccacatttttaagtatcacttccacaatacatgatattgaccaaactctcagatttattgggtgggaatgggatgaattcacagaagtggaagcatagctaaaaatgtagttatttcttgaaatgaaactctttgcaagtggataatgaactcttctagacttactaattgattccactttcaaatgaataatgatgttcaatttcagtcaatattttggcctcccatcataattttttttggtggatctggatgatgttaggatttaattccatttgagaatgagaagtggatcgtattcagatcaggtcactagaagagtcttctctctactgctggctcttctaagttggcattataactgagaggatatttatgttatgatcgagtggttggtggactactattccctggaattttaatgtgctaattattcgaaaatctcatctgtaatagagcaactaagtgaaaaatgataatgtcatatagtaattttatatatacactagttatctttctaaggttatgggtggaattaatgacacgtttaccttgcaacttttgttttggttgatttctcaggaggttgggtttagccttagatttgtgataggaactccttaatcaatgggggttactggatcggcccgttcgtttaagaaatgctttaatatgaagttaaaaggggtaagttgaaaaatacctcttttattaattaattaatcaaatttacctctaattttatatttatttgaaacatacctctttt

SEQ ID NO: 55329 - DNA, 1055 bp, Cannabis sativa
  modified_base (193)..(195): a, c, t, g, unknown or other
gaaattcattaaaaaaaaaaaaaagaagaaattaagttgtgaatttgaggcaatcgactatatatagggtaaataccattttgaaccatgcgttgcaaaagttaccaattggactctctgttttgttaaatgaaaaaatagacactacatttttcaagatggtacaaataggatcctgaattgattttttgtnnnaataaaatttaataataatccaatctaaaagtattatgacaaaaatatttatattttctatatatgttcatgttaggaattgtcttcaagttgattatattaaaaaaaaaattgtgtaaaattaagctcatggtcctatttttaccattttgaaatatatagggtccattttgtcatttaacaaactagagaatctaatcggtaacttttgaaaaaatacagagtccaaaatagtatttacccatatatatatagcctaagtcaactgttacattaaaaatgtatgtgggtcaaccggctagggttctacttatattttagaaggttcattctaaatataaagtccactttaatttatgtaaaaatatagctcgtgccaaattaatttatatttaatggtaaagttcaaatattcgtgccgaatttttacagaccgaaatataagtaccaaaatataagtatgattaatatagacccaaatttggtatttttagtctactatctaatgtttttgaagcatctttgatttatgttcgtcggtaagtttctcatgaattagttgtgcacgcacttaaagtggatgatgagctaattcggaggaaggattttccttcttttctttttgatgtactcaacgctgattttttttaataaaattttgttcattattctaaaaaatatatatgatattttatatatctaatttttttgtataatacatctaatttttcatatttaattaataaaaaaattgtatttaaataaaaaaaaaacccttaaataagaaataaatgatataatcttttaaggtgaactcacaattgtcaaatatccaactcatcacgtaaattgaaaaatac

SEQ ID NO: 55330 - DNA, 647 bp, Cannabis sativa
tttgtttctaccaatcaccataggcgaacccaagtacttgttataagtagctgctgatgtgagccccaatacgctcaaaaccccatcttgatccacttgttgcacattcagactaaaagtgatggcagacttctcaaagtcaatcttttgactagaggtagcgtcataagttagaaggatacgctttatagtttcagtatcacctttattagccctaccaaacacaaggctatcgtttgcaaagaataagtgagtaacacgtggccctgatctagaacatcaaaactccatcagttcaactctggcctctgcaagagagaataacgaagacaatgattccacacagaagagaaaaagataaggagataaaggacatccctgtcttaaccctctatcagaatcactcgacctttaagatgaccattgattaaaaaagtgtactctagggtcgtcacacaatccatgatattcctaacccaaccctcagcaaagccaaactggcgcatcatattggctaagaatctccattccacccggtcatatgttttactcatgtaaaacttgagtgccataaatccccttctcccattatttcttttaaatagtgaatgaagtagctcaaaactaaccataatgttgtcatgtat

SEQ ID NO: 55331 - DNA, 1118 bp, Cannabis sativa
  modified_base (157)..(158): a, c, t, g, unknown or other
  modified_base (1047)..(1055): a, c, t, g, unknown or other
accacaaccactacctctaccttcggtttactctaaaaaatgaggaaaaatgtgatcttttcaggttgatagttttaggtatgaaaaatagaagatttagaaataaaaatgagctaaaattgtaaaaaaaaaaaatggtgaaatgggagtgattttnngtggtggttggcgaagagggtttggggtttctttggtttgggggcttttggtttggctgatcgaatgaggaagacgaagggctgggctatggttataaacccttttggcatcgattatttccaaataaccaacgtcaaaagtggcgttaaatttccttctaaaaattttcaaccctatggcatcggttatttattattatactaaaaaaagtgcctctaaaggctaatttcgtagtagtgtttttgtgcacaagtacacccttcaaactctctcgccattgtgcgaaatcagttgattcatcaaagttctctagctcgaaccttgccatcaacatcctccttcaatctgttttcttgtagaattccttaatgaattgttgatgaattcttaatgagtgctagttgcgaaagcaagtgatctttgaatctcccttcatgatcgaagaaccaagttttgatttgtaagaaaatttagctctgatacataggaattaacctctgtaattcaagctttaagatcacacttagacaaacaaacgttaaatcaaaacaaacaaatcagtaacaaaaactatcaaacacgttaaagtagaaaaatatagcacaaatgaatctagatagcttccagacacaacaacacacaagatttatactggtttcgatcctaagttcaatgtgaacttggtaatgctccagtttgaaagtattgccaccaatctttattgataatgagaattagatatatcaagatcaagagctacaagaaaaataatcacagaaagtcatctatggagtaatccctcaacattcatcaactcactaacctgagccaatataatcaataatattgctcaaaacaatttctcaatcccaactctctctctctctnnnnnnnnntctctctctctctctcatatatatctctctctatctctcactctactgtggattgtctctcta

SEQ ID NO: 55332 - DNA, 880 bp, Cannabis sativa
gatttgagtcagttttggatcaagagagagtgaccatccgaattaggtaatgtgttattttaccaatgtatgttcactaaagagctttagttagatgttacgttgatagtgttggtggctaagagtttggtcagtattgtgagcttgttaggaggaattggttgtgagttaagctcattgtggggatttattatatttggaatcggatttgagtcagttttggacccaagagacagtgactatcctaataggttgtgtgttttgtgctttagtccctgatttggggacaacggttttgactaataaagaaaaagaatttcatatatttactatgtactcattgaattctatctagaaaatgtaattgactaaatgcttctgaaattatttatatagatatcaaagttgaatgcctgtgttctttacttaattgaagggagaataaaccaatgtgttcaagactctgtattactgatttcttctacaagtcatgaataatatattaatcaatgaaataagttctctccaacagctataaacattatagtttcaagaaattcaaatttaagatttggtagtaacaccttttacactcttggctttctgggtttttctttgagcttcgaatgtcttttcagagttgtaatgagtttgaagtactgggtgaaggactggatctgggttgtctttttggcagaaccaaaaatagatctaacatatagtttcttcaagcggattaaccatctttttgaaggtacaacaatttcaccctttcatggttttattaagtatattctaggttgttactggtggttttttttttttatcttattgttggttggtaatcgctggatgtttgtttatatttttctggaagtta

SEQ ID NO: 55333 - DNA, 1121 bp, Cannabis sativa
  modified_base (27)..(37): a, c, t, g, unknown or other
taattaataaataagttaaatgacaannnnnnnnnnnaattaattataattattaaattgacagatttgacattcataggattagaattaaaatatggcatttatgaaagaaaagataagttcttagataaatgacaaaattgaaacctgtagggcccacatgtagggccgaccacttaagggtttaatttattctattattttattctttttaattccatataatttaaatcttaaccctagatgaaatcttatataagaaagagatggctcttattttcataacctacatcagactactttgtcagacaactagaaaaatagagtccctctcgagaattttaaaatcctctcctttcttcttcttagaattttccaaccctatagcagagagagtacttgcccacacaattcaagtcaatacttaatcatagtgtggaagattatgaagaattccatcatctacgaagatccaggtttagatcttggtaatactttgcgatagaaaggaacaagggtttgagatctgacgaaatgagccattatattccgctgccaccaatgtaagattttctacaacttcatttgtgtttatttctttgttttataaaattcatatttagaatgtttgattatagaattataatcaacatacaagttagtaaatctagatcctagtaaaataagttccaacactcagtaccttgattttacctcttaggtgagggtgtcaagacgtcgcatttctttgaaccattccatcacgggcctcattcggaggtgatctccagaatgagatgtcttttgcagctgatgttatttacatatcgtcttctaactcgaagggtactcaagagaacacatacgatagatatgctagattaatgttcgagagaagagatcatttatcattaactaaagagagcgtgttaagagggttcgagccaaaatttattcagttttgagcggcgatcaatatgattttattgctgatttcggtgtgtacctttctcgacttagggtgtcacttgccaaagtttagagttacctaatattccttgagaatagcttcccacctgaacctgttgccccgtctcctaaacctgttgccatgtctcctg

SEQ ID NO: 55334 - DNA, 1479 bp, Cannabis sativa
tttgtttgagatctaatcttatgtggataagataaatatcctgcatctacgtagacaatgaactgtggtccacaattattagaatagaatagtcctttataaatagtacagtaccctaatgatagcaaagtatgtgcttaatccctgtaaaatgtctatatatttgagtagaactaaatctagctaacaaattgatagagaaagctatataaggtcttatgtagttaccaagatacattagagctcctattgcacttagttatggtacttcaggactaaggagcttgttaacgcagaaatctagacacagatgtctggccacatccgctcgctagattggcgagaatgtattttaagttaggtataaataagagagacacaacgatttatagcagttcactccctgcacttcaacaataatggagctacgtctacttcgagttttattttctcactagatggattatagaaaaatggctaagtttggatactctaatttctagagagagatgctctgaccatatgggaacttttttgaacttaaaaatgactttctgaagctctccttttatagggaaggaggtcctattaaaataataataaaatactccaagaaatatggaaaaataaatttaggctaatgttgaccgctgataatgatctaatagtgaaattgactccagagatcggtggtcaatttttaaagcttgatttgtgtctgcatgacctgcttcgggtaagttgtagcttaaattcgtaaaatcttgagagggaaatttagagttgataacatcaaaattgaaattagattgtgtggcatgacttgatagatcattgaaatattttcaaaacacaagttaaattgcgtcaattggatcactatcgagtgagttatggctattttactaaaggttgtcctcaacccaacgcctaggttaacatccagcacccaattttacatgcatagtcaacctggacattggctaagtaggaaaacgtgtcagggatatttttgattcctataagtgatatttggacaccacttagccagtttctttattttagtagtgaagttggttaccagctctcagagcaccttatttatataagtttcttgagaaagtgctaatattctccgctttctatctctatagattttaatgcccaaaaaaagagtgaaaaaaccaagtcgtcagaatctgactcgggatcagttgatagtggctgtttgacgggaccaagaggttgaaagagtggattgttggtttaaacctttgaagatcgagaagcagatgacgactcaacatattgtttaacccttgaaagtctctctttagtatcttctgcgctagacatgtacacctgagactataaaagtaaatcaagttagtaaagaaaattaaatatgaataataaaataaaacaatagtccccaacaacgtcgccaaaaatttaatgtgtgtcgtaagccacaacaaa

SEQ ID NO: 55335 - DNA, 1227 bp, Cannabis sativa
aaaaaacattctttgaacgtaatttttacaaaaaatggtgccttatgtaattattccttaattcaaatcattcaacactaatgttgcaattatattagataaagagtgattagtggatactaaaaatacgatctgtctcaataagagaggatcgcgccaaacaatgcgtattgttttacaaatcttaaagagatattaccaactttgacaatcaaagctttacattctgaaataatatgatcataaggagaagtcatgtttattactttataaatcttagataacattatatggttcattaagtatcttattttcaatgttgaagaaaagaggtctaccttttttttttatttatttaaacgtttatactcttttatggccacttgagctaacatcaagtgattaagaaagaaaatacgtgattgtggattccactttaactcttcttcaaactatttaatgctttttactagtaccaatattaataatgcacagaaaatatatatgattttttgttagcctaaggtaaaatcatatctttttatggtgtcgatacaatataatatattacagagtacatatataatgatataatacggagtagtacatatataattccaagctgattttgcatttcaattgtttgataattgaatttttcagttgtatttttgtagaaaatatattgaaatggtgtgtagagtatgttgtaataatataaaagatatttagtgctacacaacatactctttcatagttttacaatactctttttatttgcttgttttttagatagatcatttagttttttaaagtttatttattcgattgctaaataaaaataagaatttagttgattggtactttgctaccatcattgttgaaacaattttatttatttgagtattacttgtcaaaacgatacgtatacttgcataattttatattttttgtaatagatttcatttacttttgattcaagcgttgaaattagattgaaggggagagaagaaacaaagtgtgtgagagtgagagtttcagataccaatcccaaaagttatgttcttggagtactcgaattgaatattttggagttctttttgtaaaactcttgaagtgtgttcttagttagtgttgtaataatgatcctcaactaaataagaggaatatcaccttaagggaggtaacaggaagtaaaaattaccttttggcagatgctcgataaaa

SEQ ID NO: 55336 - DNA, 846 bp, Cannabis sativa
cttaatttacatatatagcatattaaatacctaaaaacaaaaaaaaaaatcatataaattagttaaacttaaaagtgtcatatttaaataaattacttttaaaatcccatagtgtaatttactcttttgtttatcaaataaaattctttttttaagagataggtttattgaataaaattctcattagaaatggctattttcaaaaatatgggaaaaattggtaaggttatgataaatattactaaaaaagtctagttattttgaatattgggcctgaatttaattgggtcaaataacagtctagtcttctttccacagagtctattgaaataaacctgtttgaagaaaggatgatttttttaggaaattacattacatattttttttaaaaaaaaattgacgcctttaatttttactatctcttctttacttctttttttaattattttaccaattttactcctatcacttcacgatagtcttcattcttctctaatcaaaattttgaccaaactttttcacaaacctacacatccatctctaaaaaatactaatgtattatatttgaaattatgtcttagttatatgagggtgtgaggataatttgggtacaatactcataaaaagaggtatatttgaattaaattttatttggaggtaaatgtagttaatgtatacaaaaaaaaaagtattcgtcaacttctcccatttttttagggttttttcaaaaatattggattttgggcaaaaatttacaattttactctcacacaaatttttttacaaaaaatactgtctttttataaaataaccgtaaaaaaccaaaacagaacaattaaaacaaca

SEQ ID NO: 55337 - DNA, 750 bp, Cannabis sativa
caagctattatcgatagggatttgatcagttttaagtttagggcatatttcaagtttgattaagttatttatcaagttgttgttgtcatgactatagcgcccaagatcgtcgaacaccattccactcaggttggcccgcacacctgactttagactaaggtaagaaaaatcaattgttatggtaattaccgttattaagaaaaagttattattctcatttggaaccgctgctagacttcttacttatcagctgcttcatcaggcaatgacagtgacattagaaacttgttggtaattaacgaatgtttaggatgctttataaagtatcaggattagcttgtctaattagacaaatagttgattacactgtgaatagttacttaaattatatgtttcaatgaatgttcattgttatttagtacattgttatatacatgatgtttgtgttttacctgcttttcttgttgagtctttgtgactcacgagtactttattataatgccctaatgcttaggcacgctacattgaatttttaattacagtgtacacatttgttaataaaagggttttctcgaatatcgtgacaaatttaaacttttgatttaactttaaacttttataaatgtatattatacaaaaagttgggatcccgcttttaaaacttatattttttttcaaaataaaatttacaaacatgtcgcacaacgactacaaaataaatcccatgtcgtcccgagaccaaactctcca

SEQ ID NO: 55338 - DNA, 1610 bp, Cannabis sativa
tgttgaagaaatggtagcaatttttttttacatataatagctcacaatattaaaaatagaattgtgagacgtcaattcacacgttctggtgaaactgttagttgacatttcaatatggtattaaatgttttgttacgtcttcatggtgtattgctaaaaaaacctatggtaattcgtgatgattgcactgatgaaaggtggaaatggtttaataattgtttgggggcgctagataggacatatattaaagttaatgtcttagctttagataggcctagatatagaaccagattgaacgaaattgctactaatgtattaggagtagtttcacaagatatgcaatttatttatgttttgcctagatgggagggttcagctgctgactctagagttttacgagatgctataaacatgaatagatttaaagttccacaaggtgaaattattttctcttttgttaattattatttattgatactcatcttaaataagatttctcacaattatatttgataaattgtaggatattattacttatgtgatgctgggtatcctattggtgaaggtttcttgacaccttatagaggacaacgctatcatttaaatgattggacattcatttgctaagaatgtagttgaaagagcatttgggttgttgaagggaagatgggcaattcttagaggtcgatcatactatcctgtaaaaattcagtgtcgcatcattctagcttgttgtcttcttcacaacttgattagaagagaaatgcatatggaccctttagagcacacagatcatgataatggcaatgatagagacgaagatggtgattatgcagataatgattgttacacatatattgaaccatcagatgcttggacaacttggagggataatttaactagagaattgtttgagcaatggcaagaaaatcgacgtttataaatcctattttgatagttttaagaataattactaattaaaacttactttttaaatgcttcttaatttttgtaaagagttgtaattgatattattttatttacgatgaattattttttagttgatcaagatatatgttaatgtttgttaaaatatctattttattttgttttatctttaattcttgataatgatttattaacttgtaggagatatcatggaagccacttctcaatcgacgccaattggtggaaaaaaacatcaatggacttccatagaagatttaaagttggtggaatgtttgatagaaatgtgtaacagcggaaggtggaaggctgataatggtacattcaagcctggatatcggcaacaaccttgaaaaaaatgatgaatgacagaattccaaattttggaattaaagcacaaccatacattaactctcgtctcaagatattaaagagacaatatacgacaatttctgatatgttgggaccttctgctagtgattttggttggagtgaggaactcaaatgtgtggtagctgataaaattgtgtttaatgagtgagttaaggttagttactatagaaaaaatttacttcattaattgtttaattaattattcattattttttttagtttaatgatatataattttgtagagtcatcca

SEQ ID NO: 55339 - DNA, 700 bp, Cannabis sativa
  modified_base (567)..(585): a, c, t, g, unknown or other
aaatcgttcaaataattatactattttaattattaattaaaataaaaaattaaaatattaaataaaattaatagtacgtagtttggcacgtaacgatcatctagtatatatatatataaatatatatatttaaatagcagctccctaagagaaacattctggttctcctctccctcatataaaaatattattgcaaggtgattaattaaaatttgtattctatatccacttggttgagttgaactattataataatataactgaaaataattgggaaacacttaaattcagggccggctctgagggtagacgggttaggcgtgtgcctcgggtcccgaacatttagggctccgaaattgtgaaaaaaaaatattaatatatagataaaatattaaataaaaagaaaatataacaaaaattaattggtgtagtagtaaaaggtcttattttaaattaaaagatcatgggatcaatttcccatctctactttttaatgttttaaaaaaatatttaatgtgtagttatgaaggattgaaccatagagagagtttctaaaatttttaccannnnnnnnnnnnnnnnnnntattattttcataatagttaaactatatatatagggcctcaaaatttaatttcaccttaggtccatatatcttagaatcggccctgctttttacacacatttcatacacataata

SEQ ID NO: 55340 - DNA, 1124 bp, Cannabis sativa
gggtccgacgtcctcgttgaccacactttcggctgggtcaagaatctgataccatttgtaacgtccttacttcaagtctctattgggtccttacacctacgaaagcatggctcttatacacgagtacatcagtttggctgctttatggactgacgactggccctacaaaccaacacaagtatttccagcgtgctttgtcctcactcgcacgcttcttgagaaaactttccaggaggtcacccatcctaaaattaccccaggtcaagcacgcttaaccatggagttctttcatgataggctaccgaaaaataaggttgattgtgacagtaagtagtcttgtgatccgtaagaaaaaaatattaggtaagctgtgcaatcccacaccgtctgagaaaagtcaagtgggatgacaatttgaaacaataacttcactttatatatataaatagatgacttctgataattaatacgcctaaatctctgcttagtcatattttctatgcctaaatctgaaggttggtcttttctttctttctttcttttatttattttttgttcgtgtattatgttcgcagcacaacaactacttaatagtagtcttatggtttagagctaatatatttatatataaatagttgacttgtgataatttaaataatatatattcaatgttttttttttgtttgatttcaagtcctgtatttatttatataaaatatattagcattggcctgcctattgtatatatgaactgagaggaacaaagaagagaacaaagaagagaacaacgaaaataaaaataatttgttttaaagtggataaaagtgaaagtaaaatcattttatttattaaatcatataatataaaaatattaaaatcatataaaatatttgaatgaggggtaatctagtcatactaaaaatttaagtctactaaattcaaagaaatggtactaaatttgtaggatttgtaaataaagagtactaattattgatcattattagaaatataaagtattaagtttgtattttgaaaaaacacagggtactaaatagttatttatcgcttaattaaatttattttagaagaggtaggatagtctatttttttgtaaaaaaaaaaaa

SEQ ID NO: 55341 - DNA, 1580 bp, Cannabis sativa
ccttggttaaactgattgtttaacacggtccacatttcagctgcagtatcaaaatacatgatactacttttgatttcaggggaaatcgaatgtattatccatgacattacaagttgattacatcgaatccaagaatcaagaagggaatcattttcaggaggttgagggagggtaccttcgagaaatggtgtcttgtttcttgctccaatggagagcttgaagtcccttttccaaggttgaaagttcttgtcagaaagcaccggagtaaccagagataattcgggatgatcagaggtgctgatgtagtatggtaatcgaatgtcttcataggctggtctgtcggcttgatgagggcgatgaacagcagatggagtgggaagattcgatcgaattgtgttgtcagcggaatgatttggtggaggatgaggagccattggagcttcgactctggaaggttcatcagagattgtagcagaactggtggcccgagttctcaccatgatcgtgaatgagagatcttgagatcttgaatcttgaagctggaagttgaatgcttagagcttcagagttgttacaactgataccatattagaaatagaacactaatgacagagggtttgtaaagaaaagtttattgaaatgtgaattgtaaaattacatggagagaatgcaattatttataggcaaaagccaatagtagttataattgaaaataacagaaataacagaaaataagctaactaacaaactgaaaatatcctaactctaagaataagcccgtagaagcttcaaagcacaccccacaatcacctcaccattgtgatttctaatcacaacccctatatcaataaccttactttcaatttacaaagttgcatccgcatttagtttaagttcaccttgtgttggaggtattcatctaaaatcagtcttctgagtgttcctttgcctcataatcatcccatatattaattgagcatttttatactcattcaaataatcagcaatccattgacaggcttcttgggctggtacaatatgtttcccaaagagttttacatccctattgttccaaatcatccaaagaaagcctagtagaatcttacaatcagaattggttagagtatcataatcattcaatgaaaaatctctaatacccataagcttattattctcataaaaactaagataaggagattgtttctgtattttcctagctctggaacaatcaagtagagcatgagtcacattttagttagcttgataataatgagagcaaattggactagaaagaactttacaattatacaaattcaaagttgcgggaaggagatagtaaaatattctccaaacaaaatattttattttagggggtattttagtcttccagacaaatgaccactatttcttcatataatctgaagtagagcttgaagagggaattgaactagtctttaccaaatgataggcagatttaattgtgaaattttctgaagggttatgagcccaaatcacagagtctggtttagatatatcatacaaaggtaatgtacgaatttcaaaagcaatatcatcatgaa

SEQ ID NO: 55342 - DNA, 2088 bp, Cannabis sativa
tttttttttttataattgttagtaacagtatataattttacttttttaagactaataaagatagcttttagccatgagtttttaacatattatcaagtgataccttttaggtgcaaaaaaattaattttgtttatttatcattattttattgctatattttttaaaatatatattttttcaccttctacaaatttttcgtaaaaataaataataataataataataacaataataataacataactaaattttaaaataacactaaaaaacaaaattgacccatgtagtctgtgacacaaataaaaaaaaacagttaatggttactatcattatttttttcatgtacgaaagtatactttttcaaaaaaaaaattatacttttcaaaaaaagaaaaaatgaaagaaaatataatatgatcatttattggcttggtgacaagacaacacagcatagttagttttttcactttttatttaatactacagatcatttacacacagaaaatagctactaatatttccccaaaaaaaaaattaacaaataatttttttcacttttagtgacttaattttttttattttttattttttaaaatatagaggtgatatgtataatgtatgatagtataagatagcaagaagagcgagaaattcgacacttctatgtgttaatattattattagtctaattaagtatcgggtctcatataatttaatgtaataagttttaaagaatatcactaatcaatcgcaagacgacacgtctagaaagtactaaattgtacttaatagcggccgaaaaagaggtatgaggttaccttggccacaacagcatcagcagaaggaacttgttgaaacatgtcacccccaacatgagtgacaccaggataagctggagcagtggaaatcacatgaggcctatcaaaattaatccctttaatatgaggatatgatttcactatttctgaaataaatctcccagtcccaccaccaacatcaaccacagatccaatcccattgaaaagatcatcaccacaatgactcaataatgtccttattgtaattcgcgccgtgcacgccatcgcgttgttaagcaatttattgtacagaggatttttcgcagcgaaatcaaactgcaggcacccgagttctttctctaacggagcgagtccaccttctctgatgaactcgctcagtttgtgccatgggtttgcgtgccacgggtggttttcactgattaacatgggagccagtgtcatgattgaggcatctgagtcagatgttggagctggctcgtggaggagccagctcgagagctttgtgggcccgtaaagggtttcacctgacactttgtcttcttgggaagtgaaaattttgcgacggacgagtagacgcaggactctgaagaggtgtgacgcttgtggggacggcgcgtcagggattgcggcagcgatttctgagagtgtcattgggccgtctgcagagtggaggatgtcggggagtctgagctccacggcgcattttagcgccatggagtctccgaagttgagcatgtatttccagatctctgcttgatcttggaaacttgcttcgttgtctattgctagtattgctcctttcactgcagcagccattgttttttctttcccctctctctctaggaataagcactctttgttttttctctatttgttatggtttgcatgcatgtatttatagatctcgttagtgtgttcctttatttatttttaattaataatatatacacatctcaactgaataaactacctttcgctatggaagaaagaaaaattacatagttagtgagtattgttattggacgccagtggtgtctagtactttttagacgtgtcactttacgattgattagcgatactctctaaaagttattatattaaagtatatgaaactcgagacgtagttagaccaataacaatattgacacgtaaaaaaatactaagcactattatagtactttttaacatttcttttatttggcacttgtatctagagatggaaatttataccgcggggatgggtaaccgcggggatccgcccctaatggg

SEQ ID NO: 55343 - DNA, 961 bp, Cannabis sativa
ggaagggagagaaaccctagtttgcaagtgtgtgaaagaaaccctcccaccctcgaattcgaatcaataggctaaagaatcgagctccaattctgcaggaaaaagaagaagaaagaagaaagaagaagaggaagaaaaagaaaaaaaaaaaagtaaaaaaaaattaattttttatttttttttaaattaaaaaaagtaaaaagaaaaaaaaatctgatttttaatttttttaaatattaattaatttgagttataatttctctaagcgctgaaaaatagaattgtttatttatactgatataaaccaaagtgatataagcgctgaagatataattaattgtataattataaaccattataatagttaaaatagtattttatttgttttcattttttttaaataacttatgattaaaatagttaattgcatgaatataaaatacaaacaggcatgtaagtaatttttgatataataaattattaatttaagttataatttctctaagcactgaaaatagaattgcttatactgatataaaccaaagtggtgtctactccatagtgtagaatcttttcaaaattattatcgtataatatattgcagaaattttgtagtagggtaaccaattggtttcaccaatagacgtgtttgtttttataaggattaatactattttggatattgagttttgcaaaagttattgattagactatctgttttctaaaatgataaattagaccttgtatttttgaaaattatacaaaatagtaccctaagctcaattttcaataatttttttttaatacaactagttttaagataatttctagcatgaaccgatgtaaaaaatgtactcagttttgtcataacaactctaaatcgagttatcatgaatttttatttggattaaaaattaattcaggacactattttgtgtcattttgaaaaatacaaggtcca

SEQ ID NO: 55344 - DNA, 1413 bp, Cannabis sativa
accacatcataaaaatgcagtgtgagcgaagagcagagccaacataaaatattaggagggcaactaattgtgggattatttcaaatatacacaaaaataacaaaaaaaaaatacaaaaatacagttgtatggaattttaaatatttttacgatttttaagattttatttacagaaaatacgatttttttgatattttcatgttatttttatattatactcttaatattgtattttttttaatttatatattattttgatgtagtttttatattatttttatataattttcttattgttcttatagaagactgtacaaatatatatataaaaaaaatatttaaaagtaaaagtctaaaaaatttattaaaaatagtaagttatataagtttctcaataattatttgcaacatatattagacatttaaacttaaatgctacaaaatgaaatattatacgctaaataaaaataaatttataataacatcataaattatgtataaaaaactaagataattctcctaattttttgccttaaaattttaattttgaacactaaaaacatgagcatgtatgtatacacatacatagatagagaaacacaatatattattattcttttaaatgaataaaaataatatttggatttgtacaaaacaacaaacataacattaatcacaaggtacaatttgtaaaagttctaaattttgataattaaatctaaatacttcttttcatttgcctatttcattgcatttacttatatatatttgtaattaggtcattaacacagttctataaaattgattttggtccatttattctaaaaaacctaatttaacttttatttagagaaacaataattcactaccctacattgaaagaaataaattcaccacaaaagaaattataaaataataagagtattttcaatggagacaattttcataattgacaaaatacacacatcattctaaaatatatatttttttattttctcttccatataagattccacatcttttcttacaaaaattactctaatagtgagcaacttcaaaaattgctcaacatggtcccacatatcactttttaattaaattttataattatatatattctctcactaaattgattagtgattaagtaactttttttcaaaaaatataaaaagaattaaataatgtcacatggtcattactcattttggacaataatattcataaagttaatttaaaatattgactaaatgcacatgtggcaaagaccactctatgtaaaacctccattgaatatgctctaagtatattcttaaaagttagaaagaaaatataagggaattttgcggcaaaagtccccaaaaagttcacggtgatacagattagtccccaagctccaaaaatagcggcaatagt

SEQ ID NO: 55345 - DNA, 948 bp, Cannabis sativa
  modified_base (496)..(500): a, c, t, g, unknown or other
ttgtgccacgactcttcaactaaacaagataagggtcttgacgaaaccccattccttcattacaagcaaacataaggctctcctcaagaaagagtcgcttttttcccataaaaggagagtcactccttccccataaaggaagagttgttgtcaccattttggccaattgacattatcactatcttagctaagtgacattgtcgcctctagagatggaagctacaggaggaaacaagcaccttgagatatgatgaggaatttcaaaaggaatcaacgacgcgcctaagaaaggacaaattagagagtacgaccacgacacctacaaaagctgatataaagtagtggcggaggtgtgcttgtgttagtatcacctgacactcgaccaacaatgtctccattccactaccacccgtcatcataatagtagggaaactttaatttctatgcatttattggattaaattatttacataaacttaagttaacccatattggnnnnntaggctaacatttcataaaactcaattctacccctcccatttcaaacacctgaccatctctcttcctccattctctctctcgctctttgaactcaccccaaggactcgacccacagcccaccacccacaacctcagtaccttctttccacaaccaccgctaccatagacccaacaacccacagacccaatgacttttccgtcaaccacgacttctccatcgacaatgttgtcaaaggaatatattatataattaatgtttgttatctgtgagttgatgttagatttagggtaaaaatggtcggatctgagttttgggtagaaaattggttttttgtcaggcccgatggttgtccaatggtggcctgatgccttcctgctattaaaatgagtaaatgttgaagacgaaggtccgatggtagctcgatgccacctataaatgtaggatat

SEQ ID NO: 55346 - DNA, 1076 bp, Cannabis sativa
tcctaatgctgaggtgaattttataaatgaagagatgatggatcacacaccagctgtcatgacattctatgatatggctcctagtggtaagaaaccatttcgatatttcaaaatgtggagcactcatccggacttcagcacagcagtagcaacctcctggaatcaacaaacttaggggcataaaatgtatcaagtactgactaaactcaagagattgaaaggggtactaagggagctgaacaaacgagctttctcggatatacagatggcgaatgagaaggccaaatacctgctaaatcagattcaaagtagaatacaacagacccgctaaaccagaatttgttgcaggaggagttagcagcccgaaaaaactacattgcttcctcaaaaaaattatcaatcctatcttcatcaaaaagcaaaagtgacttggctcaaaagtggagatgaaaacacaactattttttcatgcaagtattaaagcaaggagaaggcaaaatagagtgttatcaatacagaatcatgagggggaaagattaacagaagaaacaaagatatcagaagctttcttggcatattataaagggctgctaggcaatacaatgcaagggagaagacatgttttatcaagcttggtacacccgggggctgttgtatctgatcagcatgctaattggttgtgccaggaattttcatgtgataaaatcaaagctgctatttttgcaataccaggagtcaaagcaccaggtccggacgggtactcaagtttttttttcaggattcttgggaactcattaaggaagatttatgtgctctagtccagaatttcttgcattcggggcagatattgaaggagatcaactccattgtgcttacactcattccaaaagtgaaatgtccaaacactgtaaatgactttagacctattgcttgctgcaatgtcatatacaaagttgcaactaaattgatctgttttagattgaaacatgttcttcctgagttagtgccacagaaccagggggatttgtacagggaagattcatagcgcaaaattttatgatttgtcaagatctaat

SEQ ID NO: 55347 - DNA, 1084 bp, Cannabis sativa
tgaagcggggacgttacattaatgcttctccagactacaactcctttaccaagagtaaatattgatccaaatgttgacttttgactatcgttttctgattgaaaatcataatcaatatttctagtagtatttaactctccaccagaatatacaagcatgagatctctcgttcttcgaagatacttgagaatgtgcttcacaactatccagtgttccaaacctggattagattgataatgattaaaaatccctacagcgtagcatatgtcaggccttgtacacaaaattgcatgcatcaacctcacaactgctgatgcataagggtactttctcatgtcctcttcgttttgaggagtctttggacattgatccttacatagagtaactccatgtctagacggtaattgtcctttcttggaatttttcattgagaatctttcgagtaccttattaatataagtttttttgaaaaagtgctaatgttctccactttctagctttatagattttgatcctaagagcgtagcttgcttctcacaaattcttcatttggaatttatcggctaaccacttctttatatctgataacttctctacattgtttccaataagtagaatatcatcaatataaagaattaggaatactactacattacctttaatgtatttgtatatacaagcttcgtcttcattttattcgaagccatactctttcatagttttattaaaggtgatattctaagatctagaggcttgcttcaaccaataaatgaatttaagaaacttccatactttttgatccttggtaacacatacccttatggttgttccatataaatgacttcatcaaaattgacatttacaaaatcattcttgacgtccattttccatatctcataatcataagtggcagctatggaaagaataatgtgaatggatataagtattgtcacatgagagaaggtttcgtcatagtcgacgccttcgcgtgtagcctttagcgtagctttaaaggtctctactttcccttcagtatttctcttcttcttaaaaatccacttacacctaatgggtgtaatatcct

SEQ ID NO: 55348 - DNA, 953 bp, Cannabis sativa
ttctgcttatgattccatattcatctagtttttcatagtaaacgagagttatgaactcagagaagtcaaattcaaaacttcatattttccctttttgtgcaaagtgagtggcaaattaggtagtttcgagcctcccgattccacgaaacagcaacatcttcgagaattggtgaacggcttcaccaaaactaaaactaaatgatgtcaaaatataccttaagcatcaaaaattacatcctcaacacgtttttcccttggcccagcatctaggttgacgtcatatatcaacttaggcactagatgtcaacctaggacctggtattagagcaacttttagtaaatggccataactcactcaataatgatccaattaacaaaattcaacttatattttaaagctatttcaattctctatcaagtcatgtatcacactctaatcacaatcctgaagatatcaagtccaaatttcatcctcaatggagttatgaatatcaactacaacttacccaaaacgggtcccacagacacaattcaagctctaaaaattgacgactgacctctggattcaatttcatcgttatatcatcatcaatggtcaaaaatatcttaaatgtatttttttttttcaaattttgttattattttaaggaccttcgtccctataaaaagagagctcatctagctcatttttcacattcaaaaaagtactcataaggtcagagcatctctctcttgtttctctctctagaatttagagcttttagacttagccaattttcttgtaatcattctcctgagaataaaaacttgaagtagacatagctccattattgtcgcaacacagggagtcaactactttaaattcttgtgtgtgctctctattgttacttataactttcatctcttctatacatacgagtgagttggccagttttctacataaatattttggt

SEQ ID NO: 55349 - DNA, 2960 bp, Cannabis sativa
ttattattattattaggataaatactattttgaactctatattttgtaaaaattaccgattaaactctctattttatcaaatgacaagttaaatcctgtattttttaaaatagtacaaaataattgaatcattatactattttatactattttagaaaatacatagtccaatttattattttacaaaataaatggtctaatcaataatttttacaaaatgcaaagataaaaatgacacccctattattattatcaaaattcattatttaaaaaataaatgaataagaataagaaaaagaaaaaaaacagagaattgaacccaaaacaaaaaaaaaaacaactgaatttctttggctgtttagaaaaaacttttgaattttttagttttacatttggtagaaaccaagaccccaagaggtggtttcttgaaagtaagagtacactgaccatgcatatgataagagtaacgcaaatggtgacgccaaagcttactctgacacaaaaacctcccttttacttcaaacaaaatcttatctttcaacatctcattcttcagtctctgaatctcaagctcaaaaagctggaccttactagccaacatatcaacctcaacggacccagtcccacctttggccacagaaaaagcaggttcaacatttttagtagctataatggtttggccaaaataaagctcgaccactatgtgtttgaagtccacagcagccttcttgtttgggtttgtaaaatttgtaaaaagagtgatgttaacatttagaagattacccttttcgagattaagcttgttgagcttagtgagagttgaaactaccccgaatcgtggaccccagtgactgagaagggggtagaagatcaggagtgaaaaggctgcaagtgtcatgagaatcacggctgtgaagactgtgcaggagtagaatttgtggcgtttgaggagatccagttggctaggctcttcttcttctagagacattacatgatatgatatgatatcaaatcatttgggatttttatttatggaaattttgattcagaaagggagagtactatgatatcattattgaagaaaacttcatggaaaagtatcagacagacatggctaagcagaggaggcaaagtaatattcctttggtcttgcttccctactttttttatcatttactaatctctctctgctctgttattatatatatatatatatatatttcaataaagagaaataatcctttacgcttataaggggatgaatcagatgctagatcattttaagtcttaagtctgtcaaagttagataaagcacaaattagtttaaaattaaaaaaatgaatgaatctctttctatttttaaacgtggcttaatctaagtaatgtatcaaattttaatagatgatactcttattttttaactagtaaatggtacatatttataggcagagttaacaaaggaacagtaaataacttaaaattatgtgatgtcattattgtcataaagtttagtttgaaaacagattttttttttttttgcttgtattaatatattttatattattttgtcttatacacagtaacacagattctatgtaaaaatatataaatattaatctatttatagaatacgagttattccaactcattgttcacttatttattttgtgataaaactgcatgattcttcttaacatgatatcgatgtagttctataatgagtatatccaagaattatgtcatttatatgaaccgataatattgaacatttaaggtgagagaacaataaatgaataaattaaattagccaccatcttcttgtttgtttaaatacttgaaaaattagcaatcaaagttaaacagtactaatcagaagtaacttttcataatatcttctaaccatctatatatatatatatataatttggaaggaacgaagtgtttgattcgtatccactttcgcttttgttatatgttatttccattaatcaaagtcaaaaaaacaacacaaatttttcatcaagatgtattctcactttcttgatcatcatcatcatatatggctttcaatagcttttggttcaattagacctcaaaaaaataaattgtaaaaaaaaaaaaaaaatctgggcgcattttgtgtatacatgtcaaataacaaagatcagtgctttgatttgcatttctttgcaaccataaccccattaggaggtctggtcaccatgatagtacatcgaccatgcaaccaataagagtacctcaaaagaccaccaaagctagatcttgctctgaagaatccttttacttcaaacaaaacaccattgttcatcaactgtctcttaaatctttgtatttcgagctcagaaagccgaacttgactagtcacagcatgaaggtctaacaatttagtctcagccttaggtgcagagaaaggctcaatagattgagtagcaataagactccttccgtaataaagttcaatgtacatatagctgtagtgaatgtccactttcctatttggatttgtgaagtttgctagaaatgttagatcagcattgagtaggtaacccatgtcgagatatgctgcgtttagtgttgctgctgacacgtcgaacctcggactcctaggacggaaaatgaggtagactatgagtactgctaggcctccgaggattatgacaacccaaaagattgcacagaagaatgctactaaccatgcgaatgagcttgtcttgcgttgcggtggcataatcatattaccatcgtggattggcccacgtcgccaattgccccacacatttgattcttggtcatcttcatgacgtggcacggtcgaggcggcggttgcggcggctggcggaggcttgggatggtccacaccggttatatctggaggatgttggtgattatatggtggggattggcctgcgcggggctgcaggggtcgggggtctctttcg

SEQ ID NO: 55350 - DNA, 1223 bp, Cannabis sativa
ctttattgaatcgaaaagagataatacgttaaagcaagtagctcaagaatacttgaatgagctcatccacagaaatttagtctcctttcatataatatttggattccaacgatggtgttatgtccatgatttattgtttgagatcatcttaacaaaagtagatgcaatgtgtttttctcacattctcaacacaagtaaggcgaaatttaaagggaggagtcgtcgcctatctgtatttagtaccacaaaagatgttcaagaaattgtcagggattcaaaggttcgttctgtcatttttcataatgtcgatcagtttattgattcttttgtactggtttattcaaagaattgaaacttctaaagttgttggattttgaaggtgctcctctatatgatatccccaaagaagtgggacatttgtttcatttgaagtacttaaatttgaaaggcacgcatgttaaaaggcttccaaagtccattgggtcactctacaatttacaggtcttgaatctttttaataccttcattaaggagttaccaatcgagattaacaagctgcaaaattttcaacaccttttaggacatcggtatataaatggagatgagtgtagtgtgaaatcctacggcgatgtgaaaatacacccagggattggatgcttgaaggagttgcaaacacttacgtttgtggaagcatataaaaatggagttgattttgtaaaagagctttaaaagcttacaaaataagtgtcattaggaattggaaaagtgactacagaaatgggaaaagctctaacaatctccattggcaaaatgagccaccttgaagagctcttcataacttattttagggatgaggaaattctagacttcgaaagaatttcatctcctcctccgtctctgcgtttcatcagcttgcggtgtcaattaaaagagttcccaagctggatctcagtggttcagaatctaagggattgaccttatgtttcactaggttgaggaatgaaccgttgagaaacataaaagatttacccagtttagaattcattcgtttgcaccacgcttatgatggagaggaattgcattttgaggaaggtagtttcagaagactcaaacatctaatagtcggaaagttggaagggttgaaagttttgaaaatggatagaggatcactgccacatcgtgagcagcttggtattatagattgcctgtcattaaaagagatt

SEQ ID NO: 55351 - DNA, 2422 bp, Cannabis sativa
  modified_base (269)..(282): a, c, t, g, unknown or other
  modified_base (2001)..(2016): a, c, t, g, unknown or other
  modified_base (2255)..(2265): a, c, t, g, unknown or other
agcagatcagaccagaaacgggaaccttgctataatcgggtccgatcctctatcaatacttgattcctgccaaaaacagattagatattctgattatattgagatacaaatcgaaatcaataaggaaaaggcaataatcaaaatttccttaaaaaactaactttccgtaagagaattgcttctcttacaagaagtttccaaacaaaggaaagtccaactgaaaagtgcaactttcttaacaaggaaaagagcaactaaaaaccaaaaannnnnnnnnnnnnntcgggtatgtatacaaaagaatcttaccataaaagaaaaaaatattttgtcaactaacttgccaaaaaaggactttacaatatctatattaataattaatatattataaaattcaaatataaatgttaaatgttatttaatcatgtatacaataaattaatctattgaatatatatatttatgtaaacagaataatctggcgcaatagtacgatactaattaattgatttaattagttcttctatttctttggtatataattttattttattttattgaaaaaagctaaatcaataatcaataataatatataattagataaattgattttgtactagaagtgagatgtggtgatgacaacggttttgaaatcataagataatttttttacatagatttattaatgggcaattttcatttatgtacaagtaaatatacaactttacaaaaaaaaatgtgcaaaaaaacataataacatagttctatagaattttattaatatttataaataaacatatatatttacaatttaaattatttgattactttcgaaaaaaaacacataaagttaaatttataaacataaaagttaatatttatattcgatatattactaagtttactaaaatttaatatgaaatttaaaaaaaaaaaaatatacaaacacatttccaacatttatttatattttataaataatttatatatattattaaatatttgattagtatattattaatgtttataatgctattattcatctagttggtttattatgataataaatataatttatttattaaaaagatataacaattttaaaaataaaactcgtaagattatttatttatttgaataaatattttttggtttattaaaagatcataaacaatttaaaatataacacttacgtttattagatattgaaagatatgtttaaaaaaataaataaaattataattaaatgtgaccttatgtataaacactatgtttatcttattattgataataatatttattaataattaatctaatatatttgttatgataatgtttgtgatgatatgttttttttaccaagtttgagatgatatgttgatataacgtgtttattaaaatttaaaaataaatttataattaaaacatgtatgcttattatttgtttttttaatatatatttttatatatttattatttatttttattatatataatttttatataaaattaaaaatatgtttctcatagttaataaaatgtatgataaatgataaataaatttttatgcacgtataatgtacttaagtactaaaatatacataaagttgtaaattttcgtttattaattattttttccttcttagatatttatgttttgtgagaattttttaattactattattaaaaaataatttaaacaaaatccaagcgcacgtaatgtgcgatttacccagattagggtttttgatcatgtgatttacccgatttcattatgtgattagggcatccatttagcacaagactttccgtttaggtcagccagcacacttgaatctagaaagaaggtaggaattatatataacgtgtgatatgggtatgcgaatgtatgtatatgtttagtgtatatgcatgctgatatgttgtgattcatacactaccaacacatgtacggttgcggtacaaagtgcattggtaaagtgtatgatgtttgaaagtacnnnnnnnnnnnnnnnncacttgtacgggaaggtacaaggtgtttgttgtacaacacctaacagtactcaaggtgcagtctatacgttacctacactagtacgaaggtatattgagtgcatgtggtacatggtacatggtcgtatcctagttagaacgtacttactcattcgttaagccttgtaaataggtgtatgggcgccttgatacaagtcagtattatatgatatgttatatgcttttcttattgagtctgnnnnnnnnnnnttctgcttccatgtgtaggtaaaagaaaggcgaaagctgaacaggattgatcctggctgagatgaggttgcacatgtcatggcagcgcgacatctggggtttagtattttgtagtcgttgtgtaacctggttatgtattttggtacattttgtataa

SEQ ID NO: 55352 - DNA, 1172 bp, Cannabis sativa
aagcgcagtgtaacaagtaaaaaacaaaacttataaaattaaaaaaaaaaaaattaaaattctaattaaagtgaataagaatatgtacatattaagaacatctttaatagagagctaaaagtgtggtgtatgtgcatattttagtccatcttgataaaggtgaactccaatgttggtgtacatgttaaaattagttgtgccaaatttagcacagaatatagcatgtactaaattttatacacaataaatattacattttaatttactcttttaccacttattaatatatgaattaattatttatatatttaatagaattttatatacttttaataataatttaatacttttgttaatttttttacacctatttatcaaaaaaaggattaattctacgttggtgtactgttataaaattttagccaaatataatattgactcatttttttttagctcaataaacatagctaaaaaagtggtgaggaaatttcaagggatgtgctaaacactataaataatgaattagtgcatttcaatattgaatttcacatttttaatttagcaaataatatggaaaactactaagtaattattaagtaatatatgtaaggttccaaataataatgttttattaacaacaataataataaaataattaacccaaaaaaatatattatacaaaaaattatacatataaaaaaaacacacacaaattgttgtataaaaattgtaaaaaaaaaatagacaaaaaagaatttgtaaaaaaaaaaaatcattcataaaaaaaaatacatcaagttttgtaattgtacattaaaacataatactaaaaattaatgtaaatataataaaataatttatgattgtaaaataacataatacaaatgatcatttaaaaaaataataaaaattattcacaagaaaaaaaaacataatagaaaaaagttgattcataaacaaaaattaaaagaatgatttcataaaaaggaaaaaaatgtaaacaagaaaagaaaatagaagaatataaaaaagatgattgataaaataaaaaaaaaaataaaaagaaaaacacaaaataaaaaaaagcatgtttggtattgtttttaatttttttgttttaaaaaattgtttttagaaatgagaacaaaaaatagtttttggagtttttaaaa

SEQ ID NO: 55353 - DNA, 1212 bp, Cannabis sativa
agcaataccatcaaaggttgtatactatagctatggtactcacctaaaatataactggtggccgtgatggagatactgctatggatgacatagatcttgtagcccaagcaaagacaagagtcgatggagattcaacagaggcaaccagccgacttgctaaaaagattcaatgtactaagcgacacgttgataaaaaatcccatcaattaggatttagagaaagatcctaaagatggagatcctgaagatgatgggaaaaaaagaagatgaaaatatgattattattacgagccagatcctatagttgttgaaatggccacagaactcgctgagactaagctaaaattggcaacacaagaagatttctcccgctaaatgcaagcaacctttaacctacttaaggctatacttgaactagaaaatgttgctcacgatgaaaaaattcctgacgatcctattcccctggataataatactataaaagaatggaccctaaagacacactggaacttctgatcccaacatggacaaaggaaaaggtgtcatgggagaccctaaaaactaatatattataggataatgctttaacagaagtattaaaaataactttatgtagagtcatttttttaataggtgtcattgtttcattttatctccatatttaattttatttccttatttattctttttataattatttgtcaaaaatacttatatccaccaaaaaaattattttttggtggatatatgagttgagaggagagatatgtattttttttttttttggcattgttatttgacttcgccattagagaatttccaagtctcaacctctatttgtctttaaaaagaaaaaatatcaaagctcttagttttggttataatttagatttttgataagtaacttttaaaaacttttagagaaaaagagcaaggagaagaagagagaagtaaatgataatatttttttaaagggaatgatggtgtttttaacaaataattatacattgtaaaaaaataaataaggaaattcttataatataactcaagtgatgtttaaaatattttatggtttctttacaagttactttagaaacttatcaaaattattctttaaaataagattatttagaatactattatgttatttttaaagataaaataacaaaaaaattaagaattattacataaaaaatataaattgacacttta

SEQ ID NO: 55354 - DNA, 1446 bp, Cannabis sativa
  modified_base (889)..(890): a, c, t, g, unknown or other
gtagcacgtagctctcgatactccactggttgtaatttttctgagttaaattctccgctagaacttaaaactattatgtactcatatttgaattaatataaattctttctttcaaaaaaaaaaaaaaaagtaaaacaacaatattatcaagtaataaaatatgatgaaaataaatatacaacacaatcaaatattataaattcaacataaaaacaaaccactaaatataattaaaatatataattttttattatacatgataaatatagataattttttaatatatataaatatagctggtgtgaatcgatttttaattagattttataaataatatctaaagggtttagaaatttgagtcattgcagcctaaagggtttcaaaaatatcacccttatagactaacatatagatcctcctcttaagatttatttgattgtcttccaatattcctttcatggattaaactgttacctactcataactctcactcaacagtaggtgtttggtctaatgcataccaaagcatacatgagacatctcgttgtcgatacttaaggaattctttccttggcctttatctttttctgaagtagttaaaattgttccttagataattgacctttatgtctacgagctaaatgacttcctttaaaattagccattaaaaaaatactcccacatcttactaaagtaagttgcttgcactagagtaagtaaattataaggtatatcacaagtcataggtttagatgttgtgaaacctacgatactaggatcgagaagttttgttaggtcaattgaatagacttattattaaaatttcccttcttgttcttgtaatagaaacttttagttgcttcgtatgaatggttttaaccatagttcnnttggctttgcttcttagttccttatactatccattgcttgtttgaactaacaatgaatttttatcacaagtgtcttccaagtcatgatgtggtgagtttcttgaaaccctctcactacgacgaggtaccgtaactttctgtctaggaacattagagatattgacctcatcggttgtgtcaatacaacagaggcaatgggaccatcttatatagaataagatgatcgaacactttgggattgaaaaagtatctcctctattttactactttattttcaaatttagtcatgttcttagaaatcttaatgactataggatagtccacccctaatcactttagaataactatcaaaacatcaaaatatacaaatcttagttaacagttctagcttttcttaatttcatgatcagagtatccctaaatctaatattctaaacatgcaaacccatatttaaagattaaatatgggttttgaaaattaaatttacatatatatcgcataacaaaaatcataaaatagtttaaaaacaagaaagaaatgccattaaaaatggct

SEQ ID NO: 55355 - DNA, 1318 bp, Cannabis sativa
ttagtcataattttttcacttttaatcataagttttgttgtgactaaaagtaaaaaaatttataatacaaaataatttttttaaactaattatactgtgtaataattacaacatttcttatggatgataagaaataaatagtatttaaggaagaaattacattgaatactcgctttactttatatagtttaattttttacttttatttctatattctttgaaatatacctatttttatagatgatgttcttactaatcctccttaagttaatgtaaattatgtaatagatttaagtagagagtgagatatattagacaacccactcacaaaaatgagtacattttaatataatataatataaaaatatttttgattaatatatatatatatataaaagaggtatttgttaactatcttaattggaacatttgttataactaattacataattattttataattaaataattcaacaatatactaaattaagtcaattttttagaattacacctaaatttgattacagttgttggcatatattgtgcacttacctttaatcataagaacaacattaaagctaggccattgttggtggtattattattgtagtcttgcaactttaattatgttttggtccataatatagctaaattaattgcctttatattcgaatgcttatgatgatattagtttgttttctatcccttaggaggttcttaatgataacactgagtggactaaatttttgttggtttatagcatgacaatattgattttaaatatatttgttgtatattattttgtgtaacgtcctgatgctttggtgcgctacagtgatttttcaaataacaaattaccttgctaatcaagggttttctttgaaaatcgtgtcaaatcaaaacttgaataaaattaataaactttatgaacataaaaatgtatatatatattatataatcgggatctcgtgctaaaacttctataaacattttgaaaatatttttacaaacttgtcgcatagcgactataaaatatatcctaagaagtcctgagaccgaacacttcagattgctttgtcttgacatgtacaatcattacccgagctcagaactcactcctattcagcttccgcctttcctttacctacacagaaagaagaatctgtgagccaatagactcagtagcaaaagcatacaacaaaatataaataatcgacctgtctagacgcccatacacctatccacaaggcttaccaaatgattaagaacgttcttaattgttggtgttattgaccatgatattgttgggttttatgcc

SEQ ID NO: 55356 - DNA, 758 bp, Cannabis sativa
tgtcacaaaagacaagacttgcggtaacggaaccgaacgaaagacaaaagacaaaagacaaggcggtggctgtcgttgatcagtgactccgatcgacatggaccaaacggacgacaacccgccggcgacgctcctggacttgactcgcctgtacagttatggtagaagcttctcgacttctctcccctcgactcgtcgacttctcctctccgtattacgtggtcgataccacttacatgtatttgattatgtgtaagtttataattaccattctttcgaaaaaaaagtttataatttgccatatgtaactctattccactacaaatttaataaggtaaattgcaacataactcctataagtgttatctcgctagcaactaaccttcaattcttttttttttgcggtaaaaccccccaaacttgtattctattagcagtttaccattttcatctatttttgagtgttaagtgtcatgttggactatccatgtgtacacactgtattgtctatgtggacacaatatacacatggaacaattttattgatccacgtaaataactatttataaaaattaaaattgaaataaattaatttgaaataaaagaaataaaaaatataaaacaaattataaataaaataaaaacaaaaaaaaaacataaacaaaattaaaaaaaaaaaccctaacctaaacctaaaacatacatctctctctctctctctcgacctgagacgggacactagtcaacgggtcaccgac

SEQ ID NO: 55357 - DNA, 1176 bp, Cannabis sativa
tgttgttttgatgttattttcttgttattttcatgtattttttttcttattttcttgtgtttatataaaataatgtaaaaatatatatatataaaacttcaaatgtaaaaaagtaaattattttacaaaaattaatattttatgtaattattctatataatatatgcaacattgttgttagttcattagatttgggccattaagtgccaatgaggatcatgcggcaatgaatgttgggctacgcataaaaattttgtgagatgttgccaaaataccctttatgaaaaatttattaccaaaataactttataataaaattattagcatcattcaaaaaaaaaaaattattagcaaaataacattggtcgcataaacaaccatgaattacaatgtgcgaccataaatgattattatgatcttaaaacgattatagatttacactgtacgaatgagattattttacaaattttagtatttcatattgttagtttgacaatttttttttattttctcatttgtttcataaatatggattattaatttttgtataattatgtcttctaaaatatatatatatttataaataaatattttcaaatattttgtattatctttcttttcttatcaattcattcaatttttaatgttttttttttttttggttccaaattagattaccaccataaacatgttattttgtacaacataaggttatttcgaattgtaagtgcctttataattttttttggttattaagtaaatgagtgatgaatttacagtcaagcatgagaatttagtcccttaccataaaaggctaaatatttacttgatcaattctaagatataactctaaatcacatcctagatcaaaaaatagtaaaaactgatgcattagctaatttagctgcatcgctaacacttcctgaaaaaaaagatatccaaattaccataagggagtgccatatattatctcaatccacagaatgagttgaagaagaaaatacaatcaacttgataattgttctagatagtacaaatgaaaacgattggcgtcaactaatcaaagactacatccaaaaaggaatcttgccaaaagatttgaagaaaagagtggaggtaagaagaagagcgcctcgatttgtggtctttaatgacacattgtacaagcattcattc

SEQ ID NO: 55358 - DNA, 977 bp, Cannabis sativa
gccttggtcgagacggtgcttgtcaagacattgctgggtttgcttcccgagccagtctttaataacttcatctcctttttggcttcctcttttcgaacaaatacttgagctctttcattgaacttagtgatgttttttactgggcgaccttgtaggtcatcccatagctcacctctagcagtagagaaatcagtagttatccctgcatggaaagcagtaagctgggtactatcatctagtttcctcagccttgcagcagttgtgctgaaacgacttaagtaagccttaagcgtctcgcccggcagttgctttatgtttgtgagtgaggacgcttcgggtcatctatcccttgcggcctgaaactattttttgaagtcctttgagaacttttcccaaaaggtgattgaatgatgagtaaatttgttgaaccagctgctcgctactccaactagtgatgtggggaacaaaatacagcgtagattgttcgtaacattactggcttacatgatagtattgaaattattcaaatgtgagactagatttgtggtcccatcatatgacaagacgtgggggttcttgaattcctgggggaatggagtattcatgatgtttggatggaatggctcgagttcctcatccgagtcatatctagactactcttgttccctgacttgataccccttgaatttattctctaactcatctatttgcatttggataggatcctcttgctttggaccgagttgtttgcgaagatcaggctttttctggttcaagtgattacgaagattcagttgttgttggttataattgctagcagacctcgtcccactcatggactttgtcctactcatggatctcgtcctgctcatggaccttgtcctagagtaactctcagttatacttgtgcctgtactttctcgatcattatagcagccagtactttctcctccttgcgttgatcgactgtgggttct

SEQ ID NO: 55359 - DNA, 1017 bp, Cannabis sativa
tagggatggctccctatgaattgttgtatagtaggaagtttcattctccaatacattgggacaaaataggggcgaggacgtatttgggtcctgagttagttcaaaagaccggtgatgaaatagataagatcaaagctcagatgcttgcttcataaagcaagcatacatgtttcacttacccgaagcgcagagacattgcatttcaggcaagagaacatgttttcttgagagttttgccaatgaaaggtatcaagcgctttgtaaagagggcaagttaagcttaggtttatagggccattcaaaatattcgagaaggttgggcaggtagcgtatcggctagccttaccaccagcgttatcagctgttcataatgtatttcatatttcaatgttgaggaaatatgtcttagacccgacttatgtcttgaattatgaagccctagagcaatagtcagacttatcctatgatgaaaaaccagttcaaatcctcgataggaaagaaaaagttcttcaaaacaagaccataactttggtcaaggtactctggaagaatagtaaggtagaagaggccacctaggaactagagtcggacatgaggactcaatatcctgagttattcaggttagattttgaggacaaaatccttttaacgggtggatcattgtaatgatcgcatgttagattatggattagtaaagacaatttgcattaattattagtggtttgataattagatatgattttatatttgttgtgagccctatttttagaaatggacactagagttataatttctcaattatggagattttattaaactttaggggtattatttatgctaattatgaattatgcaatttttataattttggctcggcgatggttggccgttagagtcacatgtgtaagttagaatctatttttagtgggacaaatatttgagatattatgaatagtgggtttaagcgaggttagggttttagaccattttacccgtaggtttataattgcttaagtt

SEQ ID NO: 55360 - DNA, 2432 bp, Cannabis sativa
aaaaaataagagagaaacattattaaaaattcaaaaattcaattcagttaaaaagtgataaatgttattcaaataaaaatatttataataaaaaaaatcactattactatagtacatcggcatcacttgatattttgttggtttctctgtttaaatccaaatttgaagacacttgacaagataaacatttaatttagctatatatttccactaaaaaaaagaatacaattacatcactaacatataattcttagtttcatacttgaccaaaattaaagtatgaggtgagtaatgtcttttcaattgatgcatcattactatttgtatgatgtgaataatttttagacgacatctgcataaaaaaatatataagaataatatatatattaaagtaaattatatatacatacttatattcctacctctttggctccagaatgtttttgagaattcttcgtctttctcttaatcttttcaagagcattttttggtctccgggatgttccactaaatttttctttattttttacaccttttaatttgctatcaattgagttgctcgcatcattcttgcaaatttcaatagagtcttcaccttgtaagcatgcatcaatttcttccaaagctcttttaaaattttgtattgcaatctcataaactttgtctgttaatgatcctcttgttgcaatttgagtactaattctactctattcttggtaacgtcttgccatggatgtttttggatcatcaagaggtgtacttttgtatgtcgaagttattgttcccattttagcatactttatccatcttttcaaaatatactaagaaggaatttttccaatattgcgagaagaaagaactttaagaacatgtgagcacaatattcctgcaaactcaaacttcttgcaactgcatgaaactgtgtcatttgatgaatcatatttgacagtatgatgaaaacgtttaccattaggagtcaacttgcatgttgtttttgtctcatgctcaagacgaatttccataacacaattgtatgcttttgaaaattcaaattgaaacattttcaaaattgctggggtgtatatagaagcatcatgatttagaatttcaattggaagagatggtggtaacttacattgagttgctctaaaatctacttttacttcttcgtatcgacgattatcaactaacctttcaaaattttgtaagaatcgcaacatattatgctgatagctaacataatgcttcagaacattattcatactttcactccgttgagtagtagtcatgtttgtacaaaaaatatctctaccatagaccaaagcccatttctctcttagtttgaatgtcctcaccagccaatctttatctttgacattatatctttcaagcaccatgtttcatgcttcgatgaattcatcttcttcctcgtattcatatatacaatctccaaaatcttttgagaattgacaaaaattttgaaaacattactaaggtgttttgctgcattttgatacatatgccaaatacaaagacgatgataagtttctggccattgagaagctaatgcctttgccattgctgcattttgatctgtaagaattggttttggcatttttcccaacattgctgttgaaaatgtatcaaataaccacataaaagtatcacatgtttcgtcatataataatgctgctccaaacaaagtggcttgtttatgatggttaactccaacaaacatagcgaagggcctgcattcatgattttttctgtaagttgtatcaaaacaaataacatcaccaaaatgtgaaaaagcttctttcatttttgcatcagcccaaaaaatattagtcagcaaatcatctgtgtctgctagaagggcataaaaaaaattagaatcttcagatttcatgcgttgaagatattcaagaacgccacctgtgtctccagctctcatttgaattgttcttttagtacgtatataattccgacaatcatcaagaataaatccaagattctcacgtccaccagctctcctagccattagttctagactagctttaggagtaattctagaactctcagccaattcaatttcaacagtttgggcagcagacagtctcctttgggatcgatgcaaatgactctttataggacttgaagtaacatgattatgctcagctatacattcaacaacttgatattttcctatttgacggcaatttattttcatctttgctaaacatccaaatcttgtttagcacgatgacatttcatgttaacatttcgcttatcatttccacctgtaccttcgcatgaacaaaaaaaagttctatccatcatttttccattttcacctttatgccctttacttcttcgaatgctaaaacctacattgtaagcgtaagtattatagaaattatatgcttcttctt

SEQ ID NO: 55361 - DNA, 734 bp, Cannabis sativa
  modified_base (544)..(546): a, c, t, g, unknown or other
aaacctgaactaagggaaaaagagtgcaatatgaatatgtctccccctcatgcacatacgatccataattattttggtgatagtatatctcataagattattgttatcactttaaaaaaaatcaccgtatattatctatgatcatatattttttttactcttctagagtatgtgtggacttctaaattatggatgagggattcctaaaatatcagcatttatgcaattatttaatcattcatgcatgtgtatacaactttgttcatacaaaagtttaaaatttttaagtaatgtacttgtgacaatgatggtactcccagactatatatttattccattcttattgtatgatcttaattttcatatcaaatgatcatatatctataattcttgatgcatatgaagtacttcaagacttctatactaatgaacaactacataatttattatttttcaatatacagaaagaaataaaagtttgttcttcaatcatttattttataatgaaaaaatcttcaagagtctatcataacgtataatttannnatttatattgcatagacaaccatacgtgttttttaaataataattacttacatgtcattatttcatacaaagatttttgtcatataatgcacacgactttaaatttatatcactcaagacatgtattaaattcttccagaatttttagataaggcttattttaaattctcactatattaggagctcca

SEQ ID NO: 55362 - DNA, 1142 bp, Cannabis sativa
cccgatgaccttttatgtcacaaaacaatagtaaactaataagtgtttatcccaagacactgcttaatacctacaaaggacaacctagggttttctactaagccttgtagtacaaatacactaaaattaaacttatattttagctctaaacatacaccatatgatagagctcattgcaagcttcaaaacggtatatagaacgtccaaaagggacacccgagtgtaaagttacggcaaaaatacgatttctgatctcctaagaattttcaaaaatggtagaacacatcaatttcaaaattcccactcaccaaaacactaccgaaacctatccaaatcactccaaacttcacaaggcacatatatatcaaaaatactaccatccttacgtaaccaaaattatagtccttaaatggaaaacgccattaacgtttggactaagctttaaaaagttccaaacttgatttctaactcaaaatcccctaaaattcaacaagtaaacatcgaaactagacccatagctaccaaagaacaattctacaaagttagaatctccataaccactctaaatcacaaagccactatataaaactaatcgtttttagcttaaaacgaaattaaaccataccttaagttttctctcttcaaggaattgctatctcgctactaccagagcttgaaatactaagttttgggttggaaattgaagaaaatggattaaggaaggagagaatttcgtcgcacgaagagagaggaggatttcgttcttcgttcttctatttatgtttcttaaaacataatatatattaacatttgttttatgaatcgaatgattttattgctcaaaaccaaatttgtacaagcacaatggtcacaagaccggtattatatacagctacaaattacaaatcactaaaccaatgtacatctttatcactaactttcttaggccaaatcaatctaactctaaactatacagtttctttgatcctcctcaataattgttcaaccgggtgttgttttccattccacatgtgctcattttgatgcctccaaatgtggtataccaagcttgccaaagcataaaccattgccatctttctgaacttgctaccttaaaatttcagcagccatttgatcactct

SEQ ID NO: 55363 - DNA, 849 bp, Cannabis sativa
gagaaaaaagtaatatttattataggtcaaatttattttaatttttagtatgtgttaaatttagtacattttttaaaatactattagagtaataatttttattcagtgtactaaaatataacttttacatataattcaacacttaattacattaataacaatacgagtcaccgaataaaatactagtagtgccaataatatattttagtaattttcaatatttggagtggaccttggagaggtaagcaaagaaatatttccaaaatataaataaaataataataataattttaagaaattcttctacgcgtaaacgtgtgcacgtgtcaacttattaatacttatattttattcatttattcaaaatttaattatatatataacattattagagaaaatagtgacagaaaagtaatttaatttcatagaattttgcggaatgaatttttttttttttttttttgtgaaaaatgaactaataattatgaataacttatactactgttgagaaaagttaaaatgtcaaagaaatatatataaatggaaaaaacttatgttgtgaattgaaataatgaattttcaccaaactttttcaactaatgaacatcatcatcatcatcatcatatatataatattccttggacgaggtagatttcgaacagagacatctgagaatgtttcaccacaataagttaaatctaagactaagagagttacttaaacaaacatatatatatatatatatatatagatattacatgtcaaacatacatttcgaaaaatcaaattcaccaatgtcggatgctgctcaaaatggtacaaacgtacagttaacatcaccaattaat

SEQ ID NO: 55364 - DNA, 797 bp, Cannabis sativa
atatttaatcaatctcttatttttgtctttatattattttacaatagagttgtaatatatcttaattttcttctattgttataaaatctctaacatgagtttcataacagataacaaccctctccctctcactattttaaaatgtatttatcattattaaaaccattttagaaaaataacattttaatcttcaaatttttttttttaataatacattaactaaattactatataataggtctaaaaataatttactaaacgaatgagccttcttccgttatgctacatctctggaagtattttgtactcaatttatgatattgatgttatttatgttaaatattaatttacatgaactttaaatcaatctaactaagcatgtttttccaaattacaacttcaccctaagagtaaagaccttccagaattttacttcctgtcatcaacatcattctaaaaatttaaatcagcatagcttaaggggtttagaacaccaccttaatagactagcatatagtcttttcttctcttgagatatttcaatacgtgtttaacaactaccctatattttggtcctgggttggattgatatctccttacaactcttactttatgacaatgttgtttagtacacaatataacatacatcaaactatcaattacaaatgcataacagattcttctcattgcacacatatatatactagtatactgttacgtgcgatgcacgtatgttatgttttatattaagtattatattatgagttcggaaggaaataaatgaatcaaaaataaat

SEQ ID NO: 55365 - DNA, 694 bp, Cannabis sativa
gggcacaaaacccaacacttttaataccatgttttttttttcttttcatagagaaaaaatctcaattattaaacttagaattactattttacgtctcctttctcctttagatcccatcctagatgaactacaacccaagagagatacagggagaattcttctcttcatactagttttggggatgactatcaagagttagttggtaaaggaagattgttttagttagttgtgctcactagtttagctcagctagttggtcagagcagtaactattttcagttactaatcatgtacttgagcttgagctatataaggctcactcacttgtaattacaattccttcaaatacaatcatttcattgcttccatttctcgtgtagtgtttactgttctgttttgtaatatagtatcagagccaccactttggtgtgctgttcttcttcttcttcctcgattctgtttcccttatggtgttgttcatggctcgtggtggaacacgtactcgaagcataaccaacaaagaagatggatctgataattcaaataggttctttgttcttgagcttaccaattaattacctggagataatcctcgtagtccttattacatttttggtggagatcagtccgtggttgttgtgaaaattattaattactacgcaagtgcacgcaatcaagtagtatactcacgcaa

SEQ ID NO: 55366 - DNA, 4113 bp, Cannabis sativa
gacacggtataatactacaaattaaattagtatgatacgaataatctattttaaatgccaaacatgttaaaaactttatatttaataatattaacaatagcaattttaatatttattaggaaatatttaaattttaatagttataataaattttttaaataattttatatgaaaaattatataaaaataattgaaactataaaacatatatagctttagtaattatctcgtcaattattaaaaaaaaaatagaaaaatagagtacgaacttgagccttacaagaaaacaggtcgattcgagtaaaacacgacataacacagcccgcactttttatggcacagtacaatgtttgtattttttttatggcacgacacaagacagaacatattttcttatgacacgacatgacataatctatatttatagcacgaaacatatgtctaacacttttgatgagatactctcctctccttccattattattatgtggcgtggcttctctctatatcttacctagacacaaatttaatgcacatccacagatgcagaaaattagagaagattagaaaattaaaaagaaaaaacaatacaatttgtattgcagttggtcttttgtacttgttattattgctattgaggtcacttactagtttgctctttcatttatgactcgttgaaaccatcccagttgacaaaactggccgacccaaaaaatcacaatatgaatacaatataagtagagtaaaaatcaacttaattcactccctggaaaatatatatatattattggggactttaggaaagttcaaatagaagtatgtggattgtaattgatcaccacgtcttaacttcgtctaaatttgtatagtttaggtccaatttgagtgtaggaaattggagagtaacaacaacatgcacagcacacacattgtgacgacaacaagctttcttgctttacactttgggcttaaataatgaaaaactttactccactatattcatataaagtactcgttttccaaattcaagttgaagttgaggtcttacaaaggaccaaaaactaataagttaaaacataaaacggttactctttcttgatttctacaaaacccaccttctgtgaaaggatgccttcttcaaaaccacctaaacaataataataataataatgactgtacattttattatgttattttttggagattgtagttcaattggtcagagcaccgtcctatcaaggcgaaagctgcaggttcgagccctgtcaatcccgatagatccaaatccaataatgatatgtttgtaatataataagtcccatttttctaccctttccaataataataataataataatgttgcattctgaactcaaacttttgaaaagcagtgggagcaaggacataaacgagtttgacaccaaacaaactcggtccgttgcaatgttactgcagtgcaatgcggctgaaagaaaacagtgtgttgtatgtgatggcttgtatctgtttggacaggattgagaagctttccacaatcccattgtggccagtactgcaccagtagtcaaatgaatgactggaatataatatgaacacacatgatcattatcaaaatttcaagtgagattccatggattaggttcatagttcacaataagaatttacctgttgggtgttgaggttacagaagctcaactctgcatggaataaaattggggagccaattcagttaaccacaagtaatcaattctagttattttgtggatatacttatggttagtttggattagttcgttgtagattaagcattctggctttttctggaacaacacagaagaagggtggatctgcactatctgaccacttgccaaagccctgccattttgttaaacgtgaggccttgtaaatgttatagaaaacaaataaatacaagaacgtggacaaccttggccaataaagaactttagtggatgaccttgtttgcctttattgaaaaataaagactttaaagttcccaaagaaacggtaagacaatctgaaaaagtagagagagaaaagctgatacctatatgttccctcgggttgctttagagctgcattgagaaagaatgaagcagcaagacatctgcggaagttaagtacgtcatctccacaagagacaatatgaagacccatttgctgaacatgttctcggatttggctgccagagaagacacattaagccgaaaaatatataattaaaatgcacagcttgatctaggagccagctaaaaaattataaatataaaaaccttaattaaacaagtaataagcgtactaacttgtgaatatcacgagcatgtcttagggagcgattattaatgaagttttccttgcaccattttcttaggatcttgtcagctttctctttaccacacgtcaagttcttctccataaactcattagctgctcgaaatacattaatcaaagtgatgtgatctccctcaggacttgaaaagcgtttcattgcagctcttgcctagcccatacaataatattagaccataatttaatataaaaactttaataaggaaaaaaattcttaagagggataaagatttgctaatcaacaacaacttgcttttgtagtttattactttatttaaagaagtatatgccattacttactaaatcaaatagcctagaaaaattgagttatcagaatcataggcagaattgttctatttaggaaaataaggaaaacatgtatgaataatatctcatatgcacgcacctcatctaatttgtcccggggagcataaaatatagattccaccgaaagcattgcaacggttatcaacatttcttgcaagcacttgaactcactggctatgataagggcctttgaataaacaggatctaaaggaagtttcgacatttgacgaccaactggatcagagagtttacattcatctgttaaagcacctagcaaaaacaactgctccaatgatttgacaatagctgacctgcttaaatatatcactttagatcttatgttttcaaaaaatgatgataaacaacaactatcagcacgaagttactttaccaatcacccaaacatccccctccatgccaatatacatgaaaaaaaaatatacatctttacatatctacagacatgtacacataaattaaattccacaaaattgtgttctatattctgtaaagattcatcagaactgatattgtactccataggtcgtaggccatcaaaaatcaactatagacaagttcatcaaaataaaagatccctggttttattatgttatcaatggcatggtttaaggattagatggcagacaaaacagttactgcatataattctctgacagaattaagggatatggcatcgcaaatatagttgaacttatccgcatacatccatgatacaccaacacaaacaaaagtatagaataatatggtatgaaacaaaagcatcaagaactgcaccttgaaggcttttctataaagtcaaacccaatgatatcatccacacccagagccttgagttgtaaaattacattagcaaggttgcatctcttgatctctggcttcgttgagttctcaagtttctcaaattcactctctgggtaaagacgaaaacactttccaggcccttctcgcccagcacgtccactgtaccaatacatcattgtttgtccaaaattaatcacagaaaaaggatcttagcggactcctccaaggcaaaacaaacaattttgatcttaactacatagttatatagcaccagaaaaaaaaacggttcccaacaacgactaatttaaagatactagattccacatttttatcctactaaagattgcagcttcttctgacatcaagaagttaaaaaaaaacacagcacatacacatgcgacatagtctccaaacaacataatagagatagagataaaggtgaaaatcttccaacaatgtgtgattagtttccaaattaaaatagtaataaaaaaaggaaaggctttcaacaatatgataaacaaaaccaattccttgtattgtacatacaggaactttatagatgtgacagaatgttgggttataaacagattcaga

SEQ ID NO: 55367 - DNA, 1440 bp, Cannabis sativa
ttggacacaataaaatgacacgaataggtttttttttttttttttgaaagaactttagtttaattaaggtatagagcaaaaattgaggatcacagacggatcaccctccccacaatacaaaccggggttaataatagaccttctaatgtttctagccagacagtccgctatagtgttctggcttctaccaatataaaagaaactacaatccattaccgaatcaattagctcattaacttctaaagacaaattaaaaaagttccagtctaagtgacacttcctcaaagagcaagctttcaaaacagttctgcaatccgataaaatatgcacctttctccaggaattccctgcaataaggctcaaagccatgcgaacagccaaggtttccgcttccatggcactagcagccgccagattctcaactttgtagaaccaagaattgtctacaagattgatatctgatactcctcctttgaatttaaccttatttctgcacttccaaatctgttcaaaaacacagcccacataagttaaaacctccaatcttgaagtaccagcaagcatcggaactaagatttccagaaaatgagccaaactgttgcaagtgatacgatccaccgagacgggaaagaggcctgcaaaccaaatagccttagcaaaggcacattctttaaacagatgaatcgtgtcttccacatcattcccacaaagataacaaccgaagcttgtgaaagtggcaagtctgtttccagttggcagagcgtcactgatagccttccaaaggattatagataacctgggatggattccaggttcccaaatccacttccatatatcttttctgagactaaaccgagttctctgatcctccatataagcatccttaacacaaaatcgaccatgctttcttcctttccaaaagactctgtcctgatgggggtagggaattctgttaatggtaagaactcggtcacccaaaacgtctccaaagatttgtctcactaactcctcattccactcatgaccaatagagatatccaccaacgtcttgactgtaaaaccacgatccctcagggtatccattacttcttgaaactcagcaaaagacatccatggtatccatggttgtctccagaaatcaacctgctcaccagcagcagcaagagaaatcgaacccttccttatcacatctctagtctctaaaatgtttttccaaagggccgaatcacaacttttaggtctcacctcccagaatttctcataacggcagtatttacttaagaggcaagaagtccatggcttcttaacattactggccagatcccaactcagttttgatatgagggctttgttaacatcctcaaatctcctcaaccccaacccacccgactcttttggttggcaaatggtatcccaagagcgaagagccaagaatctatc

SEQ ID NO: 55368 - DNA, 997 bp, Cannabis sativa
  modified_base (446)..(447): a, c, t, g, unknown or other
gggacgttacaaaatggtattagaagcagtagttgaaagatacggcaaaagatgctcactgccaaaagtagacagaaaagttatgcagatatgagaagacgggaggttgagtattctgtaggggacttagtgttcttgaaggtatcacctatgaggggattatgcgtttcagaaaaaggggaaagttaagcctaagatttataggtcctttcgacatactggacaaagttggttaggtagcttaccgtttggccctactggcaacattagcagaaacgcataatgttttccacatttccatgttacggaagtatatatctgatctgacacatgtgcttaagtacgagaacttgaacttgcagcaggacatgagttatatggcacgccgtctgcgcgtgatagaaaaggaaataaaagtcttacgaaataagactatacccttagtnnaatcctgtggagtgatagttctgataaagaagcgacatgggagttagagacagacatgcaaaaatagtaacccgagttattctctagtaagtaaatttcgaggacgaaattcctttaaggagggtaaattgtaatgaccaaaatatttagtaattattttctattataatagtctagatatctcgatgcggaaatagtaattttataagataagttatttatattaatattacaatcttgtaatagtgttaaaaataaaagatcatagataatagtaatcatttattttattaaaacccaacattacattacgatatggaccatggtattttagtagaagtaattagtttactagatggtattatgaaggaaaaagcttgagtattgttataatcaactatgggttttattagttatacgtggctatactattttataagttacaatatgatggacatgagtattatgattagtattatgtctctttatttgaataattagtgtagaagtagaaggttatgtgatgactttgggaatatgaagtcttgtt

SEQ ID NO: 55369 - DNA, 762 bp, Cannabis sativa
aggtgtgttctgacaggttggcgcggtataatcacaactggtatttcgggctgaactaggtttgggcccaaaatgcaattggaattgaattattggcattgtatttattgatgtacaatctgaaaaatttatttgagtttaaatgggtgtgaaaggacatttttgcccttggtttatgcttaggctttatttggccctaggggcaatttggtcttttgacctttaaattacatatgataaaagattgaatttttggataaaagaaaaggaaattctggttgtgtttctctcttgctcgacccctctctctctcaaacccttttctttttcaattttgatttttgaaggagttgcttgagaaattggcttgaattgaagctttgagattgtgggtctttaagcttggaattgaggtagtttctttactgagtttaattgaaaattcttattgagtttaatatggaaaaagcatgttttggattgtttactcttgatttccatgctagaggagtaagtgttgattttgataaagttttaatataatttcttgatttagttgtggaatatattgttgtgttcttggatgagattgttgtgtattttctaggtcaaaatttatgtattaattggtgatatgctgctagaaattatttgagttaggttgagttgaagctcaagttcttgagcttgagttttgttgggttaaagcatgattttggattatttgtgaaatctgagatatgggatttattgttgaatttt

SEQ ID NO: 55370 - DNA, 1670 bp, Cannabis sativa
tatatgatttggagaagaaaaattagatccttgcttgctaaacagaagctgcttagggttcttaaggatcacattgaatggcagaaggcacatccaagattcaacgagaggaactcttagagacagcaataataagtataatcatattcattctgtcagatgctatcatcaggctagtggataaggaagaaaccttaagatttggaagaagttagaagaacaatttcaactaaaaactttgacaaaccaaatttttctgaaagagagaatctttgaattctagatgggtccttcaaagagtctagatcagaatctagatgaagttctaagaatgcacatagagcatgcaaatttaggagaaagtaaagccctaagtgatgagaatcaagcaattattatcttaaattcactgcctgattcatatagagaagttaaaacattaatcaagtatgaaagaacttccgtcacccttgaagaggtaaaatcaactctcaaatccaaagacttaaaaatgaagaatgaaaagagaaattctggtaaggtgagtttcatctctagaggcatcacaaacctggccaccacgataggtcaagtggacactaccaactcgattggtcttaaaggccaacctttgccgccccaggaggaccctccactagcacctcgtactgaaagaatggccaatgtggagcaacctctgggcacctcgactgaatctggtcctcggtattatgctagaaagacaggatcaggaattggagccattagcaagcctcatgtagacttgggagaagatcttgggttagccagacttagagaggctgtctgtcaagtcgaccaaactgaagaaccacgtgttgttaggtacgatacattcggacaacagagacgcaaatttctgagattgatggatgaccgagagtacatcctctaatcttattaggcaaaattacactgtcgtatagagaagctagtgacttgataaggcagttcaatgaaagaactgccgggagaggttaggatctcatcggagatcctctccaagggagaatagtcgacagatcgggaatggtctactgacaaatggtccaaccaagttcttctagaactaggatagaccttcccctgcctgaaggaggataagtcttgccacgaagatctggtggtgagaacagccagactcaggcaatcagcggcttagagagctagccagggatctctagcatgaaaattcccctacttggccaacctttgggcggccagtcctttagtggtgaacctctggttagccaaaaaggtgaactcccatcccgagacatctgggagtcacccaaaggccaatctttaaccagctaggtccgagaacgggtagaaacatccaagacaacaacaacttgagaagtgagactaatcactacatatacttagatccatcgaactctagcaattggtgtgatctaccccttgtcaacacatgggctacattagccaatcaaggaagaatgggcggtcaggccctgcccatcacagggatagttggccatgaaaagatgcccagagtagggttggtcagccatggctagttcccttacccagggctggccggccacagctagctaccaggcttaaggctggccagccttaatcataccctctcctagggtatggcc

SEQ ID NO: 55371 - DNA, 602 bp, Cannabis sativa
ccacaaaaacacacgtatatatatatatatatatatatatattaatttacttcactcaatttgttaaagcccaatttacaaaatctctcactcaatatcttaatcatgattcatgagtctaccttcattctaatcaagtccatttttaaagatagcccaatacaaataataaaaaataaaataaaataatactattgacaatgttttattttattttgttgaagatgaaaatttaaaaagatacatttatcaattaattttattagttttaacttaatatttattcaagccctcactcaactaaatttctagctttgtcactggttttggagttgcatgtatagttgggttttggcttgtgcttttgtctttacaggttcctatttagaacacaattgatggttgtattagaaatgaaaactgctaactaccaaaaaacacaaaaaaaatattgcataagaaatcacatacaaagctataggactacgaaatagccccctattcaatctcagcaggcaagttctcggggcacaaggcaagatcggcctgcgaagataagctaatacacacaaggttcatttgataggtcgtattgtattaaa

SEQ ID NO: 55372 - DNA, 1927 bp, Cannabis sativa
ataggaatgctagtttgttttagttaaaaaagaaaagaatagtcaaagttagcataaaaaggaagtcaaagtactaaaaatgttgactttgttgaattaataagaagaccagcgtggccgcctcacgcgattttaggaggtaacgtcgtcttttcttgctttactagtcagtccctcattccctcttctttatataaataaacccttcaaattctaattcaattcaaagatttctaatcattttagatataaaataaatactcttttcgatcgatcctatccacaatgaattctctcttcagttgtttcgatgttttttgcgctgaagttatgttgggcaagactctcaagacctcctccttcgcttctcctttttctcccgtgaacaataaagcactggatgtcgataataaggtcttcatctgtgaacaagatcgcaagtctttgccggcggccaatgatcagggaaagaagaaggtgatcagatcggccccggaatttgatggattgaactgtttcgagactttcgtctcttattgatgagatatatttattcatttgtacccagccaattttgattctttcacttctttctagctagctaacttgaatcaatatacgattcttttattattttactactatacattctattctttgttgtagaattatacttgataaatttagtgacatttattttttatggaaaaaagtattctgttcttaatttttatgttcattcatatatactctgtttcaaacaaaatttcattgttatagtttcctagtctatacatatatagactattcatgatctaatcatttaaactacatatagtactaaggtactttaagatttatgcgtaaaatacacatagccatatgttatgtataataatctcttaactgtgaggatagttgatagactacatgatctgcgtgaactattaaaaccaaattcagtcctaattggactaaacgagttgttcattagtctaagtgagtgaggttggtgtgaactcattttgtctctgaaatggtgtgaatttgatctgaatgaagtcaaaacttggactgaataagttatgaacctatagtgtgatttgtgaactgttaagctctccaaactaggttcgaatgaggtctaaacaaaaatttctagctactattgtaggatcataacatgaaaaagattgtagcatcaacagttaaccttaagaatacttatattcaattttatctaccactcagaaggcacaacagtagaaactgttgcatgcagtaggttcattcaatctccttatttgagcactcaactattgtgcaaggtcagtcgcagagaactttttatttccaaccactaacagcaatttaatggtaaatcatcgaagaacaaaagaactagcaacgaaacaaaacaaaacaagatcgtgtcacatagacaaaactaaaacacttaaaactatatcatagagacatgactaataaaacactcaaaatcatgtcacagagacaagactaattgcaatagcaaaatacagcccaaaccaagcaacacaacccaaggaagatcagcgggcctaaccgaagaaaaaagacaacctcgagaaatcctaatttttttttatataaagttagtttatatttagaataaaatttgaacattttattattaatttaaaaaaaaaagtaaaaaagaaaaaaatcaattgaaatacctcctatgtgtagaagaaataactattctctagagatagtaggaaaatgattgccgccaattaaacataagtatcacaaaactaaaggaattcaatttcataaaacaaaatttataattaaaaatggtggcagtgtcataaaaaataacaaggtcgacctcttatttacatccaatagcaacttaatttgtagtaaagtctaaaataaa

SEQ ID NO: 55373 - DNA, 910 bp, Cannabis sativa
  modified_base (136)..(144): a, c, t, g, unknown or other
tatatagtgggctcctcatgaacaatatcaatcatttttaacctaattgcttgatcaatcagggaaccattatcaaccttaatgtatatgaatatgaggttaggagaaatttgatattttattattattattattnnnnnnnnnattattattattattattaagtaagcatgcattgtaagattcaaaaccaaagtatttttttaagctaaagggaagaagcactatgaatttagtatggaaaaaaataggtcacaagaatacttctttgttgtgacacattattaggaaacttggttctttatgtctttttttaatcaagtttgtttacatcatgacaaacgtttttatttttatttttatttttattattttacttttgttgatccaattataccatatgagatttttatacaacaacttggttttcaatttttatttttttattttttgtttttactaaattaaagagtaaggttttgcatatttgaaggaaatattaaaacattttacattatgtataaaataatatattttgtcaataaatatatctttatagataaaatgtggatatctaacgatttttgttagtttaacagaatattttaaaaatatgagaatattctattaaatttagtggtgctaataaggtaattttataaatatatataaatatacatattatttattttattttaatataaatatatataaatattaatattatttgttttaggttattaagcttataccaattttatattaatttaaatatatataaatattaatagattatttgcaatattatttttggaggaggttctaatggttacatttttattgtaaccatcatggttacattttttttagccattggatcagtattaaatggttgtgattaatttggaaa

SEQ ID NO: 55374 - DNA, 900 bp, Cannabis sativa
tcgggagaacactgataccacgtataaatctgttgtgtcaagttattgatttttcagcaaatatttttatattctgcctgttctgttttgtcactgcaaaactggtttctacagtaacagaattactttcttcttctgcagacgcatacagttttatattttcatatatataattgacatttgtaaaaacacggtttttcattttctaaaatagcaccttcttttcttttgaaaaatgagtcaatagttttaaatttagacatacctcatagacctataattaaaatacaacatataaataaagttagatcatgatattataaattaaaaaaattcaagaaagttacaaataaagaaaataagagatacccccaataaaagtcatgtaagaaattaaaaatccctaaaaaattacaaataaagaaatgaagaaaacttcttattcaataaaagtcatattcatatatatgtaagaaattaacaacccttaattaaatgatataataaattagaatgatcaaattataaaattaaaagatttcaaatacaccatgatatgtcaaaaaaaaaaaaaatacacacatgagatataatattagagcacatgattaaagttatgagatttaatttagggtttatcacacaagattaaaggttgattaaaatatcaaacagaaaaaatgtaaactctaaaataaaaataaaaataaaaaggatgagaagagtaccttttcttagtcttcttctttctattttttggtttttttaatcaatgacctccctttcaatttttttcccaagctaaaataatttgggaacttggggaggagaactattacaaaacttgtagaatactctttgaaaaataaatcacattattatattcttaatggactattg

SEQ ID NO: 55375 - DNA, 1358 bp, Cannabis sativa
  modified_base (320)..(325): a, c, t, g, unknown or other
  modified_base (361)..(367): a, c, t, g, unknown or other
agagagagagagagagaatgtgttttctttttcaaatttctaatttttataaaatcaaaagattaaaaaggttttattaaataaacttagcttaatataaatctaataattagcatattaaatccattatagtccactaaaggacaaaaaaactaatgaggcaaaatgatcattttgcccttcccacactaaaaatcataaaaagttagttaggggtattttggtcaacttaatattctcaactattcctgaaattcctaatgtctaactatactgcccgctatactaaaaacacaaggatgtgattctaatagccaaannnnnngtttcaatgttgccgggcacaaaacatgcaaaattnnnnnnntccatatatgacatataaaatgcacactactacaaaaaggagtttttgcttcagttttaaagtgacacataaacattttgtctcggttaaggtaatcgacgcaataatcatagacgcaaatagtcatattttttgcttcattttagaaccgacacaaaatattttttgcttcagttcataactgaagcaaatagtagtacaccgatgctaattggcttttttcttcggttatgaaccgaagcaaaagaattttaaaaaaaaatctgaaccaatattgcaccaccaccactaccacactattacaacccaacaacaacgtgcattcacaatagatccaagtagcaaagaaagtaaaagaatatatatgaaaccccgttcaagtgaagcttagaaaattaatgcattaccctaccaattagaaagagcattatattatgagaaagaaaactatcaatcattatttagacatatatatatatatatatatatatcactataaaatcaaaaaaaaatataaaacccatcataggaaaatgggcaagaacacagctattattaaataaagattcaataaataaactaacaaaactagaacacaattagtattttgtttcttgagttatgtattttcttttcaatttttgaaaaagtaacaaaatttaataaataatctaacaaacaaataatcaaacatacaactcaatctgaatatagaaccaattaataaatttgtagacacagtcaatgaatcatgtatgtggtaatttgatcaagtatattaattacttatcacaactaaactgatacttttttcttctattttgtagggcaaatttgattttatatacttataaaactaaaaaaatttattcttaaaccaatacctttaaaactaacaaaactatgacacttttctcaaaactccaaaaatactcctctcataatttaaactctttctctctccttccctcaaactctctctctctctctc

SEQ ID NO: 55376 - DNA, 1046 bp, Cannabis sativa
gtgagattggtccttttggggggacgctttgcgcttgctcatgtttcttgtttgcactcaacatgtgcgagacatgtatcgtgcctaacctctgaacttgtttgcctgcatgcgcgcttaggttgacttgctagctcggtgtgccagcaagtgtcgcacgtttcgcctacgtgggagtgtccaaataggcggcccgtgacactagacatagcaatagggctgccgttggttttgctctttctcatctttgtaatcaaacatggctttggaattttttcctcttgtgcatatgctcttttagcatattggcttgtgttagtgtacgtagttaatttttgtattattactggtttgcttttaaaaaaataataaaagattgaagtgaaaaaaatataataaaagcaaagagttgtattagtgtggcctaagaaagttagcaaaaaagaggaagatcggtttcattcattatgaattgtatagaaaaataaaggctatggcatgattgtcatggtgttttaggtttgtaaaaattagtttacatacaataacactcgctgattcatcaaaaaaaaaaaaaacttagcagtaacattaaactacaccaaaatttttactctttgttgttctaaaataataattctataccttgttcttatatataaaacaaaaatgatttaaatatgtagattttgtcaaaataaaattgcatagtaaattgaaatattgtatattttcataaaatttaataaaatatttatactaaaagaaattggtatatgtgtaaaaaaaaaaatttgtaacatgcatatgggtgtgtatacattaatttaaacaaataagtgtaagtacaaattttttttataagaaaaagttgtatatacattttcgctaaagaaaataatgtataaaaaagtgcactatcttaaatctgaacaaaaaatatataaaaaaaaaaattactaatagaggtggtatttagtaacacttttgttttataattttaaaaacaaaaatgaaagtagaatttttatttttaaaattttgtt

SEQ ID NO: 55377 - DNA, 935 bp, Cannabis sativa
aaagtattggagttgcttcacatggatcttatgggtccaattcaagttgaaagtctgaatggtaagcgatatatttttgtgtgtgttgatgatatctctcgtttcaataaaaaatcttcacgagtgtcatcttcttccacaataactagtttatctttgccttttttcccaacgatttcacacgcattgctgtaggtttataaacactgggttttttttttaccgaaggagatggagaagaggaggaacggatgataactattgatataagaaaaaaaaaatagaacaaaatcgtagaatggagcttcaatggcagtagaagatcgtggggaagaaattttttggcaaaaatccttattttgatgtgctaaaataaatcaaaataaaaattgaaaaagaagaagagaaagaaaaagtatagcaaagagaggagaaaagagttgagtgtccttgtagatgaatgataacaacagtgcatgcatgatgtgtgcaaaatatattttggtaaataaaatattaaaaaaagtacaaaaatttatccaactgtatgaaggtatatttataataaaagttagttttttttttgtgtgtaaaaaattcaagatttattgcgatctttaaataatgttattttatgttttgttaaatgatctactaatcaagctacaaatgtttttgtgagacaaactcgatgttatgcttgtcatatatttagggagagaaatgtcttttttgaactttatgatgttctttagagtgattggctctaatgtaaggaagatccttaccaaaaaaggaagacaaatttcattcaaaagatagtatatactttaatatatataataaatatttaggggtgttcatccgatccaatttgcatttttttggtcaaacaacactcaatccgcactaagtgcggatttcatattttggat

SEQ ID NO: 55378 - DNA, 992 bp, Cannabis sativa
ctctctctctctctctcttcaaggaagccataaccaccatcaccaccactctctggtggcccatctctggccaccatccggccccacgcgccaaacaaatcgaaagcccaagtcctagcgatctcaccccccaagcggcgccgcttctttcgccaccgttagctaaggatcgcaagtcaaagtttgggggttccatctttgaacggatttttcgatcacctccggtgtccgtttgacgagtcgtcttcaccactaaactcagctcattgaggagaacaacctacactaagctatcttgcccaacacactacttttttcggtgacatttttgtagctccgcccctatctggtgacatttcggtgacatcgtgtactgttttgacaaatggatggcgtgggtgtgatctattcgtcgaggtcgtcattttgatatatactacccctatttttgacgatgtttttggtacactaatttttatcgccaccgatagttaatgtgtaccgtttaggtgaggcttcgaaaccccaaattttaaatatagtcatattatatgtcgttggacttgattttatatgtagaatacaataatgataatcatttagctatttgatggcataggtgagagtaatatttaagattggactaaataattggagctcgggacttgagagctaaaatcgtcttttggaccaaagtttaacgacttgggagaggtagggacccaacttgattattggacttgatttttatatgtgttgcataacattagacatattttaaatttttatgatttgcaaattgtttgaaaaattgaaaacttaatctgcttacttttctggactattctgaggcactgagtgccaaatttatttttgtgtatgaataattatgcagcttatgatttttgagtttattcaaaatacagccattatgctgccgaattttctataaaataaaaaaggaatatgttcttttattatgcttattattt

SEQ ID NO: 55379 - DNA, 1041 bp, Cannabis sativa
gtttcttggtgttgcactgatacgtgggtactttgggttgcctgtcgcactgatctaacttcgcatgatttcccaattttaattttgcaggttttcaacatttcgccgtgtagcctgagatagatcgcaccttcgactctatcaactcagcctcgaaggtgacattagaatccacacaatgttacaaacataagaaaaaagaaagcaacttactgtttgaatttagggcctagggcaatgtctggtaatttcgtctacaaatcttcgcacgaagcaaggattgctttgagaggatgaagtctgaggaaactcgcaggaaaaaggtcaacaacagagatggcatgcaaattctcgaataaaattaatggtgatccttgatgaagaagctttaggtttttctcagactctttgaaatggagaaaatgaggaagtgaagtggaaaagggtttttctcatatttgatcctatggacatgattaaaagcggaagtggaaaagatggtcatttaattgtgatgtacctcgaaaccgcaaaacctttaaaaacagaggatcttttcaaaaaagaggaaaatgacagaaataccctttctaatcattaaaaagctctttttaaggggcaaagggtatacccgaaattcggtaagcacatcagaagatgacacgtgtcgtggtaggaataacgaagaactcaaacacgcaaacgaaaagtacaattagcatggaacgagtagttggaaatataattcgtagggtaagtttataactcggctggctgaacagccttctgcgagacagaaaagtacgaactgctaccttctgtattgacgagaaaccatgtgggtgcacgcgtgcatgacgaggccacaacctcgctgcgggggagagaaacggtaacactaaaagcacagcgtctattatactatatacaaactgagtgtggatagtacagcgagtcaagatagcagacatcgaggcgtttatctcgctaggagtagtagacacaaataccgtgtattaaacacgtatttaattgttgaat

SEQ ID NO: 55380 - DNA, 1203 bp, Cannabis sativa
gcttggtgattccctggatgttgtccctgagaaccttgcgatgcctcttggctcctccctttcccaaaccctttcctccttttcctcttcctgacatttttggttctctgaaacttttctcttaggatttcttagtgttgagtttgttgttattgttggaaatgaggttgggtaaggtatttatggattatgagatgtgttatgatgaccgttggattaagtggcgatccgtgtgtggagtgaggttggattatgagccgctggattaagtagcgatccgcgtgtgcagtgagtttggattgtgaaccgttggattagctttacttgaattttattggtggggctgagaatgtttgaagtgcgcgaaagttgataaaatgcgccaaagttcgggaaattaatttctcaaaaaataataataataataataaataatgaatgtactgatacaccagctccttgtttcggcatctggaaaaaattttagtctaatttttttatatttatgtaagttataactatttaagatatcctataagattttgagaaattctaaataattaacaatatagaaaacaatgttcaaacagtcaattttacacttatgtaaaataaaatattcactcttgcaacacactgcttgaacgtaattttcggcatgttaaatttttctaatttttttaaaattttgcatgatgtcttaaataagtataatttacatgaccatgagaaaaaatttgactaaaaagttatttcgaatactaaaacagatagagatatatcgatgtatctcttttaaggggtgtattatagaatttctctataatctatatatataataaagaaatattaagagaaaaataaaatgaagtaaaaaatatgagaaataaaaagtagatggaaagaaaaataagaagaaataaaaaaaaatggataaataaaagataaataaggtgtatgagttaaaaaaaaaaataaataagaaataaataaaatgataaagaagaataaaaaataaaaagaatctttcaaaaaaataataaaaataaaaagaaaattgatgagaaaaaagaagtgtaaacatgaagatgtaaggtattcagtagtagggtaaaataaataccataaaaaagatagaaataccataaaatatgcataaacaaaattatgccatatttattgaaaatttgttaaaaatcttgt

SEQ ID NO: 55381 - DNA, 1083 bp, Cannabis sativa
gaagctttgagctcctccatagtgttatcagatcggatgacagaattgttcaaatctgtcactcgggtttgagcttcagcaattgttttcttcatgcgtccatatttcctaatgtgccattgttgcaagctggtagcacatgagtcaaggttgtgtagcacattgtcgattcaaggttgagaagaatgatgtaaccaacattgagaaatgatgtccctactctcagcatcagccaacaaaagtttttcaaaacgaaaccgactcttacgtttgaattgttgtgctggtgtattatgagaagtgagaacagcagctatagcacgatggtcagagtggaaataatccaagtgaattagcctcggcaccagaaaaacattatcccaaagattgttggtgaaacaccagtcaagacgttcctttaaagaggttgctgcagttcggttcttgatccaggtgaatgcatcaccttcaaaaggtgtatcagtcaaatggcagttatcaagagaggctctaaggtctgccattaagcgttcattacgcaggggacccccttccttgtccgcatttgataaaatctcattaaaattatcaattactaaccacggttggagaggagcagagtcagccaacctattcaaaagagtccatgaagcatttcgatcttgtgcagcaggggcaccataaaaagctgaaaagtgaaaagatgggccatcttcaaaagccatgatgcagtcaaaaaaggtatgaccaaaatgtaggagctgaacattaacattgtctttccaaagaagcatcaatccaccacttaaaccaacccttggtgcttctaaaccattattaaagtgaagactattacgcaaacgagtaagtgaatttggattaagctttgtttccatgagaaacaagacatggggcgattgttgttgaacaagcaaggaaagaaagtggttgtagaatccgtggtcacataaacatcagtcacaagatcagcagcctccgaaaaagatgctgaagcaccatttaaaacacgactccgcttaagcattttcctcactgacattgattcactaggtcgtttaggaa

SEQ ID NO: 55382 - DNA, 1185 bp, Cannabis sativa
attttgatttagtttttaatctttattttattaattaatgttttttttatctgtttaaaaaattttgtttttattaattttaaattcgaagtatttttttttaatctttaagtttttttaataattttatatgaaattttatttctaaaaataacataataataggctaaaaatatcctaacatttatcaaatattattttagatttatgattttttagattgtaacgaatccatctaatattttaagtccactatgtattgaattggatccatccaatccaagaaaaaaaaaagtaaaattttaattttaattttaatttttatatatacatatatattttacttataacaatataaaatctaaaacctcatcaaaattaaatgaaaatactaattagttcgattgaatgttaaatgtattaaatttttagatactttctttaatatccaatctgatccaattggatatttaaaaataacatctaatttaatttgatcataattaaatatttaatatttaataattaaatatttaatatttaacaatcaattatttaatatttaacaattaattataattagatcgatcaactttcattgaattgatcgatctgacaccactaagctcatgtgtagtgtacatatgttcaagtttcatttatttatttattttggttgtggtgtttgtttaaaagtgtaaaagtacatattatgaggttgaaaaaaataaagctattttgaaaaggacccatgatgtggaggaagatgtgggttccagtagccatgtgggtttcacgtgaagcattatagtaaggtttttgtcatgtcgaactcatatattaataatagtaataatgataatgataagtatttctagcaaaaaataatgatatgagattataagctgcattcctaaaaatagaggtgctcaggtgcattccgatgctctctctttaatatatattagtggagtctcaggcccttcgcacgtgtggttcgtaaaaatatttaagcacaattatttaaaaaaataattaatattttatttacaaaatttataacactatcaaattatatcctctaaaatatacactatggtgacaaaattttgtgaactcttttatttacaaaaaatatagtacttttattcttttttatcgtttcacagttcatgtgtcgttgta

SEQ ID NO: 55383 - DNA, 1222 bp, Cannabis sativa
gtgcttcaatcttgatggggacaatcccttttgtaatgcgctggcataccgcactgaaaacaggcctaccttttacactcccctaggtggtgctttttacaactagagcactctgggtaagtgtattgggtttcagagctaccctgatgattgcctcgaccttggttcccccggaacctcttgttctgacctgagccactggttgcagtaggtgcctttcttttctgatgagtggctgagccactacctcacctattaaagcctaatgtaggaggagtagtagccccgccaacaaccggagtccctcgagactctaaggtgcactccactacaccctcagctcgtagtgccttatccaccatatcagcataggtggtactatcatcagtagtggttattaaatcttgtctgatctttgcattcaacctgtccaagtacttctctttcttactgaaatcggttggcacgattcccgaggtaaaccttgccaagcaatcaaactgagtcgtatattcaataacactcatgttctccttctaagtcaactgggtgaattcttttcttttaacacttctgagtgcctcgttgtaacacttggcattgaacagttcttggatttctcccaagtcattgtggtaacatcgtgaatcatggaaaccatgtcccaccaaaccagagcgtcttcttgaacttggaaggtggcgcaggccaccctatcattgctggtgatgcccataaagtttaggattctggtaatcactgttagccactactcgactttcatgagatcgggacctcccaggaaaattagaggtgcttgcttacggaacctttcatacaggggttccatctggttcaccacagttataggttcggcctgcacagaaggggcaggagctactggtatttctggagtagggatcgtaggagcacactgcaatctcaaccgctgaatctcttcatcatgctcattaattctagcttgcatttatgcaaacctattttcccattcttgggcagcttggacagcttgggcagcctgcggcaggtcagcatcaccctgaccacgtgccctacctgtgagacctctaccacagccacatacgtttgggggaatcaaaacttcctaccgccactagatccgaccgaattaccctgactcctggtgttttgcttggcgtccattctattagaacaccctacgtaaccaagagctagtctg

SEQ ID NO: 55384 - DNA, 1326 bp, Cannabis sativa
  modified_base (768)..(771): a, c, t, g, unknown or other
ttaacttatcgggatattacaatataatagagattatatatgacaaggaccgatatgaataaagttgtctttattaacatgtcgtttatcaaaaagacataatttttgatcaatagtagttcagcataaatcctgaattattatgagatcctgttcatgttattaatttctttgattcactcgttaaaatttctcagagaagatgattctacaacttctattttagaaatctaataatatggatgaatgggaacatgatgtacaattatggaatcttaattttcctaacggattgaatgttgattctctttaagtgttaattctagaatttgaatgttgtgcataaattcagatggtatcttgaattatacttccatcggtgaattaatagacctaaaggataaataagtaattagaagggtaaacagtattttgaccaaaactaattatgaaccaatgcatggagggctaatcactggaattgattatatcaatggacactgtagttaagctcaataaatataattctacaattactaaaagtgcaattccatacttacagtggagtaaccatggaattaataaagaagggattatttgattgatgagacttaataaataatctaatttattagagcttagaattataggtccatggtcctcgaatttccaccttgaaacattgtcaagggtaggggataaagagttgtataaagatgttcgaaaaaatctattttaaattggcaaatagtaattatttatttttgnnnnaaataaataattttttcaaattaattaaatatggaaaaaaaacaaaaaatgttaagacaaaatttatcgagacaagatttatcaggacaaaatatacaaaccttgtcctaaagacaagggtaggcgcctagtatatgtcttgcccctatggggtttgtctttttggattaattatgtatttaattaattagttcaattaggtaaatatctaatttgaaaagtgattatagatatttcaagattgttgagatattctctcaagtagttaagagattccctcataaattttagtaactgaattcgattataaatatttatttatttaaataattaaataatgatttaattaaaaggatttaactactgtaaataagagcctaatttgagaaatcagaacaattcctttacactaaaaattttgaaatatacagagaaaaaaggaaattggtttttctctctattgttctttgagaactcaacaaaaacaaaagttatacactttatcctagtagcccacacaatttcttgtgtgtggtggatcgattttgaagacac

SEQ ID NO: 55385 - DNA, 3729 bp, Cannabis sativa
gcataaaaaggcttagacttgaacataaagttaaaattcaatcccatgcaacatagcatatgtgaccactgccacatgcagatggtaatgctctccagtattttggagagcactgctacaagaagatggcagctctcgccactcactgaatccaaaggggacttatcaaaatgtgtttcctcaatatttttaagtgcaacacaagtgaaagaaactatttctcaccaaggaacaagcctagccgaccactaccatatttatggcacaaagagtgccaatggtcggacacatcaaatgggaatgacattttttgccaaaagtactttttcatcatcaacatgtcaaaaccaaatgagaaaatccaccaagtggtgtaggaaccacttgactgaccactgccacctttttagcacaaatagtgccaatggtcgaccataataaggaatgaggagtttctttggctaaagtatatttccaacatcagaatgttaaatacaagtaagaaaagtcactcaagggtccataacccatacaggcgaccactgccatctttttggataaaaagatagcagtgctctcttaaccaattggttaagaactagtgtggtcaaagtggttttatagcattcatatgactaaaataagcaagaaacaccatccaaggtttcccataagccatggccaaccactaccatcttttggctctgacaaacgacaatggtctcccgttagggttttgtacatcaaaatgaggttttggggtcttaggacctccaaaatatgattcaccatcaataaataagtcaaaacacaccctcatgggtccgagaacatgcacgaccgagaatctccatttggtcgtgtcaatgcttgcatctggagcaaaacagcacaaacttcccttcagtaaaataggcataaatatctcaattttatccaaatgacctggttcaacttgcatttgaaagatcatttcaagacggatctaagtgtatgtcaaagtcatagctcaattttgaagttatcaggctcaaaattagctcacaagacatgctagtacactttactcgggaattaagtagtgtaattaagtgtgagatgttgaagaactatgccacagcccatgtggcatcatatgcaagaagtgtcacccaaaaaacacttatttctaacacttctcaccaatttcatgaagtccaagccgagaggtgacatcctttatcactcctctccaatttggtatatttctagccaagaataattattttcctaatgtttgtagagttttggcctagaaataagtgagatttttgtaaatatttatttatttatacttttttattcattattaggaataagatacaggattggaagtgacgcaccctgacatgtgggggataactaacaaatcctaagcttatataaagatggtaataaggtagggtgaaggaggaatcacttgcttagtagacggctgctaagaacaccacatcactttcttcatatttttcctaagtcctccatactttttcgacaccaagcctctcttgctcaaataccattgacatacacaatttccaagaatagagaccattttattttcttattcttattggtttgttgttcccaaggacattataaccaccatctttatcaaatttgtgaatattgggtctcccatgagcattgtgttcataagtctcgatatagatttcacctagaaatctattgcagtattattgtccacacactcttgagaacataactctagtgtgtcggatccaattaataaaaataaaagtagatgtaacctcattactatctcgacgtggggggtgaactactatagatttatggtgtccattttatttattgcagttttatttagtcaaattaattcatcatagtccttttatttgttacgatcttcttagatcagttgacaaaaactgcttcaacaaattagaacaggacctttaaaatatttaagacgacaatgggtaacgtgtattcaactattttttttttaatataaaaaaatgactcaaaagaacaagctagataataataaaacaaccattaaaaatattaaaaatatgcatacaataagaaacaaaaattaagaaatacataacaacaacaaataaattacaatgagcaaaagacatagatcaaagaaaaaaaactcagcacatctacaacaaaaaaggaaaaaaaaaatctaaaacaactgaaaaataacataagtaccttcagcacatcaagttcgaaatcagagtttaaatcttcaatgatcgatttcaaaagttttgattttctctttttcagagaacgaacaactgatttcattttcgaagctataaaagatgtagggttatgaaagttttctttgaaatatttcttatctattgctaatttactaacaaaaataagataaaaaaaaaagaaaggaaggaagaaaaagaagaaactgaaacaaaaatggaagatgcgaagggagaaaaataaaaactaacactagaaatgtgtggatttttatacaaaaaaaaaaaataattaaaaagaaaagaaaaaataaagaaaaagattaataagaaagagagaatggcaatatgaatgaaaaataaataaataaataaaaaactattataactacaaataaaaaaaaaaaccatttcaaaaaaaaaaaaaaactacaaataaaaaaaccaaaacttgtaatagagagttttgatcaacttttcaacattattttcaataataaaaaaaactgtcacaacatgacagtaaccatcaaatcataaacttttaaattatttaatacaataaaaataataagaaattttcttcaagtgacatatattatcaaaaatgccacacaatttttttataaaatacacaatacctactataaaataaatacattatacatataaatattcgcgtgctacataaaaaaataataaaaaatagtatacgttgtaaaaatcataatattaaataaaataaaatgtgttttttacgaaaataagaattaaattttcaaaaataaataaataaataaaaattctcccaaaaaaaaaaaattaatgcaaaggatgctttattgtattgatattgacaaaagaaccgaaacgacatcgtttcgttttggcaccaataaaacgcattcttaaggctcaatgcaacggctagttttttcttatgtgaccgttttagagcaccctaaagctaagattcaaaatatgaaaagataactcctacactgtccatgaagctcatcactatagaggaagaaagcgaaaaagaactcattctgattcaaaaacaaaatacccagaaaagttcaaggaagaaaagatctgggatctcagaaaaaattcaatctttttcagctaaaattagcaactcaaaatcagaatcaaagagatcaaaaatggtgtactcttacacacccacatattactcttctctccacgactccatcacctccttatgcaagaccattctccctttcaacttcaagaaaaagcggctgcaaggggccgagcagaagctgtcgaagttgcaatctgataatctaaaatggcagcaggattctttccaccaaatgctcaacttgatggggcttcataaagaagggattctggctgaaactgaggtttctgcttttcgaacccatttgctcgatacccttatagcttctccagctgaacaagagcaaacagt

SEQ ID NO: 55386 - DNA, 1262 bp, Cannabis sativa
ttgttttaattatttaaacttttagctacattacacttccaaaaatagtatatttatgaagtattaaacttaaataaaaggtaatttttacgtatttttcttcacatttttaaattaatattgaactttagctgtgtaattagatatctaattaaaaaaccgattcaatccaattaataattagattggattttgcggtctaattgaattggattggatgatgattttccaaatctaattactaattggaagaggaagaaaaggttggattggatgggatgcctactcctaatccagaatatgatcactctcttgtatcaattacaatcattcccttctatcaatgcgtggaccttccaacgctagaacttgctggctgccaacaaaggcttacaatttattgtttattaaagctgtcaagagttctgattggaagtgggaaattaataactatattactcgttgtagaaatcttatgcactcctttaaggaagtaatttttccaaaagtttctaaatcacaatttagctaagcattttctcaaaatgtaactagcattattgaggcttcaatactaaaaaacattgtttgtaattgcctgctcataccaggcccttaaagtaatgcaactagatataagcattaagtaatgagctaatggattaaaatgaaaaaataaaaataaaaagtaacaagcaaataaaaaaccagaaacatggatgaaagctgcttttaggccagacatgaaagtagcaaaactcaaaacaaaaaaatcctctttaagaaatgacaaatagatttactcaacattgtctaaatataaaatacatcgacctcaaaatgctgacaaaaaaataaccctcacactcaatcacggagaaactagtaaaagaatccaagaaccttgcctcctacatttttcctacgtgcctcttcgtgatccatgattccagcagaggttgtcaaaacaatgtagccaaactgcaagttattacatagagaggaatgaatgtaagcaagaatgagatagactgagatagacactctaaggtttacaagatacaactcttcatttaaagtggccctaaacagcatttctagacatcctagaattttgtaaacagaaactacatttacaacaatcccatgttcacattcgcaaaatccctaaataaataagaataaatggactttttctagttgaacatacagatacttcagtaatcatcattcataaaattggactaacctgacgagatgga

SEQ ID NO: 55387 - DNA, 1842 bp, Cannabis sativa
  modified_base (1681)..(1684): a, c, t, g, unknown or other
tgttttttattttatttcatttctataacacataagtcttaccattcttataaataagtcatataatatatatgaaaaattaatagttaattattatttttagagtattgttattagatattagtggtactcaacactatttagaagagatgttttacaattagttagtaatcttttataaaaattactacattaaattatatggaccaggaccgacgacccaacgatattttaatgaaataataaaaaatgggcccattaccacataagcaagacggtcttttattttttggttaagtttccaacacactaatggttgttagagcatttttaatgggaattctataacaaatatttgatgacatgaatatatttttcacatttttaataggtgtttgaagtgattttttttttttctaacaatgacattcttatgtattgttttctttagttataactgtttcttttttgttttctaaactggccaaggtttcttgaatatttgactgagtgtcattttatatttacttagtggcttgtttgaatcttttattgatttggatacttgtagaagctagtatgatttaattgtttatattttgtaagagataaatatatatatatatttttttatctatttcattgtattattggtttagaattttgtccaaatttaattttttatttttatcttatataacttgtttcattttagttaatattttatacaattgatttcattttagttaatattttttttttgtaatgcctttttttttttttattctgaacggttaatattttagtggtattttatatgtgttagtttctattaaccggttattttttaaaataaaaaaaataaaaataagaaatcattatcaatgcctttttttggtgtggaagttttatttttatgtatattgtttaaatttattaacttctttttctttgtatgtattatatatgattggttttatttttattgattatttttattggtacatgtttaatataaccggttttatttttattgattatttttattcatacatgtataatataacttgtttcattatttctgtaatttttttttgtaaggtaaatgtttattctgattttttttattaaatgtcaatattattgttttaagatatagttcatattaaaaaaatattaaaattattattagcacatacagaatctattaatgtgtttttatattaaaattatatctttatctttaataatgctcttattgttgttgtttctttactttcttgcttcttggttgttttgcttgtttttgttttggtggtagagttggattagtgcatgtctttctgttgtggcctgtctttttgcaactgtccacactttatttatgcctttgactatccttttgatcttattcttcttttcctagctctccctgcttgcttttttgtgtctggtggtagaactatcatttccaagtactcaggcattatccattcactttcatttggtaatgagtttgctattgtgtcatatgttactttcatttcgtctgttttgtcgtagtccgcaacatagtcataaacttgcagtcctcttttcgagaatatagcgattgcatgagcatgagatttcatcttgttggaaccagttacagttacatgttttgtccagtaaattgacnnnnaatttccctttctctagcacattcacttggtggagtattattgccaccagtgtaacctgtttttctaaacagaaaaaattattttataaccagttattttatactttacttgtatctctctaatatatattttatgtatataaatatatttatgttta

SEQ ID NO: 55388 - DNA, 1356 bp, Cannabis sativa
ggttacaacttttcccgagcaattagttttccagataattcaatttctaaacaattggttttccagatatcccgatttcctgtcaccataactgaccgttcctaaggcctcttcttgattgagtttggatgtgaaggtgatcgacgccgagttctcctacagcagctttggacctatctcaaccagcccttctttatggatattccaaactctttggatgttctaaatggggacagccttcttaaaatccctctttaggtgcaagttttcaacactcatttcctcaaacgcactggccagctagcagaacttgtctctgcttctcttagccacctcttagaagtgtatcggccatcctttcgtgaaacttggggaccatactttcgtattagagtcatgtttgatgtggcacaccctctcccctggggaattcctgtcaatttctcgggtaaaaacaaggtggttaggcacgaattaaaatacgaaaaatctccccgatatttgctttttagtggtcgtatgggacacagctataataagggttgcgtggactatatgaaggcttgtgatgaagcccctcttccgcccgatctcaggaatgacatcaaatccattactgacaaagttaaggttactactaaccctatgtggtgtcctgaacagcttactttcgccaaccctccggtggccaatttcatgacttcaaaccccgccagtgccgtgtgtatctctcttcctgactctatgccttcattccctatccactgccctcaggaccaaaatctaacccactaccaaacccaacttgtgggcctttacaagtcgggcccctccactcaaacacatgacactgtgacatggactcaaggagatgtccaacccaataacaccaatctaccccaaactgataccaacccaccctcatttacggctctcctaaatgcaaccatgagcaacactagtgttcaaaaagctccacaagcttcaacatctagtttttcaagtacctcacaaaattctagtagctccaaatctactagttccaagtattgccatgtccctttgcccgtcaacatccctctccttgacactagcaaacggttggaggctatgaacctaacctatcaaccaggagttgccactccctctagctcaaaaggcacaaaaaggaaaagcaaaccagctcgaaagatagcttcaaaaggcaaactgagatggtcaatggggaactttgtcaacagatcaagcgctcccgctcggacaatcatcaggacactgaaatctctcttggaaacgcaggcctggccgctgagaaggcctacccgccgccatgaagcttgtgagctggaatgcacg

SEQ ID NO: 55389 - DNA, 979 bp, Cannabis sativa
atttcaatagtcaacacaagaagatagataccaccacccttcttacccgcttcaccactatattatatattatatatattatattaatatggctttagcttaattagcatcaattatgggacaagttaatatattttcttaatttaattaatttatttattaaccatgcaaaatgtcattataaatccacacatatacatattagtttgtgtaataaatgcgtataattctgtttcaaaaaaaaaaatgcgtataatttaaatgtgtatgtaatattactcaaataattttaagtaagaattgtattttttttacaatatggttggaattaattatatgttattattttgtgtaaaaatgaaaaaaaagaaaagagagaaaagaaatatatgaatttagggaatttgttttccacaattttgtctacctcctcaatctccggacgagctataagcttaattaattagtaatacttgttaattcctaattcatatcaatctatatacatagtttttttttttttattatttatatatataaataatttatttttgaaaagatatatggaggagactattagtgaaaaaaaaaaagaatacaacattcctttggctcacatgtgacttttttttaaggtttaaatttgaagtgaagacataaaatagaagtcaaagtgagttttgatatggaagatctagaatttaaagtaaggggagtgtaatttttctttataaagcatgagcagaagtaaagttaaatgaagtaaatgaatttggtgggatttaaactcttaacttctatcttatatgtaatctaacttaattattataccaaaattaatattatgtctataaatattattttttattacaaatatatgttaactaactaaattacatatacattttttaaagggagcggctgccccatctcacttttatgtgggtccgcccctaggttagttatatcacatacttta

SEQ ID NO: 55390 - DNA, 697 bp, Cannabis sativa
tgccccgatagtgcttctgtagagtgttggattgtcaatgggagtattgcagactttggctccttccatatgaagtttgactaacaagtctataatgtacttggtttgagagagaaacataccctttgaatctcgatagatctcaacaccaagaaaatagtggacatcacccatgtttttgagagaaaactgattatttagatcagtaataagctttgtaataagtgtctggtttggccccgtgaccagtatgtcatcgacatacacaagaagaataatcacattgtcaccagacccataaacaaagagagacgtgtctgacttcgaagctttgaatccccactgaagtaaactaaccctgagcttgtcattccaagctctaggagcttgtttgagtccgtagagagccttatgaagtaaacaaacatgatctggtttattttgatcaatgaaaccagggggttggctcataaaaacagtttcagacagctgaccatttagaaaagcattactcacatctaattgagtaactggccaattgtaagtaacagctaaggagaggacagttcgaaccgtgactggtttaacaactggagaaaaagtctcagcataatcaatccccggagcctgcaagtaacccctagcaaccaacctagatttgaatctgtccaacgacccatctgcattgagcttgatg

SEQ ID NO: 55391 - DNA, 1706 bp, Cannabis sativa
aaaaaaaaaaaaaacattttgtaaaacccatttttatttgagatgtaaaaagttttatttatttgtcaaaaaaaaaatatagtgaaaaatatgtatttatgctggtgtttcgacatatctttatctgtttcgattattttaatctttaaaagagttttttaatataattttttttataattatgtatgttgtaattatttaaaattatctgtaacttttttcaataaattatagtttaaagtgtcaaaaataaaatttaaatagttgtatattatatgtataagaaaaaataattacttgtgcaacaaaaaaaaaaaattaaaccttattttttacactattatttaacaaattttaagactttacaaatggtctttttttttgagagagagaaaaaatttgtcatcataaattaaaatcatagacatttacagcaacaaaatatataggtggagaacatgtctttagacaaacacaatcttcatccaactctagtacatactttgccaaaccgtgagcagtcatattagcactacgtttgacatgagtaacaataattctaaaaaaaaaaaaagactagatatatctaaaattaaatcattaaaagcagtgagagtaatagttggtgtattacgagcttttgaaccattaaggcatccacttctatgtgatcaattgacaattgcagccgtcagttcaaactatgaaataatagtagatttttatgtgttggagtgtctgtgaggggtcacgtgatcgtaatgtaattcaaatatgtaaggtaaagaagtttctttttttgaaaaaaaaaaaacaaaattatgtgtgattttttttaagaataataggattaatatttttcttgtaatgggaaaacttcatttggccaaacaaagattacaaggacaaaaaaaaaagtaggccaaaataataacactcacaacacatttggagtaacccaatgacgcattaaaaatataaaatcaaacatgcttaattatttaaaaaataataattttttgtttttagaaacaaaaaaataaatttttaattatgatgataaagatgtttttcttagtctctattatcaaacctaaaaagaaaaaaaaaacaagcatatttttgatatatagtaagcatgcattcaaattagagcacacctcctctttatcaatcaaattattctaggaggaacttatgcaggccaagctccatccaccgtaaacctcgccttcatattcatagcaagcatctctcaaccccaattggactaattaagcctttgatggagtagaagttggagaatgcgaccaagagctttccctcaacactaacaccatgcgtttcatcatcaaggatgttgaaataaacatttagaataatgacgacatgatcaatactaggggtaggggcttgctcacatatagacctatcaacaattcccaagactcaaccaaggatccaaaatagggggcaattcaccatatgcaaggtgaagaatgaagattaagaatcaggatgtctaattatatcggttaattaggatttttgtctctcgaattttaacatgcctcttaaatttttaaggtcgttaagaatgctttttgaactattgagattgttaaatttaaggatttttatctaattttagtagaaaaaatctaacacggatgaaagttcaaagacatgatttagtacatgtgaaa

SEQ ID NO: 55392 - DNA, 1182 bp, Cannabis sativa
ccgggaagatagaggcaccaactttgtgggaagagtcctcgtgaaggagagtcccctgactgctagctacatggagggtatccgtgagccaaggtctccctctgttctaagaactaaagctatctactcctgagcagaatatggattttacaagaagggccaaggcattccgagacacactaaaccgggctacgcctttagcccgctgaagcctcacctaaacgtgtgtcagactatggacctagtgactaggcttttttgagtacgatgtcagtggttgtctcccataacatgatattgtacaaagcatgtgtgtccttgtgtacttgaccaaatgatccaacggctagggataaggaaaattcaaaaaggagaaggcctgaggtgacatgcgtccgagacccaactcgtacaatctgacgcccttaaatgccatatgggaaatatgccacctaccaatccaacggtcagattttactcgaacgatgatccatccaatgaagcacatgtaaagaagttggcctataaatacctccaaaaaagcacaaggaaaaggattttttttcggatggaagactccttttcatcatcatcctaagaaaacacattttgtaaccttactatcatctctagaatattcctactaagcttcctcttcttcaagaggagcacagtagaagggtgttttagtccattgtatctctacttgtataaacagtcaccggtcgatgagcctaataaaatggactcgtggactaaggatagttaacgcctgaaccacgaaaaaatctctattttgttatcttactatttatcctatctttagtttccaaagctctaaaaatatttagttgccaaaaaaattggtaaatattttggtactttcattaagagctaataaaagaaatatgcacggctgttaccgacgcaatcctatcaacaagagaacccccgtgagaaaagaaggaagactgcctaatttcttgccaaggtctggtcgatggtcaggaacgtgtaggttggaggtgtggcccaaagtgaaggccgatgccttcgcccgcatatggaaaatacagcagacgagcgtatgaagtcttaaaacatttgatataccaacattcatctttaaaagctcaaatctggccaaccaactctctgggggtgaccgatcgctggcatcct

SEQ ID NO: 55393 - DNA, 1044 bp, Cannabis sativa
  modified_base (950)..(952): a, c, t, g, unknown or other
atttacttactgtatcttgttttttttttttcaaatgaaggatccttctctgttgcattttgattttttttttaaaaaatcaactgttgtatttaattttttttcatcttttcaaattatgcatgaaaatagtatttttgtaaaataaggcaaaatatcggagcgtcacagaaaccaacatgaatactttgaacggctgttacgtagagaaaaactatttttgtagtaatgtcagctgggattgcgggagctacacttgcattagagcatctcacccagcaagctttctattgttttctcaccaataacaacaagactcaaacttatccttggaactaaatggtcggggctaaggaaatgggttgtcgaatggaggtttcaaccgattgtggtggtggtggctgcgttcgggtcttggtggtagtggtggttgatagaaaaagagagaatgatagaggaaaggagggagggaaagataagttatgaaaataatgagaaggataatttgggtaggttatgaaagaataacataaattggtaatgtttattagtagaggattgttttattattagaaccacatttaagtttagaaactcaatttttttttttttaaatagtgggtataattaaattttttttacataatacactaaaaatttgaaaaaatataaaaatatgttaatacggaaaaaaaattatttttttcattttttcatttacaaaaatacgctcttgaataaaaataataaattgttcgatattattttttgattgttttatagttcatttatagttattataagtgttgcccctgattttgcccaaaatatgtggaccaaccggatgatgacacgtggatgggaagggattagcatctaaataaaacagctaagtcttctcaaagcaaaggattaccttagacatgcctcccagagaaggcatgtgagtnnnatatgctcccggagagcaagatagcaacaaagcatctccgggtggggtcagattcactctgaacagtcatctcgcatttaatgccgcatggg

SEQ ID NO: 55394 - DNA, 1189 bp, Cannabis sativa
ccataactaactttgatgaaatgaggactaaagccgtttgaagaaccttctctagaaaactccattcaagcctatcataggctttgttcatgtcaactttaatggccatcaagcctcccttcccttttttcttttttatgacttgaaccaattcttgagaaaggatagaggattcagctatccacctccccgggataaaagccgattggagtggagaaacgatacggtccatcatcgaccgaagcctttgagaaataattcttgttatgatcttgtaaatgaaattacatagtgcaataggacggtatttctcgaccagatcagcattctcacatttagggattaagcacagaaaggtgtgattcagggaaggacttagatgacctgttcgaaagaaattctgaatgttctccgtgacttctaggccgatatctccccagaaatttctgtaaaagcaacccgagaaaccgtcgggtcctggagactttagaggatgcatttggaacacctgcttcgttatctcatcgaaggacggtatatcaatgagtaatgcattctcctcattagtcaccgttggactgataaactcatgaagatctacattcaaactcacattcgaactttcaaataactgttggaaatacttgttaagaataactcccttctccttctctttaaacacatggttaccgtgatcatccagaagagaccaaatgtagttgcgttttctcctgatctgagtggaggcatggaaaaaatttgtatttctgtccccctaaagcatccaagtttccctcgatctttgtcgccaaattgattcctgacgaaaccattgttcagcaatctccttttctatcaattcttcttcttggggaatcgacacagtcacttctttactctggagatcaatcaattttgcttcaagaaccttcaacttctcagtacaatccccaaaatttctcttgctccaggaaagaattttctgttgcaccttttggagtcttctcacaatgtccccagggtctccaccttcacgagaaaggtgccaagccagtttaatctcttcaaagcaactttcttctctcaaccacgcctcatagaaccggaagggtctttttcccctctgtttaaggagattagagtcaaagataatagggccatgattcgaagctataattgggaggttacg

SEQ ID NO: 55395 - DNA, 1138 bp, Cannabis sativa
accggcgtgatttctcgccggtaaaaggaagttttaccggcgcatttactctacgcgtcggtaaaaagtcttttaccgaccaagctttccagataagttttgccggcgctgttagtgtacttttgccggcgcaaaaatgcgctggtaaaagtggattttcttgtagtgtgattgtatcggtaagatagtattgttttatttattttactttttgatgatttcatataacagtgtcttttgaaataattttttgttttttttttcattgttaaatatcttataaatatattaatgtatgttatgcaagaatatataaagttaaatctgaatattttaaaaatttagattgtaaaaaagaattaataatgttagaaatatatattatgttatatcttattaaaataagaatgtttaattgttattacagtttgggaaatcataaagtaagagtttggattttaaatgtaataattgaaaatgaaagatatgccattattattttgtttgattgaatatttggaattattttataatttaattactatgttatttataacaatctatccattttttaattgtagacagtttttagttgtagacagttaacctaacaaagaagctaatgctacactaaaggagaatttaggagatgctattcggtgaactctatcattttagttgcaattgtttaaagttttattcactacatttttttgggaatcggatgactgtataataattttaaatttatgtttttgtgactgtaacattttggatactaaacgttgacatgaatttctttgtgttaggttttaatttaacgattcttataagaataaataatggtaacaaaaattaaaggacagaattttgaaagggttataacccaacccaacccaacccgatgtatagtttgttgggttgggttatacaaaaaataagttttgaatgggttagaaatttccaagccgacgtaattgggttggcttgttaaaataccttcaactcggccaacccaacccatgtacagccctacatgtgactaaatcaatggaaatgtcgtttggaaatattttgttttctaattttttaatcacaaaatgaaaataaaatttttgtttttaaaaattttgttttt

SEQ ID NO: 55396 - DNA, 778 bp, Cannabis sativa
ttttttcttatcaaagttttatagacttgacttgaatctattatggtttagaatattaccgtttaaacaagaaacaacgaccaattagttatgaattaaatttaaaagtcttagttaagttgataagtaatcattattttgtttttaaatatttttttactttattaaaataaactaatatgatattttattgttaaaagttggcaccaacttatctactttaatttttttttctttctttctttcatttttcttgataataaacttatattatatttaagctaacaaagaaagttacccttattgttaggtctatagatggtctttatttgtataatttattattgacattgacttctattacgtacgtactacactacaacaccttaaagttatttatgcatttatgttagtgtcttttatccatgttcacatctcgatgagaacaaagcttaaagttaaaacaaattcctttctcgtatatgtgtagtgtagggtttgaagtttgagtctatatatttattttatagataatttatgtattaatatttttaaattgtttttttaaattattgattagcatgattttaattgtttagaatattttaaaggctaatcatgcatttagaatcatttagaagtatattagcatatttttggtaaaaaataatagaagtcggtgagtttagttttacaaggtagaacttaattacaaattttgacaatcttagaggcagaactggacttggagcttaacataaaagttttaaatctcgtt

SEQ ID NO: 55397 - DNA, 1103 bp, Cannabis sativa
taagcaaaggaaccccctgaaagtaaaatttgaaaaccacaaaaaataattagaatattgagtataaacgatatcctcttcttcttcttttgaagatgaatgcaaacaatatctcatatgaaatttagtgtcgtataaaagaagaaataaacgacatgtcgtttacgtaatgattcaattcattcacagtgcacaaataccattacaaaaggaactggaaaactcagaagatgtattttcttaatctgactttaaaataattataataatgtttgtgttaagggtttaaatatctaataatgacagatatatatgaaattctagtgacaatcatcatatactatatcggaaattaatatgcatgattcacacaaaaatgattcctattttagtttatgcattctagtttatgcaagtaataaagaaaaaaaaaagtcatcatggtcattaatttgatttgagaaatattcttccaatttaggatatataattaaactcatttattggtattcattccatattgtgttgttacaaagataggatgagcatccacttggtcaaattgaacatacacaaaatgctagagacaaaaatttttaaaacataataaatcatcgttactaaaaattgttatctagtttggtagacaaaaacttaaaaaaaaaaagtccaagatgaatttaattgggtggggggccatgaaatgggtcaatttcgtacaaaataaaaagagaaatgctaaaaaataaatgaaaattaacacatagacatcattgacttcacatacgtgcttattttatcttacttagataaggcgaatcattaagcacatggctggaaaatcattaatagctatagttttcttatataaatatatatatacaattaaattcaagattttaatatctttttttaagtaaaataatactaataatagtacgccattactacgggaatagtggacttaatccagatatatatatataaatatatatatatatatatttctgtgagatattggagataaagtagtatttaatcctaagtttcgtagtgtgcagtagtagttatccatatatgagatcagttcacattttaaactg

SEQ ID NO: 55398 - DNA, 614 bp, Cannabis sativa
ttttttttttataaaaaggaatttctcataaaatgtttttcttattcctatttataattatagggtttttttttttttttcttttttctttcatgtttttgaattttaatttcttttaaattttacgacttgtctattctcttctattacttagaagattacagtaaacaaaaatttaattttttttttgatataaatcaataattttcataaattaaattcttacaatttaaataaggaataattttaaaaaacacacgaacatgacaaaaaaaaagttacaaaattacgattatacacaattttataaaaattacaatttttaaaattttatttacataaaatataattttggatgtatttttaattgggtgtgagaatgggtgggcgtgctacaaggtcacaggcaaaggggagatgggttcctcctcaggtggggacgctaaatatgaacgttgatgcgagtgtcaaacagaacatggaagggtcggggctagggtgtggtttgaaacaatgaagagcaagtggtttatgctttctgcaattgtaccgcatcatactttttaacctatccaagttgaattactagttatacaagctagtttacaagcagg

SEQ ID NO: 55399 - DNA, 908 bp, Cannabis sativa
tagttggtcaggtgttagttttggttgttggttttaggctctatcgacaaggatcaatcttcaagcattggaggaagcggcaatggtcgcatggggtatttggaaggcccgtaacgaggttgtttggcaacaaaatctcctactattgcatcaattgtactgtcagcaagatcactccttgatcaatttctttttgcacaatcacggatgacgactttattgtctaaggtgggactgctttcgcgtgtgcattagactacaccagttgctgatcagatcaatttcaatgttgacagggctctgtttaatgatgttagccgttttgggatgggttgcttgacctgaaatcatgtcggtcaagatcttgaggccttcactaagagcaaaaaggggaattgtgttagaccagagattgcagatttcatcgggataaaagaagctctaagttggattcagcgacataattggccaaatgttttattggaaacagatagcttggtctgtgttcaggctatccatagtaagttgcatatgccatctgagttggtttgttggtgaatgattatcaaattattttatcctctttgagtcatattgttattcagtttgttgaacgatctgtgaacagagctgcctattatttggcgcgtagctcttattttttcccaagtcatatttttcaagatcatcagttaattcttgaattacgtaatattataatggtagattattttggttaatggaagtttatttttattaaaaaaaattatcattaataataacaattttttcttgaaaagaaaaaaaaaatcatcactagtataaaaaaagtgccgacaccacatgtggtatttgttgtagtcttgtagatgtttttttttttacttttcaactattaattcttttta

SEQ ID NO: 55400 - DNA, 1154 bp, Cannabis sativa
  modified_base (269)..(269): a, c, t, g, unknown or other
ttttaaaaattagatttaaaataaggtgtcaaatgtaaaaattcctttttataatgtgcggtgcggtttgaaccgcatattaacaattcaaaattgtaaaccgcatcgtatcgcgcgatttaggaaaaattcaaaccactgcatcacaaagaatttcaaattgcatttttttgcggtgcaggcggtttgagcagtttgatgagcacccctagtattaattatggtataaatacttaagtttaatttttggttgtaaataaatatttaantttaatttttagcggtaataatatgtaagctattattctaaaactaatgtaagtacctagtcgttaaatctcaaatatattgttacatgacaatcctttattagttcatgtcattaattttttttattttttattaagaaattgatttaaatatatataccaataaaaaaagaaagacacgtagataataacttgatacttaacgttcaggtactttagaagttctcaaaatatgtaacttaggtattattatcgtcaaaaattaaatttaagtatttatctacatccgatagttaaatttaaatatttatgccataaatatttttttttaagatgactagataataacttttcttaaggttacccctaaaaaacgatttatgttcacagttgtaggaatttaccaatttaacctacacgcaacaaaatataatcaagcttttaactgaggtcaaaatagacattttaccctgagtcaaacacaagttgactcaatcaaaacactgtcattttgatcgtaacacaaaactctcagaactctctcgaatcccccaaacacttcatccttgacctaattgaatcaaaccctagcaaagctgaagaaactcgaagactgatatctacccaagatcgagccttatcccctttcccagatcaaaaccagacccctaaatccatacacacaaacatataaagcagtaaaaacaaaaacaaaaaaacaatagacagataacactaaatttatagaggttccgtaaaatgttgttgggtacttcctctttcgagcttgccttagaaatggctcaatttctctattggagcttcaagatcaacaatttacaatcatggattctaaatcaccggtacgattgataatcctttaat

SEQ ID NO: 55401 - DNA, 1454 bp, Cannabis sativa
ttcatttataagtaacaaacatacattaatttatttagtaaataagtctagatcagatgtttctctgggacaagtttaagagcagttctcttggagatggtaatagagtaaccagcaaactcatccatgttgatatcttgctctttcattccatcaggcaatttccaatcaaagctgtataagagatttgcaaggcctaattgaactattgttgttcccatgtaaatggctggacacgcccttcgccccgaaccaaatggcagcagctcgaaatgttgacctttgatatcaatggaactatcctcaaatctctctgggatgaactcttcagggtccttccagctgttggggtctcttccaatagcccaagcattcacttgaatcattgtctttgggttaatttcataaccattgacagtgaagtgtgacatggtctctcttgcaagaagcagaggagctggagggtgtaatctaaaagtttctttgattatcatattgaggtattgaagctgatcaaggtcagtttctaagacttttcctttgtttccaatgcaagttctaacttcatcttgagccttcttaagcaatttaggcctcttgattagctctgccattgcccacaccatggtgattgcaccagtatctaccccacctagaaacatattctgcaatcatagatatattagtactcaagccatgattggggaaactcaaagcttagccaagtggctagttaattgctttttgtcaaggataaaaataaaaacagatggaagagcttaccaagaggactcctttgacattgtttatggttagagaagcagcttgaaaaccagcttggtctttcactattttgagaagcacatcaacaatgtcttcatgctcttttttttctcttcctgaactaagatgatcatcaatcaccctttgaaagaaatcatccatcttgtgaaaaatcctttcgcgcctttgttctaaacccgaaagcttgtcaacgatccatcccacatatggaaagtactcagctgcacagaaagttcccatgatggtttccacctcttgaactataccatgaaaattctcatgagaaaatttagcatcttgaaaagttgtcccaaaagcagtcctgaaaattatgctggcagtaagagtaaaaagcttctcagtaagatcaacaggagcaccaggacaagatgaggagtgatgagatatggagtttatgagcttagtaaattcttcttctctaaccgatcggtatgaatttaccctcttcacactgaacagctcaagaacacaaattttcctgatctctctccaatattctccatatggacaaaaagcagagtcttgaaaattgtatgtcagttgcttaggaccatgcaattgtggtctgctgcaactgctgagatcatgagtcttcatgacttgttttgcagcctcagcagatgatataa

SEQ ID NO: 55402 - DNA, 1232 bp, Cannabis sativa
actgcagttattcgctttttgtagacaacgattcgtttcctgaggttaggcccccttgtgatagcaggtagtgacctactccccttttagttgtattataccaggggaattactatccagattgttataggtgaaatctgctataacacccttagcattacaatcaatgcctggaaaaactcgagtgttggacagcctagggtgtcggacatcctagggtattggacaacttcaggtagggatgtgggagagaatgaggaagagagatagagggaatttgtcacacacttagagttctagatctagtttctagcttggaggcagcttaggcaacttaggttttcagtcagaggttaaggcctttatataggaagccttaaaccctagctttacaacagaccaaaattcccttgattctagatattattcagccattttgttgggcttcttgggcccaattcatagcccattactcctggccacgtgtaggagtgtccaatgaggcctgcatagcagtcctttgccagtcaggcccttgtgctggccaggctggcaggccatggtgctttccctatgctagccggccatagggtcagccatgggtggccaataaactcctaagagtgagctggtctgtcacttgatccccgtttgtgtgctgggggtaatagtttgctatgatgtttacttggccttccttttagtgagttgtactaccacgtggcacgggtcttgtccacgtaagtataccatgtcatgaggacaaaacttggaataaaaggtatattatacaacaccttcacttagatgttatcctacatcagtaatcattgactaaatattcctaaacattaatatattgttggatgttttatttattgctaagtgatcttcattctccatacaatacaagtcaccacctcatacatgaaaaataaatttttcaacatttatatataaattataaaatattaaatattaataatttatcaaacaagtatatataaaaatgtttaaaaaaatcgagtttttgcaaatgtcaatcatataaacgaaaatataaaactgtatacgtctgcagaaacagaatgtaattttgttactgcataaaccaattttgcaacgacagaacagacagattataaaaataattgtagaaaattaaatcacttgacacttgtacgtggtatcagtgttctttcaaacactcctagtccacgggaccacgccca

SEQ ID NO: 55403 - DNA, 1203 bp, Cannabis sativa
tctctctctctctctctcttccgatgacaaatgcgcaaccacgagccaccactctttttgtccactctttcttgtaacttctttattattttttttaatttaggatttatgtgtttttgagatttctgtatttcacagatcgtcggagatctcgactcttcgaggatcttaagaacaattgaaactcctatcttggtttcgaggaggatgatgtctcaactatagctcaacggttttagatcgtcaggaattcttttataccgatatttttccaccgttgcctattctacctagtattcgcgacactcgtatagcgaacggttttatagagtatcgagaattctatacttgatggtgtaaattaggtattttgggattttagtagtgatgtcacctacacatgtgggccatattttaaagcccaaaattgattctcaatttttttacaaataagatttattatttattttaccaataaataatatttaattaattctcactctcttatttcattaggattaaaataaatattacattatacaaaaataatattttctctctctttaatattatttaagataatattatatttaactaattaatatagttttatcaaataaaactaaatagttagatatgactttaataatccaattcataattgatataattattcaaaataactatttatacaaaattattacttttcccttaagaattctcatagaaattaattctttctcaaattttcatcaagtcaaaccttcccctctatagtgtttcatagaggtgactgggaaccatagacctatatttcaatgttctaatcttatccattttgtaagcttcacacgtggaccctgttccaggaacactcaatgctaatcagtcggtcaatacctttgaccgtggttcctggaagataggagccctcgctcacggaaagggcctttatgaaaaaatctccccctgcaaggcagtgatgttggggggcagtttattcgattagaaatcttccctagtttcatggaatgaaaccatatgctttcacaaaggataaggtcttgtcacaaagcgtccatataagtcaagaaggaagtttagttgtgttgaaatctcgtttactatcacggggaagctcatctcgtacgtgttattctgcagacatggctgctaggcttttttaggtatagtgccaggatt

SEQ ID NO: 55404 - DNA, 715 bp, Cannabis sativa
aaacattgtcattgttgtgtattctgtttatctcgagatggaccttccttctctttcattgatctcgctagtctcatcagtcagtagttattattcatggctcgacgttgtttttaagagggtgagtttgaatatttctaccaactgtattttttgaggcgagctgtctgaacgtatttattattgtataatttgggcaggttcatattccagctatattacacgtgtcagcatcatattgctactcgaagtatgggtataacaccttgccttttctcctttggcttgatcccgtttcccgtttggcgttcaactgcctacagaggactaaagttgactaactttcttcaggagaaaatatctctaccttattgtcttggttaacagaatgattaggacaatttttccatccccgaaggcaccgggcctatcgttttgcgcaactctgtctcgcagatcagaagggcatcctaaccctggggcattaatagccgtctttctccatagaggttaggggtgttcataaaatacccgattaatccaattcgcatgatccaatccaatccaatcagcaaagtgcggatatccgcacttaaaacggattggattggaaaattcaaattctgcacttgtgcagattggatgttgattgatatagtaaaagtaaccaatcaaatccaatccacacatctttatatatattttaaaaaaaaaa

SEQ ID NO: 55405 - DNA, 1031 bp, Cannabis sativa
tttgacccatttgaatttagacgaacccgaaaattgaaaccctagttgggaatattaacttgggcgctgggtgaaaccctaggtgcccaggttcgcttccaggttgcagattcatgtaatttaagctcctgaggcttgaatttggttgcttcatgtctggtacagaatactaaaagatagtaagttagatatgagttatctcgaacttccattttggagttcccaaagtcaacctgggcacagggctagggacccctcccaagtcgacttgctatgacgcgggactactcaactctgagatgtaatctttcttgccacgtgttaaatattgatgtacatgtcatcagggttacttttggtgtaaacatctctaaaagtttcgagttctaattttgttttttcggtcacaagttagttggcgagtttccaccgccaacaacaatgaaaatatattctcaaaactatattaaattaacaccaatattctacctaattaaagttattccaaaatatcaatacttcattgaaaaaaatatatattaagtatgtgtaaatgaaatatgcagattagtttagtttgaaccgctggcgagaattctaaaataatgactgaaccaaaaaattataaacggtctggattaacaaaaccattgacactagactcattggtctcgaatggtttaatctaaattagttggagtttgaaatcacatattgtaaattataaaaactaccctatttctaaataactacattacatagcgtcatctaaaataaaataataatgaaaaaagagaaatactaaaacacacctgtggtgaccagcatcctcctcaatgtcatatcgttattggatcaattaaatatgaagtctcatataatcgctaactaatcataaagcgttacctctaagttgtattaaacatcactggtgtctaacaaactaacaaatcaaccaaaaaagagatacactttcctacctaggggtgttcataaaatagctgattcaatccaatccgcacgatccaatc

SEQ ID NO: 55406 - DNA, 1691 bp, Cannabis sativa
ttgaattttcaagaactggtttagatcttttaaataactctccatgtacccgaatgattgaatgtaacacattatgaaaatatttgttaatagtctcacccgatctcataaattaaaatctaacgactctatttttcacatgatgagcaattaatgtaagaatatagccacttgctcatctacttgtaaatatttagatgcttttaactgtttcaagcattatgcataaagtgctaaatgctttcctatttatcctaagttgttcaaaacaaatgacatcactctcataagctatttgatgcacaatttgcctattgacaaaaatatcaagcatgtataattttcttctcaaagagcttgattcaatactacgttcaataattttttttccataatttgtaaaaccattgcactacatgtaacacacattcatccaatacatataaagagtcatgatcttcttctttcttaaaatttttctttcacttaaagttaaacgaactattatcctacaataacaataattaagtaaaaattggagaacatcatttcttaaaatccaactataaacaaaaataagcattttgcttgaaaatgactccaaactattacataaaacattaaatactaggatttatattttcctgaagcaattgtgcaatactaggactttcttaatgaaatacttcatcattgaattctcaccctctttccaataaataacaagtggataattatttctttatctaaactctatacaaataatacttttttttttaatctgaacagagccagccaaatcatggtaaattttgttcactatactcaactcaactactttttagttcatgtcaattctaaaagccagccaccctaatgatacaatacaataatagagataagatcatatatataagagtgatgtgtcaaaagatatgatctaatatatatgtttcatcagactaagctattaccacattgttatgctatatctctctctaaaggagcagcaagccaattttaggacttgtttcttcttcttttgtttttatctcattttatatttctatcagaaaaaaatttattatgagataaagctcttgaaaactattgatcttaagctttataaccaatagaaatagatagaagaaaacacagatccatattcagtcaaatatttatataaatatgaacgaaacaaaaaagaataggcaaactaatttcttcaattttcaggtggcacaatccaaatacagtactgtccccaaacaggtaagccaataaacggagatgccataatcaaatatgagttactctataggccggcaagaggagtggtaaaagtcaaacccggaacgaggctccaaaaaaagaaagaagccaacatgaaccgagatactctaagtacacaaacttaatagataatcaagagaacgtgtacaatgataattgcaatatggttcattgcaagaaataggggtgttcgcggtgcgggtgatgtagttttgaccattttttcaaaccaacccgcaccgcgaaactaaaaaattgtagaaattgcaccgcaaaatggtgcgatgcggcgtggtttctccggtttggactatcacctaataattaaactatcataaatacaacaaaatttgagcaacacttgtcaaaaataccataagacttgaaaataaacatga

SEQ ID NO: 55407 - DNA, 791 bp, Cannabis sativa
tttctttctttcttttctaatatagaaatttccatgatttaatgaatatacggatgcttctaaacgtatatgttcattctaaaaatgagataaaaatatataatttagggtagtgattgtcacgcaacaaaatcttttaaaataaaaaaaaaaaattgaaatttaacattgttaaactatcctctatccagttggtttgttagttttgtttgttaactttaatttgttagtaattgagttagcccataactaattccctcttcttgtttctttggttcactttgcctatataaggcttttttacctaagttgtaaataagatttcagattcaataataaagtctttttttttatgttctctattctaatatgatatcagaaaataatcattaaaatctctcaaagctcttcaagctttccaaccatggtacgaactcgggccataacctctgctaccaccactgatcctatggtcaatgccattgctccaaacgctcctccaccatctcaaactcatacttacgctaacaatgtacatggagtttcatcttcaactctatatcacaaccaaactaagaacgatcagcctgcttatgaagatattcgcagtccatactatttaagttctgctgatcatcctggactggcacttgccactccggttctcaatgacaaaaatttataaccatggtaacgagatttcaaattatccattgtcgctcgcaacaagattccatttcttgaaggtaccttacctcggccccctcccaatgactctcttttaagttctt

SEQ ID NO: 55408 - DNA, 1432 bp, Cannabis sativa
  modified_base (253)..(253): a, c, t, g, unknown or other
  modified_base (1403)..(1403): a, c, t, g, unknown or other
atgctcttaggatagacaataaactattatagatggaagaaaattctcctctggttgtgtaactttgttacctttgttattttaacctgtattggttaccctccaaaaaaaaataaaaaaaaataaaaatattatattagaaatatttatgtgcgtggtcaagttatcaacatagaaaaaagtctatatttctccaaattatagatagatttgatgagtgtgagaaagattaaaaatgtatatatatatatanatatatatatataaaaagaaataaaaaaagaagaagaataaagatagagaatattaaaaatatcaattgaaaattgagatattgatgttgaacaaaaaaaacaaataggattaaagataaatgaagaatatatgcattaaagaacaaaaaaaaaaatagaaaaaaaaaaaaaactaaatattacctcacacgtaattatgcatctctagaactttaaatattgatatagtgaaattgtaaatattgatatagggaaattgagatctttaaatattgatattttttttttttgaaaataatatagtgaaattgtaaatccacttttagtaaatggtgagtggtaaatcggttagggttgtattatataagaattttattttattttagagcgccatgtcatcatttttatcttttctataatttatgctttaataaaaaattaaaaaattaagagaattaaggagaaaaatgaaaaatagctttagagagatttaaggcgccacgtcacgcctcatacttctcctttatatatatagatttatatatattatattttttaataattattatatttttaatttaaaaatatttatttaaaaaataaattcaattagaattattattttttaaaaaatgaaaaatattttaatataattattgaaaatttaatttttttcgacacactcttcaatgacgacaatgtcgttgttgatgtacccaaatttaaaaaaaaaaaaataaataaactattattcccaacgacaatgtcgttgttgatattattaattgccaatgactttaaaagtcgttgttgataatcgtttttatcgacgaactattcccaacgacttttcaccaacgaaatgtcctcattgatgagaaacactgacgaaaacaagactttttaccaacgaaatttgtcctcattgatgcacatttttcttgtagtgttcattttgaactctagactatactcaatacaccacagtatctctatggcacacatatttttgattaaacatggatataatatttattagaacttattcctaatcttaatttttgttccaattaacatattattgttgtaagaaattgataccaataaagttcttagacatagtgtcacagtaccttatttgagtggganaattttaaaattctaagcccatctttatt

SEQ ID NO: 55409 - DNA, 773 bp, Cannabis sativa
tacatttttatattttttttctaaaaaaaattcatataattttatataaaaaaacattgcataaaatacagttcaatataatactataccatacaatactaatacagtataccaaacaaagtttaataacacatttactaaactataattggaatcagaacaattaataggagaaatgaatcggttgaaaatagaaaataatcggaaacaatattttattatgttgtttactaaactctccgaaaaaaaaaaaaaaaaaaaccagaatcatattattttgtttacaatttcacataactaagaaaaataatcagaatgtcttaatttgacaaaatttccattattagaacatgtaattatttttttgtttatagatttttaaaagacatagttatcatttttatttttaattaataaaagtaaaattaaaataaattaagttatgaaagggaaatgtattccctataaaaatgggggagatctttccctttattttctctagtcccactactaatatcataccattaatcctcatgcctttaggtaaacatacatgccctaagagcatccaatggtaatattttggagaatgcttgatgaggtggaaagcttatgtggaaaaatatagggatgctatatcattggagataaagaatgttattcttaaaatttgcattgatggcacgacattgatgctatgtttttttatacaataaaaaattaaaagtgcaatatatatataatagtttaataaagaaaaaaaattatatata

SEQ ID NO: 55410 - DNA, 1766 bp, Cannabis sativa
ccatgcatgggatcctacctttgcctgcgcttttgcagatatgtctctttaggtaataggaagcaaacaagggctcaatgtcaatctatatgacacacaaattagtccttacactcaatttttacaccacatattaatattttcaaattttttttcttttttaatatggcgcggtgtggttttttttttttttttcaaaatactgtataggttttatattatgtactgtaataaattttcactgttgtttcacggttgttttttaattgtgctattattattttaaattgttctgttttgttgttttatagttcatttaggttgttttataaaaaaacagtatttttgtaaaaacattcgtgacaataaaattataaacttttacctaaaatttagtatttttgtttcttataaatatatgtatttatatagagggcgccctaagttaatttgagccctaaaaaaaataagtttttttgagctctttttataaaaataaatggtacttttaacattattaaaaaatatgcatattataattttttttttcatttgggctcttgataggagtacatcctaggcgtaaacctaacctgccttagtctagaaccacctctgtttatatataaatatatatatctatatatatatatattacacacgtatatgtatatgggtattacccatccatgagtagtattattaaaatttgagtttttatgtttagtgtttctatataattaaaaaaatctctcatttttacatcatatgagttagaattgttccatcaactgaaaaaaaaaaaaaaaattagcaaaaaaagttaaatttgactcatctattttttatataaatatattttaatatagtatacaaagtaatattttttttattaagtacaaaaatttaaaattttcttttattattatctaatagtttaatatttttaaaattaatatttatagttaataatagtttaatatttttaaaattaatatttatagttaaattgtttcgtaatcattaataaataatacctaatgtttcatatatatttattatttatagtataggctctctagtaattaatctaagacttaataatggcaagcttctttaactttgttagttaactgggattgaataaggaatgcttttcatgtggtgttagatttatattattgtcaatcaaataaagaaggaaaaagtattgttaggaaatccatttattgggtcaattatttagggctttttactacacttattcgacctatttcctatttttagattaaattttattcaatatctctaatataggtggcgtttttttttattttaaaaacagaaaaataaaagtaaatttttgttttttaaatttttgtttttgaaaaacaaaaatgtgttctataaccacttttgtttttaaatttttaaaacagaaaacaaaagtgtgttctgtaactacttttgttttataattttaaaaacaaaaaataaaagtgtgttgtgtaaccatttttatttttccattttaaaaacaaaaaacataaattttgattttttttttccatttttctttttaaaaaattatgaatatcatttatatttatttttaaataaatatataaaagttatataaaaaaaacaaataaaaagtactcattagcatttttagaaaagtaggtaatttgaaatcacaaaactcattatccaaaactaagagaaacaattggccacaactattataattaagttatatatactaa

SEQ ID NO: 55411 - DNA, 522 bp, Cannabis sativa
atttcggtgagattgagaaaaaaaaaacagtaaaatcgacaacaaataaataatcatggcaaaataactggaaaacaacactaaaacaaatcaaacaaaaaaaattaaaagatgattataaaaaactaaaatatgttctgtacaacctcaatacccaatgcaataacagttatatttgcaagcccaatcttgaaaaatctgaactaaaaaactagtaaaacaacacaaaaataaataacaataagcagatataactacttagaaaaatataaaagaaccacacacttaattcaatttttttttctaatgagctcgtcaaatgtattttcaggagaaccaaaataaaaaaaaaataaccacaaaataaccatagagaaggaagaagaaatgtattttatagcctccatcttccacacccacggatagaattaccacaacaccatgagaacacctaaaaaataatcattatttccaacaagatggagcaagaacactgaaatcgacgttaaaaaaataaattat

SEQ ID NO: 55412 - DNA, 1158 bp, Cannabis sativa
tcagacctgggtggttgggatgttaatctactttggggtcatgattccactggttttcattttgttaagagtggttactggtttgctactagatccttgaagtgcagcaaatcttctacttgtaaagggtcattaggttggtggaaaaaactctgaagtcttcatctttctcccaaagttaaaatgtttgctaggtagatttctcacaattggatcccaaccaagtttaatctaaatacacatggtatgcttactgatggcttatgccctttgtgcgacgcccaggagactactcatcatgctttatggagatgttcttctgtttctcaatgctaaaatctttgtgagtttaaccttggagattctttagtcacatgtactgattttatttcttttatcttttttttttttttgatcctttgccaaattctcaatttggagttaggctttgttatcatattgggagaatttggtataggagaaataaaatcgtccataataattattttatgtcccctgagttggtggttaattgggctcgtacttttttgagtaattatcaaaaacctctcttgttttcaaagagactattcttcggagttctcatgggaatgtcatgcctaatttgtaccttgttgggtaccttctctacgggttattttaaggttaatattgatgtgggtttaaacttgtatggtgatttttgtggtatggatatgattattcgtgatgctcatgggaatgactttgccttggctattggcacatggttggcttttttcaagctaaaacttcggaagcccttgctcttcgtcatgtaggtatccaattgtcatattcttgggttggataatcttcaattcaaaattgattgtcttaatgtggttaacaagatcaacaataatattcttttgaattcgttgctaggcttaatttttagagatattcattgtaatttggctctctttcgtaattgagcctttcttattgttctaagacacttaatgttgttgtccacaaccttgctaattatgccttggatgtggctactagcaaagtttggtggcgaggatatctagatgccacaagtatttaatgatatcctcttattccttcttttaagagatttcgctctttagggtggagttttatgttaaa

SEQ ID NO: 55413 - DNA, 1407 bp, Cannabis sativa
aaaaggccttcgtcaaggggacccgatgtctctgcttctctttgtgctcataatggagtatttaactagacttcttaagaagaagggatttggatttcaccctttgtgtaaatccttaggccttgtcgatttatgctttgcggacgatctcattattttttgcaagggcaatgacaaatccgttcagatggtgaaagaggccttccaactgtttagtgaagctacaggcctcgttgccaacaaggccaaatcaacggtgttttctgggggtatctcaactacctgcaaacagagacttgccaatattttacaaatggaagagggatctttcccattgaagtacctcggtgtgaatctcagaccaaccaaatggcgatctactgactgtggtatcatccttgataaactccataagaatttgcacacttgggcaagtaggaacctctcttttgctggaagggctcaattgattcattcggttctcttgggagtcaaaaattataggatggttttatttttgctttcttagaaaattacggtggctattgacaaatgttgcagagacttcctttggggctccattggaaacagaagaaaatttcatattccttcttgggagaaagtgtgtctccccaagaactcagtaggtcttggattcagagaagggaagaaatagaacatagcgcttatggaaaagtatatctgggctatttctagcaaacaagacaacctttgggctaggtggattgatgtgatatatctgagagggttgagcttctagacagttgaattcaagcaagatgcgagctggtatttcaaaaagatccttcctcttcgttcaactgtcaatgaaacaaaagtcatagctgctgttaaaagaggtaaatttagtgcaaaactgttttatctctcttatatcgaagcttacaaggttgactatgcaagaaacatttggaatagaatggttctaccaaagcataggttcataggatggcaaattgtgaacaaccaactgctaaccagagacaaactaagccgctttctttccattccttcttctctttgcccggtctgctatgaggaaaatgagactcacccgcacttgtttgtgagatgctgctttacccgaaagttgatctgtcagattaccaagtggtgtgtctagtttgactggccgtccgacttcagcaattggttctccaagactgccagcagtatgcaggagaagatcatcaacacagtcattttggcaaccttgtacacagtgtggatatacaagaattgttgtatttttgagatgaattgtaagacaggtagaactttaagtagagagatcaaatcttgtgtaaaatctagatgtttaattggctataatggggggaaagggaagctagatagctatattat

SEQ ID NO: 55414 - DNA, 916 bp, Cannabis sativa
  modified_base (246)..(247): a, c, t, g, unknown or other
  modified_base (563)..(566): a, c, t, g, unknown or other
atctttgactctcgcctaccgaaatattgtatcagtttgttggaaaccttaaaaattatttaagatatgatagttttgtattttcacatgtgtttgttacttgctaaataattaataatttcttaattatgtgtgaaattatatttaaccatgttattttttgttattaattgtagttgtaaatttcgtataaaataagaataactttgactctcgcctaccggaacattgttggattcttatttnnatcgaaattatcctaatttttcctcttagcttattcattttgaatttgcttacatagtatatcattggatgaatgatttataaatcatttgcttatgatctcactctaaaatctcttataaaagtgaatggcacaaatgactatattcccaacattctatctcgaaataataaaaatcctcgatcgtagagatctcttacttgtatatgcttactataggcaatttaaacttagaattagattagtagtggtgatccaagctaaaataattactcatgtatatttggtataaattaagtctttgactttaaatttnnnnttccaaatagaaattttatatttcggtttcctagaatacattatacattacagtatgacttccacaagtttttaatatccattttctgtcaatggattcaaactatatgtttatgtatggaaaatgagtttagtattttgtgactaggatccacttggactattttatgaactctttattgtaactaaacattttccattaaaagaccacaaccacactttaatatatctatggcatatgctaatatctacgtgaaagtaagatcatctatatttatctatggatgtacattcaggggtggatatgagttttcgttaaattcttaaaacgatcactctagattttacctt

SEQ ID NO: 55415 - DNA, 776 bp, Cannabis sativa
cgagaggcttctggagacgcctcttagacttcctctcattaggtatcttatcaattgtttagaggactttgtttattttgtctgttggaaggctggaagagctttgggagcaaaggggcctcatcttcagaggcaaggttttaagagtttagatgggctcgggcccaactctgatctggactgggtttttgtatacgggaaggcttggccttagcttacgtagaccaattatactttgaaaatgtcacattttcccatctagatatatagataacatttacccccaagctttcgagacttgagaatggtagaagcttgcagtctttcttccagatgactttggacactttggacacgtgaaccattttgaaatagtggcttattcatcttccatatcacgaaatgtgaaaggttgaggacttttggggctacaacttacaatgcacgcgtatccttgttttcttagtctgtgaatttaacgcgcccttcgaaggcgcatgatgtttggggtattgcaacgacggctatttgatgtcagcacaaacactgaggagaatattgatgatggaaaaacaccttgagtactgtaaggcgtattaaatattgcatttcagctccccaactgttgaattgatattgtgcttttcttggaagatctaggcccttgactaatgcgcatgcagatctctaacttcaagtataaataggagcgagggagaatcttctaccaatttcacatcttcgagattttgaatttgaatttgagaaagagaaaa

SEQ ID NO: 55416 - DNA, 2547 bp, Cannabis sativa
aatgaaagggacaaagtactcatatttaccatgtcctacacattcagtggtccacagacatctgaagtaccatttcaagtattttgtggtacgattccctttccatagaaagaatgtttagtcattttgccttttagacatgattcgcaaacatgtaattccctaaggaagatatttttcaatggaccactcatggttagtctacataatttatcatacccaatatgacaaagtcgtaagcgttataggtatgtttcttaattattattgatctttttctttttatggtttctaagtttaacaattctaaaatggtccttatttagtgaaattagtccttctggtcgcaaaatatgaagcctattatccatacaagcaacatataattgaatatatttaagagaaatctttaaactaaaactcaaaaagttcaatgtataatgttgcaattgtaaactggaaacataacttaaatttcttctaaaatttggaataaataaatcatcgtctaataacaaaaaaatattttcaaatttgagacagcattttcctctagcttggaccgacaccattttgccattatcaactttaagtttcaactcatcgagattcaaatactctcaagtttcaagcagttgcaatgatgtacacacatggttagtagatccagcatccacaatccaaatggatttattattctctaaaacacatgattcaaaaataaaatcataagaaatattaccttcattttttcgagcataatatctgggaaatttggatttcaaatgtcctctctttctatagtaaaaacatcttataggtatcttcaaaatatttggactaggtaaatgaaaactaatgtagttcaattgttgtctgattgttcttcttgttgatttaatctattgatcaagaactattggagaagatgaagaacttcccagaacccttttaattgagcctaatggtgtagcatttttggaaattgtaagactttataaattagatttctctatgtttgaatcatcttctatctcaagaatttttgtctttctgttagtgtcaagagtatttctggaacctaagtctgttaccctcactattgtttgttcataagctctaacttcagctttaagtttgttaatgtcagatgaattcaaattgttcatcatgaaggatataacaaattggtggaattcatgagataaacttttgagaataaattaaacttgtttttttttaagtaaaatttttagcgtagtagttttctgaaatttcatattaaccaagagtaaatgtgaagtgatattttgactaggagtcatcttcactcgttcaagtttgtttgtaagtatgttaaggtagcgaggattaggttgaggattattaaacgtcattttgagaactacaaacatcaataaacagaaattaattgctagcttaaaaaaaatcaaacaaattattttttggaaatttgcaaatatttaaacaagtgtaatgaaggtacgaaaaaaaaaaaatacaaaacaaaacatatctcaaatattttcttaagtttttaatcaaatgatatacaatgtccgtttaggagagagtcaaatataccttaagttaaataaagtagtctgctcatctaaaatggacaacaatttagtaactttttattcgatcaccataagaatcaagcgttgtcccgtttaagcgagattcaaggttatatatattttatgagcttctacccttattgtatatatgtcaactcaattttaagtagtcacgttttggatgaagctcctagaatatgaatctacataatccttattttttgagatctaatggtgttaaattgctaatggatgaccttttattaagggatcgtcaaccgccacaacgtcctcattaaaataataatcatgtaaaaccaacaatgttgatcgaatatgtcatattaaaaactcgttattttgaagaaaaaaaatgtatttttattttatttaatatttattttaatctatttattttaaataaatattattcaaaatcacttaattcaagttggtctaaaattaattaaaattcattatcaatttaatttatttttttacatttatttgaatttcaaaattctaatatattaaaatatattttttgaaatttaattaaaaaaattaaaataaattctgaaattttttctaatttatgttgatctaaaattaattttcatcaaaaatataattttcttatttatttaaatgtcacaaaaaatatcaaatatttaattatcttgaattgaattcaacttaaaaattaattttctatttagttaaacacttggaaaaaaatacaaattattttacttagaaattaattatatagaatttatctcattaaactaagtgtgcaatttttgaattaattaaaaaatagtctattgaaaaataaattttaaatatttttggatttaattatgttgcaaattaattttaattaagttaaattaattacattattaatagtttagacccaattagtattaagtctattcag

SEQ ID NO: 55417 - DNA, 2324 bp, Cannabis sativa
  modified_base (229)..(229): a, c, t, g, unknown or other
aaaattatttacacaaataccaatgtgatacgttagcatacatatcgaaatttaaaataattaccgaaaatagaaaaagctggaaaaatttctgtttccagaaatttttgctttttaggagttttgaaaaaagcaaccatttagttgcttttgatttgaataagatatcacttggttacttttctactaaaaaaattatttcaaaattttacacatatataaataatanaataaccatttaatatgtgagaaaaatatattaatatttttgttgcttttgatgtaaataaaatatcaattagttacttttcattaaagaaaattattttaagataattttttatctcatacatttcagggttacttattttgattagttaactttaaaaccatgattttattttttaattttcaagctatattatattattttattgtttaagatgcattgatgttatctcttttttttagcaatttcaaactatattttggaatatggaaaatatatattttttctgtataaaaatgataaccaagataaaaaaaaaaaaagtaacttttttatataatttttaaaaagaagtaactaaaataataactacacatcatacatatatgatgatataaatatctaaaatatacacagagaacaaaagcacaacatcatatgatcaattatcatatgaaaccgtaacttctttattaagctcagtaacacattcaacaccacctcgtcataaatgagaaactctaaattttttagtaacctcaaacaaactctaaaagatgatagagagagaaaataaaaaatgaaacacaaagtaaagacttaaatgatcttgtttggatatacagctagagagagagagactaacttctccactaaaagtactgtctatgaaagatgagagagaaattgtccaaaattaaagaaaagtgagatgattgtgactgatcagtaagctatgagagagagagagatagaataggctatcatatagttataattttataatcgtgtgtaatatacacacaaaaatatatcacaaaggcaaaagtatttcatatcggtatacgtgccactatttttttaaaaaaatataaatggtataaaattacattaaaacacacaaggccatatctataaataaattcaatttaacatcgcctggtgtaaatttttctaaaatataaatacgtgaatgtatgcatgttatgttgtgattgtatatgttttgggtgttatcatagcagcggcacaaccattgtgtcggttaagagtgatattcaccccagagagtatttattggcgctatcatagcggcacaaccattgtgtcggttcggcagtacgggcacagtactagttaagagggatatcatggccaattatactcttgggtgctattgatgctatcatagcggtatgaacatagtgtcggtaccgctgtgcaattatagtgctggcagtgggtgatatcatggtcaatagtaccaaccgttgagaatgttcttaaccatctggtgagctcggttgttgagctcaggacagcttaaacataaagtcggtacagcattatctttatatatgttatgcatatcttactgagtatatcgactcatcagtttgctaccttgtgtaggtaagggcaaagctaagctggaggaacggtgagttggagcttggcagtgattgtacatatcgcggcagagcagcctggagggtttcggtctttcaacattttggactcatattgtatggttgcctgttgtttgtaaaaaaaatatattacgaaactttatatatagaaaatctaattttcaactgtattttaaatctcgggatcccgacctagaaggttatataattatattataataagattaatttttgtttagtaagttttcaaatacgggagttacaacgagaagaacgtgtattgcacttaacatcaacttattgaaccgaattaaaaaaaattaatgatatgtgtagtacacttaacatcaacctaatataaagaaaagtataatagagattgaggtgacactctatatttcattccatcaattttttcttttatgtaaaaatttcatattcttattaatttatattcataaaaaatataattaataatataataaatattaagttacaccttttctacttatatcataacatctttcactattgcatatttatcactatatatatacaaatattttcatttatctataacccttttgaatattactatatgtttatcactatgttaaattaattattacacaatgagcattttattatcaataataataatcaca

SEQ ID NO: 55418 - DNA, 1269 bp, Cannabis sativa
tatttaaataatatatttatagtaaatcttttgtatttatactatttgtgtttatttataatataataattaaaaatataattttagcgtaattattaatattgtgattggaatagaaaaaaaatttagtgttaaaattttattatttttgtattaatttaacatttaccttgaagatagagaaactatctagctaggtggaatcacattagattctcaaacatcatataatgaaaataagtaggaccctataaataattataattataataataaaaggttattgattctgagtgtcaccacgttgtgtgagcaaaccatccaaaaatagtatagaacaaaaagaaagtggggtgttttatatttacacgtggcagtcacttaggttgccgacagtcactttcactaacgttcacatcaactgttttttttatttatttattaaaaaaaatagaaatttagtaaaataaaaataatttccttaaatggttcaaatttcaaccacattcaagtcttggctttctggggacaacgattgtgaccacaccacgattaattcgcaactctgctctcataattttatacattatataacaataaaaataataaaaaaaattatacagaaatcatgatataacatttcaaaatataaatttatatatataatttcattttcatagtactctttacaaaacccttgttattaatattatttaaacaaattaccctacctatcgattttttacatatttattcaattatatatattatataaatagacaaatataaccaaagtcggacatgatattagagggttatagaaaaaaaaaaaataacataagacattattttttgtcaaaaaattactttttaacgtttaatttttttttttaaatttttatgatttttttatagaaacaatacgaaaataacaagaaatatacataaaaataacatcaaaataactacaaaaaaatatcgtaaacgtaacaaaaaattaacaataattaatagagtacaacataaaaaaaaccgtattttctgtaaataaaattaaaaaattataaaaatatttaaaattttgtgaaatcgtatttttgtaatttttttgttatttttatgtatttgtaaaataatctaaaaaaaaatatttttagactcttatttataataaatgctgtattttttgaaatcagtaaaaaaaatgtttaattttaataaaaaaaaaatttaggcttttaggctaggtaggccctaggcataggccca

SEQ ID NO: 55419 - DNA, 1294 bp, Cannabis sativa
  modified_base (45)..(66): a, c, t, g, unknown or other
aacataaaatgttatttctgatatttattaataagtaaatctgannnnnnnnnnnnnnnnnnnnnntaggacacaaaacccaacagttaccggtgttgaaaaaatcactgaaaaagtcacgagtattgaaaaagtcactaaaaaaattattgtcgccgaaaaaatcatcggaaaagtcactatcactggaaaaatcaccaaatgtagatgtctcagatataaattaaaatagaaccggttctataacataataaataaaaacaaataacacagaaaaactcaaacctattataaattaaaatatgttcagcaaaaaaaatatgaattaaaatagaattgattctataacataatgaataaaaataagtaacacgcaataatttaaaccagtaataattcaaaatagaatcagttctataacataatgaataaaaataaataacacaaaattacttaaatcagttataattaatatagaaccggttctataacataatgaataaaaataaataatacaaaatagctcaaatcaattataattaaaatagaacaagttttataacaattttataatgaataaaaatgaattaacacaaaataactcaaacgagttataattaatatagaactggttctataacataatgagtaaaaatgaataacatataatagctcaaacatgttataattaaaaaaataaagagaatcagttcctaaaacactaaaacataaattaaaaacaaaactagttccataacaaaataagtaaaaaaaatgaataacacatagtacctcctaaaaccgattatatatttttttttaaacatgtgagtatcaattctaaaaatactgcggcataaatataaatagaaccggttccataacaaaataaataaaaacaaataataacacacaataactcaaaaaataatataacgaacctcttatatttatcaactagttaaaatttattctgtaaaacaaccaagataaaaacgtacacacaaaaaaccagttagataaaaataaataaattaaaaactagttccttgaattaactaaattaaaaatcaattcccgaaatgactaaattaaacacctgttccttgaattaattaaataaaaaaaactaggttttgaaataaataattcaagaaatattttcttaaatgacttgaataaaaaaattacttggggtataaattaaaataaaaccgatttcacaataaaataaataaaaataaataacacacaatatatcataaaaccaattataattagaaaaaaaaaaaaa

SEQ ID NO: 55420 - DNA, 993 bp, Cannabis sativa
  modified_base (816)..(816): a, c, t, g, unknown or other
aaaaaaaaaaaaaaacatcgggttttcggatcaatagataagaatactgggcttgaccttagtgggcttaagacttttttcttagcattagtgggctttgacttataatataattaaaaattataaaataatgaggaaattagaacgtgtacccattgttatctttttatttggtaatatatcatttagtacattgtgttttcattaaaaaaaaacatatttagtaccttgtgttttcaataatacttaattgttatctcttatttttaaattatatatatttagtaccttaaattaaaattcaatgaatacaattttatcaatttaaccaaacaaatctaagttgtatgtaattaaataattaatttaaaattaaaatttataaaattttagaccatttgattgtattgataaaattctattaaaaaaattaaatttaaagtactaaatatatataattttaaaatacatggtaccaaataagtattattgaaaatacaaggtacctaacttagtaacttgtatttagataaaatattaggtactaaatgtgtagatacttttttatttttattttattactctttcatttataactaattttataagtcatatactttagagactttaattttaataaattatgtaaagttatatttaatattttaataaattattgttgggtaaataccattttagaccatgtgttttgtaaaagttactaattggatcctctattttgttaaataacaaaatagaccatgtattttccaaaattgtacaaacaggatcctgaactgattttttatcaaaatnaaacttaataataatctgatttagagatgctatgacaaaactggttacattttctgtatttgttcgtataaatttttttcttaaagttgattatattaaaaaaataaaattattgaaaattgagctcaaagtcctatttttactattttggaaaatatagggttcattttgtcattt

SEQ ID NO: 55421 - DNA, 696 bp, Cannabis sativa
attcacaccccaaatcaaaatggcgtccgtgataacaaacccaaaaatcactgctcgtatcgcgatactaaaaaacttatagaccagaactacaaaattcaaaacttaaaggactcaaatgtaaaaaaaatcaacaaataaatataattaaggttaataccatttttagatcaagccttttgtaaaaattattgatttaatgtttattttgtaaaataacaaattagatcatgtatattctaaaatggtataaaatagtgaattgaatttttaataacttgaagataatttttagtacgaacaaatatagtaaatatataaaattatataataataattttaaatcaagttattattaatttttattttagcaaaagattagttcaatgtataattttatatttttttaaaatttaatttaaaaaattcaatttatcatttaacaaaacaaaaaattaaatagttaaattttactaaatatattattgaaaattatcttgtattatatacttgtgttatctgattttttatttatttatttaattaaaaaatatatatatatatttgtgtttgtttctctctctatatttggtgtttagtgttgtttctctccttcttcaccactctccggaatcgaaactcgtaaattaatcagaattaaccaaaagcttttcaagtccgacattttcacagaga

SEQ ID NO: 55422 - DNA, 1377 bp, Cannabis sativa
  modified_base (697)..(698): a, c, t, g, unknown or other
catttgggacaagttgttactctcgaaacacaaatttatagggtggcagattgttaaaaatcgattactgaagagagacaacctaagcatgtctttgcttttatcttctaatttatgcccagtttgtgcaactgtcactaagacacactcccatatatttgttaactactaccatactctcaaagtgatcagtgagatatccaattggtgtggaaattttacttggccaaccaacatcaaagattggttgtcgagaccctcttctagctttcgggatagagtcttgaatactgtagtcatggcaactttgtactgcatttggatcaatagaaattgttgtgttttttatttgaaatgtaatactgccacttttatcaccagggaggtaaaaagggtggttaaaattaggatcctgaatttttgtacagggagtaaaaacaagttagagaggtatattattaatgtaatctcttactggtagtgtgggttgtgtggttgatgccgctatattgtttgttgcttctttggctgttttgaataaagatattctcttgttcaaaaaacaaaaaaaaacatgtttatatctactcacatcatatcagatatttcataatagaactttttttaagaaaaaattaaagaatcaaaatacgccacattagatgtttacaattctttttttattttaatttttttnnaaaaaaaaaaaaaatctattcatactctacatttatagaatattatatattctgttaaaattagatctcccctggaccacttgttttacagttttacaagaagattaaacttacaagtaaaaggctcgtggctttacccactcaccagacacaacaacattaacaacctagtgtaaccgaatttttgttttgcaacagaaattctgttacacactttacactaaacctaaagctataaaaggggagcaaaggcttaccaatctctcagtcgagagatcccagaagtgtgaagacctagctttagagagagagcctctcgaggatatttttcagtgtgtatatgcaaagaaaagaagagagagttagtgagaatcaaagaaaaacacttaaagaaacaaacgagagaaatatcagaaataccagtcgagttgtgacttgaatttctcacctgatgtaatattcaccattgatagtgcagatctgagatcgttcttcaaggcgagctcgaaagaggacgtacccctggatttagggcgaacctctataaactcttgtgtttgtcttcttatctctctttcactgcttatgtttgatcatgtgtgtgtatgtgtttgtggtaattttctagggaaggtttctgggtaaaatcgatctagttcagatcgagaagtagatctgg

SEQ ID NO: 55423 - DNA, 1039 bp, Cannabis sativa
  modified_base (40)..(47): a, c, t, g, unknown or other
  modified_base (492)..(492): a, c, t, g, unknown or other
acatgttaacataaaccacttcaaatctcttaaattgatnnnnnnnnagattgtaatgggttttattaagggcacaaaacccaacaggataatggtgtcaccgaaccaaaacggatgtgcttgtggactctagatgagatggagagggccaatttgaattcaaaggccatgcatgatctattcaatgcagtgtccacaagtccattgaaggtcattgcgaactgtgagatggccaaagaggcttgggaaaaactacgaattaaaaatgaaggaacggatgcagtaaagaaatcatgtcttcatgctttggcaaaagcgtttgaggatttatcaatggaggaagaagaaacggtggctgagttccatgctaaattgtgtgacatatcaaatgagtcttatgctttgggaaagacttattcaaatgcaaagctagttcgtaaagttcttggagttttgcctatatgatttatgtctaaagtaacctccattgangaaatgagaaacgtggaggaactggatcttgatgaactaattggatccttctagaattatgaaatttccttaacaaggtggaagaaagaaaaaaagaataaggatgtgaacgaagaaaaaggggacagtagtgttgcgttcattcacaaaaaagaaaagaagtctatcctagatgtgtctgctggtttctcaaatgaagttgtagatttgttgaccaagaactatgcaaaattcttgaaaaagaagtacaagaaattttgttctgagggtaaggaaaatgttcccaaaagaaatcctcttgggaacttcaggcatggtcagctacccattgacaataagagcatgggcattcagtgcagagactgtgatgggttcgaacacattcaagtcgagtgtgccaacactctcaaaaagaagaaagcccttgttgccaccaagagcgatagtaacgaagaaaaagattctgttgcaagcaaatgttctgatgaggataaacatgtagtggctttcatggctcaaagtaatcattctgttgaatctaaggatg

SEQ ID NO: 55424 - DNA, 910 bp, Cannabis sativa
  modified_base (880)..(882): a, c, t, g, unknown or other
gagtcctgttcaatgttcgagtcttagttcaggtctgggttcgggtcctgagtcccggtttaggttcaggttcaggttttagacccaatcccggggtgggtatgtccgagtcctattcctgggtcccgatccgcttctagttttggttccagttttaactaatggggtacggcttcgggtcgagttctggttcgagtctaagtttgggtcttgatttgggtccgtggcgaggttcaggtctgagtttttgtctccattagggtctgaggctgggtctggtttcgagtttgggttcgggtttaggtcccggtaccattccaagatcccggtctggttctagttcaagtttcggttttggttcccgtgtgtgggcctgggtctttgtatgtgttcggggtcctagtttgagttcaagtttgggtttgggttctggtctaagtcctagatccagacaccgactacgggtcgggtccaagcatcgagtcccgaatcccaggtcccgaggtgggtcctaagtccacgtttgggtctggggtcgagtcccggatcctgatccacgatatgacacccaagttcttgtgctagttcgtgggcccgattcccagctctgggtcccccatctatatttggatcctaggtcccagtttgggtcaaagttcgtgtttcggtttaggttcgggtccggtctgagtcctggtcccgatttgggtttgggtccgagtttgggtccaagtcccagtctgggtccgagtttcgggtcccaggtccgagtctggttcttgggtccttggttcggccccggtttttgggtttggtttttgcttcgggtctgggttgtaatatcccagaaaataaataatatttaaatggacatattttnnnaaatatgtaattacttggaaaatgaagt

SEQ ID NO: 55425 - DNA, 2138 bp, Cannabis sativa
  modified_base (106)..(107): a, c, t, g, unknown or other
ttaattaaatatatctaacatcaacagaagaattgatgttcactactaaacaaaagaaaaggacttgtttttgtcctatctttctttcttcttttctttttttttnnaaaaaaaaaaaaatattatattttttatttatatatttattattattttttacttttgtaatttttttaattgattgttttttattttttaattgttattttttatttttcatttatttaatttttaaatttatatttatttgttttttattttttattttttatgtaggactaagggaatacatagtgtgaattccttcttatacgtttggtcattttttacaatcttaaaaactatgtatcagctataatggtctcatatctcaatctttcttaatcaggtcatcgataataatgatcttttttctattcttttattttattgtttaatttttacaaatgattttttttttcatttttaaaatgatcttttatactatattttttttgctcgtaattttttttttcaacatttttcaacgttgacattttccttattaagtatatatctttattcattttaattagaatttaaacttttgtttaattatacacaaatttgtaagtttttttattttttttatcttatttatactgactatatataattaattattgttagtatttttttagcagtttctcatattatttattaaatcaaaatttataagacccgatattaaaatgcaccaataacggtatgccacattttttagtatttgactcatcccttagcattttacttattaatatgtacatgtctttgttcactttaattaaaattttaactttttgtttaattatatataacttagtaagtttaatttttttaattctttttcgtttttatcttatttatattgttcataattaattatatttattagtactttctttttataaatttatttagtttatttatattttacgatatacatgtataggatatattattctttattattaaatgttgaatgaaatatattatttttgttgaaataaattaagtaatttaattagttagacaattccatattaaaatttatttaaaattataagtaattttatgtaattaaatttatttgggagcctgtataacaatacctgggtataataatatttttttgtaaatactttatgtttattttttatattttctatgtaaatgtaaaaaaaaaaaagatttcttttttttatgtatatatgtatattacttttttgcacatatgtgtattacttgtaaatattttaaaaaaaaagaagaaatataattttatcatcaaaataaaataagtattgatacataaaaatattttattatttaaattatgataactttaaattttatatttatttttctatagtcgttgcactttttatattttctcaaacttaaaataagattatcttagtaatttaattttttttatttaccatatttagagttatgtgttttgattttatttttacttattattaatatttgtcttttcttgtctcttttttaatctctcaattttttttgcccttttcttaaaaaatctctctttttctactccatttgcttttttaaaataccattttttaagttttttatacatttttttaccatttttttctcttgtatttttttaatgaattttccttgtttattttttttttaaaaaaatttcttcttatttgtttattagtaaatagataatagtgtaaaaattatataagcatgcatatgatattaatcttttttgtgctattattcttctttttttttcataaatttttattagttattattttattttttttctaaattttgcttattacataataatggagaaaataattaaatgagcttacatatagataggacgactggtgactttacctttaacaaacgaacttataacacacttatatccttattaaaaaactataaactaattaatatcatacccataaaataactttactcctaattttttaaatgaataattacataagacactatttttttaaaaaaagttacatttttacgtttaatgattttttttttttacatttttatgtttttccatagaaacaacaagaaaa

SEQ ID NO: 55426 - DNA, 614 bp, Cannabis sativa
tattcacttcttagattttatattaagatcatagatcacattcaagattgccagtctaaaacatgtattaaagcaaataagagtacaaatcacaacaatcgagagaagaaaaatgaataatcacattaattaaattgggaaaacatcaactaacattcatcatatctctaaattaaaaatttagttcataatattcacgttcacatccataatgaaactaaaaacataaattaacataaaagaaataaaaagagaagaaagaaattgattgtggaatggatccgggttgccattctcgctctagccatcgtccttttctgcttctagggttcaatttttaagtcccccactatctaactcgaagtccctttaaatagaatcagattaaactcaaaatatcacaaaaatacgaaactgccctcgagttgtatggactacctcgttgcggccaagaatggcctcactgcagcgagttcaataactcaaaaaaccttgcctctgcctatcgtctcgctgcggccataagtcccctcgtcgcggcgagagtgtctggatggggcacattctttctcgtcgcggccactgaacaaaacacgaaaaactctattctgtag

SEQ ID NO: 55427 - DNA, 1587 bp, Cannabis sativa
acgtggcactggttctttccacgtaagcatgccacatcatgaggacaaaaattgggataacatttgcccctaagtccctttgtggacgtctgtacggatagagactttaccaactatattgatattgtcgggactgttgtaaccttcgttgaataaaagttgatgtgcttgttgaagtactttgtcttcactgtctgatctcattacagtagagaaataactgttttagttgcctttacgatgtgtaggtgaggtaagtgaggaaaaggggcccacatgtactacattagtgactttcgggggaaacccatttttcactttcatttttcacttttactttttctcactagaaatttgctctagaaaaagctcctccttctctctaagtggtcgaacccacaagcaccattcttcttaggatttttgcgctatttcaatgatccaagcttcctaccttctttttcatcgaaatcttgtagtgggtaagctttctattcctgcccttgctatttctcaagaagatctcaagaaagaaagcactgatgaagaacctccctctacttcctaagacaattcaggcattgacgaagattctccctctatttccaacaattatcaagaacatgggagtagcagtgaagatgtgtcttatgagtcttaagaaagcgtcagtgaagactcccaatgagagggggagggaccttatattgtcacagaagcatttgaacctgggataaacaggttggagtttgccgataccaaggtactagaatggagagcatctgtgacaataataaagcactgctccctaaacaagttgcctcacagtgtgatttactttaccttgtgaaagtgaattgattgcctcctaagccaacaagatgtgagaaagacatctttaggaggtccgtcactaaggtatggtccctacacttttagtcgaacaatgcatttgtgtagtagggatcactcagctaagctttgatgaaaaacaaatgtctagaactactacttctttttctttgaacttatatcactatgaatgtaattgaatttaatatctaatgaataaaattattgagtaaagcttgttggtacttcattagtattaatcaattgtagctcacaggcctaacgacgctttcaagcactgaacaaagcttgtagagttggtcttaaggtaactacatttatttttttagtgagttaaacactgtcaacccacaaatctctggatatgtggacaagtgctcacacatgtaataactctctaagatccatgatcaagaaatcccaataggatttggtatggcaaaagaccaatgaaggcattttttcgatcagtcaaggggcaaataagacatagtatacgggagctacgaacattatatgagcattcacaaaaatcatggtacacgagacccatgtatgtcatatacactttggtatacgggagccaggtgttaccttagtatacgacagacaggggctgcagtgacgttcaagaattttacacactagagttaagcacttaaggtctcacaagaatataacgatcgaatttataaatctaaagtgctagtgcaa

SEQ ID NO: 55428 - DNA, 1050 bp, Cannabis sativa
ctcaaatatggcatgttgagcccccttcgatagagaataccatcgatcattaaattccgatgagtttggtactataaatttctagacatggtcctttcttgaggcagttctcctattgttatgtatttaatgatagggtccatccaacttgacccttgctcattggtagccactatttctttggcccgaatgctaggtttcgcaaggtgttcaacaagtaccacccccagcttctctatctcactatctgaggctagcttagccaggcagtctacatgggcattcttttcttgtgggattcgctccactttgtattccttaaatttttgcaacgattccctgacgaatgatacgtaaccagccatcttttctccccgagtttgatatttttcttactcctggttgaccactagttgtgaatcactgtgcacttctactctactagcccctatagccttagccaatctcaaccctgctattaaggcttcatactcgacctcgttgttggaggtcgagaacgtgaactgtagggcagactaaagtcgtaacccgtcaggtgagatcattgctattctggccccagacctattttcattaaacgatctgtcaacatatactttccatgtgggcttatcctgagttggcatactggcgctggcctccgtctcgttgcattctacgataaagtctactaatgccttaatcaagatgcgtgggatgtactgtatgtcgaattggcttaaccatggccccttgaggagcctccctgaggcctcgggcttctgtaaaacttgtcaaagcgggtgatttgtaaataccttgatggagtgagcctagaagtaaggtctgagcttcctggatgcaacaagagacagaaagctagttttttgatcaggggataccgaatttcagttcctatcatgcatttgatgacgtaatatactgggtgttaaactttttcttcctcccagaccagagctgcactgacggcgttctcaaaaacggcaaaatataaatttaagtattcttcgtgaactagttttaacagta

SEQ ID NO: 55429 - DNA, 1235 bp, Cannabis sativa
catcctcacttctaggtatatatcatgtagaattattggtatcttcattctttcttttagggttttgattatcaccaccatagtttctttttgaacgtgacgtttcagtagtatggggtctttgagaacccattggttctttcccaaggcgatgcgtagtttctttagggcgatttccatcattttgattgttatcagccatggatatatttctatttgtaaggagggatttttctgagttttatcactaaggctctcaatgaaagcagcaaactgttaacgcagattttcgttagcagaaattaatgagcctttacgtaataattattttacataaataacaataagtaatttagaaattaataacttcagagatttttacgtggtttcgcagttaaaatctgcatacttcacaagtctttcttattaatgatatttgttgagtacaaaatacaacatcagaatgatagtatttttctctcaatttctccgtccctttttctatggaatctgcccctatttatagaaatataggttggcagttattttttttgggatcagtttaaatgtaactattcatgaaatatggataattcccatgtttcatttaatcgcatgtgggataatatttggtaactgctcaactgccttttatctttatcctttagatggttaatgctgatttggacggttgtatctcgcttaatcgtgagttatcctccttgtccatcttaatgaggaaaaaatactaagtattagcagatggttcgcctcgttatgtctctttatttgagttaagatcgcgaggtgactgtctcgttatatataatacgaggttgccatgtgtgattgtatttattctacttcgaataaatatgaatatcttctttgactatgtactccgaggcaggcacgtgtctcgttaatgtcagttttaatagctttttatccttatctcgcttaagacttatgtagttagcgagttgtgaatattttctattaaactcttataacgagttattttatcttgcatttaatgatataactttattatatcaggtgattcatattctactgcaggacacgtgtcaacttttgaagtgcaaccaaattttaggtataacacaaccaaacaaagaaatagaataaaaattattttatttccattccatttcattacctccaaccaaaccccacctaaaatattaatggttcattgaaaagagaaagggaca

SEQ ID NO: 55430 - DNA, 3253 bp, Cannabis sativa
aaaaacacaagtattggagtgattctgtgcacttggccaaccagccttgttgaaggctgcccagtgcttggaagttgtcaatctttgacggtcagctataggtccgaccaggaccttactgcagggttgtacatctcattttacttgtgtgtaccgtgtatctatggaatctcaaaggttgagaggttgcacagtactaatcctagaaagtacttaatgttggcctgtcttcaacgtaatttttactttttgttatgtggaggggccacattaggtggacaaaatttgagataacaatgatcccccaactattcattctttttcttcttaatgcaatcacccaatttctcttcttcctattcaattgacaagttgaattaagtagttcataatcttgttaagacttagaaacccaatctacatgaaaactccctaattcctatgtaaagtttaatcacgaagaagacattaatgaaagcaactcataaaattatacaaatattctagatacaatcgacctaaactaatttttattcataacaatgaaaacatattcaaatctcacttttcataatttattttcaaattcataaatgacaactataggtgatcagttaataattacaaaattaaatcagattacatggaattaaaataatagaagaagataaaattgaataactacattaatctataaaataaattcaattagttcatataataatccttaaagaaaattagttcataaaagtcattctaaaacaataaagattcaattaaaaacataaaagataaagatagatgagaaagagagctatttagagtcttctaatggtgtcttctgctcttagctatcctcctatgctcaaaattggtctccaagttccaatataaaggaaacctagatccaactcgttttatagacaaaatttgggaaatttcccatttttttcgctaagcagcaaaatttccaaaacgattgcaatgctgaaattctactacgatgcccgatggtattttagccataactctctcgatataacttaaaattggacaattcaagatgttatagaaagataaaaaaagagatctagaacttttattcagaaagttttcctgaaagtgaatagatcatagtcaaaaatgggcttgaagcttcagactttatttttgattacaaacggagcgtgttgagcgtccaaaacttaaaatttttcaccaaatgtatcttgaaactccaaaattcatgctaaatccatcaaattcttattatttagcatatttttctcttatttcaacccacatgatttacttgaccattaaaacctgaaacaaaaagaaaacaagcataaacctgaacaaaaataaataaaaactactaaaacacatactaaaatggactctaaaataaacctaactaattccccaaacttaacctttactaacccttgagtaaatactaagttaaattattgaaaaagaaaataaataacgaacacacaagtaagccaccattgttatctatactacattgtctttcccgtaaaatctcaattacaatttttaaccaaatttataactcaaccgtctcaaagttcaaccttaaagttcaataagaaaaataaataatatgtctcacaaatgaaaataatatttggactctaccaaatatgctcaactaaaaccaaacaaatctacaaactaattttttaatatggttgcattagttaatcttctccactaatgtcaacaccaatactttgaaatcaaaaggactttaacaggttataacgttaggcttaggtaaaggtagataaaaaaatttataccacaaatttttttacgttttaagaacctcactttcattacaaaattatctcattccccacttaatgcaatacaaaaattgcaatccacaccaaaaattatttagtattcattttttttcttctttttttcttctttttttcatattgaagaaaaagattgcaacatgttaaaaatttctctctaattctttttaagcttttagcttctcaaaacacaatacccaattataattttccccaaacttatttgaaaagtcatggtatagttaggacataccaaaattgactctaaaattgcatgaaaataaagctaacaagtctcgacaccaaatggttggataatattttcgtgagttttctagaggtgtcatggggcccccaagtaggattttcttaacttatttggcctttgtaagtcttggccaaagcattcggctatttttagtataattgttggatcactttttagagttatttttcttcttagttgttactttttggacagttttacgcttgtttttctttgtttcaagtttccaggattttaaagtgcaaaattagttaactatcgaagggataagatgagttggaaatcggtgaaaaatcatgttgaatttttgaagcctcaccgtgacgagctcattgttggtcgcaactaattatcgccgcaacgagggtaaggcatggtcgcggcaaggaactttggcaaaatcaatgttttcaactcactacagtcatcgcgacgagactatatgtggttgcggcgacgcctccatacatgacaaggatattttcgtcttttctcaattttaagttgtaaaattgaattttaataggaggtttcaaattttgagaggactcattcaaaaaagaaacctagaaacaaaataagaagactcttggagcaagcgtggcgaattgatcaagttctccacctattttttctcttccttttaatttccatatgttttattcggtctttagcttaaacatagatttcaatgttgagattatgaactaatttcacaatttaaggatatgatgaatattggatgattttattttaaaatttaatgtgatttgttatttcttctttctcgattcttgtgattttttcatattcattttatatacatattttagattgattacctttaacataatttatgatcctaatatgaaatttaaaaagtgaatattaggaatgctcaaattgaacaaacataggttttgatgtgaaataagagtatttacatagcttgtgtgacccttagattctttcttaatgaaaattatatgttattctattttagagatgcaatagatggtatatagtttaggaactttatgatctaaaaagtgtttaggttattttcataacatgtcatcacttaaagaaagaagaatagttaatagcattaaca

SEQ ID NO: 55431 - DNA, 1186 bp, Cannabis sativa
  modified_base (1130)..(1140): a, c, t, g, unknown or other
cgattaattcagttaccaaacaaggcaacaactcaacaggaacattgtccaagttgaaacgacgatcacgatgggatatagcagctctagcaaaagagtgagcaactatatttgctgatcgctttacaaaataaaaagaaacattacgtaaatcatgaaataaaattttacatttgctaatcgctttgccaaacattgaaactatggacatagagcttcacatagcttggacaaccgagagacagtcggtttccaaggtgacattggtccacggatggtatttgatccaacttaaggcctctcgaacaccaatagcttcagccatttccggcgtagttgaaccatggaaaagctttataccaccttccaccaggaagccaccacaatctcttgccacaaagctaaccccataagatgaggaatcactaaacaccgctgcgtcgacattaaccttaatactatcgtccattaattggggcattccattgctcagcaccatttcctgggatgtacccaaagaaaagcaattcattgcttgatttttgagcaatacaccattgattaaggtagtttgtagccaaaacaacaatgctcttcactcctacgaacttgttttgccagaccttgtcaatcctagcattccaaagtgcccaacagactgccacaagcacgcaagactggtctgtattcaacattgtaaaccgctccatacaccagtcaaggaaggacatttgctgatgcaacaaagttcctatccccacacggttccatacagcaacagcagctggacaagaaacaagggcatgaagagtggtttcgacatccatactgcaaataggacaggccgaagtaacgttccctttttttgacaacagttgagatattataggaaggcaacctttagccgcacgccacacaaaatttttcattttcgggggagttttaagttgccataactttttccaaaaattgtcttcagccgagacatcaagagtgaagtcaccactaagttgctgaagtaacttgtaagcgctcctaactgtgtaaatcccataagagtctttcaaccaagtaagaacatcttcactaggccgagatttaaagggaatactgttgggttttgtgccctnnnnnnnnnnnatttcaatataatcagatcggaagagcgtcgtgtagggaaagagtg

SEQ ID NO: 55432 - DNA, 1314 bp, Cannabis sativa
cttatatatatacaaatatgtttatacgattcttctttacaaaatgagaaaaggaaatatatactatccataatatactaaaaataacatgataaaaaaacttttctttcttagttggtgaaatctcttttatatatatatatataacttaggattacacttatatatagatttagattaataaaatttgtttaagtacgtgaggcttgctagcattatttatgtagcatagtttaagatattttattttaaaaattgttaaaactatgattttgaattttataatagagatttttttttgattctttaaaaaaaaaacgtcagatttagagtgatacttgatctatactattattaattaataataaataaatatttataaatttaataaaactttaaaaaaaataaaaaaaaaaattaaggagagaacaaatagtattatttagagtgagaaaaaataattaactttaaaaaataattaactttaataaaaaattagaaaaaatgagaaaaaagaaatagtactttcaagcgtttttagactgccatgtcaccgcttcatacttctcctttatatatatactagtcaaaagctacatgcaaagacacgtatactaaattttatgctaggtattttctaatttatataaaagttataaaataaaagaaaaaatgttattatatttattaggtgaaattattattatgtatatctaaataatgtaatttataatttaactgtaatatgttcttaagattatctaaaaataaactaaaaactattgttcaaatactaaagaaaacacaactgaaatgggtgtaaaataaaaaaaaattaaaaatcaaactctaaattattgataattgaagataaaaactaaaagacatagcatataatttcctactatacgtgtgaacatgatagtttcctaatatgatgtcgatctagaagataaaaaccaaaagacatagcatataatttggtaataaagtgacaccaaaaatcgtaaagtgcaatttgtcatttgtcacacatatgcaacacgagagacaatgaaagcaaaaggctttccgatagcatgtccacactttctaaatagactaaatgagataattaatctcacattgatatcagatacaacaactgctacttactaccatagaactaacagattgatgaaagagagatatccactacttagtatgcaaacaatgagattgaaaaatacattatccgttaaagagtatgattcttcctcatcatgtcagcaaatgctaccacagtaccaacaggatcaatctcaaatagcttct

SEQ ID NO: 55433 - DNA, 1405 bp, Cannabis sativa
  modified_base (36)..(45): a, c, t, g, unknown or other
tgcatgcccactcatagcaagttagtcctcaatcannnnnnnnnngactgtgaagaatccaaataactgaaggagtgtcaggctcagatcttgatactctgcgaaagaaagaaacaagggttagagatctgagcagaaggagtcatttaattctactgcaaccaatgtaaggtttctcatacttttatgtgtttaagtttcattgttctagaaattcatgtttaggatgttaaaaaaacataattgttagtaaatctaggtcctggtaaaatataatccaacaccattcacctagactttaatacagactgcatttcaaaaggcacagagagaatctacgattagttaaaatgcactaattgttttatgttagtgcaagtggaagttttttgggttttgcgccataactaaaactctatttcaatgtaatcttaaatattcatttctcaataaagaaataaaattatttcattacttgtttaatgtactacttagttcacatgtttatttcatgatcatttgtttgatttataaattcatctaaatccttatcacattgatattcttgattattgtgttgtcaacatagtggaaagtaatcaaaattatgtgattaaatatagtctcccaatttatcaatacacataatttccactgatatgaaaattaacaatgtaatttacttaaatcttagataagtattatgtcattttcagggcattggtaaagcaagcttagattagatgtgctgttatacatcagcttataccgatattgaacttagataagatataataaacttactgtaatatctatctaagttaatatcacctagttgatcttaaatcaatgatctcaatcctgagatggttaggttttagttcaattgtattatttatattctttgatttgttaatcaaattggaccaattggattttcccgatacttacagattaagaacacgatagttctattgagtgggagcgccaatcatagatatggaatctatagcttttataaatgcataaaagtaaaataatgatttctttcgatcttagcttaagagataaatggtagagtactcatttcaataattaaattagtttactggaatattatttatgggtagctaagtatttaaagaataaaatacattgaagggtagaacggtaaatttatccatactcgatgtagatcatctatagaggatcatcaattatttggattataacaatagataattaatagcgtatccgtatcttggaatatatagagcattctatataattaaacgtataactctgaatatatagtgtagtcaggaaaaattaataagatagagaatttactactagaactagttattggaagcttgatcatacaggcccatggtccccacactag

SEQ ID NO: 55434 - DNA, 1794 bp, Cannabis sativa
aattatatataatatttctttttgttcatttttgttcgtttctctttttttttttttatttgagagaagaataattctaatttgggatctcacctttctgaggagagatataaaactactactgacttatgatcattgtttttaattttgctcaattcttttttgcacattaaggctcctatgaaacatatatattctttcacaaaatttattatctatattggaatgggtggataatgtattttcttaaattttttaattcctcgcaactctttttcttttatagaatttttttttatactttaaagtatttttcttttttatatttttatggaattccatataaaaattaataaaataatttaaattataattaaaatttatatagcaaccgacaaaaaaattatcaaaacaaccactctgaagcaacttaaactataaattttttttaaaaaatagtatataacataattcataaaaaatatatataccaaattactccatatcttagctaaggttgcaaaacaattatacattactttcgaatatgtcatgctcaaaaaataaaaacaaataattcttaaattatgtctaatcgatgaaaaaaaaactaacaattttaaatataactaatgtataagatatagttttaaaatattatcggccaaacataaaagggcataatttttttttccagctgatctttctatacttatcaccaatatgtacaaatatattagcggacttatatggtgccagaggggcaactccccattgttattattttttttttcattaatttaaatttgtatacatctatatctataactatataaaaatgagaatgtggctttgggctttccaaagtaaattacataattgtccttctttttttctatttatagcctttataaaaaaaaagaaaatattttagacttccactaaataaattacttaattaacttttactaaatattaaattacaaaaaataataaactattcttttataactaaaaaaaaaaatctaagttaaacaaccttacatattgtaattcttttaaaaataataaaaaaaatatttttgaaatctttttatatctcacatttaattaatgaaaaataatttatctttctacaaaataacttaaaagtatattattttatacaaaaaatttgaaaaattatttcaattgatgaaaataatttacttattattttattaaataaaaaaaacacaattttagttatataagtatatatatgtgataattacttttctctccatcactttaaattactaaaataatagatttataaaattttaaaattgttgaattatgtacattcacttaaatttttaacattaatttgacacaggtataaacaaacccatttattgatgtgtgagggccatagcctttattaaaaaaatattacacttaaaaaatatatgtattttctaatttcataattgtaaagttaaatatagtaaaaagctccacaaaattaatttagtataagtgattataatttttgtttaatgcgggcagtgagcataaatatctttaggggagttttatttgcactttaaaaatttataaatgcatcatattttaataatttttattttaaataaaatttatatctgtaattatattagggttttttttatcaaaattccttcaactcaaattgttaaaaaaataaatctatcaaaaacaatttaaatattataataaaaaaattaaaataaaaaattatatgaaattctattagagaaaaataaaaaaaaa

SEQ ID NO: 55435 - DNA, 720 bp, Cannabis sativa
ttttttcaaataaaaaatttgtaatctttaaaaataaaatacattcaaaatcttaaaaagaccaaaatcttaaataaaactagcaatacgtggctcggcacgtacattcacctagtatattaactaacgttgagttgtgaccaatcttaaatatatttgaatattaattttattgaaatttcaatttaaacaaaactattgcgtgcatttattgaatatagactattttttttttaatgcgaatatagactatttatatcatatattatataaatagattttccttccaaatatataatataacaatatattacatatataattttggtccttctcaattttcgcctgataaacttttagtttaattttttttttttttttataatcgtgtacattattgttaatttaaaaaaaaaaaattctcgtgatgtgaacatcaatatttgacatatggcataaaggatgacatcactaaattgagtagacccgagtcataacagtcgacctgagaagggaccttagccctacacctaggttgacttcgagatctccgaatgaaagttcaaacttcaataacttgaatccaactcactatctttcaatattctataccatgaagacatgaaacaacttaatccaaggcccgagatgtaacgcccttacttacgtaaaataagatgccataaataaactggcgttaagatactaatgttgccttta

SEQ ID NO: 55436 - DNA, 1154 bp, Cannabis sativa
cattcaaaccaactccagaattacttttattgtttttttgaattggcaaattcttgagaccttttctatggggagtaatccattggccaccattctatgaattatgattcccagacatcttttccacttctgtattattaccctcctcttttccttattatgctctatcgaactattaacttgtttagactaaattggctttacatcctctttatccagtttactaacatccatttttccttttccttggtctgtccttattttcttcatccaaactaggcccttgtcttttgcacaagaattaatattgtgccccagaagaccacatgcaacacaagaagtaggaagccattcatattcgattggctaacccaccagttgtcccctctcattgaagaaactaggcccttgtcttttatcatcattcgttcacttgtaactttgtcaaatataatcagattacccatagtgctcacaagggcactgagagtatttctacctcagcattgaagccctaagccatttcggcaaatccaaataggtactgttttaacaagcttgagagaattgaggttagaagtccagggtctaattaccactggttttttgtcaaaatggataactccagtttccaaaaccaggttcctagtagcttcctctctaaagctaactagggtgaaaccagagtgcattgttacttccgttcaacacccaaattttcccagatccttttgatgaatcaaatacacaaaacatagggttagctctgagaacaacataaatgatcgagtttttccaattagacgcctcgacttctacctcatcgatgtcaattttagcaataacctgatcaccttgtttgattggttgagtaaacttaagcttagtagagggtgtccttacctaattaactttgaattagtctaagctttcttcgctgatgattgaaagtcattcacctcagcttgcccaagataaaattccatatcgattaaaatcaaattcatttgaaagctccaaatttgttaccaattccgacttagtatcgctttgagtttcattattattatttctaaaaataacaataagaacataggttgtagttgtattaaaagaaaaagtagaggtattttgtggaaaggaaatcttaaatt

SEQ ID NO: 55437 - DNA, 1646 bp, Cannabis sativa
catcaccattcattggcaccttttcttttttccttgtcctatattgtttgagccagcaagagcatttttacatgaatgaaatatcagatcttcaagtacatgattaaggcagcctgcttctgagtcatttgagtttttcgacaacattatttgctctgctcgataatctgcttttacagtttttgaacacatgggcttcaaatgcctagaaaggaaaggtgatgggattttcttcaagatcaacttccataaaaataacaatactggtgtagaaagaaccaaccttacatgctatttttacttggtttagttcaatgatcatctccattattagcctcatgctgaactaacagtagttcaaatttccttatttgatcatgcttccatgatcaagaacaactcgagcatagagagccacattagctgctgaactacctttgttcttccacaacacatcacagcctcgtcggccaacatacaagaccggttccagaacaatcccaccaagcacatggaatatagataatctctagagcaacactagttggactaacaattctccaagcctggatgagtagatatcacaaaaggacaatatctagcccaactgaccctacagatactatctagccttataataaatttggccaactagttgatattcatgtagcagcaacctccaaccttgtttccctagtagcgataaattgaaatctctaatgttttcgaagccaaggccaccgaataccacgagaatttcgattagaagaagaccaacaatgcacagacaccattatttccaaacttatacaagtcttcaaaagcatatgagaaataatatgagctccataatccactttacaacctctcaactcgccttgagactcaaatttcttgattaacgaaaagagacattcaacacaaatgaaaaacaaacgttttggtactaaacagtagaaacacattgcaaaattacaaaattgaacaacacttatagaatttgaaacttctcacatttctgtttattatttggtgttgaacaatgtaatatgtaaatgccagaaattatgagtgactattggatcgtaaaactcagcttgtttttcattattttagaatcatcatcaaagagagcaattaaacactttaaaaatcgttttccctaactaaatttgttcattcatttttttagatccaaaagtcatatccttatattttcgaaaaggataaatactatttcagattttgtattttgtaaaatttataaaagtatagattagactttatgttttattaaatgacaatttagaccatgtatttttcaaaatagtacaaaataaatacacaactcaaatttttgttattttttttaatataactaatttgaaaccaatttctagcacaaatagatgcaaaaaaaaaaaatatatataatcattcttatcataatacttccagatcatattattattaaattttaaattgacataaggactattttgtactattttcaaaaatacaagatttaaattgtcatttaacaaaataaaaggtctaatcgatagtttttacaacacagagtccaaaatacgaactttgatatgtatcaaatcatttcttatacttttattcatattagacttttc

SEQ ID NO: 55438 - DNA, 840 bp, Cannabis sativa
tatacatatacgatcaaattatttgaagcccatatataataattaaaagcaatttgatcttatccataaaatttattgacaaaatttgagctaagcgtatcaaagaattatatgatttcaaattatataatatcatatacgaacattaataaaaacattaaatatcaaatatgtattccgataatatcaaatataagagtgttgctattattgcgttagaaggaatccgacataatttaatgtgtgaattagggtgtggcatatattgtccaattaaatttactgtgaattaataatttggcataccgaatctgatcttaaaagttgggtgttatggcattgtattggtggtaggggtggtattatttattgggcaatgggcagataggattgggcctaagcatatctactctactctcaataaatggtctcaacaatatggaaacttctataaaccatcaacatttttggaagaacgagtaacaaaaggcattctcctggtaagacatgatgaattaatctaccaccatcacactactactactactactattgttatttgttttaataattattgtgaatttattactaataagaacaagaacatgttaatccaaataatagaaccttttgaaaaagaaaattataataatatattacatatgagttacactaataacagccttgacatttcactgcagggtgatcaaactgtttcaaaatggaaagctcgcctgtaagtaaatgtagttgtgaatttgagaggaatataaagtgaaattattgtgtgttcagatgaaatctgatcatggacttaaccaagaatgcggcacgccccta

SEQ ID NO: 55439 - DNA, 804 bp, Cannabis sativa
  modified_base (142)..(149): a, c, t, g, unknown or other
cttgtgtcttaattacaacaaaaatataatatttagttacaagttgtgactaatttagttttaatcacaacaaatattgtcactaaaaatatatttagtccgaacaaattatatttagtcctatattattattattattatnnnnnnnnttattattattattattgttggttaatgaataagtgcctaactagtctaggattgagattgttatgttaatgcaagatgctatataccttagttctacctaccatgcatgttaaaaattagaatattgttattaggtagtactgtattaggtgattaatactatattaatgtaacgcattgtgagtgattagtgattttttatattatttattaaattaaaatacatgtataggacttaatattaaattataccaatagataactgtataccaccttaaagtgctcttaattcagcttgcttctttccgtgttggctttcggggttctctcaaatctctagttaaggatttatttgatttagtaatgtgtaactttaatttctactataatagtttaagtttattatgtaataatgttatggcttttgccagagtttatcatttttattggtgttttgagcttttggttttttgtaattagtgtggttaactgtttgttcgatcatttccttgtaaaatttgtgtaacttggctgctatttgactgttaggattttgttccagttttaaccttaatgaaattttttctttcaaaagaaaaaataaataaataatacaatatgctcttgaacaagaaataaaaacaataataatgt

SEQ ID NO: 55440 - DNA, 1129 bp, Cannabis sativa
agcaatactttttgcaagttgctccatcacatgttccatagcagagttagcccctttgttctttttttcctttggcctgggtgcatcaggtggagcagaagtagctcgacgacgtataccagtaacttcttcttcctctccaaaattttcaccatcacattcaataccaacatcaacatcaatatgtgctccagtaccaataaagtgacgttcttgttggcgttcctcaactgaagtaggcggaggttgagtggaggcgtaactcatcccaccagtggctgttgtgttattaaatatttctttaagcatatcataatgtggcaatcctttttttcgatatctctttgcatttggatatttttacaaaatccaaaaaaacaccacattagtattagtatataaaatgaatttaaaaatacaaataatcaacaacacaattataatataagtttaatacctttagataagcatcccaaacttcatcagttgctgtaacagtacaagttttaggttcccatcccattccagtatgtagcaaaagatgagaaaattctcgatgtgcctttctcaatcgattgaattttgatttcaatttatccattttatacctctttccaaatttgttaaatatgtcattctctatctttagccatccttttttgtccaaggttgttgtttgcaatccttttttggcctcttcatacaaaaggccgataaaatatgactcaataacctcgggccaagaagcatgatcctcaatgtctgaattctttgtatccatctaatcaaattaacattgagccactaataatactcataaagttctataaacatgctaccaagtcatattatttcaataaatctaaagttatacatgaaaacaacaaatgtataatatgtatgcataaagttcaatttggataaacaataatattgagtgtccaaaaaaggacactaaaatttattcaagcaaaaagcaaaaatatccaaattttctaattaatcatgttgacttaattttacaaaaactactaagttagatcacttagatccaaatagggcaacttgaaaaccccccaaaaaatgtctatttattgtgtgtttacaataaaataaatatatatatata

SEQ ID NO: 55441 - DNA, 3018 bp, Cannabis sativa
aaaaaaagttaaaaaaatattatatggggcaattcccctacattaaatatgtataggaaaatttacatctcaacacatttttcttgatttaataccaatattgaagtgaattttcaaattgttcactattataaaattggactttaaaagcagtttttaaaatatttcagcatcaattttagtaaaattcgctaccgatgctgttttaagcggcgttgtagggattaaaaacaatcgacgacataggaatcttataccgcgtcgattattattaaataacatagagtcggttattataaactgactccatagaggctttctatgatttttttacctttaaaattttgtattttaacataaattttttaatatttatttaaaatctaattttacttcttcttatatattattttatcattaaaataattaaataatgtataaattatatataataagtataagtcaaaattaaattaaaaagttaaataaaaatacatttatattactctgagtgtttgtatattaactattttttatttatattttatattttataatatgtgtatctatttttattttaatatcatttttataatttttaagttatattttatataataattagtatattaaataataaataatgtgtaatattataatttttatgtaatttaataatttatatacattttaattttataatatgatttggtatttttctagtatgttagtgtcatttttataatgctttaagttatgttttgtataataatttgtatttgaataataaataatgtgcaatattataattcattattttacttaaaataaattaatagaattcttatgttaagtattatagaattaatgtttaggatgtatttgttaatttttataaaagtattttaaataaagcatacctaattctatcgaaatttcagcagcataacgactataattgaacgttctcaaaaaatttaaatctcttaacaacaacaaaacacaattcaaaatataaaacaattacaataatatttagcaatacaaaaatttactactcatctcactgtattacaggtattcacagatgctacttcactacaaaaaaaatatttaatatattcgaacacatctaacatgcatatactttcacacatcgatctgaccgctgtataatatatcacaaaacctactaaattactagttagtaactaactatagtataattaataaaatttgtaactaactaataattaattttactctaaattactaattatataataactggcgctccccacgcatcaatataatttatcaataaagaaaattaacaaaaaaaaacctaacaaccaagtttaagatcgaaacttatatcaaataattttcctaattctactaaaatttcgacaacataatcatgactataattgagcattctcaaaaaaattaaggtcgttaataacaataaaaaaataatctaaaacaagataaaataagtgacgatgacttagatgattttaatcatcattgaattttttattaatgttttaattcgagttttatgagtcaagtgtgctctaagataataaaatttagggttctagttcaagaaacataattatctttactttagtttaagttatatgatacatcttttatatatttaaattttatgtgacattttattaatccttattaaaatattatttcaatataattagtgaggattacacgtcaaacgtctcaaggcttacaaaattagtaactagtaactaattatactataataaattataaactagtaactagtcctagtttccaccgaaattttggcagcataacaacgttattaaaaaatttaaagctattaataacaacaaacacaattgttgtggtattttcaacaagcaagtgtacgtattgtaaataagtaatagactcacaaaaagtgaggtcaatcccataaggattatagttaagtactttgaaattaaatctttactcttacatggttatgcaaaattaagagaaaattaaatttagaaacactaaagaaacagtgaaattaagaagcaaatcaatcaaaaagaaaatttacgataattaaagttagggctttcgatttcacgaacccacagcccagcgaacccaaaaccctcgccaaccaccacctccgccaccccttttctctcccatttctcaaccatttgatcctatttttttttttttaaaaaaacaaatctttcatttttgatacgcaatcccatacacctaaaaagttttaatttttaccctctttaagtgttatccgaacccaatagaaaatagtgggtatatataactccggtcactattatttgttgagaaaatattgaatctcaacattctttaaggtataaatatagtttctagtcatttttataatgtacattattttatttttagtttttgtaaattattttttgggttattttcatattagtaatattattgtgttgtatgtgcatagtgcccagattttttgcagaattgctcgtcagattgcgcttataacgtataaatttaaacctcattatataaatatttttctatattttattgaatatgtgtttatatattgtgtgtatattttttatgtaaatacaatttgtaattgtattgtatatattcaaagtaatatatattaattgtaatgagaatgacattggaggaatttaatgaatttttaaaattgaattagtgtgggatataattgattttatatatatgtatgtataatttagtatctaagtaacttgttactattttttataactagtaagtaatgaaataattaattttgcaatttcgttgtatttctttatattgtaggtttggcataattttgtgttgattgcctttaagcttccatatataggtatatactttaactaactttttcttattatataattaattatcaatgcatgttagttgagtttgaatatcttaaataacaaacaatatacatatata

SEQ ID NO: 55442 - DNA, 978 bp, Cannabis sativa
atacataaatcatctagatcgtggtaaaataagttccaacaataataccccataattagtcaatataagcaaactacgatatttgggtgagatctatatggcgaccgataccaagctaagccttttgaatattaggagagaattatataatatacttaaattgaataaaataataaaagtatgagtaatttgcggtaaaatatttaagtttaactcttgattgtagataaatacttaagtttaattttgatggcaatgaccaagttatatttctagaacttttaaaggaacttgtttgttaactactaagtcaatatccacatgtcattttactagtatatttaaataaatttttaaataaaaatacaaatttataatgacttgggctaatcaaggactatgatgtgtctattgacttggcacttaataattaagtatatacataagtaaatattattaccgtcaaaaattaaaattagatatttatttataaatgagaattaaatttaaatattaatttatactacaaattactctaaaagcatcttagtattatatcgtattttatttcttttgtttttggtctttatcttatttaaatttggaaagtatattacataaaatattatttttttttacaaaaaatttaaacctagctattatgttttggaacctagtttaaaaggaattgatatagtatacctttccaagaaaaaaaaagtgaaaaaggaacggatagtttttgacatttttgttgtgtgtcagttaatgtagagtgtgctcgtggctttattttctcaaatgagaaaaatgaaattacctctttcaattcactttcttttaggcaccaatacccaaattattaattaactgaattattttttcatcacgttagaatactaaccggttacacaaccagttaacattattaatacccctatatataatatattaaattggccaattatgaagtccctc

SEQ ID NO: 55443 - DNA, 759 bp, Cannabis sativa
aaaaaaaaatacaaaaatatataaagaggaagataaaaaaaaaataaataaagatataaggaaggaaaaaaataagctttcttaaaaaaattgtcttgttaaagtataaatgtaaattttagagaaaagttagtatgtggtgtaaatatctctatttttatccatggttgaccatcctcatttagagaaacattttctttgtgtgtacattgtatacatatataatatgataaaatataatacaaaattaagtaaccacttatgttaaccacttgaggctagctcaagtggtcataggagggtgcgtttgtattgaaggtcctgagttcgagtttaaggttatacattgtaatatataaacacttcaataaaaaaaaaagtaatcatttatgttataacagtcaaggggaattaaattctcgtgaaaataatgtgtagatatataccataaggattttaaatacccaaaatagtaatggttctcaaaaaaatactaggatttttgtattttatccttccctatcaaaaagaaatacataaaagagtagtatatttttggaaaatcaaacattctatgaattcttcaacaatgacttcagtttggtattcttctttgaaataaaatgttctattaaaatagcatttaggattttgaataactaaaacatttttagaataattagatttgaaattatatgtacttcttgagtcttttataatctttatatcttcgacataatattataaatataatatata

SEQ ID NO: 55444 - DNA, 1580 bp, Cannabis sativa
gtaccagagtggttatgatagttgaaaaccagagaagcatctctatggtaaagaagttcaaggtaaaatctaatttacaggagatattgtttttgttttctatttctttaatctaatctgattaaaacaatatactgtgtttggatgtagaatcttcatgattcttaaatataatctaagtttcaataatatatgtatattgcatttttttacatttgaatatgaaattaaatatttgttaggttatgattaagggaagattttgttaatcaaaattaatcttcttttctcaaaattttgaattttgtgaattttaaaattttagctaatctgagttgaaatagaagctagattttgttttttgttgcaagaatgaagatagacgagaggatgtggcattgaaagagatggttgttcgaatatcaagagaagcacaagaacaagaatatcaaataggcgagagcaattgaactaagtcgttcaaggtacaaattttgtaatttcatattgctttttataatttcatgaccagatagtttgtttcactgtgtataagtttattatttgtgatcaatattgcccatatctatgtaggtgggagttaaattgtcgacgatgatgaagcaattgaatttggattttttggctactgattaatatatgaaacaaaagaatgtattttgtttatattttgaattttgatgaacaatttacatatttttcttgaaactatttgttgtatacttttccaatctttaatgaatagaaagagtatatatagtacaacattatgcttggactccagatgatcccattgttgcaacaatctcacttaataactaataatattttctttttaaaaaaatattaattgtattacgtttttttaaaaaaaatatatatattttttcttcaattattaattgtattactttaaataaagtagaaaataactagcataaaatttactatacgtgtctcgcacgtagctttttactagtatatatatgtatatataaagctacactatgtgatagttttaataaaaaaaaaaatattgctgaaagagtgtttactttcagtcgaccaccaatctttatatatatctctaaaatatgtcataagatatttcatggtgttccaaatcaaataaaggacaaaattggaatccaaaattcaatcgaattggagatatcattgactgataattattatttcctcaaactgtggaataatgaattaaaatattagttaataatctcttttattctatctttttataaaaaataataaaaagatttcaaaactcaattttatcacaaaaagtggtaaaattctaaagccatacaaaattgcacaaaattccaaatgagcttattaaaatttattttagaacattaaagaggtcatcaacctcaccaaatttcaaagaggtcattaacgtcacaaaaatctcagaaaatggtaattttacctaaaaaattaaatagtgcactaaaattcaaagccatagcaaattaaatggccttccaaaaaagagaggtcattcacctctcaaaaaattaaaattatgaactacg

SEQ ID NO: 55445 - DNA, 1230 bp, Cannabis sativa
tctaggataactgatccagttaaatttttttattgtcaaaaaattgttattaaaattgttgaaaatatatcattttgagttagcatatctaattaaaattttaaaataatattaattaaacaatatgtacaatacaaaaaacaaactctctatctcaagagttaataataagaaaaataattagggtttctcgtttttaaatttatcactattgaatcttgtctttttttttttaaggttgtgttttgctacttacaattctattttttcaactacgattagtcttgttcatgtgacattgttagaacttaggataagatgcatgggtatctatctcaaaattaattggcaatgggagaagcaactcatttattttatatatgacaaattattttcacacattagtaatgtgggacgaattctaatacaccctcctcacaattaggattagaaagtgtgggtataacgaacgacctttaagagaccacaagaccgacatgacatttgaaagaatctcacaaggccaaatatagggaaatttgtgggtgtacagaaatttgtagattttgaaacaggtcaaagaccccaacattagaaactggcacacattggccgaaaggtcccaaatagagattaaagggaagacagtggaagtttttatgtttggctcgtcttttttggaccggcgacactttaggctcacaacggatcacaaacggctcatggctcgcctttttggactgtcgacactttgggctcacaacgaatcacaaacggctctgataccaagttagaatttgggataaaatgcatgggattccatctcaaaaccaattggcaatgggaggagtagctcattcatcttacatatgacaatttattttcacacattaacaatgtgggactaattctaatagacatggttttgagtgtgacatgatttttgagtgttttagtcttgtttctatgatatgattgtattttagtcttgtttgtgtgacatggttttattttattttatttcgttgttggttcttctttgttcttcgatgactcgctatcaaatcattattagtggttagaaatgactatttctttgcgattgaaggggttgttagtagtgtagttacgtatcttatacaatagttgaatactcaagttacgaggttgaatgaacctgctgcaacaatttttaatgttttatcttttgagcagtggatgaaacagaat

SEQ ID NO: 55446 - DNA, 795 bp, Cannabis sativa
ccttaaaggctgatttgttaagactgtaattggatgtgcctggaaatatggcctaatttgtgagattcatgaattaggcataatgcaagtttgttcagaggtgggtatcttgactctacccccagtaactttttactgacatagtaaacaagttacttgtgcttaccctcttttcgcactaaagtcgcgctaatggcatgcttcgagacaactagataaaggtataaactttctctagttattggtttggccaaaactaggggtgctgacaaatgcttctttatgcccttaaaagcttcctcgtattcttcagtccgttcgaatttcttattaccatgcaaagcattgaaaaatggaaggcatttatatgttgactttgaaatgaacccgttgagtgctgccatccttcctgttaaagcctgaacttcttttggctttgttggtgaaggcatctcgattaaggcctttattatctctggatttgctttaattcctctcgttaactatggaacctagaaattttcttgaggaaactccaaaagaacatttcttacgattaagcttcatgtcgtattttctaagtatgttaaaccattctatgtagtcctttgtgtgatccttacattttactaatttcaccagcatatcgttgacatagatttcaatatttcgtctaatctggttctcaaacataccatttacaagtttttggtacgttgctccagcattttttaatccaaacggcatgactttataataatagactcccaaatttgttacaaagcttgtatgctc

SEQ ID NO: 55447 - DNA, 592 bp, Cannabis sativa
atttcgtttaattttactaacataaacctgtcgtggatgaaaatttagggagtacagtttgatacatgtcaaagttcgggggcacaatttggtagatagcagagtttggatggcacgatttaatacatgtacaatcgtcacattagtagaattgaatgaaataattggacaaaatttcttgaatccaactatttctatagtttagagaaaaattttaacggtctgaaaaattcgagaatttaatttggtatttgttaaagtttggggaacaaaaattctaattaatcaaaataaaaatacaaaatcatcgtaaagttgctacgctcacttgattaaaacatgaagtggtgcaaccaatccttattgctagcaatatttgtgaaagaactggcacagccttgccaagaaacctatgacaaaacatatattatcacatttttatgtcaatttgaaacctaataagaatcacttgatgataatgagaaaacaaggttaaataataataataataattaatatgactaatttgatataggactttttgcgaagtattagttgtaaagatgatgatgatggtaaagaatgaatgact

SEQ ID NO: 55448 - DNA, 794 bp, Cannabis sativa
  modified_base (744)..(750): a, c, t, g, unknown or other
atccaccacaacctcttattttttaacattgttgaggcctctaacattctaactgagtatgttgctgctatccatgtaaagataaattagtaccaatctcagcttaaaaagcccctattgtcaatgtagaatctcaaaagtataaggatgattagaattatataatgtgaagtttcccatttcctggaatgcaaggattttttaggagtttgccaactcccactttctagctttttcaaatctttgctccctcttactacagctataccagcaacttcattgctatgttctaatacctcctctacttcttcattgtttccattctgctccattgtatcagtaacatcctttacacactctaaaccactctccataacatccaccttcccttttcctacaatcacactctcgcctcaaacatcttcttatctctagggaccttttaacctttcctacagtctgccattatatgaccatagccttgacaagctttgcatctcactgagagccattcatacacaacctcctgctcaataagctggccatgttcattcaaagaatgaataaccctcagtggcttatctgttatctccatctcaactagaacccttgcgaatttaaccatagatctctcccttataaccttatttgtcgaaatatgtttcccaatagtactcacaatggcagtgaggcatttatttccccagtaataaagcctaagatcattttgttgggttttatgcnnnnnnnaaaactctatttcaatgtaatccagatttttcaatatcaataaa

SEQ ID NO: 55449 - DNA, 1144 bp, Cannabis sativa
ctcccctttaaaaaaaataataagtaaattgtctttgagaggggagaaggatcaaatatataaaaagaaaaaaaaaggaaaataatgattatgataatggtggtgaacaactggcttaatcaattcgaggtatatggcgaggatccctgcgctcctcaaacaaggcatcaactctcttcttcttacatattgggatgttagatatagaacttgcgtggaaatgatgaatttcaaatcgtccggtacgtcgttatttcctaaatccaattacgccaccgtttacgtacttggttggatgagtacaagcatttagtgaaatattttcctgtacaaacaaatatgtgtaaaattgttcatacatattaataaatattatgaagagttataaatacttaaattattcattttaaatatacatataccgattgttgtaggggacaatagcccatttattttgattgttcatcctagtcatacgagtgacttgtgcttgacaacggttactgttaacccatgctttggtggtaatcgcacccggatttaaaaattcatatactctattcagccgattgatgtccaataatcttttttcatgtgcccaataaaaaatcataattaataactggcttgtcaaaacaatattatcaagtttattattaagagttagaaatcatacttgcacaaaaatcctaccagctgggctccaaagtatggcgtggggcataattcatgaatgtcatttttaacaagccaaatggagtcatcttcgaccccaaatagatcataagcaacctggaattggattatggatggctttggccaccttttgacaaagttttagaacgtaatgattgagctattttgtcgtggttggacataacaatcatggcatgttggcttactcgccctcttagggtgctttggaggctatgctggaggaccgagtaaatctttagaggcttgtttgcttctcctcatgggttgcttctgaagtttctttgtgggtggttatgtctatatatatagaaaataaataattaagttagaaatgtcattaatcaataaacaaattaaaacataccaagtattttcctatatttgtaaggtagactttcatccattctacgtagctttttatagcttg

SEQ ID NO: 55450 - DNA, 1040 bp, Cannabis sativa
attacccactgttgtgactcctttaccaattggagataccaaacaaatatttttttttttttgtattttttataaaagaggaagtatttatggtgtttataaaagaatatgttgcttgttacatatttttaaactttagatagttttccttaaattttcaaaactttaaacattgtttaaaaaaaaattaaaagaagtttacaagtagtttgctttaatttaaaaagtattaatattatcgcttttttatgcatcttgataatattttcatttttttaaaaaaaaaaattactattatgttttctttttatagataaaatttcgattagatatttttttttaataaaaataagattgtttattggataacatctaccatataaaaaaaattatctataaaattaaaaatacacataattaacataaaaactagaaatataactaaatatacgtgtatcgcacgtaacattaacttaatatatataaaatacctcatttacaatatatttattttgcataatatatttttaatttatactaattattttttgtcttctttttcacattccgaaaaatacatataatatatgttgactattaagacaaaaaaaaattataaacttattagagtaaaggaaaaaaaattaaatatatattatttgaaaataaataaaaaattattaaaattaatagaaaagagtaaaagaaaaactaagaaaacatgttaagagtaaatgttaagatatttaacaccaatggtacacaatactttttatggatgccacttttaaaaattattttcttaagttacctaaaattcgatacttaattacaatgataccgagaaatgtactaaacaccaataaccaatagtgccttttacttcaagttttaagtcagtagttgaaaatggaatgcctattttgattgaattcattcttgtttcgcattagggttttcactaatcaatttaaaagaattttaatcacctctattcttattttaaatttactgtttagtttggatttaaaagtcttttc

SEQ ID NO: 55451 - DNA, 778 bp, Cannabis sativa
aagatggataatcagagattttatgcagcaaccttagagtattggatgatggattcagcatgagaaaaacttccattcccgtcatccttaacaacaactatatccattccatttggatttccttgcacagatgctggtgggggttgagtagccaatgcataaggctgcaataacaaaggatgttaaagttttctcaaatatttttttaatatgagttttctccaaatattcttagatagcataaaactctactgacataattaagaatatatattctggaagaaaaaaaaaaacatgaaatagattctacattgtttataacaaacaaacctcctcaaaagaactataaacaaaaatggacaagaatctaatttactctttcacctgaagatggtgaactttttcaaggaccaaatttgaaccaaatccttagtggccctcattgaaactattaggttccatctaagaactaattggtgattagtggtttcacatgtttttttttttcctttttagaaatggctagtggctctttcttagctcgaatctgtagtgtctttttgagttaaccggatcttaaccggtgctcgttgagactattaggttccatctaaaaaccaattagtgattagtggataaatacatgccttattttctttttatgaagggtacgtaagaggctctttcttagctccaatgagcatattcttttttcgatataatcagatctcaagcagcttattaaaagcccataataccatattaagagtaagaatga

SEQ ID NO: 55452 - DNA, 1795 bp, Cannabis sativa
cgtcgaccggatccaggttggttttcaggatttcttccatcattacaagagatttcctagtttcttggtcgctgttgtctcacctctacgttcatgcaagatgactcaagtatataagtccactcattcccttggtttgcaaatccatgggaagttcttggaacattgcgtcgatgctcttgatttcatgtattacttgggttgggttgattttctctatccattaggacattccttgcattcccaggtttttcttcctgagcatttgtgggattcccttggttattttcctgcctcctggtccgagagcctcgaggtcttcctcatggtctccttaaagtttgatcaggttggttttgaggaactgttccctgtgcagccctggctgccatgacttctcgctccaactcagcgttgtcaaagttgactattttctaattctaccagtgggacaaatctgctaggatcatatgcatcttcactccttcttgttagaatttaatcaccagcagtattcaaattaccatccttcctccctgaacgtggtgtttcagatgtgttggttctttgagatccgataggttctttaccaggacgatgggtagtttcctctggataattacctttgcgtagaatgttattagccattgatgtggatttgtaattgtgtttataaggagggatattctaagtttttacaaccaaggctctcaatgaaagcactaaactgttaatgcagattttcattaactaaatatatggtcttttacgtaataagtctactacagagtttaataataatgaacaccatatattttatgtagttttgctgttaaaatctacacacttaatgagtctgtattattagggatatttagtagaatacaaagtaccattctcaataatgataaataatagaattatctctcccttttccccatagattctttccctatttataggtgtaacggttggaagttatttttattgggatcgattcacttacaattgttaatcaaacatggacatgactcacgtttcatttattttcacatgatataatatctaataactacctaacttctccttgtctttatactttaaatggttatgctgactaagaacgttgtttctcgttgagtatgagttatccttcttatccgttctaagaggaaaaaatgttaagtgtagacattcttcttcttgcagtgctcatcgaatcgtaaagttattcgcgaggtggtgttaagagcgagatggatgagcgtaatcttctccatgtacaattgcgtgagtaaatgagttgcaagcttttatttccaagtatgtgggttaacgagctggaagctccttgatgtctcctcttgtatgcttctattatatactatatttatctcgtgatagacatattgtctcattaattatatcagtttaatagttattattcttatctcgcatatggtcgtgtggcagcgagtttgaatatttctatcaactaataaataattgaaatgagttattttaaattgcattaataatgcaatttaattactatattctttgagctgatttatattccctttgtaggacacgtgtcagcttctgatgaatatcgtaattttaggtataacacttatgctaatctctaatttattgtttcattctcttgatataattagggctaaattgaattactggtgtgattttttcttcactgaatggtaggcttttgtacctgagcactaggcctatgctttcgcacagctctacctctcggatctatagagttgccttg

SEQ ID NO: 55453 - DNA, 3098 bp, Cannabis sativa
taatttttccatatctatgaaatttaaagaaaaaatgtcatattctacgtaatttcctctataattaactacatcataacattattattatcattataataaaattttaataattcataacattttaaaagttatagtttaccaaattttttccacaattttgttcacaagcgaacccaacataggcctaggctgggctaaagcacatgctgagaaaaaatatatcacattttataaccaaattatatataaaaaaaaaaactaatcaaatgttcacctagaaaaatctcaacaacttaaataataagtttaatattacatttccctaacactctctccctcacttttctttttaactatagtatatagattatgtataaccttaaaatctattaaaataatatagtaataaaaacattttaacccactcttttttttcatcaataaaccttatcctcttttttttttcctacctctctccatctttctctcacttttccgtgataaatatgtattagtctctctttctatctttgattatgatttgcaacatgatcagaactgtcattggtattataaatatggatcagactttttgatatggcataaatcgacacgagcccgagagacacaaacacgacactaaaaaatatgtgcttaggtacgacatgacacgaaaaaaaatatggacttaggcgtgacacaacacgataaatcccaaaaatacgacacgtaagcataaatagattagctcaatagcacgacatattataaagctcgataataataacaatgataaatatttatttatcaattaaaatgatagtaatattcaaattataataattatcattattttaatataattgtgtgtaactattgttggaaaaggatataaaattaattaaaactataaatacacatatattttagtacttagctcatcaattttaataaaaatacaaaaatatagagcacgaatttgtgtttgtataagaaaataggttcgtctatttaagaaaaatagccggtccgaataagcacgataagaatctgagcacgacacgaaactattagatttgcgggccgttttagggttaccctatgaaattattgcatggcatgaaacatttcatatttttatggcatgatccatattttcttatggtccagtacaacattttttttaagattaatgttcattaaacataaagttagaccccgcgactattacataaaatgttcataggcagggacggatgtacattgggagtaagggtggccttggcccccctttatttttcaaaaaatatataagaagcattaaaatagtacaaaaaataatatactaagtagtcaattggctctctccattaaaataaataaataaataaaaataaaaataagagaaacaaatgagatagtagaaactagacattagagagtacgtgatcagtattcatttaaagtgtgagtcctacaaattaaatatttaaaacaaaataatccaatattataaatacaatatacactaattttttcttctaaataaatattacatcaattaataaacatctttttgagtaaatatatataagtgggaattttataaaataataaaattttatcccataaaaataatcaaatagaaggaaaaaaaaatctaagtttatatttcgcccaatatcaatcacgtgttgtaaatgatgtatgatattctttaatagttattaaattataatatatagaacttgatatttaattatattaaaatggcatgacacctcatactggtgatgcacaccattagtaatactttctagcatttatcaaaataataaaaaaaaaaagaaaatctacaatcaagatattttattttataaaaaatatagtaaaaactacaattctataataaagaagataaattttaataattatatagtagtttagtaaaaaatagactaatgaataattaagtacaaatacacaatttgtattcataattttaaatgtaattatgtattttaagatatttatttaatgtttaaattttcatagttggcctcccctcttattagaccctgcctccgcccctattcatagggatagatgccacatcaaagcacccaaagcggttatgggagaacgcccatctaaccacattgtgagccataaaattacaggttctggcagtaatacatagtaaacaactaacaaaagatgaaacgattctattacaaaataatgattagttctcaatttcccatttagggtcaaagccactgagcgaattgatcactaccttagaatcgctttcaactaggataaaattaagtcctttgtcctttgccacttcaagcgccaaacaaactgcagcagtttcaccacttaaagcgtcttaaaagtccagttttgccgtgtacaacatgatccgtgctttaaaatgtctaacaattatgggtcggcaatacagacatatttacacatccgtaatttgtgtatttttatacgtaaaaacaaaattacgcctccttgaaatttaattttgggtttgttgcaactgttttttttatggcatagttacaaataattttttgagttttcaattattagagtatttttttataaaaaaatgtgagagaataactataaatattggccatagatgctcacctcaaagatatttacaataaatttgttcatttcttaaaaaaaaaaaatcagttttaattaatattagggattcttacacttggtgccacattttgccatttttttttacatttttatcattattcggttatttaaacatttataaaaaatttgtttttcaatattagattttcaaaagtttgataattacaaaaatacctatgcatgcttatgtcatgagttttctctcatattacacaccatccctaacatcttctcctctttcttttctttcttctgaatttttattttattttctgttagtttttttttttatataaatatcatctggtgagatatttaagtgaaaattacataggcatgacatgtgtagcatgtaaagcacaagtcataagtttatgtttctggtattactcgcttgaaca

SEQ ID NO: 55454 - DNA, 1812 bp, Cannabis sativa
tgtcctctggtttggggatctgtttgatattcgacagcttagttctgatggacaaactgtatatattcgaataccattttcaacaaaaggtaaaaaaacttatgtcaagttcacaagtattttgttttggttataacttttatgtttgatttttctcagttccaaaaatgaatcatgaaaaagcaagaagtgatcataagaaagtagtgatacttgtagctgtcaccgttggattagctggtgtgtttatttcaattgccttctacattcttaggaggagacacttcaatggtaacagtctctttaccctttacttcattctttccattgaattatcgaatgaagtttctggttgagtcgtgaattatgtcgctaacacacttcacttctcatatattttgtaaaatgagtttgaggccacatatacagagtagatagttttttatatacattagtattttttcataagatatggtttttgtggattggataggaaatttgtgaaatatttcgagtaacatttttttaagagacagaggtcatttatcttagactgacttcctacaaaactttattcaggagcctcacttatggcagagaaaaaccgtggttacaaattatgttttatcatccgtccataaaacatacataaatcttgaaacaatgacaaacctgagtacaaaaggagctagaggttgtaaagagtgagtttcgagaggattttctcgtcgtactttttgattagtgaacgtgatttggtgaccgaaccgtgtatgttgctgtgtttgattgtctttaaacatattgtatgttctgtttttcatttgtttttagagagaaacaaaagccaagacgacgacttggagcttccatttttcgatctacatacaattagtgttgccactgataatttttcagaggctaataagcttggagagggtggttttggacctgtatacaaagtaagttcacattaacatgtttagaacattttcttttcccaatttggatagcgaaatatttatctttgtcatgacatattagggtatgctagacggaggtaaataaatcgctgtgaagagactattaatgtgttcaggacaaggagctgatgaattcaaaaacgaaattaaactaattgctaagcttcaacatcgaaatcttgtaaagatattcggttattgcattcatagagaaatgaaactattggtttatgagtacatgcccaacaaaagccttgattatttcatttttggtaacaattttcacctattttaatacaaatgtaatgttttacatatgtaatttgctaattttgttctaataaaagttgaagccaacatttgcagatgaaaggcaaaacagactattagattggcctaagcgtttccaaattgtatgtggaattgctaaggggcttctctatcttcatcatgatttgagattaagaattatacatcgagatctcagagctagtaatgtattacttgatgaagagatgaatcccaagatttcggactttggcttggctagagcttttggtggagatcaaatagaaggaataaacacaaacaaagttgcaggaacttagtaagtcatcttgaaaaaaaaatagtttctttgatttaaattcattttttatgcaaataattaaatgttatgcaaatgtagtggttatatggcaccagaatatgctttcaatggcctcttctcaacaaaattagacgtatttagcttcggtacattgatgcttgaaattttaagtggaaagaaaagtagagacctttacgataaagatagcattctcaacct

SEQ ID NO: 55455 - DNA, 1088 bp, Cannabis sativa
acaccttatcatatatcattcccataatttgaaaacatgttttttactgtaccaaaagaattgcaccatcatcattctctcccgaaccactctaacatgcatgtaaatcaatgaaacgatatctttttgaacaaggattcaatgcaacaatgccttcaaaatctaaagtaactgtatggccagggtacaattaattctattgcttccaatgatggcactctcttgattccataaaggaatgggcattgcaaatttaatagtcgaacgactccattgtctagtctctaaacaaaagatgacatgtttattaaatcatttgcatccacactaattttcactaggttactttcatattaatactactaatgcatatttgaaatagttatgatcaaagccattgggacatacagaattgcaacagattgtcttattatgggattattgcaaatatacacatatatagcaacgaatccgacctatataattaagaataacacttgtagttaacacttgtctaaggcaaaaactctaataagtaataatggtttttgtccatgcatgcatactcaaaaacctttgatcgatctcttggaaaaaaattccgatgagaatgtataatttatgtacatatatatcgtagtttctaaatatatagcaatgtaaaagggagagctgagtcaagcgaacgaattattaaaccttttttggcagtgaaagtgattaagtgtttgccactaaaatataatatagaatcacatgcactacgtactgacagtccagaagcacactcctgcagtactatatatacatttaaaattaggaataagttgaacaaatatgtcgagtagtatcaacgacacatcactcctatcgatctttttcttctttatcattcatctgtgttttactttctcctgcacaattaacaatattcattttggaacttatatcactcttctattattcacatcataaatatatgttagtatactggttgaaattgtgtttgagaaatgctaaagggtaccagtagtgcttagcaccctcttatgtgtcaatatcgctattggtccaactaattatcgggt

SEQ ID NO: 55456 - DNA, 1880 bp, Cannabis sativa
tatttttgcctctaaaaataaatattaagtatttaagtgtgtaaaatttgaaacattaagtatttatgccgcagtttacccattattaggtgactattaggttataagttaattattatttatttttgtttaattttcaacaaattaatcacaaccattcaataataatctaatgactaaaaaacatgtaaccataatggttacatatttaatgtaaccattgaaacctcttatatactagtagaaagttatgtgcaagacacgtatacttcgttttatgctaagtattttttactttatttaaaaatgatgcaataagtaattttaaaaaatattattagttattatttgagattattattatgtatatttaaaccattatacaataaaaaaaataaaaaatctttttttttttttgaaaattagcgtcgagttgcattagataaaggaaacataattagacctcacggtcattacaaatcatgttctccgacaaagaagagaccggaatacagccaaacttacggtgggtaaaagcccacttagccacattatgggcaacatagttacaatgtctactaacattcataaaattacaactagtaaaagaaggagtagatctcaaacaaaaggagacatagttctcaagtgcccaatgggactccttcccattgagcgcattgataattagtcttgagtcactctcaataataataaacttcaaacctaaatccaaagccacaaaaatggctaaacaaacagccgccgcctctccgcataaagcatccgaaaagtccaactgagacgtgtggatccaaatcaccttgcccaggtggttcctagcaacaacagttgtgcacatgcttgccaatcccactctaacatcacaattcagcttgatccaatcctcagggggtggattccagctttctgtcaaaataggagatgagcatggtaccagagtaggatgtaattctgtaaaagatgtatgaataaggtcaatacattttaaaacatccgggggattgttattgtgtattttttcatttcgcgcctccagatggtatcaaccacgatcgaagcataaagaaaaacttcctccactcggatacccctgttgttataagtgtccaaataaatttcacccagtcccaaacacgaatcccattatcaaagaccggatagatgccctaaggagatgaacgccacagatgtagcgccacattgcacgagagaaaaaggtgttcaatagattcctcccccattccacacatagggcagcttgtatcctctatttggaatcttctcccgatcactctcctgacagggagcgcctccgagagaatgcaccaccaaaggatcttatgccgctcaagcactttgctattccataacttgttccacagcgttggggctaccacacaatggctagctctatcgtgtgcttgagttagataagcggatttacaagtgaatctaccattaggctccagtgtccatccccatttatcctcttcctgccttgaaggattgcctcctttcaaaatagcagagacagtttctttgtcaaacagattatttagtttagaaatgtcccaagatccttgagtagtgagaagatcagccacacagttcaatccaggcagaatttctcttattggtttcggaatgaaaccttttaagtgaggaatccaaggatccctccaaatgcaagtgtttctaccatgacccattaacttacaagccccatttttcaatattgccttggctttgattacattcttccagaaccacgagtcagaatctttataattgcagtttagaaaatctgtacctcgaaggtatttggcctctaggactctgcagcataaagattgaca

SEQ ID NO: 55457 - DNA, 1016 bp, Cannabis sativa
tttgccatctttctcttgtaatgaacttgagattaataaaatggataactactcatttgattcctatccctctatctttcatacttttaaacaaaatgacataaattcttggcacttaaaacttggtcatcctaatcctactgtcttgtctaaaatcttgcctttggttcctcacataggaactctaaaccagctgcaattttgcacagcatgtcaattaggaaagaaccacaaacaaccctttcctttatcccttagccgtgcctctcagccactagagatcattcatactgatctctgggggccctctcatattacagcaaaggatggttatagatattatgtccattttcttgatgactatagcaggtacacatggatttttcctttggtacagaaaaaccatgcttttgacacctttattaagttcaaaagcatggttgagaagcaatttaatttgcccatcaagaatgttcaggcagattggggggggggagtataggacgtttgctcggtttttgagtgatcaagggattcttttcactcattcatgtcctcatactcatgaacagaatggccgtgctgagagaaagcacaggcatattactgaaacaggtttaaccattcttgcacaatcgggtttagacttcacttactggtggtttgcatttcagtgtgttatttatactatcaacaggttgcctacacctgttcttggtcataagtctcctattgaatgtttgtttggcaatgttcctgattacactatattgaaaccgtttggttgtgcttgttttccatacttgcgaccttacaatcatcacaaaatggagtacaaatctcaacaatgcatcttcttgggctactccaacaattataagggatacttatgtgaacatagagatgggcgactctttatagctagacatgtggtgtttgatgaagcttgcttccctgctcactcttcagccacgcacactcaggtatcaacatctcactctactatacctcctaca

SEQ ID NO: 55458 - DNA, 977 bp, Cannabis sativa
aataaaatttaatgtaagcccaaataaaagtctaacaatttccttataccgttgcaattgcttagatcgattgcaatttcaatactgcagtattcaatctgctgtgttgaagtgataagttttcttttttcttttttctttttaaagttagaatcttcatcatttcagaacagaaataatagctgaaatttctcttgagctttcttgttttttaaatattacagaatggtaagctttcgagaggcttgcagtctcttattcccaataacccgagagaaatggagctctccacaatgagactaatctctaatcattccataccccaaatgaaagcaattcttatctatatagtctttggcacaaaaattatcccagtccactaacctagaattacagtagtacccttcataaaaagactcctagaataaagccttgaggctttttcctgtagtaagtttatcttgaagttcttctggctttctttgaacttcaagaactaacaaaaatgggaaagaggcagttatgtgctttgaccagccgtaaatatggaataaactgtgacaatttacacccttttattcagaatgaagtgcaaaagtctatacaaattaggagcatgttatttgtgtactattggtgtataaagttgaaagaatagctataagttggtatgttctcattgtcaccctctggataaagttcaatatcttttagatttttttatcatgatgcaaattaaagaagttcagattttttttttttttaaaagagacggatgtgtctaagactgatctcctcctaaatttattaggaggccctcacttttggtggaggaaaactatggtaacaaaacaaactaaaacattagaatgcttgacataacacatcaaaatgcataggcctaaagatctcaaagcatcatttgaacacaaatagcaatatagctattgaggaaaagtaaaagtaccttggtggag

SEQ ID NO: 55459 - DNA, 1074 bp, Cannabis sativa
ataaagtagatgcacacagaaaattgaaaaagaattgtatcacattaaactaaaataaaattttaaacaatctccaataatgccctaattgaaagtctgctaaaaacccatatttattgtaaataagtgacaacaattaattaagaacataggaaaagagtaaaagaaagaactcgtcgaaaaaatattgataaaagtctttagagctgctttttccttccaattttcgtccctccaatggttgcttccaaagtatcaaaagagtccattatatagccttccaagtagggttaaaactctaatttttgctaaataaatgaggcgggccatgatattgaccttccatgtcgcagctcctagagtctatttttgggcagcaagcttcctaatgcaacgaaaaataattttttggccataactctctcaatattacttggaattggatgattcaagatgtttagaaagctgaaagagagatctaaaacttttattcacaatatttttcatgtaagtgaaggcatcataggcaaaaattatcttgaagctttaattttgattttcgatcacagagcgtgttgagtatccaaaatttagaatctttcacccattatatcatagaactctgaattctatgataaattcatcatattcatctcatttaacatgtttattctcattttcaattcatattataaattttactatttagacctgaaacaagtagaaaataagcgtaattctgcataaaataattataatcaactaaaacacacctataaaatacttcataaaatgcacctaaaattagtctatcaaactccccaaaacttaacctttactcgccctccagtaatgattgaaacttttctaaaaacaaatgaatagagacaaacaaattaagccttaacttttattcacaccacaccgccatcacttgcatgactcaactgttgcaaaaccagattttcaatccaattgcttacaatacaaaccttagctctcaaacttggaaaagaaaaaaatataactcacaaatgtcaaaaatcattaaaaattaatttacatgctcaaagt

SEQ ID NO: 55460 - DNA, 690 bp, Cannabis sativa
gaattatttttgtcatcttccatcataaaacagataaaatatacaaactcaatatattactagaaataattttaacgggtgtagatattagaagtttgtgtatatatttttttaatattactagaacactaatatatataatattatatttattataattttataaaatatatgtatatataatattaagtgtggattagattagattggttattttttaaggtcaaaaaacattcaatccgtacaagtgtggatttcaaatttttcaatccagtccaatctacgaaagtgcggatattcacattttgcgaatttgattggattggaccgttcggattaaattagatcaaatactttgtgaacaaccctattgttaaccattggagtaaaaaataaaaaaatatatatatatgtgaataatgtggatgagagaaaaaataataataaaaaatgataatattttaggataatgtatgtgcttttggtaactataggtatatgtcctcctatttgtagaaaataaaacttactgttcctaaattggtgtgccctcccaatcccaccagttattttagtacacatcatctataccaatttaacatataataaattccttaacaaattaactctaaactaaattaatacatgtaaaatatattcaaatgatgcatatcgtgaaataattggtgg

SEQ ID NO: 55461 - DNA, 1647 bp, Cannabis sativa
ggtagttagggtgttacattaaggttctattattactactaggaactacaatatcctaggaaacagggaaacacccaactaaggcactgaaatgggcaagaattgagacaacaagttattcagggaatctgccaataccggttaaccagttttacaggacctggcaaacccgttaactagtttgcaccaggtttccccaaaccactcaaaacttatccaaatgccaccaaaccttccagagcacctaaacagagcatacacaacatattccaaccaataaaacttagaaaaacacccagaatcaaaatgtgccatggatgaaccaagcgtgagttttcaactcaagcttgtgcatctatcaccaaaaataatcaaaccatttccaactcaaattaaacttaaaattcaaaccacacataatccaaaccctaacagcccttaaaatccaaaattgaacattcaagctaaaataaaacttcattaacacaaatctatgagttctagggttaccttagcttcaaagttatttgaatccttgattgaaatcccaaaagaaaatatcaaaagatgctggttccttctggttttgtggtggccgaacaaggaaagagagagaaaaaggatgagtttccttatttttgacttttctttccatttttcctaaatgaataaggattatccaaattaatccttactgagaatagaagctaggtgtcaacacccaaggctgccacccaattcccacttgccaaattaccaaaatcctcttttagcctaaacttaggctaacttaatgcttaggggtaaaatggtcaaaaaccgtaaccctgcataaacttggtattttattttctccaatttacatccctctaagaaataaggttttacacctacccatgtgattaaactagccattcatcacattttccattatcattgagcaaaaattataaaaattgcataattcaaatataatacaaataatatacctagagtttaataaaatctacggaattgagaaattataactctaatgcccatttctaacaatgagacccaaaaataacttaaatccacaaatactataaaaatatcaataattagtgttaattgtcttgactaatccatattatgaaatgcgatcattacactttgtcagcgaaaaaggtcgccggcagctgtgccagtgagatcctcattattttgcaagtgagtttactcgccggcaaaagatgattttcttgtagtttaaaggaatcaacaattcatccattgaaggatcatctccaccaacagttgaatctcctactttagttggtccactatcactgaaaaaatccatacaaacccattgtactaacttatgtcactcctccaccttttcaaagtagattgaaaaaatctaagaaagaggaacccatcaaggagatccctaaaaatctttcaaaagttgaggtcataattccatgtcttgaggtaatcaaataagagtctcattgtgctaatattcttaaggagttgtgtccaaatgaaaaaaggttgaatggaggtgaggaaataagtgtgggagagaatgtttttgttgttctccaaagaaagttgttgttggattttgtgccctaaataaaactcatttcaatatcatca

SEQ ID NO: 55462 - DNA, 1297 bp, Cannabis sativa
attttaaattcaaccatttaggttcaatttaatattgtcagtgcctataattagtataactattaatgtgaaaaaatacatatatatttgtaaagtagataaaacatacctgaaagaaacctatgaaaataagcttagttgaatattgattgaagagattgagaagtacgaatatttcgaaatatatatataaatatatatatatatatatatatttgagattatattgattgagaagaatgaatattatgttcatatatataacttaagtagagggactagttataattaacgttggattactcctacttggaataggaaatgtagagataatattataggattctttttcctattataattaggatttagtagttaccttctttagattttattagttttgacccattactaaatttacccaatgttttaattaaaagatttttcttacgagcaaacccggttttatgatcaagttatctaaaaaagttacccttttctgtcccaaaaaacaggaaaaaaaagattaccattttgtccaaaaaaaaaaaaggtgtatttatatattttgaatttatataaatcttcttttgaatttatttgatttttggaaatttaaataccaaatacgaaagtaaaatcatattttgaatgtatttgattttgggaattaagtttctatgagattttaggagataccggatctattattggaaattaatttgagatatctacaattaaatataactttttattttattttattttaaaaagttaattaaagataactttacttcttaataatcttatatagttgatttccataacattcaatctatatccctctcctttttttcacgcgttttatattgtacatttataataaattaatttatcattattaattaattatcaatataaaatttctcaataaataaataaattctttgagagttaatataaattaaatatgcataataaataaataatgtaattacttcaattttaaacattagctactcccttttgtgagctctacgtacacttcgactgagatctaagctctcatcttcaaagactcatttcttctatattataattagggaacaaagccgcgcttcgcgcgggttcgaccctagttttgcaaactttattttaatccttttcctgaagttactcgagacactgcgacatttaattggccatgagtgaatatttacttaaggagatacaatccgacatatttaagcgattgttcttgacttttattaacttatggtaaaacatagtgccaaag

SEQ ID NO: 55463 - DNA, 860 bp, Cannabis sativa
atgacatttagaaaaggaaattaatcatactattagtctccccagagagttaagaatagagtaatgttagatacacacttgaattgcaatattaaatattaataatttaagtaggaaatacatcacttttaattgtgtaattgaagttaattatacctcattatgtataaaaaaattaatgtataatttaagtgtgttcgaacctttatttttaagtataaaacttggacagactactattcttcctcttttattcttaccttaaaaaaagagtattgttattaataattaagcaccgatcaacccactctacctaatgttaaaataagttttattaaacgatcagctaatcgagttgctcatgctattgttaggcattctcgattttcctctggttgtagcattttcgaacaaactgtttgggccgatctacaggctcttttgtattcagaatacttttaattcaatgaagttaaaacaccgatcagcagtatctaacactagagtagttagtaattttacatatcaataattaaattagatcaatatagtgacatataacactttaattggtagctataggaatgtatattaaaaggaaaggtcaaagtaaaaatatattaaaaaataaattataggtaaattagttaagtttgtttattactaaactcaaaagtaattatatgttaaagacttatatacatatttaccctgttacctaaaatatttacctaccacttaatgatatgactaagttaataatgagggtgggaaatgcaaatcacacatatatataacaaattaaaaaaataataatataatcttgttatataattgaagattgaataattatagaagaa

SEQ ID NO: 55464 - DNA, 726 bp, Cannabis sativa
tctctggtttaccatctgtggacagcaagaaatgctgggattttgaaaggtggactggcagttataggttgagtaaatgaagagatagaagggaagttgaaatgagattaacaatgtgtcaacctcagaaaataagcagccaggataaagaatggatccaatccttgtaaaagaaattgtgcaaagcagtatgggaatttcagatttgtaaataaagagaattttggggcctctacttgaggtgcctttaggatgtacaaatgattggttttatgcaatacaactcactgatttatcaaaaaaaaaatattcactaagtcgattgtaccacatgcttcttgattgttttaatccatacaatgatctttgtaatttaaatgaacatatttcttgattgcttgaattatatgcattaggtatcttacatcattcaaggatcttcatgtaaatatcactatttagttatccatataaataagctatgattatatccattaatcgtatatcgagtaattttttactcatagccaggctaataaaatatcttaatgttattgcatccaccacaagaaaatatgtctcttcataatcaatatctggtctttaaaaaaaatcttgtgctacaagtcttgctttgtatccaataacttcatttttctcatttcttttacgtacacatacccatttgtatccaacgggtttcacacctttaggtgtttggactat

SEQ ID NO: 55465 - DNA, 655 bp, Cannabis sativa
aaaaactaattgtttaaaacatcatttaaggttttatcagtcattttttttcaaaaaaataaaaaataaaattatgtaattgtacttttaaaactgtgttttcgaagttacattggataggaaacgtggtatttacaaaataaaattctggtgatatatgccgggcttgacactcataaaattggaaagtgaaagtgaattttagggaaatttacacaaaaatattatctttgataaatttttttacacttttatgtttataaatatatttatatttttacggtattctatataaatacataaaaataacaaaaaaaatcacataaggataacagaaaaataacatccaaacaatatcaaaataacaaaaaaaataatatacaaattacaaaaaaattaataattaaataataagagtaaaatataaaaattacataaaaatatcaaaagaccataatttcagtaaataaaatcttaaaaaatcattaaaatatttaaaattccatacaactgtatttttataattttttattgtctttgtgtatttctaaaataatcacttcactttatgttactccaaaaagggtcaactgaagcccatgggaaaaccctatagtcattaagaaaaagcccaatatcaatacttacattgggc

SEQ ID NO: 55466 - DNA, 1060 bp, Cannabis sativa
atttcttaaataaaagcctaataattttcttttattttggcccccaaaaggtgtaggcccttggcacgagcttagcccgcctatacctagggccgaccctgattatagtttaactcaaaaaaataatttagtcaatttaagcattccaattatgtttcttgacaaagtaaacaagataaatcactatcatttcatttccaagaagttttagtaaacaacatattacgaatattgattccgattatttttcatttattctgttacattttttcattaatttattttgattttgaatactgaacggtaaacgtgccactagttccttttattacgattcttaattctatttgcttactcctcccctagatccctactatttttttttctattacctaaatataattaatctttttactttttaagaaatcatccaattttattaataacaatcaattaaaataatagtctacaacccaatcccattaaaaacacaatcagtattagaatcagaaaaatgagccaactaattaccgcttgattctcatatcgttttgacaaaagaaacaaaaataaagtcaaatgaaaaagattacaacattacagttaaccttaagaacacctatattcaatttcctccaccgttcagaagacacaacaatagatctgttgcagcagtttattcaaccctttaacttgagtactcaactattgtgcaaggtacgtaacatcactactaacaactcctttagccacaaatattttttttttaaccactaacaacaatttgatggcaacacatcaaagaacaaagaagaggaacaaacaacaaataaaacaaaacaaaaccatgtcacagaaacaagactaatcgcaataacctaaacaaaagacactcaaaatcatatcgcagagacaaaactaattacatttgcaaaaatctaatcgcagtaacaaaatcacagaccctagccaagccacacctaagcccaaggaaggctggcgagcctgttagaaaaattaataataaacctaagatctatttgtatataacatagaacac

SEQ ID NO: 55467 - DNA, 848 bp, Cannabis sativa
taaaggccaagattgtagtagtgggcatattaaatttttttaaaattttggagaatctcttaaataattactatatatataaaaaaaaataaactaaaaaagtctgtacattacttttaaaaatgtacattgtaaaattttttaaaaaataatttttaatttaacaaatacaataatataaatattaattaaattatataaaaaaactatgcagtgcatatatgttgtgcattgtagataaaatcacaaaatgctacaagaaatgcggcttccttagacagcacatgcacgacatttaacatatatgcaatctccttagagctgctcttattgtttccgaatgtatggtgtttttctttattaatttatgatcagaaaatctggacaaaatctaaccatgtccatcacattaattgttagagtggtttgggcatttttggtcaggttatatatagcttgcattgttggtgagaagcttcctaggccaattttggttttggaagggtttggctctggaggtgaggaggctcattttcatagagaaaaggaaaaggcttttggtatatacggagtaatccttatcacaggaagaaagttagtcttccattagattttacctataatatatgttttctaatctagtgtgggtgtatatatttgtgtttgatgtgttttcagttgaaaaggggaaaaaaaattaatttagatgatgcttgtgttaatatttgatcatgttataacaacttttgttgttcatatttgataacccacgaaataatcactagagattgttgcttttaaatgttatcatacggtactaatgtatttgataaagggtaattaggatt

SEQ ID NO: 55468 - DNA, 1638 bp, Cannabis sativa
gaccacctcacccaaatggtttctggcaaccacggcaataccggaactacccagaccaactcttacatcacagttcagcttcagccagtcctggggaggatggcgccagtcttccctctggatcgggaccacatcaggtaataaagtacctttcagatttgtgaaaacacaaagggtagagtcaatacaattgtccaagttaggagagcagttattgtggatcttatcattcctggcacgccatatagtatccaccacaactgacgcattaaaaaaattcctccacatttaaaccttcggaaccgagcccccacaggaacttgacccaatcccaaacacgaataccagaaccagtaacaggataaatcccccagggggacgatctccaaaggtgaaacgcaaagtcacaagaaaggaacaaatgctcagcagattcctcttcccttccacataaagggcagatcacttcctcaatatagaatcgtttcttaatgatggctctaagagggagggcatttgacaaaatacaccaccaaaggactttgtgtctctccaggattttactgttccaaagtctattccaaagagaaggggcaacatcacaactaggagctctctgtaaagcttgaataagataggccgacttgcacgagaaccttccattacggtccttggtccaaatccacttatcagaaccattaccagaaggatggccccctttcagaatggcagctattgtatcctgatcaaacaagcttgtcaacttttggatgtcccatttcccaacactagttaaaatgtctgccaccttattgaacccatctgaagaactcccatttgattttggaatgaaagatttttcatgcgtcacccaaggatcttcccaaattctcgtattcttgccatcagataccactttgcatgctccttgccggaggatgttagtcgctttcacaacattcttctaaaaccaagagtccgagtctttatacttgcaatgaaaaagctcattcccttttaaatacttggcttccaaaatcctacaacacagagattgacttccagtaagtaagttccacccccacttagccaagaaggctagattcatctcttttgttttcctaaaaccaaggcatcctctagatttgggaagacaaagcttatcccaggctttcaagtgtaatccatggttccctttcttaaaactccaccagaagtcacggaccataccatcaatcctggtaaccagtcgattagagattttggtggtttgcatggcatacataggcaacgagagacccacagacttaatcagagttgcccggccagctttcgacagtaatttcgccttccacccttgtaacttagaagttaggttgtctagaataaaattgaaatcagcatccttttgctttgaacggaaaagagggagccccaagtacttaacattaccatctgagctcccaattcccaaagcttccttaatctcctttctcacaccaaccggagtattattgctgaaaaagatagacgttttgagcttattgacctgttggcctgactcagcaaaaaaattctcaaggcactgccaaaattttttagcttctaccactaaggctctaccaaccaggatcaaat

SEQ ID NO: 55469 - DNA, 638 bp, Cannabis sativa
ttgtactttaagaaatggtattccaattttattatatgacgttgtatatatagatgtcataggttttttgttttctttcgagaaattgtaaataatttatattgttgaaaataaattttaaaatagtatttccgtaactatctcaattttatttttgacactgtaaatgatttaaaatatttaaaaaatagataagatgcctaatataactataatgtataccatgttataaaaaattggtttttaatattttttatatacagaaaatgaaaaatactactaccggaaaggcaaactgatacccttacctttgaattttccaggacaaaatgtaagcttgagtaaaaaatatgatcaaaaatataacaaaaacagatagatgtcttttgaaaaaaaaaataaaaaattaaatcatatcttaagttaaaataataaaaaaaaaaattatttattaagatatttttattgaaatttaattttgagtttttttagatgcttattttcatcactttattattttaacacttataaattttcttataatatattttatgagtaaagaactttgtaatttgctaataaattgaaatatatgtggaaagaaatttgtatttataatatgtcttatgaggaaagaa

SEQ ID NO: 55470 - DNA, 1055 bp, Cannabis sativa
gcttcataaaacttccatttctcaacatagcaacaaaagctttcattgtattcccatctgagttatggataatgattatatattagtatgtatttatgttcttgtgtgcagaaccaaacgaggcaaatcttgaacttgaaccatggttagcttaaagtttgtcaagattattaagaatgaacattcaaagatacaactggtaatcattcttagatctatagttcctttcaggttttcgctccaacggttttgacatatattaattagatgtgtctaactatacttgttgtgattcatgtaggctcttccacaaaagtttggaatgctttttgcagattcactggccagtagtgtgtctcttgttcttccatgtggccatacatggaagattgggttgattaaacaaaatgacaacataatccttcaaaaggattggcaaaaatttattcaacattatgggataaataggcagctactaatatttgattatagagggaattcaaattttgatgttttcataactgatgatagtttgtgcgagattgattacactcactttcctttctattctgatgagaagaagaatggtaaatcacctgtgattaatttaacatcaagtgaggagtgctcttctaactcggattacaaaggtatgtcaaaacttgaaacatcttaaatatgaaatctgatgagaaattataggatatgttaaacaatttattgggtttgtttttttattgtaggcaaatccattgttagtgaagaaagtgaagatgagacaactagaaagatgaagaggaggaatgaaggggcatataatacgtacagagatactaaagcttacaaacaagctagccaattctatacaaacaatccatcattcaaaagaattataagagcaaacaacaatcgtcagtataatctggtgagttagtagattaagcaaacatattgtttatgaattttttattgagtttcttctgtttttgctgcagcgtctaccagatagtttcgttacgaatcatgttggatcaaagactcagatggtatctctt

SEQ ID NO: 55471 - DNA, 1344 bp, Cannabis sativa
aaaataatatttacccatattaatacccccattaaaactccaccatcaccttcaatgaaaattttgtataaatagagacacaaagcaaactagaaagaacacaaaatacaatttggtctctttttaattttgacatatttttcttcatctctctctaccaaccaccatgaccagaaagaaagtaaatttggagtacatcactgatgactcctctcgaaaaaccactttcaggaagagaaagaatggtatgctaaaacaagttgttgagctaagcacattgtgtgatgtcgacgtatgtgcaatcgtctatggcccaaatggtggtgagccagaagtgtttccatcgacagaaaaggctcattgtgtgttaacaaggttcaagtgtatgccagagatcgagcgaagtaagaatatgttgaaccaagaaaagtacctaaggaataagattgagaaggtgaaagagcaagtgagaaaattaaaaagagacaatcgtgagaaagagttgatccaaatcatgtatgccaatcttgtaggtaacactaaccttcaaggcttgagtgtcatggatttgaatgatctcactaggcttattgaccaaagtattggagaaatcaacaaaaagattgataaaatagccaataccatgtctactcagatgtctgaaacaacaacatcatcacctataataactccagacctaattgaaaatcttgttggagaccgaaatactactatattagatgttgttgcgactaactttgataacaatggtggcaataatcttgctctgagtctgtaatgggcgacagaagcaaaattggccaaccctaaataataataatcctaggattatttgtgttttgtatttcctagatctatatgttgtttgtgttttggagttgttccttctagttggttatgttcttattcatgtttgtgtttttctttaatttcatattttcaattaagtgttgagtctttatgtaatttcttgttggttgttgttcttaacttaatttaatctaaaattggagttttgtgtttaagaaagtggaattttttttatcttaatgatttcataggttcttaaaaaaattaatttcaatgtatgtatttttacaactgtctacaatacatattcatattttaaattaggcattacaaaattaatgttaattatatcatatatatatatatatggtaatgttaattataattcagtcaaatatatatggtaattataagaataaatacattgaagttaattaatatgatttagtctaatgatttttttttcatttaaattaaaaaaaaaatttacatttttttttttttttacaaaga

SEQ ID NO: 55472 - DNA, 1090 bp, Cannabis sativa
tggcaccaataacactcagaataagtcgaatctcaacatctcaacagaccagtcaatcaacctaatggagcttcgaatctcaatcgaccgagaaacgactctgatgagtttaatttggtatacttcaaccataatatgtccattagattaaattatcacaattttcttttgtggaaacatcaggttcttgctgcaattcatggaaacagattgctaatgctcattcaagatcgtgctcctcctccttagtttctaaatgatgttgatcaagcttcaaacactttcaatcaagcttttcttgaatgggaggttcaagatcagctccttgtttcttggcttctctctttgatgacagagagtcttcttacacacatggttggacgcaacacaacgagacaaatctggagtgctcttgagaaacacttcactttacaagtctcttccaagatcctggaaatcagaacaaaattacgaaaacttagaaaagggtcaatgtcattgaatgacaatctgctaaaagttaagaaacatgtggatcttcttgcctcggttggagaagtttaaagcttaaaagatcacatcgctgctatcttcaagggtttaccacctcaatatgatacttttatcatatcaaccaacactagaattgaagaatactcggttgctgaaattgaagctctcctattagcctccgagtctcaaattaaaaagactaaccttgatcaagaaaatgatcttagagttaatgttgctactactgagatggatcaattctctgaagctaatgttgcttatcaaaattacacaaatcatgctagcaagtgccctaatcaaagtcgaatccctccctcatcctcttctagatcagctagaggaaatggtcatggcttcaacaatcgtgttgttaacaatggaggtaactacactaatccttcccctaatcctaactatgctaatggccgtggtgtttctggtttcagcaaaggaggcagattttccacttcatcaaatcgtgttcagggccagctttgccacaagcttggacacactattcttgattgtttttacagatttgataagagctttacag

SEQ ID NO: 55473 - DNA, 1839 bp, Cannabis sativa
tctatatgctgcatataaaggttagaggaagcagttagacaacaaaatatattaattgtagattagttagcttataaaatgtagtaaaactatagattagtttacttacgcaatgtgtaagcttttcttgcaatattaacaacttccaaaagaataatggaccgtaatcatcagttttcaaatcccgaagccaatgcttgggaatgagtccagaacaccacttccgaaaagtatccaacaatctctcatccggtgatgacaggggatcaaacgtcgaagaaagcctctgtttcttcttcatgtccgtgtaatctttaaaccatataggggatttctcttcctcttcccacactcaacccctccaagtggtgcctccaaagccaaaatttcaccctgtggctcgctgtcacctatgcagataatacctgcaccgataggggtagctggagcatcctcatagggatcatacccgtcaggaaagacctcatcatctccacccatagcaaatggtgagggtgatgtagctactagtgggggtgatgcatctgatgggggctccggtgttggagctgttgttggcgtacgatgaagcatgctcaatatagttctgagttgctccataatgaggttctgaccacccttcagctctatatggctattttgagatgcctccttcagctcggcgtgagaagcgtacagacccttctgctcagcctcaatcttgtccaacctccccaccaattctctgtactcgacaccaccaagacctgaagatgatgcactgggctgagggtctgaagaaatgacctgataaaatatatcccaaaaaaatatggttagcatatagtaatataacaaataaattacataattgtcgacaacatgtcgataacatgtcaacattgtcgacatggtatcgacaatatctaaaagatatttaaaataaaaaaccaaacaattatcgacaacctatgtaaattacaacaactaacaaagtaaattacaactaaccaagaaatcacaactaatgacaatcaataatcataaaaaaaaaagtttaaaaaatggtacctgagtctctgtcttaggcaaatcagcattttcaacatattccgctgctttctctacttgtcttccaaaaacagctggatcttgggtttcctcctcagcctgtgtggcatccaccccaccctcaaccaggttctccacaccatcgtaagagatggtcctcacatattcctcctcttctgtgcgtggaagtaaccccttcatcacttcaagatgctatttaagattcaaaaaatataagagaaaaataatttagcatttattacaagcatttatcttaaattattactctaacataagagaaactcatacccgtctagaaaataatgcactaaggtccttctttcctatatcacccttgctcgtccagctaagtatcctgggaaatcaaatcccatgattcatgccatacctctttccaacctctacaatggcctcatatacccaatattgtactacatgtgcgaagccataagttgtgtatttacacttttgctgaacttctaaactcaactttctctcgtagttggccttctgtttcaacatgttcttttgaagcgagtgcataagtctggcgaatgagtgcttcccccaaggaatccgaaagaagaactcaagatcgtcgacatatctaagtatgccagccgtaatcatcgcgttaacctcatgacccagcagcactacctcaacaaacaagcacaagccaagcttgtacaagtcttccgggttctgacagtttgtgaacctatcttggagtgcttctgtcttcac

SEQ ID NO: 55474 - DNA, 944 bp, Cannabis sativa
tagtcccatacctacacagcctcacaatcatcacacttgaccttctccaagcggtgtgggattgcacagcttacttggtatttccccttacggatcacaggactactgactgtcacaatcacccggtttagagaaaccaaggtgccacatgggtattcctaactgaaaaagtaagttcgtgtcacacaacatatatttatagatgcctgccggcactacaagaaattacacttttgccagcgtaatttgctattgtgctggtaaaagtaacttttacctgcgcatttcacaaactgcgctggcaaaaaggtcaaagttttaccagtgcacattcgtagtggcaaaattctaacttttactagcgcatttacgtgctaggaaaagtcatttttgccagcgcttttcattttacactggtaaaaattctaataccaacgttgatttgtcgacctcttttgtcaacacatcaaaagtagattttgttttgccagcacaatactaaacttttgctagcacaaaaatgtacatggtaaaagtgacattttttgtaatgcggtcttactagcaaaactctttagatgttttaacaacgtttctccttgtttggcaaaaactttattgttgggattaaactcacttaacttgtcaagtcagtatgtccatctatttgatcatcaaatgaatctgaagaaaggtgctgctagttataacagttggctttaataccaacttaaaggggattccaccaacaactataaataggcgttcctctattctcaaaggggggaagagttctgatctctaatctccaaaagctcatactttagatttagtttggagagagaaagtccatgatcatagtgaatgtgtgttgagggatgtaatgggagtatcactcttgaagtgatttctctcaatgtgagacatttctttgtaatacttta

SEQ ID NO: 55475 - DNA, 1944 bp, Cannabis sativa
tataataggaatatatgtacttatagggtggttgttaagaatttgttttatttatttatgttttttttttaagaaatggaaatacagaaataggatagctaaattaaaaatttaaattcttagattttatctaattagttgattatattaaacttagggttttacgattcaatcaaacgctgaatgcaaattttactatttactcttaggttcttttctacaccttaaataattcctaaaactctcttagccaagaatcgtaaatttcagcatagcatcaaactaaagctagaggtacgggtagagcagcaagtcaaaagaataagaataatcgagattttgaggcattggaattgttgattgaagcctctgttacagtatttgatttctaaggtaataaaattttctttgtctcttaatgtcggggtttgatgtataattttcctcaagtgtgatttttcgttttcagagaaatagagtttcgtaaaactatcatatctctctcctcatatgtccattttcaaggatctggataccgttttaaaaataatttaaagatctaaatattttgtgaagagagttttccctaattcggaatcttttggtgccaaaagttcatgttttttccctgattgtcgaattacagtttttccagttttcctttcgatattgcctcagtaaaagtgtaatacctctctcgatatttcttcttttccagagatcctggtatcattagaaagataatttgataatccttatttttttaaagaaacctttccctaattcggagttcttacttgtcaaaaattggtatctttactggttaggatatttcattttatgtattgtttcaaaaaaaagtgtccttagtaaaaactcaatattactctcaattttgatccattttaaaggaattttatctcattttaaagtttaagagaagagctacattttttatgaaggaagtattgagtggatcaaggtgtgactatatttaaaatttttatttttgggttgtatctagaaatcggcatgatccagaatttaaaaaaactattgtaataaaatatccataactcctaggttataacttcacttttgatgatctctataccgtaaggaaggtcttttgattatctaaaacctttgtgaacagtaagatttctaattcaaacgttttatgagtcaaattatgaggcaaacttactgtgtagtaagaattataaatatattgagtttattagtggtctaaaggttcggtaattgttaataggacctagaaggtatcgtaagagttaattacaacggggttgaggtaagaaaaaataattatactttatacttgtacttttttatataatttgagtacttagtgagacttgttgaattagttgtattgaaactgtggaatatgatagtttcggtggaatagtgtttggtagatggattgcatatggctgcttaatcatgtttcaagtacttgaacatgattggaaaccacacatgtatgatgatgttgtaagtggggcagtgtacataagggtgcactggctattgatactgcgttcaggtttagaacgtaagacactctagacttgtatggaagctagagtgtgggtgtgtgtgtgtgatatttttgtactagtgtggctgcctcgatttaaatacatgatggatttgttgtatggttgatgtatatgattgggctatgatgtgtgagtgcttgtacatggtaatttttttccttactcggctttgcagatcaccccttatttacttaccatgtccagataagtaagcctgtaaacttttggtggcaagttgagtctgggtaacatggagtgtatctcgtgagatcatgtaactgttggatttattttaccaggatctagatttaataacaagtatgttattaacatcctaaacatgaacttctaaaaggat

SEQ ID NO: 55476 - DNA, 678 bp, Cannabis sativa
tgctgcttcttctttttcttctgatgtagtagtagttgttgttggtcttggataatgtttagcaggcctaaacatttccaaatcaatttcgggactcatttgtaagaataccttaacttcgtagtattttccatccgtacactgcagtgtaagataataataatcgaatcctatttgtatcacatttataatctctctaatctccaaattagcaccctgcacatatatagaaaatcaatacaaataataaactcattatcatatattaatgaagcaaaacaagagtacctcaagtttgttatattcagcaacggctaaattagctgcttcaatagtatatttacaacaagaattgcccaagattttctgataccagttccttttgtgtttattaggaaggtaatcaacatggaaaccctaaatatagattagaagaattaatattagatctaataatgaatgtagaattggagaaagagagatctagaaataagaatagtacatacatcagtttgaaggagttgtttgtgaacaatggcccaatcttgttcaaattcatcatcttcatcggataagtatgataagtttgtgtttggtggtagtttagctttattttccctaataataataatcagtataacactaatcataaaaagagaaaaagagaaaagcaattaa

SEQ ID NO: 55477 - DNA, 842 bp, Cannabis sativa
  modified_base (381)..(382): a, c, t, g, unknown or other
  modified_base (463)..(463): a, c, t, g, unknown or other
  modified_base (692)..(700): a, c, t, g, unknown or other
  modified_base (792)..(793): a, c, t, g, unknown or other
tgcagagaaggatcttgtcaaaataaaatatgtggttgtggtctttcgataacttaggtctagtgacaataaagatttcttagaatagtccaagtggatttggtcacaaaatattaaactcacattccatattaacatatagtttgaatccattgataggaaatggatattaataacttgtgaaagttgaactgtattgtattttggaaacaaaaatttaaaatttctatttggagtctaaaatttaaagtcaaaaactttcatttataccaaatatacatgagtattctttcttggaccatcactactaatctaactctaagcttaattttcctaaagtaagcatgtacaagtaggagattctaagatcgaggatttatnncatttcgggatagaatttcgggaatataatcacatgtgtcattcaatttcttaagagaaaatagaatgacattatatgatntataaaccattcatccaatgatattttatttaagctaattcgaaatgaataagctaagaggaaaaataaaggataatttcgattaaaaacaagaatccaacgatatcccgattattgagagtcaaagttattcttatttttataaatttcttcattgtttcatattgtaaatactagtctaaggtgtcgtctattgatgaacagctagatgttgcatttacaaatattnnnnnnnnnagatctaacactattatgtttgtataatggataacaaattatgaggatttgtcccattaaaataataagtcaagttagaccaacaatgaagnntcaaaattaaactacaattaataaaagaaaacatcatggttcaatataa

SEQ ID NO: 55478 - DNA, 769 bp, Cannabis sativa
acatttggacggcggcggcgcctccaccgccggcttcgaggtcgagatctttcatggcggcttttttgagatcgatgtagttggtgaaggatttggtcattaagtcgttcatttttgaaaactgtttttggatttgaagaaaatggaaatggaaatggcgtttttaaaaatggatgagattagtgagaagatgaagatgatgaagaagctgagttgagttggtttgattaataatgagagtagtgagtgagtgagtgagtgaggtttggattttgttatgtgttttatttttttatttgaatggataacggctattattgatttttgtacgttgaagaaaaatttagtagccgttggttttggtggcaacggctatatttttgggaagaaacgtcaaatgatttgggagcttgtgatgatgataatgatgatgattggatggaatgggctgggctgggctgagcttatgtgtttggatcgacatgggccatattgtattggagatcatttcataaaatattcatttttgttaaatttttacatttgtacgttatttttttttatatttttacagtattttaacaacaaaataacattaaaaataatatacaaataacaaaacattaataacaaattaataaaattacaacattaaaatatataaaagatcgtattttatgtaaataaaatttaaaaactgtaaaaatattaaaaactccgtacaaactgtatttttgtaattttatttaaattatctcatatttgatcc

SEQ ID NO: 55479 - DNA, 2079 bp, Cannabis sativa
taaaataatttccaacaggttttttgtgatttcaggaacatgaagtaaatgatttaaagctagaggttttgaacatgtatctgagagtatgaaggagttacccatttgagaaacaggaaggccagtgccatttccaacatatagttgatatggtccctcacaatctgctggtgtcatcaggttttgaccatttggagtgcagtgtgttgttgctccagaatttggataccagttatcatctgaagcttgactggtttgagcaacattggcttgtgtttgagaggtgtctgtaggtggaaaaactcctgtaaaactcttgtcaaatcggtaaaagcagtcaataacagagtgtcccaatttgtgacataattggcactgaattcgatttgatggagtgggaaatctgcttcctcttcctcttcccagtgtattagtttgcatattgttggattggccatgtggtgggggatattgacctcgaggattgcccctgtaattgtagtaaggaggaaaagatggaaatggaaaaccaggaggggggtactgacctcgattttgggcagggtactttccatttcgatacgtgttggtaaagaaggcttccatagtaggatcttgatcagtggtagccatatgcacactagattcagattcttgatcttctttttcaattcgagattcagaggccagaagaagagcttcaatctcaccaaccaaatatccttccattagagtgttggtggagatgatgaaagtgtcgtactcacttggcaatcccttgaaaattgctgcaatatggtcacgatcggagagaacttcacctacagatgcaaggagatcaacgtgttgtttaactttaagaaggtaatcattgagattcgagttgcctttcttgagtttctgtggcttatttctaaactccagaatcttggaggagactttgaaggtgtagtgttgctcaagagctttccagatctggcgagctaagttgcatcccaccatttgagttaataaactctctgtcatagaaaagagaagccaagacacaatgagttggtcttgaacatcccaatctatgtattctgggttgtatctatgtgcgatgtgatctgcatcagtgaggaactgagggggggatcagtgtcttggatgaactgaagaagacgatttccacgaattgaagccaagatttgttgtttccagagtaagtaattgtgatcgttaagctttattgagacagtgtgattgaagtagaatgtgccatcttcttgatgatttcgagttcttgaagcagattgagttccttgctgttgatttgagccgccattacccacagtagcaatattcgccattaatggcggaaaaggctctgataccatgttggattggttaagtcttctagacattgcagcattgagaaagttacagaaagagaaagaaagaagaacagagagaatgagaaagaaaaagagaaagagagaaagaactcttcattgattaagcacacttgatacaagacttatatagtacaagaaccaaaggcacttaaccaatacactaaccaaaaccagtaaagacttgaaaacatgttaaccaaagttaaccactaaccaacttaacaggcacaacagaatgatagttacacctaactgtcataattgtccttacaaactgtgatgttaaggttggtaacgagtcatgtgtgtggcggtgttagctagggatcacacgaggacagttttatgggtagcagctaacatgctcaacttcttggatctattgattggcgaagctgcgacgtgtcggttagcgttagaattggttgtttcgatgaagcactgttttgtcttgattgagagtgattcggaaaagattatcaaagcactaaaaggaatctactccatttggaacattgataattatattaatatttgtaatcaattctctaatcattttttatgctgtaatttctcatttatttctagatgttatcgttggatttatttttaccaggatcttagatttactaataagtatgttatttaacatcctaaatatgaacttctaaaatgatatgaa

SEQ ID NO: 55480 - DNA, 1389 bp, Cannabis sativa
tggtggacacgaagagaagaaggatgaatcgggcttgtttgatgggccgaatgaattggatgaagatcgggagattaacaaagctgcaatgggttcaaaaaatatgagtctagtgggttctggtatccaggcccaccgtccattatgaaaatattataatggaattgtcatgggcttgggaacccatgggcttttcaattccttaagaatattgtgattcaaaagtaacccaaaattgtattcctcgtgttttgttgggatatgatgggatgatggttgtcgatgttcatgagaggagcggaggaattgcatttctatggaaagaagaagatgaagttttagtgctggggttctcaacaaataacattgacgtgaaggtttcagttgaaggcatggttgtatggaggtttactggtctgtatggagagccaaatagaagccataggattgctacctggaatcttttacgtttgctcgctactaattcaaacttgtcttggtgcgtcatgggagatttgaacaatatttgctctcacaaagataaaaggggagggaacgctatcctaaatttttaatttaacgctttcaacaagctatgaatgatagttgtttacaagatatggagctgtgtggttatcctttcacatgggaaagaggcagaggcacttctcattgggttgaagttcgattcgatagatgtttggcaaatctttcttggctgcaagctttttcatttgctaaattatataaccttgagctttcgacttcggatcattctcccatattgcttgaactcgttaatattgctacgcaaaggagagtaactcggttttgttttgagaatgcgtggctttgagagcctctgtgcgaccaaatagtcaaagatagctgggattgaagtgatgtaactgatgtgcaagaaaaaaatcaagttttgtgggcagcagctgagttcttaggggaaggaggttatgggaaactttaaggacatgataaagaagtataaaagtgaagtgcaatggtggaaattggggcgtgatgagtcttcagttagcaagtacaaacaagctaagaaggagttggctgaagcttatgtacaacgagaagttttttagcgtcaaagatcgaagaaattgtggctaataattagtaaatattttcatgcttatgctactaatcgacgtcgtaataactttattgctaaactcaaagataataatggtaattgggttgattggagttcgggtttgcctcaagttatagttgattatttttctacacttttttcttcttcaactaattcttggctggaagttacgagtgctgtggacaatcgagtttcagctgaccaaaatgttgacttgttacagccaattactgatgaagagg

SEQ ID NO: 55481 - DNA, 761 bp, Cannabis sativa
tgttgttataatctaatctattaattctgacaaatttgatagcaaatattatttagaggccacagtatacattattctagttagcaatacattttacctaaattcatcattacaatgactgttgttttcccactagattccaattctgcattgttataaaatgagctggtttgttaatttgtttgtaaaagttttgttgtgtgattcgactggttgagctctatgaactgaaaatgtggtgagaactgaggcatatacaatacaagattgattggtatatcccattgtaataagtccttatgttgttgtgtaatctttcttgcttaagaaatgtataattaaactatattttatggtaaaatcaacttcctggtgagatttattgcctgagaaatttagctcacagtggagactctttttaagtgaatgacttgatttgagtattgttcttcttaactgtcttggtgagactaatagaaggtgccaactttgatttaaagaacaattataagttgtgctgggtgtggtttgactggttcagtgagctcaatgaattggaaatgtggtgagagaactaagaatcatataatacaagatttctttagtgaccaaccatgagaatcaaaatttgattagtaagttaatattggtttcaagatgttctgttttgttctttttcttctagaaattcagggtggttggtggtagtaagcttaaaatttaaaacagaaccttattggaccaacctgaatacagtcttt

SEQ ID NO: 55482 - DNA, 1260 bp, Cannabis sativa
aaaaaaaatatatatatatatatattatttagttatgaataaatgtcatggtgaaattaaggaagtgtttcctttctttgtgtgcagatcaagtgaagaaggctgtggaagtgaagaaatttaaaattgggcaaagaaattaagtttggggtggaaaagttacatctagttgctatagcaatggcttagcaacgttatttggcagcaaaaggtgttttggtactgggctgatcaaatgaattggagttttgaaacaataatagagtgcttggtctgataaagaggaacatgtgaagaaaatgtgttttaatgatgcaatcattggggaagtgtctttatcagaccaatcatttggtcttggtgattggtcttggtactttgtattttccttatttttgggctgagattgtagatcaatctaaatcaaattgaccccacaagcttaataagtccaaaaatttagtcaactaggccccattatgttgttgacttcagcccattttctcaatgattagcccattagctaaactacaaccctaccaccattactttcatccttctccaccaactagccgcatgctaaactcgattcaccaccagtcaccataacctctgcctgactgcaaacaacccatctctaaaccactgcgcaatcgacctccacctgaactcactcaccaacccgaaccagcaactccactccgaagccctcaacttctaaactcgacccgtagccaccacctttagtctactttcaccagaaatcaccaaaccgttcactcaaacagcaaccaacaccaacctgtaacctccattcaaacaccagattaagacaacctccacccgaagttaacccgagccatctcaagtcgaccttcactcaccatcagcaacttctgtgcgagacaccttcaacttgcaccactcgttgccaatcacgaatcacccaaagctccgttcaaccatcactacgaaccaactcgaaccacccagccgcatccttcaccaacgcgacccagcaacgaaccactgcaccacgccgagatccgactctgttcgcacacaccagtacaccaccagcaatcgaggaagcaaacaagtacctccatttcaccattccagtcgacaccatccgagccccgttcatccaacagcaacccagctcacatccctcactaacccgagccatctcagctcctatcaacgaacaactcgcacaccagaaagcactcatctcgaaccaaagtcacccatctccat

SEQ ID NO: 55483 - DNA, 641 bp, Cannabis sativa
aaaaaaatatttattaaaagattcctacttagtaattaattgtaaaaagttaattaacaattattagtaatttaattttaaatataactaattttaattaagattttataaagaaataaagtataagttactagttaattattatttaatttatttttaatttctaaattaatcataatcattcaatagtaattcaataactataaataaatgtaattatagtggttacatatatgatcaaaccgttgaaacctactctctctatatataaattgactatttaactattgttggtagtttaacaggatatactttaaaaataaaaaaaatatttcgttaaatttaacaaatattgttagtactatttattttataaatatacaaatattaatattattttattcaattaagttttcttcaaattgtatttacaatatgaattgtataaaactaatatttcaattcgatttcattatacataacaaaataaatatagattttaccttaatctttgataaatttattatttaatggcaacacagaataaagaattagctcattacttttaatatattttactaacattttttatttaatttttttttttgtaaaaaatattttaatttaattgtgtttttttt

SEQ ID NO: 55484 - DNA, 1060 bp, Cannabis sativa
tagcaaagatagcactgtaatttttaaaaaaaaaacactgtagcgtgccttatcattagggcgttacaattatgatcgagatcctgatatgtgtttgtagtgactggattttgatcgaggtaatgttgaggaacgattattatagttcgtgccgagtatgatcgagataataatatggaacgattattatcgtttgcgacttaattatgatcgagtaaaagatacaatcattacagttatgagtaattactcgatgaaactgtggataggtttcttacttatcgtttgctttatcaggcaacaatagtgacatacatatctcatagataacgagtgttaatagtgctttttgaagcactgagattatgtgattacggtaatgtttgaattagagtgctttatgaagcactgaaattgagtgtttataatgatgtattattagagtgctttatgaggcactgtgattatgtggctatgaattgaacaaatgtattttttggtgaaagaagaaaatgttgattatgaattgctataagtatttttaattatgtaataaatgtgcttgcatagacgttgagttatattcatgttgaatatgtaatgacctactagtatgtatattatattgtaatgaaaatttctcgcacttagtatgatttctatctagtagcttttcttgctgagtcattgtgactcacaggtgcttagtggtgcaggtaagaaggattgaagctgtgttcggccatgagtcagaggtctcccagcaatgtacaaatcagctgtgatgtcttggcttctgggaagcaggattgacccctttttctatgtttgaaaatgtgacctttcttttgtaatagcaattttgtaaatttgttctaaacgaattttataaacaggggatccctatattataatggtactttgtatggaagttttattgtaatttaaaatctgaaagggttttaatttaaaccacacttttcctaaactaatacattagtgagaaattggtttgtaaaagcacacacgtggcgtctctaagggtcagggcattacaaca

SEQ ID NO: 55485 - DNA, 932 bp, Cannabis sativa
tagatagtagaggtgagggtttcgtcccaccgaaggaagagggtttcgttcattcttcaatttatttttaaaatttaataatatatattaaactgatatggatatttttattaataataataatataatattattaataacaattaatttactatttctcaaccactaagaaatctctaattctagagtatttggtaaaacccgagtaccgtaaaatatcctggtatttcttaaattaaattatcttaataatctcatcaataatactaactaaaatcattgtgatatttttagccttcaatcgggtctctagggtcgtcgaacttgaaaatatttttatttcacaaataacttacattatatccacatattctaaataaatctctgtaattaataaatttcgcttatttatccacttatagctaaatttacaattgatgctaaattaaattagctagattataatcctactcattactacctcattaatccataatatagaataaatcttaattattcatatttaagtttccggaatattacaaccatcatctcattatagaaattttgtctttaaaatttacgtaaataatttacgatattactcccgtattcatgattctaactctcaagttgcttcttcctccttgttatttctctacatcacttttaactagtagaatcatcttattctaaagtactttttcttctagtccaaaacctggacaaattattccccatatagttaattagctaaaaattgttacaattcagaatatgggtcgggtccaatacatattttctcaacatggagatatgaaacacgttatacactctggaaaatgcaggagtcaaggctagttgataggctacctagcctacctactccagtatcaaaaggtctaatgaatctaggttttaacttccctctc

SEQ ID NO: 55486 - DNA, 823 bp, Cannabis sativa
aaggaaaaaagaattgtgcatcaatcaacttgtctcgatactctcgaacaaaatggggtagctgaacagaaaaataaacacttgcttgaagatgctcatgctatgatgttttatatgaatattccaaaatatttatagggggatgttgttcttactgcatcttattagattaataggatgcctactaaagtgttacaatatcttactccattggcatgtttaaaaaaaaaaggaaaaattctaaatcaagacttaatgtttaaaatatttggttgtactgcttatattcacctaccaaaaagatctatgtccaagttagatcctatgtttgagaaatgtattttttgggggggttatcctcctcataaacaaggttataaatattttaatcctgtcactaaatatgtttaaactactatggatgttactttcttggagaataccccatatttctgcaaaaaaaataatttagggggagaatatagtagaaccaaatttttgggaaattagtgagcctttacaagacactattcttgatgtttcgatagaaaaaactcagccccagcctgctgattttgaatttgagcctggtttgttagaaagaaaaatactacgattgattataaattgtaataaccttgagcctgtggtttattcaagaaaaaatacctttgagaaaaataaagatcaccaaatgatccttgcacaggaccaatcgtaagccctgaatgatggttcaacaattgctccgggtaattctctttctattcctactacgaattcatctcctattagcactactgacggactatacttctcgagt

SEQ ID NO: 55487 - DNA, 1357 bp, Cannabis sativa
  modified_base (46)..(51): a, c, t, g, unknown or other
  modified_base (997)..(1003): a, c, t, g, unknown or other
aatgatagcatgaaccaaatgacacacaaatgagtgaaaaatactnnnnnntctttattgatattgaataatagagattacattgaaatggagtttatttagggcatgaaacccaacaagatattgcagattatttgacacttctcgaaacaactactccaccccaagagtaaataccatcccagatgtagacaacctgtcatcaagataggcctgtaaatctgagtcagcatagcctacgggatttaaagcaccacccttgtagacaaacacataataccttgtactttttaaatatttcaaaatatgcttaactacagtccaatgttcctctcctgggttcttctgatacctgctcacaattcctactgcaataacacatgtctggtctagtgcatagcataggatacattagacttccaactgctgaagcataaggaaccttcctcatatcttctatctcttgaggaatagtgggacactggtccttagatagatggataccatttctataaggaataattgcccctttggtgttgctcatgaaaaaatgatctagcactttattaatgtaagctgcttgcgagagagcaagtgatctgttcttccagtttctaataatttgaataccaagaacataactagcttcacccaaatctttcattttgaattgggtgttaagccagtctttaatgtcagtcattttcttgatattgttaccaatgatcaaaatgtcatcaacataaatgaccaggaatactaccgctacattatccttgagttgggaaacacaagattcatcttcattttggtgaaagtcttaggttttgattatgtcctcaaaccatttgttccaagagcgagaagctgcttaagtccataaatggacctgtttagcttgcaaactttctcttcttgtcttagaagtttataaccttctggttgctccatatagattgtctcgtcaagaactccgttaaggaaagctgtcttgacnnnnnnntgccaaatttcataatcaaaagtggcagctatggagagaagtattctgatggatttgagcatggcgaccgaactaaaagtatcctcatagtccacactttttctttgggtataaccctttacgacaagtctagctttaaaagttttgacttctccaccagtacctcttttcttcttgtagacacatttacatccaattggtgataatcatcaggtgcatctacatattcccaaaatttatttcttttcatggaatcctttttagaatccatgccagttgaccattaattttggtctggagttgccattgtttgtttataggttaatgttgttagatatattttaccaggatcta

SEQ ID NO: 55488 - DNA, 1039 bp, Cannabis sativa
caacgaaggaaagcctgaagaaatgattgttggtttgcatctacctaaggaagttggggccgaaatcattgagatttatagcatctcctagttagttgtgaattaaatatcaggggagtattaaactaaagaagaaaagatggctgcctaagtctctagagctcgagaactactctagaattttaatatactatccggcaggtccctaaggaccagaatgccttcgtgaacatgttgcactactataaaattggcctttcctattagcttaaaactatcttttatactagttccgtcaattttcaaaatttttggctatgtaggtgtagtaaaaatatggaactttaaatgatagtttataattattagagaaagtcaatctaaatgacggtttacaactgtcaggaaaagttactttaaatgacattttataattgttagaaaagactttcgtctgatagtaaatgatgggaaagtaagttaaaatgatagtttatgtcagaaaaatatcactttaaatggctattataattgttgaaaaaaatactctaaatggtagtttataactgacggcaaaggcttccagctttataaataatattttaatttcatattttaataagaattacgttatttcataaataacatgtaataattaaataaaattttgaataaacattattataaaattaataatattataaacatttatcgaaaattgaatacaacaaatattatttaatagtttacaatatcaaaaatagtataactataatacatttattttaaaaaaataaacataataaattaataaattttttttgataaatcagcaagtttattattgatccacaaactttttacattccattacaatgagagagcatctttacttagaaagatctcaaatctattttgtacagcttttacaacttttggaaccattctctatcttcttgaccaatcttttttggccaaactaattctactctatgcttaacactattcttaattctttgtacaattacatctttgtttt

SEQ ID NO: 55489 - DNA, 1006 bp, Cannabis sativa
tttcaaatttttgaaaaaaaaaaaaaaaaaaaaaaaaaaaggaggggaggggggcatgcaaccctttgtcccttccctagctttatcattgggtccaaccttgaaaaaaaaaaaaatactctttataataaaaattgataaggaactctttaaatataagaaaatctctattttttgctaattttttggatatattttaatcaaaattattattattattattatttcattatcttattaaattaataaatatttaacatatttaaattataaaaaaattgttaaagtaattaatcttaacttaattagaaagcatgattagagtgtaacataaagaaaaatagcattctatttttaacattttagttaaaaaaaatatataaatagtgtccttgaaaatactctattgttatgttaaaataagatttaaatgcctaaattttctagtaaatatgtaactatatctatataaaatatcatctactatgttaatattgttgaaaatttattttatcaggatttaaatttactaatatatatgttgattataattttataatctatcatactaaacatgaaattcctgaaaacgataaataaacacataaggaatcaagaaattcttatagtaatggtagcggaagaagaagactatttccattcagatctctaacatttgatttttttttttgtgacataatattatcaagatttgaatatgaatattcttctgatgacaattgaactacacagccttccacaaaggcttgagtatcaccttaaatagtatggggttgatactcaagtacctttggaacaatattttaagagagaatactatgtaatttttgaaatatacagagaaataagagaagagagttgtctgatattgaaaacttaggttagattctcccttctcatcactttctttatatatgcttcacttatggataggttagatgagactggacttaaactaaagactctggctgaatcaactcttaga

SEQ ID NO: 55490 - DNA, 828 bp, Cannabis sativa
ggtgcatgcattattactcttattgtaatattacccttttcattattttagaaaaatcatttagaatctagagagtgaaggatatgttggtccaaatcccatttaaagtgagcacatttattagatatagggtatctttaaacatagatgctcaatagatatttctggaagaatccagatatttccaagaatataattagatttagagggcattgaataaagaagaagaagatgagaattgacaaataatagaagccaccaagataccaattttacattattaataaataattggctaatcgaactcgacactctttacaagtggtactctacgattaattaataatattttttaaaatattttttttaaagaatattgctattgagaactagtgatgctcaatatttttttataagtagtactaaacaattagttagctatatattctaaaaattatttttttaaaattatataagattaaatattaaatactaataatacattttaacaattataaatctttcttaaattatataaattcactacttaatcatacaaccaaaaaatgtaatagtacaattctattgtttgttaagtttttggtttgcattaactaaaattaccacaatcattgttaatttcaactacaaatttcctatatatatatataatatatgatgttaaaacaaatccataacataataataattaattcaattcgtatgctctttccatttgttcaaaattccaaccaaaaattacaaatagaaaggaaaaagaaaaggcataataaacaagtatcaaaataggaaacaaaaatgtttttt

SEQ ID NO: 55491 - DNA, 594 bp, Cannabis sativa
tttgtctattaatactatttagtacgtatttaccaatcaaaaaaagaagaagattaaaaaaaataacctctttataattaccctagctacttaatatattcattaaaaaatgttaaaaagtacatattatattgttattggtaaaattaagtatcaaatttcatataatttaatatattaactttcatagaatatcactaaccacgcataatacgccacttttaaatccaacgtaccatattgctattgttacaactaaccatcgaaattttatataatttaatctattaatttttatggaatataggtaattaataaaataacaccacttctagatgatattaagcattagtggtactagcaagtagcaatgctcattcataagcaagagtagtaatttagcttcattattgtttcaaaagaatagaccactaataataatgatcatacagtacatatatcaagtattatatttactattttggtattccaactcaagttattatgttttctcttttttctcttttctatattttttcaaataatttcattcttgatgaaagtttaattaatccaacacaccaataaaataag

SEQ ID NO: 55492 - DNA, 3751 bp, Cannabis sativa
  modified_base (47)..(48): a, c, t, g, unknown or other
agatggagatttttacatcgttcaggtgttaattaaccttagtccannagtcagtctattagcctctaagggcgtatttgatggttttacagtgttttagcacaagaaaccctaactttgtattctgtgtttctcttgaagaagaagaaagcttcagataatatgagtagagttttggctaaggtaggtatggacatgcccatgattcacttagggtttctacaaaaagcccactaatggggtaaaacacatgcaaaaagagagatcactattgggccccttggaaagaattgtgctcgtgcattgcagtagctggacaattgaggaccattgtacgtaatggacgcgtgtcgccaaaagattcaacctttaaaagtagattcctggaataaccgtctgaccaaaagttgtgtgaggtgcgcgcactaccatgttcagcgcaagggacacgatcttattttgtgtcagaaaaagcacaaccatcattgggcgatctaggttgtatccaaggtagaggtctgcgatactcttgggtggtcagcatttggaataggcccttagagttctcattagggtatgatttgcgtagactttaagtgaaggctacttcgggtcctggagtggtaataagtctttcgtgttcgggaagctaagataaggcaaggtagacttctgcttatcccttagtcttgattggttcccagtttggtgacgcttctccgtaactgagttttgatgaaggattttaattagtgagattataagactttctcttcccttttatgccatgtgtcacctgtttagaaacacgaatagtatttaccccaagatttcgggactcttcgagttgcaagagcttgcagttttcttccaactcttagagataagttttcaacacgtggtgattgttggaatcacggatgtattctttgagttgtcatcaatttcaagggccaagaactaaggcgccatgacatggcacgcatgctgtgcctttaatgcatctattgataacacgcgcatgtaggggcacgtctcttagaagaagttacaatgatggcaggtcgattgaaatgactcttctttattgcacactatactcgaggtgagcaatgatgaaaaataaacgcattgagcaagctttaaatgccatattttcaactttccatctcttggatcaaatcgtactttttggagagaggatttggaccatttatttcaaattgcacagttttggctgaagtataaataaactcttcaaatccatttttctcttttttcaccatctcagactttttgatcctctaccttcaaacctcgaaccagagcccccaatcttgtgaccgtttccagtggtgaatgcaagaagtttttgattacttgattcagtactttctaaacctccattcagcctactttccaaacgcaaagctgttagaccttgaactgctccacacccagctcgacaagattttaacgctcaggccggctttgaccgtgtaattggctgggtaaacaactcttgggcagatatccctaataacctttcattttccactcatataccaagtaagtatcccgatgctcgtgaatattgctattttgtatctaggatagaaatgcttagttcaagctaggtctaggatacttgatatgtgtgaatggtagttacatctttaggacaggattatgttggaatttttacgccatgggagtgctaattctatctagatagttaggttatggcaatctaactccgtaggcatttgcatatttttaggattctggagtcagggtttgaaccagataggatgaacttttgagtgcgtactaggtttgtttatcttccatacatctatttagagttgctaagactctgaatggacttgatttctagaatttgtttaggccatgttctggtaattttttccctgggtttccgatctgtcactttgagtcacccagtgaagacatgcttttgagagtgatgggtctatcagggatctctccaagaatttttatgggaggtcttccccgatgcccatattgtcatttggatgttgggtgtctaattgcttgttttttcttttcttttcatttttctagtgttggatttgaacgaagaattccatcttgaggtagtggatattgtggaaaatccaagcgctgctcctacggaggaggtggctttggcagaggctcctgcccaggtacttcgactagaaactgctctggagactatcccggtggctgctccgtctggggtagtcgtgaaatccaaaggaaaggggaaagttaagacacctcctcctgtacctatgttcaatgattccatctgggagatagataaaaaactcacaactttaaatcatatggcatgctggagctttatgccaccgaagctggaatgtgcaacatttaggggttattgtggcatagactttctactgcaggagagtatgcttttgtgagcacggactagttcggtgcttggagttgggctcacattacaagtggggcacatcttcccctaaggacttacttcacagagttcattgcgaggatcaagattgctcctttttaattgatacctttggcttaaaaactcttagccgaatggaacatcttctacaagatccataaattttagatgcctactctagaggagatcctatacttttattgtatgaagccccagcctatgcgcaccaattataagaaaattgggttctacaagttggaaagatactcggatgcatattgccccactagctccaccttacgctcccactacctctgggagtgttggttcttctctactggtttcccagtgaagagggtatctcaaaaagtacaatgaatacaaggccaagactgatagggaccataagtgttgacttagaaatctagactagacttctaaaccacaactgctcgctagattagcgagaatgaaaaaatacttaagtaattaatagagagacacaacaaatttatagtacttcactccctgtatcgtgacagtagtagagctacgtctactttgagtttttatttctcacgagatggtattactgaagaagactaagtgttagaagctccaatttttagatagagaaactagatagagaagctctaaccttgtgggtagttttctgaacttgaaaaataaggtaagggagctctccttttataggtgaaggaggcctacaaaaataggagaaaaataaaagtcagatgtttttgaccatagatggtgatctaacggtgaaagttagctcttggtggtgatgaccatttttcagagcctggcaggtcctgttgcgagtaactcggagcttatttttgtaacttccttgggagtgaaattttgggatgatagcttcagaattacgattgaagtgtaaaacatgactttatataacattgaattaacttcaaatgaaagttgaatcgcatcaatcagatcaatattgagtgagttatgaatgttttactgaagacaattcacgacccattacctaggttgacatctaatgccttgattgacatcccagcgcccaacctagacatcgggtttgtgtaaaaatgtccaaggaatgtactttatgatgcttaagtgatatttttacattacttagcctatttctatgttctggtgaagctggtcaccagttcttagagatgttgatgttttgcggaaatgagagactcgaaactcttcatttccgagtgagtttcccatgttgga

SEQ ID NO: 55493 - DNA, 596 bp, Cannabis sativa
ttttttttttttgtatttttcaatttgttattgatggtttttctatagtttcttgatggtttttatgactgtgtgaattttttattttttttttcattttcaatttcttattgatggtttctcgatgatttctatgtttgtgtgaattttttttttttttttttacacaaccatagaaataaccaagaaaccataaaaaattgtagattagtgtcttctccaactttagtactcttaccgtcaataaaacatcaacaaccctaatatattattattatgaaatttatttattaaatcaagactcatttattggttaacaaatatcaaaattaagaagtagcaacataatcactaaattgcagatacatgtgctaaatatatataaaattaaagaattaagtggcaacaaagtcatataagaagtatagttacgtaatagctattattaattagacttaaaagaatcttgtatgaaatttggattataaataaaatcaataggtattgtagtttgaattgcaaggggttgaagtgtatcccttgtcgcgtgctaaagatgatggtcttgctattgggaagtttgaattttgtgagta

SEQ ID NO: 55494 - DNA, 4329 bp, Cannabis sativa
ctttaacctccataacaaaaaatcaatatgaaattataaaattttcaaattaatcataatgaatttttattgtgccacaattatgattgtatagtgtacaaaacaactataatattcgttttgtggttacatcatttttcctcacggatctcatcactcaaatctcttttgcttcgtcatctttcttatttgcatataggaagagcggcaaggagggaatcgtctaaaccatggaagcttcgatcaagtgaaaatataattttaaaagtatttttacttgtttaattaaaaatataaaataaatgtttaaaaaattatatcctaagaacactcctatcaacttctctactctttcatttaaaatagattatcaaaacctcattttttttgtatattaatattctactctttcatttaaaataattatcaaaacctcattttttttttgtatattactattagtgcatagcaccatctataagtggcagtgtataaataatgaactatattttataatagatcatattccttattttcatttgtcatagtaatggaaattgttggctgtccaaattagatggtaaccctagttttttaaactacataaggtcaaatttttaaaaagggcacgtcaaaagactcaacaaataggtttcttatttgatggaatggaagacttagtcaaataacaacttttttaggaatgtctaatttaacaaaggataatcaatggagcattgaatgaataaataagcataacaaaatcaatataatgcatttaaagtattttcaaatactatttcattgatgatatatttgtagtctaaattcgactctaagatcataattgacaaattgaagaaagaaaagagtagtgcaacatagtgatatagcagtagtaaggaatacatatctttattagaattagaatcatgagatatatatataatcaaagagttcccaccaaagtttcaatatggtttggggttggggttcaatgatattctacaaggcaggcaccaaccaacccctcattttttcttttcttttctgttttaatatatatatatataattatatatatatttatatataaaactactgcagtctgctcatggccttggagaaaataataatgagtaaagaaacaacagaaacagcctctgccatgttatacggcaaaaatgttcagaagagaggatatgttaatcagcttagcttacaataacattgcattttcgcctttcaacccttcttcgctttgaatcatcatcatatgactgccaagaaaacaatgtcaaactgatgtaagtaaagattatacactttcaaagtgtaaacacatgatgtaaatacaaaaccaaaaaaaaaatacctgtgcattgagaaagagaggaacccgaatcctctttgagccatcaccaaatcgtttggacagtataacatttccaaatgtttcagtacggttatttacctattatcatttttttaaaaataaacagtgttagaaaacttgatattgcagcatagactgaaaacaaaatgaaactatatatacacatgtatgaataaaacatggtttgaatttttgttgggatttaaacgggatagatttgtttgtaaaatgtgtatttacctgagtctgaacagttccaactagcaaagtcttgcaaccagttgcatgcacacattctaatttggggcactgaagtgacaatttctctgtaaatggacgcaggaattaacatcaactaactgataaagccagattaattcacaaaggctaagatgataaaataaaatagagtacctggctgcaaatttgtacaagagttcagattcagatcaatgagttctggacagtttagatacaaagcctgcaattggattctgaaacttaagatccaaagaaccgtatacaagtaaaaacagctttcttgctaagttttagaaactcacgttcaagccagaacaaccccacaagcttagtttttttaaacggctatgtttaatgatcagattctggtaaatatgtgagactgtggcattgcatgttttctgcacttcacaatcactattttcatctgttgtaggatctgaagagttgggatcacatatgaccatgccacagtccatgagttcgaggaagggcaactgtgctgtggcaaattgaataccacctgccaatattaacaaacattaataaaataaggtttgaaaagacaaagggcaaaacaaaatttctattcattatcttagagcaaagacaaggcaattacttgaagtaatgtttggacaaagagcgacaaggaacctcgtaagagtgtctgggaacacattgcagatcattccaatcccattatcactgataccagacctgaactcagataggacacaaaatattgcgttagaaaacattaaaggaaaaagatgtcattatgaatttcatactcatttgagttcgcaaccattgcatgagttaaattcacaatcacctttataatgcaaatggaattggaaacatacccactaagatcaagcagctctaaatttgggtaactttcagcaatggcagcaactgaagcatcagtgatttcagaaccaagaacaagagaaagcattcttaagcccctgcatatggagaaccaaaccatactattagcctcttcgcatatttttattcatagttagaaactgattttcgttttcaattatcttaagccgtgataattgcacatcagtttatggtcaaaaaatggaactagcattacacatgataagtcaaacgtttacaaagcttgaggaaaaggaaaaaagcacagtctaccaaccttaagtgggcggctgtaagggcaagtacgactggatgagataaccggatagaagcaatgtgaatgttttgcaaccttggacaaccccttcccagagattcagccatgctaataaggtcggtattatcattttcttggcgagaaaattccaaagaaatctctttaagacttggacaattaaaaacctgtgccaaaacaaatggataagtaactaataacactaagaattacttttttatatataaaagatccacaaaaataagagactaaaaatgtggatgatcaccatcttagacagagagcaaagatctgaaagccaaagagtagtaagacatggtgaactaagaacaaaaccaccaagattggaacacccctcaaccttaagacttttcagcattcgtcgatcagcaataaaacggcctaactcatcactgcatttcaaatcacaaagaaagataatgaaccaatattattctcatagcacgagagtaactttccattagataggaacacaaatcaacaggagttactaccaaatctagcataaaagaaaataattagctaatttgtttagatataacataaatcctaagcactatcatctacttacaattgcaaccttagcttgagccaaaaacaggataggaaagatcagaaatttacccagtgatacgattgacggcagcatcagaagtagagatctccatgtattcaagatttgggcatgaaaatgcaacacaggccagcatcgtcgcatccagatcactacaccaaaccgaaagaaaccacagttaatatcaaaagaaaaactttaaactatcaatgaatctctgatagtgcaacatagaaatttcaccaacttgacgatgatcaagcacaaagccatgagctttcaccaatgactagtttatttgattaagaatttagatcaaacggtgcatataatcatttctgtatagatcgagcattgtgaggtcatttataaccgttgtctatgcaagtgaagttcctgcttggttaagtttattgtttgtcctttacttgttgaattcttttctttcatttttcttaaattgttcagtttgtgtttactttcttaaatcattcaacttaatcttcaatgttcatctcaacactgaaaccatccaaaaaaatccagatctgacaaaatcaacccccgtattaaaatcgtatacctttccattctcaaagagagattgacaagcccagggcacttgtgcaacattgatccaaccaatccaacctgagctctcgacggaaccctaagtttcaaaacttccgccgccttccataacttcttagtcgtctctctccaacccttacaaaccttcgccgccgaaagcaaccccgccggcggcaaccttctcagcacctcccacaagcaactcaccggtaagccaccagaaaccagatcagcatccatctccatcatcggatcaacaaactcatcatcatcgctctccgcttgctcaaaccg

SEQ ID NO: 55495 - DNA, 1878 bp, Cannabis sativa
ttcacaaaggtccaaactcgtgacgtgggcttctttttcttctcttctgtattgtcatactatataatttcaattattaattcttcaacttttcttttttttttttcttttttgggttttattactgttgggttaatgtttctctgattctgtaaaaggttatatacacctacatataccggactgatgaaggaattaaactaattggtgggtcaaggaggcagagcaaacgtacgtaaattgacaaacatgagagcgtgatgagtgtcccctaatttcagcactattttgtgcttcaatgcattatttttcaaacaatatatatcccatttacttgaataatgttttttttttctgaaagaggacctctgttttccaacccacaatttaaagtcttcactaataaaaattttctttatttaaatttaatttccaaccgacaaccccagaaccatccataagtttctgaatcttcatgtaaattacgcagttgccatcttctctgctttctctttacttgtgcacacaattagataagggtttttttttttggtttctaacaatgaacgatcaattaaacatgtgcatttgtttgtttttcatgttgttagtccctgcattaaaaatataatggggaactagtctgtgtactaaatagcttgatagggttagtgtgggaaattaattaatgaaataagattatgggccttagcattaaccactcttacattatgaacctttatacttttcaatgcattgtaatgatgagtgggtatgtatatgtatatatagccgccttgaaagaatgtagagaaagctttctcacttttattggtaacctattataacttttgtattgtaaaccacacacgtatataagagtagtacatattagtttgttacttgcaatcaattgttacatcgcaatcaattctgtaacaactctaggctgacttttttagatcgtatatatatttctcctaagtaacgggagatatagtaatgtgagcataatatataggggatatttaaattggctttcttgtttttagcgaaacactaattgcaaagcactgtagaatcactttcagtgccaagtgggaattttaataacgacaatattgtcgatccacttttaagatcatctctagtagaaataggaatatattggaagtgtatatcacatggaaaaatccccaataagaagttggctgtgttgtttctttatttttcttcattgctattacttggttttacatgtttacttatatttggtttttaacatcgtgtgtataagggttattaatataagaggaagaattagttatgaatgattttgtgcaaaaaaaaaaaaatggggtaaatactatctttgttttggcaaagttattaatttgaccttctttattgtgaaatgattaaatggacaatgtgttttttaaaattgtacaaataggatcttgagtttattttttcaataattttattttttaatattactaagtttaagacaatttttaacacaaacagatgctaaaaatttaataagttttatcatcatatctttagattacattattattaaattttattttgataaaaaaattagttcaggttctatttgtacaattttaaaaaatagaggatctactttgtcatttaacaaaataaaaaatccaattaataacttttacaaaacatagaatctaaaatagtatgtacccgaaataatgatagagagaggtagaaattacacacttttaacatataactatgaatagggatcatattactttttttttaattatgtagttaaaatttattcaatatcattgtatataatttaagtgcgtgacatgatagaaaaattaataataa

SEQ ID NO: 55496 - DNA, 1808 bp, Cannabis sativa
caaataagaagtcatatgtagatatgatatatctatttcgatatttataaaagttttttcagtcaatttttgttttagtgtatatgttatagttatttataaaataaattttaaataattaattaccacatgtataaaaaaaaataattacgctaagatcctgatcaattctaaactttaagagtttttgaagtgagaggtgtattttttttataggggcatttttgtttttttaattataattaatatttttttatataaaagttattgactagactctatattttacaaaaattattaattagattatctattttgttaaataataaatcaggctttatattttcaaaataatactaaataataccctgaactatttttcttgttaaaataaaatttaataataatctgatcttgatgtgttattacaaaattggttacaatttgtattaggaattgtcttcaaattagttatatttttttaaaaaaaattattaaaaactgagttaagggtcgtttatactaatttaagaaacatagagtctattttatcatttaataaaatagagaatcgaattaataacttttacaaaatttaatatacaaaatattatattttacccttttcttatacatccaaaaaaagtgcagcaccgactaatactaaacaactgtcttattaatgttccaatatttttcaatacaaaatggaagtatgtgtgtatttttctcttgaagaaaagaaaagaaaagaaaagaaaaagaagatgtgattaacacatgtgcatataaagaatgttagaaaagacttttactattgacatagatagataagagaagagaactactttacttggttctccaacttgtaaacaaacccatgttctttctattttatgattattggtttctttgtttgggatgaaaatgccacatttctttgctctattattactcttccattaattaatgcatatatagtatataatacaagataagtctacaatgcacttttctaaaataaaagtttagtaaattttttatttgttagtaaaactttttaatttatttttttataactgtatatgttataattatttaagacttgtaaaattttagaaaattttaagtgatttacaatatcgtaaataaaatttacatatcttgttgtatacgtaactgttttttttttttaactgtttaaactttttttttcaacaaaactattcggattgcataaaaaaattagactattttttttttttttgtgctgaaatagataaaaaacctattagaacgacccttactctctaaagttgaccaccgttagccaataaattaaataccttagcattttcaagacctggatgacctgagatgacaaaggggttatcattattaggtaaccaaggctcccccgacacattgatatttcttccatccccaatactccactgtacccttttacgcaccactttttgagcttccaagacacttcgccatactaaatttgggttattacccaattgagcggtaaggtaattatctttaacaaaatatcttgcacgaaaaatcttatatgccaaagagtgtccgagtgagcaactgccagtcttgcttgtctaaaaggacgagattaaaatctcttaagttatgaaagtccatacctcccacatttttgtgatgagtcatcttagcccaagatagccaatgaatcctgaacccttttctttcgatgtttttcaccaaaacttggccatatgctgctccatatctcggcttatgttaaggggaagtagaaaaacgct

SEQ ID NO: 55497 - DNA, 1696 bp, Cannabis sativa
atcattttccttcgtttgttctgcgattttcaggtttggcttacaattttctgggtttgttattcttttttctgtgattttttgggtggtgcagagtgttctttcgcacttttttctgggatatttctgggcagtttgtgttgggttcggcggtgattcctggggtgtactccatggatttggagctggtgaacagactttctgaggttttggttcttgatgagggtgatggccatgttctttcattgaataaggctggtattgaggaaggaaaaaagaagatggatttgtgtttggtagggaaggtaatcggtcctaggccagcaaatagagaagggatcaaaaaggctatgaatggggtatggaaaatccaccaccgatttcaggtggaagaattgagttccaagaatgtgtttcgttttttctttggatgcagggaggatcggcagagggtttatggtggtggaccatggacaattgataagcaatttattttttttgtgaaaccgatggggttgggtgaaatttcaaagatgaattttgattttacttcattttggatatcgattaataatgtcccattggcttgtatgactgaactttttgcaagagaatggggggagaggattggaaagttagaagacatcaagattgttaatggtacaatgaaagtgagggtgcgcattaacattacggagcctctaaagcgtggattgcgtgtggcgatcgatgatcaaggtaatgaggtttcacttctatttcaatacgaacatttacctgacttttgttttgattgtggaatcatcggtcataaggcattggattgtcctttgcgagactttggtggggttaatcctaattttgatagtgggaggtatggttcgtggatgtgtgctccgagttctccgccacgtgaccggactaggtaccaaaaaaaacgagagacttccccctctaacaggccgattatgactatgggagaagcttcaaagattgtttcggcagttgagagaagccgagttcgttactctggccctacaccaaaggagttagctccaacctcagttttagaggctcgggaacgtgatgaagaaatggcgtccaaggccaatacgaaagcaaaggctcccgtggttgctgggggtcattcggaggtgaccgagactgaattgggtaggttgaatggtgatcctatggtgtccgaggaggtgctcttgccttcttctacaccttcagtatgtgtgccgggtgtgggtgtggtgatggccgataatgctagtaggacggagcagttgggtaaggtgttttcttcggatgtggatggtggttcaactagtggaaaggtggatggtgtgggagaagtgagtgaccaccgagtgctcaaggtcactaaagaccacaagggaaagggtgtgattgttcattcggatcaagatgagctctcgtttcgccaagcactccaacaaacatttgagccgataattcaagcacaaaaatcgaagacttggaagcgtcttaattctgtaaagggccgtggccctcatggggtatctaaggcggccacttttcctattagtcctaagttgtctcatgtcattgttgcaaatgccaaatgtaaggtgagtcctaaggttggtgggggtgggaaacgcaagatggagatggatgttacttctgaaagtgtgaaaaagggacg

SEQ ID NO: 55498 - DNA, 3080 bp, Cannabis sativa
tctcctctgttgttctgctgtggacatctgtggaggctgcataagtggaggttgcccattttgttgtacaaaccctgttctagctcggagtaactgctggttgtacccaaacccaaacccaaacccaaactcgggttggggaggaatcatagcaccatagtatagttgttgtccaacacctggagcacacaatggatgcataggattaacatactgatttactctttcatttttgtgctcaaatttttctttcaattccatttctctttcaccttttttctgggccttcccaacataccactctttctcatcaaacttctttccattaacaccatcaacggctcgagctgcatcatcggcgtcttcaaagttcacaaacccaaaaccttttgaatttccttttccgtctctcataattattacactagtaatacttccatattcaccaaaaatgttgcttaaatcatcttcattcaaagatcgagaaaagttctttacataaatattgttgaattttcttttctctttccgaacaaaaggtccaataaaaacttgtttgtcattaaataacatcccgttaagcttctcgatagcacactgtgaagcctcttcactctcaaattgaacaaaaccgtaccctttagactgaccccaaacgtctgtagctatcttgcacgacaaaatgttgccaaagcttgaaaatgtttcatgtaaagctttgcagtcaattcctttatctaagtttttaataaatatattgccagttccgctctttcgaatactcgggtcccgattagaatacattattctaattggcttaccgttaacaacccgaaaattcatgacattcattgctcgagaagcatcttgcggattactaaaattaacatagccataaccgagggatcgtcctgagctcaaatctctgcagacacgaaccgaaatgagttgacccatttggctaaacaattgaaaaagttgtgtttcatttagtgagggatggagatcaccaacatagagtgagctcctcacgccatttgcaacctgaacatgcgccatctttttcacttttttgtttattgtattaattgtagtataggtacgtacgtacgtagaagaaaaatgagaagaagagaattaaggataaatcaggtgattctattattatatatattgaaagtataactgcagtacttttttttttttgagaaagattcactgttattataatcaacaactgcagtacttaatttatataatacgtatgagagtgtttatatagtactatagtgctatatataatccacgtataaatagtattcctattggaaaaaagatatatacataatcctatatagttaaggataatatcaaattttaaaaataatcgtctatatatcttttttttttttaatataactactaatttaatgattttaattaattagtaaaaaaaatagtgggaattatagtaattaaatggtgtaatggtaggcattaatttagagttatgttcgaggttctgatacagtagagcgcgtccatggcgttttggtaggccgccggtggtaagttgaaaacgtaattaattatgaggtaattaatgttgttttccattacccaatatatatatatatatctgctatttatttattttagtagaacatcttctcctgaattgctttcaaaattactaattaattaaattaatatataatataatataaaacatacatttgttcctctgcaaaagtttttttcattgaaaattaaaaaataataagtaattaaaaatcaaaaaataaaaacaaggaaggatatatttatttagactattgactcttcaaattgaatgttcttctactagtacttttaaaacaagtatacacgaaaataattaagtgaggtatgaattttataattgttttaaattttctcttgaatagtgtgggtagggtactggagtatggtagttacagtagatatcccctttaataattaatagtgttcttttgatagaatgttaataaaatttatgaatattataatttttttgaaaaagtggaaaagttttattcaacttgaaataatatcatcccttacaattgaaagtaaatttgatggagcagaaagctcatcaaatatacaatctgacataaaataggattcccttgcaatgcaatgagcagcgaccgtttaacaaaacaaataaaaacattttataactcagacagtaacaaacgacaatcttgaacaagtaacccaaactgagatgacatttgaactgatccattaatagcctgaacagcaactaagaaatcaatttcaatttccacatccgttagtttcatcgtctttatccaactcaagacctctttcaaacccacaacttcagcaatctcaggagaaaccctaccaattttactgcctgaaaccgcttgaacaagcttaccatccttgtctctaacaatgaagccaaaaccaaaccgattctcagcttcaaagagggccccgtcgacaatgaatattatatatttttttttgacgcgattaatattataattttgtttgtgaggacattcagttttttctaatgctgatttactggggttcttgctttcagttttgtcacctaatttttaggtttaaatggaattgcccttctttctccccatgattttcacctttttcggtacatgatcttgtgaccaactttttaatcccacatatataagagagggtcttttatggtctatgttttgtccaatcttattctcaccttttagatattgtaattcttgttctctttagctaggtaatcttatagtgttacggttaagatttgtagttttttttgctaaatgttgtagggcctgtttggcacagctttttttaaaaaagctaaaagatactttttaaaaaagctgtgataaaaatgtgtttcgtaaacagtcaaaaaatagattttcaagaatttttggagaagctacagctaaaagttgaagttgctccaactcaacttttagaaaaagttattttgattaaaagactataatagttttttttatactaaaaccata

SEQ ID NO: 55499 - DNA, 587 bp, Cannabis sativa
tatatatatatatatcatatgtaactcttggaataagtttttaactacttatactgattgaagataaacacataaaagtaagactctccattcagcatgtttactctagctaaaaagtaatctagtgttatattttagcatttttaataaaattagtgattctccaatggagtactaaattttgtattaaatttaatccgtgttaaaagttatattaaatttggcttaagatataatattatgttaaatttaacccacaataaatatagtttttttaattatatttttatcattgattattaatgctaatctttgattaatacatatttttagtagtgaggttattgttgtaaattagatacaaaataatatacatgacttgcattaatggattgtgtaaagttataatgtattttcaatacactcaaccccaacaccaactacgggtccgggtctgggtacgggtccgactctggggtccgggtctggttctagggttcgagtccgggtcccgggtctgggtctcgggttccggtcccaatctgggtctaggtttcgtgttcgggtccgggtttgggttcaggtcc

SEQ ID NO: 55500 - DNA, 887 bp, Cannabis sativa
tgccaaacatatggagttgcctgttggtgtaaacttgaaactctttttccctttgattgggattttctcaatcttaggagtccaaaagagatgctttcaaggagcttggactgtcacttcatggtacgttggctttgttattataattatattattcttttttacacatctttcatattcatctatttgtaattctccaggcttcttttgcttccaactgattactctctgagcgacttgagtatttggagggcgaggtccacaagttactttcacaatgcaaggttgtgagtaagcactgggacgactcccaactatcaaaatacctgcctcaagcaagaatttgagaaagcaaaggaggaagacgagaaggcaaagaaggaagctgagaagccgaaagaggaggtcgagaaggcaacagaagaggccgagaagaccatcaaaacccaagtcgatgagtttgagaagaagcttgctaaaaaacatgctgagaaagaagtcgagaccgtagaacggtgcgataaggttggttttcgcactgtatatcggccttggctttggaaccctactatggtaccagcttcttggaggagcaggaagaggaaactttagctctttgtgagaagatcaagatggaggaagaagatggcgaggtcgaggaagaagaagaagatctgtcgaagtttcccagcatgtagacttggtttttatttatctcccttttcccttttagaaaattgtcctttggccgacacaatggtttacccctagcgacacttttttttaaagatagattttcaaggttggatggccaactttgctttttaatgcctcgcacttttaaatttaaactttaatatgcggatgtttgcttgcgttttattcac

SEQ ID NO: 55501 - DNA, 1335 bp, Cannabis sativa
cacacgtatgctgctctctgaccgttttgtaagggtgaggtgtcacttattttttttaattgaaaaattatttaataaatatttattttttatttatttatttattcataaattatttttaacattaaatgaagtagtaaagagcgatcagtcaatgatccgtttttcacagccatgatccaagtatagaagtcgtgtaagtcgtttcaagacaacggaagaacacattgtttatattacaaaaaaaaaaaatcttcttccttacggtttttctcggtgcaataatttagggtgtaatagaacgatattgtttggtgcagaacatatcgtatacagaggactcacacattggaccaccacacgcacatcgctgtctgaccgtgccgggagggtgaggtgtcacttatttttttaaaagaaaaattatttaataaatatttattatttatttatttattaattaattattttttacgttaactgaagtagtaaaaattgattagacaatgatccacttttcactgccatgatccaacaatataagtcgtataattcgtatcagaacaacggaagaacacatcctttcaactaaaaaaaattattccttacaatttttctcagagtaataatttagggtgtaatcgaaggatatcgtttggtgcagaacatatcgtatacagaggttgttttatcctggggacgccgtggctgcttgactgtcgtgcacacttcgggcagagccgcgaaacgtcttaaagaaagcaacattgttcacgagaaaataagactagaaagatgaagtgcttgttgttttaaacaacaacactaagaagtccacaccattgtttctaaagcctaatggcaaaaatttcaagaatcagaaccgcaacttgatttctaattctaaccgcaatcaccctcctcgtgacaataatcagagttaaaaccataataggaaccgacatggaaggcagccacctccacataaacagaatgaccccacacaaattttgtgttacaactgtaagaagtcgagtcatatgacacgaaagtgttggaacaagcctagcactgctccgcatgctaactttactgaagaagcttttacagctatgatttccgagatcaacataattggtggatcagaagggtggtgggtagaaactggcgcctttttccatgtctgctatgatcgtgctatgtttaagacatactgtaatgaccactttagtaatttagattagtaaaggcaattagtactagtttctcatatttttataattatttatgaatttaattatttttgggccccattgttagaaatgggtattagag

SEQ ID NO: 55502 - DNA, 1006 bp, Cannabis sativa
tagccatacacctattcaattatttccaaaacttaattgttcatagattcttttaagctagagtcaagtcgccgtgtggatttttttccattataaaaaaaataccaattaatattaattaaaggaaaaaaaaaagaacaggcatgatcaatttgattaaaataaatatacgtacgtacccaaaggaatatagaggaagagagctctacgtgatccatttattttaccgcaagttgtttcactttcattgactggtttataaccctttaggcatgaacacttaaagctcccatttacattaatacagtttccgttgatgcacggattttcacctttgcactcgtcaatatctgaataattaaaaattaagagcaggacataaacaataataaggtcatcaatttctgttaaaaataataataataaaattaacgacccgtttgttttgcgggtcagaattggccgtcggatcaggactctgacagatattcagattttttgcctttttcgtttatataatacaatgtataacttaacattcgaatccaagatgtctaacagacacgcactctctagaaaatagtttattatatcacctctatataacattgttgggtttttcttttccagaatttaatgaaaatttacaataatatttttatttttcacaaacaaagaattaaaaataatatagcattagagttactgtatcgctgatatatttccgataaattaataataaaaaaaaattatactagttgctagtgggaatatattaatttaatattggacatataatatattgagacgttctccaattttcaatttgataaataatataaaaaatctaatcactaagaacgccccacatatccatacatagtgaatagtcttaaaaatgtattaaaattcactctttactctttactgttaactaattaattaatattaattaagtttgaataaaaataacacagaaaaacatcaataaagaaaagaaaaaata

SEQ ID NO: 55503 - DNA, 7290 bp, Cannabis sativa
aacgctgccgaacaagaggaagaaggagaggtggctggtgaggcgtatgttccacaaccatacgctcctcaggatgaggtacaaccacagatttatgcattgacggacccaagattaaattttagagtgggcttaattatacatttaatataatccaaaataataaataactagctaaatttaaatagaatatgatttagcaacatcctcctattatagtggtcataagtttagacttaatttgaaccttgtacttcatttgttttttctaataaataaaaaagtaaatacacatagaaaaaatggacaatgagattcaaaatatggtctcccatgtcaatttaaagcatcttaaccaattattctagctatttgactactatgtatatataaaaacaaaaattgtatattaatatatttttaatttcagggtggactttagtcctccctcaacacccttagatccgccatgcaaacccatacatatagtactaatttttgttttttgtgttgttattttatttttttttcataaatttttgttaattattattttatttttcatttaaacttttcttattaatatataataatggaaaaaattacatatgcttacatttagataggaggactgatgattttaattttataagcgaatttatattctcttgtttaaacataattttttttattaattgtataaatataaataataaaaataagatatatcattataaacacatctaccacacttattatatatatcaatgtttaaaagaaattatctatttctaaacacggtaattcacacgtgaccataaagctcacattagattagagagtaagcttggatttcaaatggataaagacaaactatccaaaactagtcattttactaattacttttctaataataataatgttacttttatattcttgtattatatttccttgaagggaaaaggaaaaaaaaataaaactttaaaaaatctcaactttcaaaaaaaaaaaagaacactgatctctattgggaagaatatatatatatatatataaatcacagcaacaagtgaagatctttggagagctgtacatttggatacgcataacacacttggatcaagcacagtgtactttgtagcccatctttgttgagtggtttggggggtcctcaaagaaacgaataagattcatggagataaaatatttcttttggacatggtggaagctccataaaacaaaagcaccaacctttcattataaagagaatagttcttccatgaaaagacagggtatcatatacacatacacacacacttactttatataaatgtatatttatatttatataatatctcctccacaagtactaaaatgaattaggagaggaaaaggagatgataaatcataaattttgtgatataaagcaaattgatagtggcaataagtaaagtacgtttgtgcttgattagaggagtcatgacaatactcattcttttttctttcccaatgtatttcttttatctaaacaaaccttatgcctgctatatgcttatatactcttcttcttcttctcctactcaaccaaagcataaatattaaaactctctcaatctagattttcagctactcaaatcaaatggcgcccaactctatagcatgcttcctctgtcttttattcttcatatcacagctttattcaaatgaatcgaccatcattggagccaacaaccagacagactttttcgtcctcatgaagaaatctctctccggtgccaccttggacaattggtatgttggttccggggctaaaaaaccaatatgtaacttctccggcatagaatgcgatagtggaggccaagtcatcaaaatcgacatgtacggttggtcactctctgggaccttcccctccaacatatgttattatcttccaaaattaagggtccttcgactcggacggaaccgaatctctggtgagtttccaactaccattgtcaactgtactcagcttgaagagttggacatgagttatctctacctcactggaactctgccggacttttccggtatgaaaaaattgaggattctcaacttgtcttataactttttccaaggaaagtttccgatttcggtcgtcaacctcaccaacctagaagtcctcaacttcaacgagaatgggaacttcgaattatggcgattgccggagagtatcgcaaacttaaagaagctaaagtcaatggtgctgaccacctgcatggtgtacggagaaatcccacggtccatcgggaacatgacgtcactagttgatctggagcttagtgggaacttcatatcgggaaaaatccctgccgagattgggttgttaaagaatatcaaattgttggagctatactacaaccagctagtgggaccaatacctgaggagctagggaacctgacggagctaaatgactttgacatgtcggtcaaccgtttgactggtcaaattccaacctcgatttgtcgtttgcccaatcttcatgtattgcagctctacaacaatagcctcacaggagaaatcccaagtgtgatcgctgaatcaaccacactaaagatcttgtcgctttacgacaattacttgactggccaagtaccttggaatcttggacagtcgtcgcctatggaagtgcttgatttgtcagaaaataacttgacaggaccactccctgctcacgtttgtcaagctggtaagttacaatattttttggtacttgataataagttctcaggggagttacctcagagctatggaaattgctattcattactgaggtttagagtgagtgctaataatttagtgggatcaatccctgagggcctgctggctcttcctcatgtttcaattgttgatcttggttacaataatttcagtggccctataactgattccattggaagagctcgaaacttgtctgagttgttcctacagaataacaaaatttcaggggtgcttccccttgagatttctagagctacaaatttggtcaaaattgatcttagtaacaatcttctttccggtccaatcccatcccatattggaggcttgaaaaaattgaatttgcttcttttacaaggcaacaagttgaattcttcaatcccagctgactcactctcttcccttaaatatctcaacgttcttgacctctccaacaatcttttgactggtaatataccagagagtctctgtgaacttttaccaaactcaatcaatttctccaacaacaacctctcaggcccaatcccaccctcattaatcaaaggaggattagtagaaagcttttcaggtaacccgggtctatgcattgactcgtcagttctggccaaatcctctacttcccataagaacgtaactttccctctttgtccatcacgatcatacaaccaaaagaaattgaactccatctgggcaatatcaatatcaatcgtcatcctcataatcggggtcgttttgctcattaagcgtcgttttggcaaagaaagagcctcagtggaaaacgacgagaccctatcctcgtacttctcctacgaagtcaagagcttccaccgcataacgtttgaccaacgtgaaatcatggaagctatggttgataagaacatagtgggtcgtggtgggtctggcacagtgtacaagattgagttgagcaacaaagaagtcgtggcagtcaaacgactatggagtagaacagagcagaaatggacttcggaagatgatgatcaattgatactgaacaaggagctcaaaacagaggtggagactttggggagcataaggcataagaatatagtcaagttgttttgttatttctccagcttggattgtaatcttttggtgtatgagtacatgcctaatggaaatctttgggatgctctccacagagggtggaataacttccatttggagtggccaactaggcaccagattgctctaggggtagctcaaggcttggcttatctccaccatgatcttcctcgtcccattattcatagagacattaaatctactaatattcttcttgatgtgaattatcatccaaaggtggctgattttggtatagccaaggttttgcaagctagaggaggcaaagattctacaaccactgttattgccggcacctatggttacttggctcctggtaaattaatgtttttttcttaccttccagcttttatcatagtgttaaaaaaaataataattttaacatttatttaatttgaagatatactcttttatttttattaatgaacttagaaacactgaaaaaatggatgttttattcaaaaaactttgttcttattttatgtttcaaacttgttacgttaatatccttttatgatcatatatagtgatcatatacgcacatataaattaattttataggtaaagttaacaaattattttaatatgaaatatatttttttaattcacaattcgattttcacaaatcatttttatttattttattgttatacttgtaattattttttataataataataattaattacattaaaaaatatacgtataataattacattaaatttttatgtatcttttatttttttattgttattgttatatgcctagttgtttaaatttaagccgtgatattttataatgatttcgttccaaaaagaaaagaagtggtatgctgatgatgatcactaatttaattatattactcagaatacgcatattcatcgaaagcaactacaaagtgtgacgtgtacagttttggagttgtcctaatggagctgataacagggaaaaagccagtggaagctgagtttggagaaaacaagaacatcatatattgggtttctaacaaggtggatacccgagaaggagccatggaggtacttgaccaaactctatccgattcctataaggatgagatgatccaagtcctccgagttgcggttcggtgcacctacaagaacccggctctccgaccaactatgaaggaggtcgttcagttgctgttggaggctgatccatgcaagtttgattcctccaactataaaaccaattctaatactacttctactattactaaagagtacccattaaataccattaaggtaaaaggtgaccagtttgatgaattatgaattctactcagtcttcgtgacacttgtttgtttgggtgatgccaacttcatcattcaaggttatgtactacaaatataaatataaatataaatatatagtatatatatagaatattacatacttattattattattaatggaaaattgggcttgtagattctgtaggggcctcttttaaccttattattattattattattattgttatttactgttgagaaataacatgcatgcatgtaataatcaaattatagtctctgtgcctttcaaaaaaaaaaaattatagtctctgtgtgtgtatacttcaattatacgtgcttgcattaacatttaattttatggcttaattatgataaatgatatataatttagaaaacaatataaggtttctatttctctagtcccactaatgaagaatcagtgtcagattttgtgcgttttttttaacctcttgtacatgttcttctttttcttttttatcatattcatatcagaaaaaagaaagaaagaataacaaataaaataaaaaatgcacatgagagttgagatatatattgcaaggggttattccttgtctttctttttgcattgaagtgggtttctgattcttaattttaaaaatttagatggcatgattcgtctgtggaaggaccacttgagagcaatatcctatctatatgagaataatctttcgattgatcattagcatcttctgtctattttcagaattttacgacggaggagattatgaagtaattttttttttcattttatgtttcttaatttatacccagcttttgaaataatgtaacggttcaaattctttaaaagaaaaaggaaggacttaaaagaacaataatataccctcctctttcctctttcctctttcctatttcctctttcattcctttattccttcttcacacatcatgggagccacgccggcccaagcattgggcagcttgagccattgcacaagctcttatttttttaaggcccatttttattttttaaagaaaaggcttatttatttcttttttttttctcatatatacataaataaaaaatttataattgaaaatttatgacgaattttttttgggatattttcaaaaatatgggaaaaatgaaccatgttataataaatatggcaagaaaactaaatgccacacaatatgacattaactaaccaatcaaactacaaatataaaaaaaaaccataaaataccttaaaaactgaatctaatttgaaatcaaggaaatttattatttttaaccatatataaacaaaattctctctctctctacaccgattctgtctctctcctgcgactctctctctctctctctttcctgcgattctctctctctcttctacgattctctctggcatgcgattcttcttctccatcttctccaattcactttctctcttctccatgcgcaaattcttcctctgattcaaccaacactgacctgaaaaactcagaaaatataaaattcaaccatggccataccgacagaagcaaccatcaacatcgacacctgaaaagcaatgaagctctcaccttagagcagaaaatgaaatcttaagctcaaagcaccgatcaacctgcacacacaaaattcaatcaacaatcaagttaactctgatcgtccccgtcaacagcgatcaaaagaaatacaggtacaattatataaattatgctatgaatattatatgtatatatatatataaattgagaaatacaccgaatatgtgcatttgcaatttaaacttaaaagaaaaaaaaatctagattgaaataaatttcataccaaaactatatgatcttgcattgcttcataatgaaatgttcatatatactcaatctagattgagactatgaagtttcacaaacaaaagacaaaagaaactgaaaattaaatattatgaaaaatttagttttatgaaaagattactgaaaattatgaatataaaaccagtttctaaatacattataaattttaactaacagttttcaaaatgatattatctgttaaacataaacaaatataaattaatgttggaaactggtttctcaaatatatggtgaaaaaatcacttataatttgaatacaaaataaaaacaaaaaaaaaa

SEQ ID NO: 55504 - DNA, 1170 bp, Cannabis sativa
cttttaaatgcaagtggtgggacacaaacggtaaccatacagaaagtgatagtttttttgctagtttctgcattgcccgtcaatggcacaaaaattaacattcatacttgcaatctaagcaaatttggtatattacatttctagcctgaagaatagagttgattggaagcttgtcaatgctcacaactcccacaatgtctgagattttacaaatgaggatgatgaaaaaaccatgactatacaagaaataaactctttcaaaatcaagttagtcatacaacttctacaactagacgatgtcaaatatgtcttgtacaatgtcgacccaactaaagtgatcagcatggaccatgtgcagactgaccgtaagatttagatgattttatttttcatagtgatgatgataactagtattaatgatgatgataatgatgattatgatgccttgtacacttcaacgtattgtaatatttaaacctaccattaattatatagaatacatggtccttttgttaatgaattgattagtacttattttattattaataaatatagcttgtatgtgtagaatgactcgcgcaggtacaagtaatagtaagaataagggagttagaggaccttacaaggggaaatgtggaagaagaactgaccaagatgtcttcagggcagaaattaaaatttagatggcatatggggactggggcgtcatagacgactatgggaacaagtttaacaacatggtcaagttctttattcacaacaccattcctatgaataagttcaattttaaggaaagttgacagaaggaacatttagactatctgaaacagactagcgtaacattcaatttttattgtaatagatcaaacaaaactattctacaaaaaatatatatgattttaatatttatctttttttaaatcaaatttgacttctcacttgacaatcctaagttcgtggactatattttgttaaatgtcgaaagggctatgcgaatggagagcgaacaagaaaatggcatgaaagaataatattgagaaatatgaagaggaagaggcgactaggagatcacgtccacagggggtcttacaggaggtgtggtaagaggtcattgcctactggaaagacccgaaacaacaggtagaaattaaaaattgtaaaattgaattt

SEQ ID NO: 55505 - DNA, 1318 bp, Cannabis sativa
  modified_base (1264)..(1275): a, c, t, g, unknown or other
tacagcggcaatgaccaaataattttttggaaattaaaaacaatattgatgaacgcagtgcatatgtatttttaaattcaaaccttaccgaacatattactgtttttttttatactatatagttttttttattattattagctaatcatgttcgtaatatgagagagatattattcaattctatacgtatacatatatgatatacataataaatatatatactaaattaatattattacgtgcaaatttccttatacttaattattaaatattcttaatttttatgttatatagttatatatatatttttttgttgtataataataaaaatagagagtagtgctaagatcggtaacttcttgcaaagtcctcattgtactttcacggaatgtattacgtgatgtaccacagcttttagatgatagagttatttgatctgagggctgagattgatgtaggggtaattagggttaaaaaatagtaacgtaccctgagacccatctaatgtaccacgaaatacattccgtgaaagtacatcacgggacaaaatcgtgtccctgtaatggttattgaagcattacatattttgatttttcaaaaattaaaaaaaatatatttttattggtaactataaaggttacaacgttacaacaaagattctttaagaaatataaatattttttttttattttattggttaaaatgaaaacaataataaaaataaaaagttttttatatttgaattgggtaaaaaatgataatagaaaaatgtattctagaatgtgtaacaggtttaaatttgaagtgcagtattaaaaaaaaaataataaaagataaaagagatataggtagtgagtttaaatttaaattgtaatgttttaaaatgtgaacaacactttctcttatatagacacatttaatataactaagttaatattattacttgaatgcacgtatacttaattaattatcttgttagtttttatttttattatgtaaattttagttgataattaattttttttttgtgtgtgtattcaataaacaaaattatttttataatttagtgttaattataattttagtttattaattatcctaatactttcattatttttgaaatattatacacttttttatttttattaaataataatagaagtatatatttttggtaaaaaaatgatggaagatattttttaaatgtatgtaatgagtttaaattttagggctcgtttggaatgccgtattaggtcgtattgtnnnnnnnnnnnntatattgaattggattatacattatatttttatataatactat

SEQ ID NO: 55506 - DNA, 1273 bp, Cannabis sativa
ttctaactcgagctttgaagattgggaagtgagtagtgatcgttctcctactccagaacccgtagtgaaacatcaatcttacttcgagcagatcgtaggagaagcgtacggccgtttcatatgggaattgaagaagggttggagggattatcttccatccaactagacatacattgtctggccaggtgttgctgatacccttcctgttcgccgtccaagttttggtaacttcgacatcccaatagttgtccctaccattactattgcatgacacacacatcagtatccatccaggagaaggatgatggcccgcacaaagcagactatgcaaaaagtcaacgcatttgaccctcacatggttcaactcgccaagtttccaagtgtcaagcaagatctgccctatatggaggaggaggatcataaggggacatttaggtccaagagatagaggaacaggacgacgttcgtcttgatagcccttctgaagttgagaaggaaggagtcgctgaacctctaaattttggagggtataatgaggttgggagcaagtgtttgcggagggtgacgtcttggtcgagggggaggactatgtcactgaggagcttactaaacaagttccccacaggaggctaagtgccttaggttccaaatgggttagccctccatcccaaataagtgaggcacatatgagagccttggataaggctgggtacttgggcagactggagtgttatgtcccctcttcgaaacaccgggcaaataacccacagaaagggttttgtgcttggtcggctgctcacaccaagcaaggggccatggtgcctttgcactcgtacttcaagagggttgcagattatttttgcttttgtttgaacaagttcactcccaagggcattaagtatttgtctgccctgttcgtcctctatgccattcaagatgaggtgtgccgtccccacacgaggtcaactagttttatgacttgaagtctacccctaagcaaggcaggtcggggtacttctacttctcttagccagacttcaagtggctgacgggctctgtggataaggatgttagcaagatgaggggtgttattgacgagtattatttcgtggaaggcatgggttctacctatactcggttttaatagatcccagtatattgccgtcaacccctcacactggcacttagggacagggctcggaggattgtccaactgccggatgctgctcaaaatatcactttgttaacctcagaggacaactttgtgaagtac

SEQ ID NO: 55507 - DNA, 1368 bp, Cannabis sativa
atggtatttcaaacttgtgtggttgcctatgtatggtcacttcacaattattagaaaatttatcaccatcatcatgtattgagatatgggttatgaaggaatatggtgtatttgattcttggaacaaatatctttatgtggacttgattaaccaacctctctaccgacaattaagtgtatcacataatggtaacctcttattatttgaatcaaataacaaaaatattttggatagaaactgcctatttactctgtccatttatgatgccaaggcgagtaagatggtccaactccaacatattggtctacaaaagccgcagggttcctaccttggtacttatgcagagagtatctttctcagttgattaaggcacaacatttttattcttagttaatttgttaattttcttcctcttactcttatagtactggtttttgaatatatattatattatgggtttctattttagatttttattattggttagtcaagtctcttcattcatgcatgcttagtttagtttattttggttttgtgggcatgtctaacttatatctatttttttatccatggtgttgaagtgtttagtaaatatcaatttttctttttttttttacttatttgatcgacctattatatatattattaattagaatggaggccgacatcatacgatcatgatatttttaataaagcaacaaagtaaaccaataggaagaaagagagttttcgttcaattaataattaatgcaaaagtttacgaatctttgttttgttttaatttgatttgatcgatatagcgatggtttttttacttatttgatcgacctatttttattattaattaattaattgtatgaataaaaacagagtgaaaattagaatgggtgatgaaggaatgtggtgtgtgtgattcttggagtaaatatctttatttggatttggttaaccaacttaatatttgtggctactgaatcaaataattgtgttgatgaaccctggttatttagtctgtcattttatgatcccaaggctaagactaagatggtccaacatattggtctacaagatattagtatctttctgagttgagttagaaaatataattgaggccacaaaattttgttcttacattctataatagtggttttaggtactagttttggaatattttattatggtttctacttagttttttattattgattggtgattggttagtctcttcatgcttagtactttttctatactatccacctatgaagaaacaaacatcagcatcgtacatggtttcaataatttgttttgattctaagtttcttttgtttcattgtagacttttttttttggtgtttgattttcttact

SEQ ID NO: 55508 - DNA, 1671 bp, Cannabis sativa
  modified_base (532)..(532): a, c, t, g, unknown or other
  modified_base (1610)..(1612): a, c, t, g, unknown or other
tcaaaatagaattcaaaaccaaaactcatctaggtgatgatattgtataagtcttttccaaatccaaaataactagtctttaatcatagttgaatatccttataaactcatatgtagatgtttcacttttgcccctaaagatgaatctttcattatcacttggcttttagtttcatagataaccttccatagttatacttacataagaaatttcataaaaatttacttattaagtatagttatgtacaataaattaaatcatttacaaaacacatagtgagaaacttatttttattagatatgcataatgacatacttggaacactttaaccttattttaattccttttgtaaaagtcatagataattccatatctaatatcttttgtactttctttaacagtgttccatatgcaacatactgaatgttatctttatccttatcctttatttaaacaaagtacctaaagaagcatgtttttctcttttctttagttaaaaatttatctcatttagcatgagaattaactttntgttggtagatataactaaaacatgagctaaaaagagaataaaataaacaaaagttcacaaaagaatccacataataatataagttcaaataattgcaaatcccatctcaagataccaaacacaccattaatatcaagtctttggacaataatattaactgtaagcggtactcttgttgtcgcaatcaaatattgacaataaatcctgtcaaataatttgtcaatctttggactgtacacattgttcacatagaaaccttataattgtcacacatttatcaccacatgtatatgtgcactcaaaataagtataacctttctttgggcccatcaatacttacataagaaacacacacacacaaacatctaacattcatcatgagcaatctacacaagaggttgcttttgcgacatcatgtttcaatcaactcatttataatgaaagataaattttaatattttagtatgccaaatttgaacttaaaataatacaaatttatatatatatatttaatttggacttgaatttttatcatgaacctcatacctatacacatatattatatataattatatcttttcaatgcaacttatatataataataatagcccatatttaattatatatattagaactgtatatatatatgtgcctataaacaaaaatcttaaaattaataataaatacctcatatataactatgaatatttaaccaaaatatgaattgaaaagttttaataaaaagatcacgtccatagtaatggtgcagttaatccaaaagtctaaaagactcaatatatgagtgaaaacttagaatcacattacatatgaatacatatgtcaaatataaagtatatatgcataaaaaggaggcataaactttaattctaatagtggctttatgctaaataagatgagatcggtgacatatattatatgatatattagtagtcaatccatgtcacaaaaaaaaaaaaaattgggactgaaatcttattagacataatgaatcaataagattcaaacaaacaccatctcatcactgttggattaaaaaaaatcctatgtgggcacatnnntataatgtatatgctattataaagtgtgatacaaaattaagtgaccaattatgttatgg

SEQ ID NO: 55509 - DNA, 851 bp, Cannabis sativa
agtgttggaggactatggggcatcgtcctcaatggaaagtgaagagctttctttagttgcctttttttgaagagagagaatgagaagtgtggaatgagaagtgtgttacaccaataagcttatatagcttctggtgggtccctctctcacttaccatgcagcatgcataaaataacttgcaaaagcattttaaattttcttctaaggaaggtgatcagacaagcaagagcaaatattctaaagattgaatatactgtaagacttgtcccgttaagatttcatcagtccaaactataatctgaaaagtctcaatccatacagaagtccgcatagggacttaggggacaatgttatcctaagttttacccacattacatggcatgtccatgtgggcaagaccagtgtcacgtagagtaaaacttgtcaataagaaggcgaagtcatctacacaatacatcagttgtttggaagcccaaatacttaagcaagatggagagacaacaaactggcaaccttcaggggtctaactggacccccctagctggccctatggccagcataggccagccagcctcgagcaaaagaaaggtcggccagcttgtaccctagcaggcacttggctagtcaacttgcaccctagcaggcacttggtgtgtagcattcatctgggacaacaatcctagttgtgaattgggcttcaacaacccataaaaataggggagaaatatcaactatttaaatttttttgggggataattaacctatttattatttattattttattatgtaacaaatactttatagttcttattttttagggatattaggttattattctcttgtaagctct

SEQ ID NO: 55510 - DNA, 2813 bp, Cannabis sativa
  modified_base (2183)..(2189): a, c, t, g, unknown or other
aactcatttttgtattttttttttcatctaacatgttaaagaacttgtaatttggttaggaaattaatttcattaataaataatagatgattgctcatcattaattagtcatttagcatttctaaaaataataacgtgagatatacaaaaataatgtataatttgactgattctatagagtatttgtacgtatatacataataacttgatatgagttagtcgaataaaagttaacaaacagtttagagaaaaaagtaattggataaatattattttggtattattaaaatctatctaacaaaaaagtcatgcatcatgattggatctgatatttaaaaaattataactcactatagtgtccttcgccaaactctataacctgagcactgttaatcaattattttgtcaaatgtccttaaagaaattacccactgtaaatttttattcatgccactgtgtaagtatgtgtctgaatcaaaatttacgttgccaacttatcacttaatagtgtacaggatgtcattttcaaaagaaacaaaataagaaaatacacaataaaaatagttgaagctaaaaaaattcaaactaaaataaacaataccatttaatcataaaaaatgaagttcaatgaagtttcctccacatatatatacttgttgagtttaaaaaaaaattacacttaatggttattccaatttccattacatataaaggctttctcattttatataatactacctcaacaccaattttaattatggatagatatttatctgagtattcatgcataaataagtcattcatgcaacattcaacattgtaaaaagagcatccacaaatatttttaggatagattatataaaatataaacttaccttaaagaaaaacatacaaatctatgtatatcaatttataaaattaagaaaatgacatgtgacttttgctcctaatttatagaagacactacttaaaaatacacaacatagtaaacttacattcctataacaaataacctctaccaatatgcttcttacatcaaaaaattctaggtacaaaccaattagacatatagcaagttacctccaccaaatccaactgctattttcgaatagttttgaccaagtgaatgcattgccacaaagaaatatgcaaccacagtaccaattatggtggaaatttttgtaaaaagactttaatgtatacatgagttgattaactgattttaaattcataaggaatagaaaaaacattaagttttaacaatatcatagtctaaaaagaacaaagatatgacaaattaaaaacataaaaaagtacaattaaacataataaaaaaaatctagaagcaagtgagatggtatacatgctggatagaaggttttaattgttcttgctgtgagtagaaacaaaattgctctcccctccattccaatgtttgtcatactttgaggaagaccattcttcatgtcccaactaaataaattatttaaagaatcaaaggagaagaaagacctcatttcttatcacactttaacacaacaaatcacttttaagtttatgcaaacatgattagtaggcaattaaaaaagaatgacattgaaaaaaatgaatataggattacaaatacataattcaaaacttcaaaacgtggttgaatatttatacatataaatatttatgactacatacatatgtattttttatattttccaataaaaacagttgagactctatgatgctatagcagatcacatagataagtatactgcaaagtaccggtcacatcaatatacgaccttgattttatcaatataactaccacaattggagaagtgaagtattgggtttgaagcccatatcgtacgtacatgagagtctcaaggtaatggtagtacgactcatgtcgcctaaaatatttaaattgaataggttaataagttttcaacactatttttgcctattacgtatttgttgttctcttcagcgattttaaacttaaagtaatattaatttatttaaaaattaataaaaaactcttatttttgaataatttttttttaaaaaaaaatattactcaataatttctcataaatcaataattctgttatatagtcacattttatatagaatagatatatatgtaattttgctttctaaaatatgtaattattttttaaggtgtnnnnnnntttatagtcatgtaaaataaccaaaattgataaaattttctattgttataattggaagaaaagaattagaggaagattattattttttattgtttcatttttatttaaataacaacatttagtgcttgcttgttcggtaacaattagataatttttttttattaatttagttaattaagaactaagaagaaactaaaatttttgttaagtaaaattagaaaaaacaaagtaaaaaggtacaagagtttagttattaaaaaatacatcacgacacaataataaaatcaatgtgaaaacaaccaaaataccaaaataccaggaggagagagaaaccctacagagtcgatgtgaagctagcttccagggacgtgtgcgattataccttctgagttgtgtgcgataacgacaacctccaggagcatcgccgacgattcgtctgccgttcggttcacgtcggtcggcgacgctgatcaacaacggccaccatcagttcttgtcttttgtcttgttttgtcttgtcttttttaacatggtgtgattgtttgagattggttcttgtttattgattcttgttattggtttgagtttgttctaattttaccattgttttctggcttgagtgtc

SEQ ID NO: 55511 - DNA, 1249 bp, Cannabis sativa
ccaacttgagtctatgatggcaaatttttggtggggcttgaatgagaatggcaacaagattcattggcgctcttggaagcttctgtgtaaaaggaaagacagtggcggtatggggtttcgttctttcatgcatttaatcaagcaatgcttgcaaagcaagcttggagaaacaaccagactccttacttgcaaaggtgctgaagagtagatactacccaaataacaatttccttcaagctaacattggtcactccccctcttttacttggcaaggcatccattggggtagaagcctttttgttgctggtttacgttggaaaattggagaaggatgtaggataaattgtgctgatgacccgtggattccaagacattccacctttcggccataccacttctccggaccacctgatacgactgtctcaaacttaattgcagatgaaaggcaatgggatttagcactcctaaatcaatggttttcctctccagatgtagatcgtatcttaactattccactgagctttttccgttatgaagatacccttgcttggaacccctgctcctctggaatatattcggtccaaacaggctatcacctagctgcttccctagcagaaaccgatgacagctcatgttcttcaacgtttgcttcatggtggaacttcttatggtcactgtccttgccacaaaagattaagattttcatttggcgggcctttaatgatgctctccctgttgcaacagcccttgtaaagcgcaagattatcacagattcaacttgttccttgttccatctgtcaacaagcttgggaaactgctgggcatgcactattcagttgtaagtatgctcgatctgtttggcgacatcttgatattactcatgactggaatactgctaggcttatgcacaaaggtgattatttggtgcactttgggcaatctggactgaacggaaccgtgtggttcatggtcacaaagccaaaccagcaaaagaccttgctttttttttgcaaaaaactattggcataactacactgctgcccaactgaagtgctcttcttctgcaccagatcccaactcgctcgctgcagctactactgcttctttgccacaaatttctcctgctgcaccattgatgccgtggactcctcctccacttggaatgctgaagatgaatgtcgatgcggcagtagatagcacacgaaaaattactggtattggtgctttaattcgaagttcaaatggtgag

SEQ ID NO: 55512 - DNA, 1385 bp, Cannabis sativa
atttttaaaagttaaagcttctgccattttaggagagaaaatatgcaaatgtgtcaaacagtagaaaccatattctcacttatggagtcacgaaccaccatatccaaaccacatctattagtggaagcatcgagagcagcatcaacatagatcttcattgtcccctaccaagcgacacccaaacaaaactagaagaaatatttgtagaggatggcaagctcccaaccaagtgagaagcactaggagagttgtctaatatctggtaatcaacaagaaaatcacgatcccaagtaacaacaatatcttgagcaatcatcttatcattatgtacttttttgttcctcctaaaccagatttgccacatattcacgaaaatcaactctaaagaggctacaagaaaattatcaagaaacttgaataaaatcataaaaattgtgacaaatagcaagaggatcctctcaaaaaatatcacaaagtttacaacaattagctaaagacgggcactcccataaggcatggtgggtagctaggaatcgcaaataggatatatctcatctatccataagtcgtgctttgtaagattgtatttttatgcctttatggtaattttatgtatttcaatacacgaaatttcattatatataatacatattgttgccctattttctcccaatatacgtggctactccatgacacgacacgtggtagataaagattaagtattcgaaggtgtttaaacaaatcttaagtaggcatgatttccttggataacctaccggttcctcctagagctataactaggtttggagggaccaaccttttgttcatctttgggagctaggtagcatctagctcgctcgggcccagcaaactggatatgaattatccacgggcattaaatgcagcatggaggaaacgtctacggacgaatataaaaagacatgtcagatgcattaaacccattctttagcaattttacgttaatcaaggatgtaagtgacaactacataatgtactattacatcaatcaaggaaggataagtgtttgtctcacctaaaccctatgtatcctactacgtagggacgcatgccctacttcaccgatttggaaacttgtgcatggccaaggtggacacttaggacaatagaggcctttctcctttccaaataattgttatgaatacccccaacgacatttgtaatggggggataaaaaagaaaatagatcagaacattctctgaaaagaaacacctacatattaaatatcagaggctcgtggactaaggctcattcatgccctaaccacgtaaaaacaattgcatttactcttttctaatcattcttagtgcactaatgatttagttgttgaaaatctcagtcaaca

SEQ ID NO: 55513 - DNA, 895 bp, Cannabis sativa
ttttttttttaaaataaagcgttttatagaacaaaaattagacctcacgttcattacaaaagatagttttaggtattgaggatatctccacgaaacctgaaaagaaaaaggcattgctattgggtaccaatagtgctcagcacttttatggaggtctataattggttaatgatattgcctaaaaactattttcttaaattatatagagttcaatacttaattacactaataggatgacaccaaaaaagtattaatctttttagcaattcgaaaaaaaaaaaaaaaaacatgctaagggtattagtcaacctttcttgtctctagtttgtctttagcataaaataacattttttcactttacttacctggtcccactatttcaaaaaaataaaataaaaatgtactacctggtcccagttatctaagacacaacacactaaacaatgtcactgatgatgcgtgtaatacaattgtttgttgatttaaatgtacagaattattataaaaaatagaaatgattcctaatgattgcttattgatgagtagtccaaacatgtcgacatttcaagtacacttcaacttggctggctcgtactatatgttttaaacatactagctagtgctgaaaaatggtctacgaattgactaactaaaataacactactcaattttgaacattcctattagggcagatagatgtgtatatatatttattttaaaatccttttgaataataaacggtaggtatatatatgagcacatatgaaattggatataataaatatatatatctaactaataatagtagttgtattgcaatattaggagattgatgtggccaagcacttaggccgagaaaaggcaccccacagtgtccatatataaatatcaaccc

SEQ ID NO: 55514 - DNA, 1205 bp, Cannabis sativa
atattgaccttgttttagtcaacgatgtagaatcaattatatgacaatgataatgtttgataattaataataataaaaaagcaataaatgacacaaatgatttatagaggtttggccccagatttggtaatgacctactccctttacttggtatttcttttggatatataaagatcacaagaacatggtctagtgagtttcttgatattcttttgtataaattagagatagtattttgcatcgtaataactctcttgaaagtctagaattcagtcctttaaattgtgaatatgactcactatttatatggttacaagtgaataaataatattaattacagaatattcaatgcttacggtttattccctcagtcccttgattgtaggaaaccattatggcctattctttagagatttggaggttaatttcgtagatcttgtatacattcagtcaagccttactggtcgggaggtcgattagggtattgccctacgaatacttagcaatagaatcttgtcgaatcatgctagccggatgccattggtcgaataatgtgattagtcgagaaatgtgactagccgagcaatgtgtttgaatgatatggttcaaaataacggctaattgtgtattttttttttgccacgtgtcactctaactaatgccatgtcacttaggcgaattcttgggataacaggtgccacattaaaaaataatattgatgccaaaacttagtattaatgccatactcattttttttaataaaactaaaacaaataatattaaataatattgtgtggcaacataatgataaatttgaaaagtgcttatcactagtacttttaaaagtaagagtgtcaaaaatgatgaggaagagagataaaataaaatattaagggttgtttggcttcataacttaaaaactgcttttactttttaaaaacaggaaataacttctaaaaactaataggggacgtttgaccaagttttttaaatatagtttttcgaaaatcgtatttttaaaaactagaaaacagaaaatattaaaatgttgttttctattttcaaaaatattttttttcataaagtattcttttttatatttttgctcacatacacgaacttggatcgtggacccgaacacggacgcagacctcaaaccagggcgcgaactgttgggttttgtgccctaaataaaaccctttaca

SEQ ID NO: 55515 - DNA, 797 bp, Cannabis sativa
  modified_base (743)..(749): a, c, t, g, unknown or other
atgatcaagactatttcaaatccttctcatagcattctaactctactaaatagtaaatagttttatcctttctttcatatgtcatacatcttttcaacatatattatgtcatttaaaattgaaatttaaaatcaattctacctaggacctagtaatgtacggctactaatgccctttgataacaataaagataattacaacattgaaaataataaaataaagtgaactcatcattttataataaaacacctaaaagtttttagaagaaatctaatttaaataaaaacgacataattctcataaattagaaaaatatcattttgtctaacgaatttatatgaacttactatatccatatcgagaatgctagactatcgtaataataatcaaatattttggttattacatactctttcactataggttcgaaatttatgaagaaagagggagaggatttcaaaatatagaagggaatgaggctctcaaaaactctagttgtattacagaatgtaaactaggttatgaggatttgatgagaatgagagcatcctattccttttatcctatatggaataaaaaataataaaataatagcaaattaaacactataatggttggccatatagatagcccccactagttataattttactatattttgaatcacttatcttttatttcactaatatcatatgttctaattttaatcctataaatactaaaattatttatttaataattannnnnnnttatcaaataaaattgtcattgatcttatttattaattagattttaca

SEQ ID NO: 55516 - DNA, 2436 bp, Cannabis sativa
aatttttaacggccaaaaaagtccagggcatgatttggtacatgtcaaagttcgggggaaaaaatcctaattagccaaactaaaatcccgttatgcagacactattttgaagttgaagacaatcgctgcattgactcctttaaaactagtcaggtaatatattttctaattataatttggaaagtttgttgagattttagtgtttagtctcaaatatatctgattttttcttttatctttctgttttctaaatagggcgataaaataactaaccttgagaagttaaagcacacaaaggaattggaacaaggcaacatgaagttgaaggtaattttagtactgaagcttgttgtagaatattgcagtacagcatgtgtctgtgacctttttttttcgtcaatttttatttcctttttttgattttggttaatttttaaattgaggatacatatgtagctttaccatacgtttctgccattatctagtgttcctgtatttaaatttatgcgggaaacttcttttctattgagcactcaatttttttggtcattgaggaaagtgaataatttgagcgatttctttactcaagagaaggtccgaggtcgagtccctcctggtaacctacataatagttgttgtagtttcatggtcccctaatatataaggttagaggcagtttagttaaaaaaaaaataagtggggaatttctttgacatagatgagatgagtgtttaatttgtgtttcattgtagtgagtttcaaagtagtaaatgaattcggagttttctttgaaacatggtgactagtcttctttctatgtctgtcctaatgaaatatgtgatactaaaatcttaactttgcacaggaggtgatgattgaggttgtctcaagaagaacaaagaccgaaatggagtcaatacagcaacgaaaaagggagagagaagctactcgagttgcacttgataaggttcgataaaaattcagtttttttgtttttgtttttggtgtcttgatattaatgatcatttgagctctgagaatctaacagtgtttctcgtccatcacccaggttattgctgaagctgatattgatcaaaccctggagtattttgaggcactcgaacggttgtgcgggtacaagccgtcatgtcggtttactagaagaggaaaccattgttacatcgaatcttccggtcaagtttctctcactcacaattggagaagctgggtttgttcttgaaagaagagtaaatggatggtgaggaggatgacgaggagtatatataagaacatatatgtgatatgagttgttcttagaaaattttgccccaattcatatattcttatcttaaaaatgtcttcttttttttccttttctacattgtatataaggaaactggtaagagcattacttttgctctcaccacccatgagaagcattttttaggacattttattggttgagttggtgtattgaagcgtggtagtatatgatatattatttttccttaaattgtgggcattttcatattttttaatttgatgaattgtattctattattctatgttttttttttctttttgattagtcttcttctaatttattatcgaccaaggctagagatattcatatataattaaacaccagtcctagtgtaaaagatattcatatataattaaagttgagaaacaaatcaaggctagagacagacaaatagcaaattttatttaacagtatacatgataaattatataaagaattttaggattgaattgaaaacaaatatacaagacaataatgtatagaaacaaataacaaagaaatgaataatgattgtatattgtcaatattgagtacaattagagtatataattaatcagaggaatcttgaatgcttgcattcatcaggaagtttggctttggggaagcgtttcaagtcagtgcagtaattgtaaaccatgaacttctgctgcacccaccgcagcctgtttcgcccggccgcatccagcccttgattctgccacgtggcgtcattaaagccaccggagttattggcatcgcaactggactttccggcagaccaaacacatgcattggccttgaagttagcgtatgaagcagtgaaaggagctttggtccaatcagtcttgacaaggccacctcttgtagcccaatcatctgcattccacaagcttgagtaaatcctcattggttggtttttggggaatggtactcctgttgatgactccaagttgttgaacactcttattggaatgttgtccaccataaatctaattcaccaataccatatataagatgtatgatctatttctctcattactaattaattttgacataaaacccggtgtatcttaccatacacacaccctattctacctccaaattctaacattactaattgaatgtgattgatc

SEQ ID NO: 55517 - DNA, 1812 bp, Cannabis sativa
atcgcgaagttcttttttacaacgaacatctcaacaaatcagtaagtggcatttctctttgctaattttttcttcatgattttaatttcaattttttggtatgtgtttttctttctctaccttgttttgctacttaggtaatttgattttgagtgtttggataattctagggctagaaaatttaaggttatacaattcacagagttttttgggttttatttttgctcatttttctagaaatcgggacattattttttattaccatgtcataatttatccctgaatttgcaatcccagaatctttagaattggcttgtccttaaaaagagtcacgaccatggataatggtggtcgcgactactaaagcatacttgtcagcttcagtagatttttctccagttcaccctgtcttttcaacaattgattagaatttgaactctaataccctcgagtatctaaaacaaaggaaatcaagcataaaactatttcaaaagttaaattaacaaagaaaacaattgtaaaattaacctgtaacttaggctaaaaatcgaactcttttatcaaagtatctagtgatacggtgttgataagcagttgtgactctgtgtgtttttcttcaagtagatcaaggacatgcttagaggttcttgatttgttattgattgtagaattcatgcctatgggtcgcaatgtttacctctacaggtaacattgctttcgagccaaatatcagtgaaaatggagtgtgtccctttgatgttttctctgtggttctatggccccagagcacttgtggtccattcgcttgaggccttaacactgatgagaagcttttaattattttattcctttcacagaactcagtgaataaatctccatcaaactgagtaccgttgtgagatactattttaattggaataccaaacctacaaataatgttcttgataacaaaatcaagagccttcttgcatgtaatggatacttatggtttggcttctgtccattttgtgaagaagtcatctgccacaacaacatattttgtgccacctcgacctgtgggtaaggacccaatcaagtcaatcccccatattgcaaatggatatggcgaggtcatcattcttaactcggtgggtggtactcgaggtatgtgtgagaactgttggcacttgtcgtatctcttaacaaatttgtgtgtgtctttattaatagttggccagtattatccttgacggattatctttttagataagcctttccaacctgcatgatctccacagaaaccttcatgaatttctctgattatttcattagcttctgttggtaacacacatcgcaatagaggcatataatatcctcttctgtacaattttccttcgaccattgtatagcgaggaataaaatataagagctttcgtgcctcattctaatctgtaggaagttttgcatttaatagatacttgacgattggtgtcatctatgtaggccttgtatctatcatgtcaacatctttcttttcacatatacttggctcgtccagtacctctactaggaccaagttcaacttgttaagatcaaattgagatgccagtttcactaaggcatctacattagagttttgttatcttggaatatgttctattttgaaaaaatcgaacttttccaagttcttccaaactttctctaaatattaggccatcttcatggctttttgcttggtactctcccgagacttgatctactattaactgtgaatcaatgaagcacttaatgttcttgactttcaatgtttcagctattcttaatcctgctaac

SEQ ID NO: 55518 - DNA, 1271 bp, Cannabis sativa
tggtcataacttcttcaatataacgcaaaattagataattcaagatgtttcggaaagctgagaacgagatctaaaactttcatgctaagctctaagttcagttctctttccaaggtcatcaaaatttgtaattaagttccatgttgtacaactgagctcgccggctttcactattttctatcaaaatgtgctaacatcccaccaaatgactctaaataaatgattattctttaaaataacttaataaagtataatcacactaatcaataatttaaagaatcaatttaaaaatattaatataaaaattagtcatatttaaaagacaaatatggactcatcaaattcccccacgcttgactcttgctcgtcctcgagtaagttaatgataaaataaattatgctcaaacaaatcgatctttatgaaaaataatattagtttcaaaaattgtgcatccacttataattccaagaaaatcaaaactcttcaattattagaatttcaactcaagataattacttttcaaacccaattttttgtgcgtgtgttcaatcaactcatctgattactaatattttaatttaatttatgcatgtcaaaaatcaatttttatctcaaaataaatgtgtatttcaatgaaaatctactccttaagcttaattatcgaactattctccactaatataattacacacattttaaagatcaataagactttataggcttataatgtaaggctagggtgaaaggtagataagaaggttaatttaggctaaaatcacaccatagcatacatatacaacattatctcaaataattcccatttgtattccccaattactctcctcaacaattcaatcttgtatttctttttagcataaacttactaattcttccacacttagattgttgcaagtattgatcatttatattattgaaccttttttttttcaggtcattctcttttcattaactttttttttttttttacatatatcaaatacttgcaacttacaaacattcattctaggggaaattttttttcatcatcatttatacataaccgccaatattttcccctgaacacatctctcacacatttacaaataattcccatttgtattctccaattactctcctcaataatttaatcttatatcttttttcagcattaacttactaattcccccacacttagattgttgcaagtattcatttatatttcttattaattttttttttatgtcattctctattcattcaattttttttt

SEQ ID NO: 55519 - DNA, 2605 bp, Cannabis sativa
ttttatacaaactaaaaaatatataataacatcataaaaatagagcaacctcattacagaacacttaaaccctgtgaaactaattttgaggctgaaaaatcataacaaaatataaatgttaaataataaagctaactgaaaccagtttcaccaaacaactaaaccaaataaaaaataaaaaagaaaaagaaaaatacgcacacaaaaatacaaaaaaaaaaatattaatcacaaatataatcaaaacaacacacaatacataccaataatttgaaagctaaatataagtgtaagttcctaacctagaaacaaaataataattaagtaacttaaaattaaaaatatgcaataaataataacataatacaatagagcattacagaactctcaaaacatgtgaaaccaatttcgaacctgtaaacctggtgaaaccagtttcgactctatgaaaaatcacagagcacattttaaatctaaataatttttaaacataggaggttaggcctggctcattttctaaacaaataagtcaccaaagacacaagcatattctttgacagtttgactcgctcaatcaactagttaataagttaaaataaatatctaaaaatgagaaacacattttttttttcgaaaatcagaaccttcattgatatatgattctaccaaaaaataatggaacactcgtccaatatacttttaggtaaaactatcagcaaccagggtctacaaagaaaaaaaaatatataaatatataagaatataaaagacacacagggctggaaaggaaatatataatctgttaatttgataaaatcaaaaacttacacttcaatgaccatgaccaattattatacaaactcttctaaactattgggaacgggaaaagggggacaaaatgagttcctataatcccaaagaataatactaagagaaaaagggtcaattgactgtgctaccatggcttcaagtcaccaacaggtccagctgtccaattcaagactttcttagctggcttcaggaaaatgcttcgatcgtgcgacaactttcttgccagtccattcaaaacttgatggaaggaatctcctgattgaacaggctgtgggaataaattagcttgtttcattgaaaggttggcaagtaatctctgctttcttaaaatcggatccagtgggattgaagggttggcaagtaatcgcaccttggcttccaacaccttgacttgctccctggcattgacagaacaagtttgaagcagcccttttgaagatctcccatggtcattgcagtatgaagaagtcattttgatcttgtgtttgagaacctcggtctgtcttgtctgtcaacggtagaaatagcttcgtcggagctagtcgtggtcgtacgagggactagatcggtcactggagctagcaaagattagtcactggaaagagaagaaaatgagagaggcagccgactagagagaaagaagttgaaaaaattaggactgactacacaaacttaaaatattggatttgaaaattaaatttacaaaaatgtggcaaataaaataccataaaaaactttaaatttgaacaaatgccatagaagggtggtaaagtttaaaatgccatatttatgaaacttttttatgacatcccatatttagtgtaattttcactatataatataaacattaatcacattattatttataggataattctaatatttacttcgaaacttttacatgtactaagtcgtgtcatttaaatttttttaggtcgttaatttttttttaaactattgagattgttcgattcaagaacttctctctatttttactaatggatgcttaacgtggatgaaagttcagaagacacgattttgtccatgcaaagttcgggcacgattttgtatacatataaaagttcgaaaggtatgattaagtacatggatgccacgtcagtaaaattaaacgaaatttaataaaagttcttaaatccaataatttcaacatttcatttacatttatactttcaacacttcactgttttttactattttatatttgataaattacaatatattgtaacactttttttacattatttctctctctttttttgtcaaaaaaaaaaccttttctctttctcaacttctcacctccataacctatcaccgtcaaccactctgttgcatagtgcttgctgtcgccagttgctcctttattcccaccggcatagagccatcttcgggcctcgattgctgcctagaacccactccaactacttaccctacatctccatctttagtttttttcttctttatttatttaatttttgggaaatagatgcttggttttagtttcttgttagattaaggatgatttgaaattttatcctgcatatatatatgtataatctgccatgtgtttgttaaaatgcttaaagagtttgagtttttactatcgtaaagaaaatcccttgagccttaaatttccaaaagtttttgactggatccattaacaagagaaatttcacgcataataagtatgaaaaagattagatgatgatgaagattttcatagagaggaagcttcaaaaatgtttgatttactatt

SEQ ID NO: 55520 - DNA, 1986 bp, Cannabis sativa
gtggaccaataaaattgtgccacgggtccagtccaacctgacagttaacagctaaatttcgacggaagtgtgtttttactaacagaatagtggttttgggggtttacctgcagaaatttgagttatgagggtttagtgaaaccaaaaccaaagtatttggagttttgtccccatttacctttttttttttttttttaaaaaagaatactttttattatatagtcaaatataatataacatagaattaatgtacaaataaatatatatatatatatatatctaataactacatctaattatttttttattatttatttatttattttctatattttttttttcaattttggtaattttttttatagttacaaattaaaatatctattaccttttaaaatacttttgagaagtttattcaaaatagttttttaattgtatgataatttaaattaatttttcttacattatcatttattgatactcttcattctctattcagtatcattatttttttatatataaatttataaatcgttatatttttttttcaagatattgataattacaagtgagatacggtgatgacaataattttaaatatagtgacaagtgaggtacagtgatgacaacaattttaaatttgatgagtttcttatagatttatcaattgttatattttttttttcctaattctatttttttttatatataactttaatcacacaaaaataatatttatctaattgctaaaattctatatttcaatttaattaacacaaaagatatatattttaaaaaatgattttataaaaatatatgtccattaaattaattaattattatcatttattgagttcaaaataattaaaaaaattaagactctaaaaagattaatttatttttcttttgttattaagagttaaaaaataaaaaatttaatagctactcactattaaacaaattatataaaaatgttagaatttaaaatttgatataattttataacttaattatcactaaataaaatacaactccacgcgaagcacgatttgtttcctagttttaagatatctttaatgcattatctaatatatatgtatatcttttttttttttcttctatgggaaggtaacgaggttttttttttttctcaaaggaattaaaaataaaaatgcattacttaaaaaaaattattatatatattttttataagtaacaaatattatatttaatataatattttaagaaattactctaatatataagatacagtagtattttttggtgcaaattgataaaagaaattatcaccataataataaataaattaaatatttcaaaaaataagaatattataacttaaaaagttaatgaattataagttaaataaaaagtatatttgttaattattatgtctttttaaatttataaactattaacatatgataaaaaaatgacaaaatcttttacgtgtatttttttgggattttttctataataaactaataaaggcagcattttacatttataccctataaaagaaaaataaacataaatagaaaataaaagtttatatttacaaaaataacggcctaacaaaaaagcggaggaaactcctccttcttcgtgagcttgccgaaacaccctaattcaccaaatctccactgttttctttcaaaaactagggaaatcagctcacatcaagatgtagatttcaaggaaaaagtaataaaatcctaaaaaatccaaatacaaaaagggaaaaagaaaaaaacagagatattgacctccattgctgtaaaaaaaatgcaaaaacaacctacaaacaaaaactgaaagcgtacagaggagatgatttgaagagaaagcgatcagaaaaactttgaatcttacccgtaatcgaatcagagaaaaattcaaggtacaaaaatatgaaaaaacaaacatcatctaagcttccacaaaaaaactagaaagcaaccacaa

SEQ ID NO: 55521 - DNA, 1178 bp, Cannabis sativa
tcggcttccgtgaggaaaggctaaggttgcataaaaattcaagcaatatcttcgctttaaaagaccaagtgaaacatcactaggcgtgtgatagacttcaagttgtccttctcttccgcgaaggagggttaaagatgtatcatacccaactcatctttcacacagaaaaaaactacttgcatgcaagattcatgttgaatttatatgtagcacactgcgacttctgcaaggaaaaattatagttgcataaaaatgctagcgatcacttcacttcaaaagacaaaaaggtgaaacatcactgggtgcgtgatagacttcaagcagtccttctgttccgggaatgagggttgaaaatgtatcatactgctagtgatctttcaagcacgaaatattacgtgcatgcgagagtcatgttgaattttcatgtggcatacttcaactttcacgaggaaaggctaaatttgcaaaaaaattcaaacgatgacttcgcttaaaaaggctaaaggataaaacatcactgcgcgtgtgacagactttaaacagtccttctcttccgggaaggaggtttgaagacgtatcatatccctagtgaactttcacgcacgagagtcatgttgaatttttatgtggcagactttgggttcctcgaaaaaaggctaaagttgcataaaaattcaagcgatgagtttgctttaaaaaaccaaagggtgaaacatcaatgggcgtgtgacagacttctagtagttctttcgggaaggagtgttgaagacgtatcataaccctagtgatctttcacgctaaaaaaaactacatgcatgcaagagtcatgttgaattattatgtggtagacttcggcttccgtgaggaatggctaaagctgaataaaaattcaagcgatgacttcactttaaatgaccaaagggtgaaacaagactgggcgtgtgaaagactccaagtagtccttctcttcagagaaagagggttgaagacgtattataacaccactgatctttcacacacaaaaaaactacatgcaagtgagagtcttgttgaattttcatgtggcagattttggcttgcacgaggaaaggctaaagttgcagtaaaattcaagcgatgactatgctttaaaagaccaaagggtgaaatatcactaggcacgtgatagactgcaagca

SEQ ID NO: 55522 - DNA, 1391 bp, Cannabis sativa
cctgcaaagggcaaggtctggcctctcgtgatgcttctttggctggccagacctgcattgggcagggtttggctgcccgtgactcctcggttgactgccattggttgtgtattgactgagggtggatcacgccaattgctaaagtttggtggatctagattcctaaagcgatgaacttcacttctcaaattgctattttgggtgtttccacccactctcggtcctcgtcggtcgaagatcgatctctgagcacctcgctccccttggggaggaagtgatgtaccctggctagccatgggtactcctattgatggctggccaactagtggctacacaatggggcgtgctgctaagccagagatccctggctggtcccctaagccgctggttgtcaagatctggctgttcttgtcgtttgacctttgaagaaaggtctgtcctccttctggcaggggaaaatctgtcctagtttctgaggaacttggcgacagtcttccttgaagtggatccctaaggagatcatggcctcttctgtcgattctctaattgaatgtcttattagatcagtggcctcccggttgcagcgatctaattctgcttggtgagatcgaaggatgtactcctggtcatccatccatctcaggagttcgcgtctctactaagtaaaaacatcacaatcagcaatgtgtggttctttagttaggcctgcacgacttacaacttcactgagtctggccaactcaaggtcttctcctaggtccaggtgaggctcgccaattgctgttacacgactaagaggccatatgttggtacttggtagtgttaggagaactatgtggttttgttcattgggtcaattgttggtggaattcttattatgcttttgcaaatactatccgttttaggctctatttcatgttttatttgggtccaaaattgggttttttagtacatgtttcagtttagtaagatgtgtgattaagctaattttaattgggttttttcagttaataaattttaacaaatccattatgtatttttcgccaaatacgcctgagaatttgcaaactcaatctgaggaaactttgcatctgtaaactactgaagccattgtccaatatctaggtttacctatgataagtggtcgtaacaaacagagaatgtttatgtaatgccctaatgctaaggcacattacagtgctttttcaattacaatgctatctttgctaatcaaagatttttctcaaaaaatgtgtcaaattaaaactttttataatgaatattaaactttgtaatttacataattatttacaaacaccgggatcccgtttctaaacttttatacaaaacatgccaaaacacaatatttaggtcgcacagcgactacaaaa

SEQ ID NO: 55523 - DNA, 804 bp, Cannabis sativa
tatatatatatatatacacaaatgaacacttttactttctttgtgtaatatgagaagaaactttatatctctagctatatatatacttaattaactagctctcatatctcggtcatatattcacacatagatatatacatacacatgtttatgatccagcatgggtttaattattagaaatttctctcatgcacttgatatatatatatatatgcatgattagttattatatatctttagctatatgtttattgattagatagggattttctcagtgatcttcagtagtcatatttctataaatatatatatatatatttggagaatattgcatgcatgaatgaattgatcattaattatcaaagttaatgatcatataatattattaatctattttcaggtggtctttaatagctgggagaattccaggaagaactgacaatgaaataaagaattattggaacactcaccttagcaagaagctaatcaatcaaggtatagatccaagaacccataagcccttcaataacaataataatattaataataatcaaacaccaccaccactacttcatcatcctcatcatcatcaacaacatgatcatactaataagatcatgatcatgaataataataataacaataatattcatcaagcacctccaataatgttaagtactgtccctgaagaagagcaagaagaagaagaagagttattagctccaactacaacaactactcatcatcatcatcatcatcatcataatattgaagctattacaccaataattaataataataata

SEQ ID NO: 55524 - DNA, 1668 bp, Cannabis sativa
catgattgagctaacgcataaggcagagacacatgaagctatcattgacgagaggactcaagtgactatgatacttgagtcgctgtctccttacttcaaggctttcaccacaaattatgtgatgaacatgctcgagtttaactctcatttctcttctggtaagaaaaagaagaagaacagttaggacaacaatggtggcaagcccaaaggccagaagtcacccaaggccaagaagaacaaagctagccccaagtccaagaataagtaggctaaaggaaactattccattgtgacgtaatgggacactagaagagaaactgtaacaagtatctctccgaacttaagaaatataaatatgatttattttttcttgaagctaacttagtggaagatgatgaatccttatgtattattgattctggagccactaatcatatttgttaagggaactggccgatggggaagtgactatgcgcgtggataatggagcataagtgtctgccaagggtgttgccaaatttaataataaatttttgttattgaaaaatgtttattttattcttgaatgtaccaagaatattagttctttatctcttttgcatgaataatttttcaatattagttttattaataatgagattattatttctaagaatggtgcgcctatttatttttcaaatagagtaacaaactttatgtgctcaatccaagtgatcaattaattttaaataatgaattgtttagagtagcattgcctcaatcaaataagaggcaaaaagtttatgacaatgatgaaacgtatctataacatctatgtttaggccatattggcctagcagaataaatcgattaacaaaggattggtcctttgagaaaactaaaagttggaactcttccgatgtttgagtcttgtttagaaggcaagatggcaaaagaccttttttttgtaaaatgtaatagagctaaagaataacttgagcttatacacactgatgtgtgtggacctattaatattcaaactcaaaatggctatgaatactttgtcacttttattgacgattattttagatacagtcatacttacctaatggccaagaagtctgaaactttcagaaagttcaaagaattcaaggctatggttgaaaaagccattaggtaaatcattaaagatactttgatcagatcgtggtggtaagtatttggatttcgaattcaaagactattttttggaagaagggatcttgtcccaactcatagtacctataacacctcaacataacggtgttgcagaaagaagaaactgaaccttgttagacatggtcagatcgatgatgtattactcatcactgtcgctaaacttctagggatacacacttttggcaactagttacatttcgaatgtagtaccctcaaagagcataatcaatactccaatggaattatggaatggtacaaaacccagtttgaaataattctgtatttagggctgtcctgctcatgttcttaaaccaaagtttgtgaagcttactcccaagactaaagtgtgtatatttgtagaatattcagatgagaatcgagatgcctatttctatagtcatcaaaacaataaagtatttgtattaacaaatactatttttcttgaacataactacatgaaaagtcataagc

SEQ ID NO: 55525 - DNA, 652 bp, Cannabis sativa
tgtattaagtacatcaacgtatgcgacttgataagctgcgagttgcccattcatattctaacacacgagctcacaagctctacgatcctgtactcaccggatggccttcgagcctatcgtttggatgtctgcgttcatcatgatcgcataatcaaacattccatgcattgacaacgcggaacacgcgagtccctaacgagtcatcgaacacattagtcattcagaccaaacctatgtaaagaaacattatttactagttgcaggagaggtctacttggtcatcgctataatcggtatgcactaccagtattcaatcctctcggtcctacttattcttttgactaagcgagacatagtatgcaactagatcctgtctcagtcgcatcttcttgtaagttcacatcaagcaaggttagctctactagagctattttatgacacattatcctttcaatcgagaattgggcccatgtgtcagttttataggagcctgtacttgtatttctagtccaaaattttgcactagaacactttcgttacacctaaattctaacttcctgatattcatacatcgagtttctgaccactaactttgttgacgagtttccactgtcaacaacaacttgtcaacaacgccgtaaccaattttaat

SEQ ID NO: 55526 - DNA, 1218 bp, Cannabis sativa
agctttattcaaaggacttacatcctatgaaattctacacaataaacccccttaatatgatcatttgaggacatttggctgcttggcctatggatccgcacttgtctccaagcgacacaaattcacccctcgcagccgtgcctctatttttattggctatccatatggtatgaaagcctatactttattagacatagaaactaatattatttaccactctagggatgttaccttccatgaaaatatgtttccttttttctctcacaaacccaacactgatgttgaactttgtatccctcatactgtgataccctcccatcacaccatacaacctactgctcctacagagcaaataccaaagacagtttcccctatcagtaaaccaactgctcttcctgagcaaaatcaacaaataccttccacggtcacaacaaaactcagcagagttgataaatcaactgatcctgcagcagaattcctacagaatacaaaggcacctatgatcatttcacctgcttctactgtgcctataaaacagaccaaacatggtcgaataacaaaaaaaccatctcatctagatgcctatgtttgtcacacagcctccactatacatcccattgaacattttctttcctatataaaacttaatcctgaattctgtaatgctgtattagcagcctattctgaaattgaacctcaaaactatgccgaggcatctcaattcattcattggctcaaggccatggacaccaagactgaagccctagaaagaataaaacttggataataaccaagttaccacaaagacaaaaagctatcggatgcaaatgggtatacaaagttaaatataccaaagaaggagttgttgatagattcaaagcaaggctagtagcaaaaggctacaaccaaagacaaggaattgactattcccaaacctttgcacccgtagcaaagttcaatactttaaaaatcctactagctcttgttgccatgaataattggaaaattcaccaattagacatcaacaacgctttccttcatggcgatcttcatgaagaagtttacatgaaactaccaccggggtacaaagctcccacaaactctgtttgcctcttaaaaaagaacatctatgacttgaaacaagcctctcgacaatggtattctaagcttagtaccacacttctcgaagatggattccaccaatcctcatttgacaac

SEQ ID NO: 55527 - DNA, 1050 bp, Cannabis sativa
taacaatggattttcatcacaagtgtcttccaagtcataacagggtgggtttcttgaaaccctcccaaggactgctttccatttccacatattgatcagttagtcgacgccactactggacgcgagctcatgtcattcatggatgcttattccggctacagccagattgccatgaatgtcgctgaccaagaacatacaagttttaccactggcatggaattatattgttacaatgtgatgccattcgcactaaaaaatgctagcgccacttactagcgacttgttaacaaaatgtttgccactccaattgggcaaagtatggaagtctacgtagacgacatgccaatgaagactaaactagcaagacgacataccacatgaagcttaatcctttgaagtgctcatttgctgtttcatctggaaagtttttggatttcattgtcaattaacccagaaaagataaaagccctcatggacatgccttcacctcaaagaaagaaagatgtgcaaagccttactggtcgcaatgcggcactaaatcggtttgtatcaaagtcaaccaacaaattcctatcctttttcaacttgcttcggggaaacaacaaggtggaatagacaaaataatgttaacaagctttccaagcacttaaaagcacttggcagagccccctattttttccaaaccaataataggagagatcttatatttatacttgggcattactgaaacaaccaccagcacaaccttggtgcgagaacagaagaaggcccgaaaaccagtatattatgtcagcatgcgcctcttgggggcagaggcaagatatccagtcatggaaaaacttgctttttacctggtccatgcatcgagaaaactctgcccatatatctaagcacacccgatacatgtactcactaatcaaccccttcgaaaagtgttaatgaaataagaagcttcgggctgaatcctcaagtgggttgttgaattgggacaatttgaaataacttaccatccaagaaataccataaaagctcaagatctcaccgatttca

SEQ ID NO: 55528 - DNA, 930 bp, Cannabis sativa
attctagattattgggtctagacttaaatatgtaatattagttacttctaaatgttattttaataaattcaaaacggagttgtactaatgatataatttatatcactcacaaacttaaaactttaagtactcatgtgctatttattctaaaaaaaaaatatgtttcaatgcgacatccaataaattttgttcataaaataaaataatgtgcatttaattattctttgtttgttaatgtacttggataggaagaatcagaatatccaattttagagcctctaccttcttatggattagagaaaaattccacaggaaggttcagtagtctaattatgggaacaaatctcactgatgttgtaattacaggtaatcaaattattgaattaacaattttatatgaaataaaatctagattttgtttctaattaataatagtttatttaatcgaaaaataattattaggaaacaatggcacaatagatggtcaaggtaaaccttggtggaccaagttcaaggctcgtgaattaaatgcagttaggccattgataattgagattttgttctctcgtgatattcaaatcttcaacctaactttgcttaattctcctttttggttcgtccatcctgtatactcaaggtttgaatatattatcctttttttttatgcttaattaagatttttgtctctacattttgacatgtatcaaattatattttttaaactttacaagtcgttaaaaatttatcctgagttattgagatagttggatttaaatacttttgtctaattttattcaattttgctaatgtgacaattatctatatactaaatcgtgcttccaaattttgatatttataaaattatgcgccctgaattttaatatgtatcgaattgtgctcttaaattttctttcacgttagactttcttt

SEQ ID NO: 55529 - DNA, 1075 bp, Cannabis sativa
tataattcttgatttccagtcaatttcatagcacctggtcaacaagaagggtggagcttagtaaaaaatgaatggattcaaaatccatcaaatcttgtgttctaccttggagaacgctttggatgcacgtgtacgcgcaagtatgttccagtttcaacaaactgatctacatgtgttatccggaaagttttctgagcttctcgtacggttttacctttgatggaagttctatttaccaaagctgaaggtgctgtgtattgcttgaataactttacttgctctggtgttgcagttggaggaggccttggacataccagggcataaaatacagctccgaaatggatgagatctgcaacaaaccttcaaaccataaaaatgttttttttactaattactcaaacttcttataacagaaattaattcttatgcattgacaaaaatacaacatgactaaacaggaacacttacaaaggaggaagatccagagctttacatatgtaatcctgaacacgtcccccttcactaacaaccaaatgttcaactcttggaggtaaattgtgcgagggacaaggtagcaagcgatcatattttgggtagctgatttgaatttaaagctttaatgttagcaaagcaaaaatcatatgacaaaaactataaattaattagctagaagaatccatctaatatgtgtgataatcatagctccactgtgcattgtaactacgaatggtaccttaaacaatggtgataaatgtatgatccttaacgtgaaaaggagcaatgttgaagcattgaaatacacactgaacaaatatggaaaattggagaatcccattgaaaaataaaaagttcaaactttcaatattaaacgttgtaaagcttttggtccgctacatattcattaacgtcaacttccaacgaacccaaacaataaacaaaacaaaacaaacaaagagccaaaaactgagagaacgagaatatatatatagaattccattttctattggtgaaaaacacttaaagttggaaaatttaaggtacccatttgcagaagaatcggtattgagatcggcaa

SEQ ID NO: 55530 - DNA, 1764 bp, Cannabis sativa
gagctgaaacttttgctttctcttcaattttggtgcaccaattaatgcagcacaaaataaaggttcaagttgagaaggcagacgaagtatggttttacattggaagaaacgaggcaagatttggcgtggttgagtttggtctcataaccgtgttgaatttcacgcaagggccatccattgaagagaaaaatgctcacttgggaaacgaccgattgttgaatctttatttcaacaaatctgggaacgtgaagatggaacatcttactgcgcagttcttaaactgtgagattgtggaggacgtttacaagctagggttgtgcttgttcgtggagggagtcctaatgggtcgtgagagggatacagagattacaagtggtatactaagttttgttgaggatattgacttcctttttcagattccttggggatgtgcttcttttagtcggcttatgtattctgttcagaaagacatggtaaaaatgaaggctaagttagataagaaggaggtcaccgagtcagcggggtacacaatttatggctacataccagcattacaatattgggcctacgaggcaattttagaagttggaaagaagttcgctgttagtcatgggatacaagtacccaaaatgcttagctagggcagtaaggagattgatggaagttatgacattccaaagaaaatacttgctccaatattttttaaaagggtatgatttttttctatcagtattgtattatttatcttttattgatatcattgataagttgtattttttctctatgttatattctgtttattttttttataggtttgggaaatgattctaacatgtttttttttcaacagcaattgaatgttttgagagcattacttcctcgccctgatgaagaagggtatgccaaaacaatcacatacaatgatattgaaatagtgattgagatgggtgtcaacgagaccttttctgaatatgatgccaaggaccctgctgtatttcaaagccatgcagaaaaagtcgcacaacatatcaaaccttctactattgcatcttcttcaggcctcgatcgtgtggagttccaagatttggtacagaggttagacaagatcgaggctgagcataagtgtctttccacttgtcaggcccagttgaaagaggcataccaggctagccacctagaactgaaggctggccagaatcttattatggagcagctcaaggtcattttgagtataatacataataggtcaggagcagatgcacgtcctcaatcgcctcccatggaagatgttgacgtactgcctgacgactatgatccttatgttgatgagaatacttctactccagcggatgccaccaatatttccatagtggagagtcagtcagagggtgaggtactaccgttagagagaccaccagaaggtattcagtttcgaaagaggaggaagacccctcctacatggtttaaagactacactgaaatgaagaaaaaactcaagtcatctacgccttttgatcctctcgtcccaccagatgataggttgttggaaagttttcgtaggtggttgtgtgggagtatccccaaacatcgtcttcgggacattaagactggtgattatggtcctgtatggtttacgaagatgttgatatgacaggattggattgaagattctgtaagttaacatatattattttattattacaatttaattttagtttatttaatttactaatgtaactactcatttgtatcattatatgcagc

SEQ ID NO: 55531 - DNA, 1206 bp, Cannabis sativa
aaaattattttttacttaaaaaaaattattaatttaatatgaagtagaattatagtgggtaatttttaaagttgagtattttttttttaagaaaatatgactaattttatgtacatgaaagaaaaaataaaaagataatattttaagataatgtatatattaaaatttattttacgagtatctagatttactaacatgtatattgaataattctataatctaacaccataaatatgaattcttaaaataatgaaaataaatacatataaaatttagaaaactttatattggtagcagcgaaatattatggctaattctgttcggatctctaacccttgttcctttctgttgcagagtaataacaagatctaaatttggatctccttcaggtattgaattcttcacaatctttcacactatgattgagtacttgacttgatatgagtgggcatgtattcttcactatggttcgaattgaatgaagaagaagaaggaatgaattttgaaattttatagaaggaggctcttactttatagttgtctaacaaataatgaaaactaggttattggatatttttgagaaagagagcatcttattgcttttaggggtcatttggtatgcaagtttcatttcatgagaataggtttaacattgttaagagtgatgaagggaatgataaacctaggaaaacaacattaccgtgtttggttgtgcacagtaatgttatacccaaagtttggctgcacttcagaagttgacatgtgccctttagtggaatatgaattacttgatataataaatcataaatattttaataaaaaatattcacaactcgcagactatatagccttaagcgagataagaataaaaagctgttaaaactgatattgacgagatacgcgcttgtctcgaggtacatagtcacacatggcaatctcagattacatatagcgagacggtcacctcgcaatcttaactcgaacaaagagacataacgaggcaaaccatctgccaacacttagcatttttttcacatcacgatggataagggggataactcattttaagtgagatacaatcgtccaaatcagcattaaccatcgaaaaggataagaacaaaaggcagttgagcagttaagcaattatcatatgttatcccacatacatttaaatgaaacatgtgaattatctacgtttcatgaaca

SEQ ID NO: 55532 - DNA, 3562 bp, Cannabis sativa
ttttttttgataaatactattttgaattttttaagataaatatcattttagattatttgttttgcaaaaattattaattggatcctctattttattaaataacaaaatgaactttatatttttcaaaatggtaaaaatagattattgagttcaattttcaataattttattttttaatataactaacttttaagataatttctaacacgaacagatacagaaaatttaaccagttttatcataacatctctatcagattattataaaattttattttgataaaaaaaaaaaatcaatttagggtcctatttatacaattttagaaaatacagggtctattttgttatttaacaaaatagaaagtccaattaataatttttgcaaatacaaagtccaaaataatatttatccttctttttttcttcataattttagtacaatgatttaggatcatgtaattttttttaaaaaaattaaataatttataatgtaaaaaattacacataattatttttttaagtatggtaagtaattatttgaattatttttggcactataaattattcaaaaaaatttaaaaatttataaataatactaaataactaccatgtatatatgattattaaaaataaaaaaaaattaaaaaactcaactaaacactgaaacagataaaaaaatatacgtcaacaattcttttagaggactgtaaacatacccatactatatagtaatactaagttttagtgacaaaagtagtctattttttttttgtaaaaaatgtggagttattttttatatttattattaataacaatttgttataaaaatgattaactttttaaatatgtactaaaaaagtacttggataataacaataaagtaagagaaatgttgggggaaaaaattaaggttcttgttcttaaatttatagttattggaggttgtttattttctttcgccaggcccgctgatcttcccttacggcttagtcagagttgtgttttactattgcgattcgattttcattactgcaaccagtcttgcctctatgacatagttttaagtgtttcaatcttgtctcggttataagtgttcaatattatatgtgtgacatgtttttgtttattttgttttgttgttagttcttttttgttcttcaatgactcgtcataaaatcattgttaatggttgtgaataataagttctcaacgagtgaaggggttgttagtattgcaattacgtgccttgcactagttgagtgcttaagttacgatactgaatgaacctgctgcaacatttcatactgttgtgtcttctgagcggtggatgaaactaaatatatgtgttctcaaagttaactgtaatgttacaatctttttcatctgattttacattagttttattattaaacgacttaaaaattagacggttaattatttgactcatttttctaattctaactatggtcgtgtctccaacgaagagatgtctcgattggattgcagactattattttagctaattactattaataaaattgcataatttattcaatagataaataaataaataagagaaatactatataaagatagggtaatttgtagcataaatacttaagtttaactctcggttgtaaataaatacctaagtttaatttttgatggtaataatacttaagttatatttctggaactctgtaggtatctgaccgttaaatgttaagtcattatccacgcgttattttcttattggtatatttaaactaatttgttttttaaaaaaatgacttggaccaatcagggattgccacgtggcaatttacttaacacttaacagccaagtacctacagaaattctaaaattataacttaggtattactaccccaaaaaattaaacttaagtatttatttataactgggagttaaacttaaggatttataccacaaattactctataaagataactactaatgtcaagtattactacaagatatatcataattaagtagataaaattttacatattttaatttaataattattataaaaaaaccctaatttggtgagtaactttagacctatctcatgttgtaatgtgctatataagattgctacaaaactaatatgttctaggctcaagaacatccttccggatttagtttctttaaatcgaggagggttcattaagggtagatatatagcgcataatatcatgatctgtcaggacctaattaggaactatggaaggaaggggctaaggccaattgtttgattaaaattgatctacaaaaggcctgtgacacattggattgggatttccttgaggaaatgatggatgctttgcaatttcctaggaaatttactgaattagttatgatttgtgttagaacgcctaagttctctctaatgttcaatggatccatgcatggtttttttgaaactaagagagggcttagacagggagatccaatgtctttactgttatttgtatcaggcatggaatactttagtagattaatgaggaaggttgggaagaaaaaagagtttggtttccatgaaaggtgtgctgatatggaattgaatcatttaagttttgcggatgatgtcctaattttttgtagagggaacttcaaaaggatctacttaatgatgcaagctctcaaattattctctatcacttcgggtttggtgcctaataatgctaaatcagcagtatattgtagtggaatgagtgagaatgaggttagaagggtgcttgacatgtccggttttacaaagcaacatgagccttttaaataccttgtagtgcccatttgtgctaagaagatctcagctactaattgtagtagtctagtccagaaaatggtagctagaattaggatttggagctcgaggcacttgtcttttgcgaggagattggtattgattaaatcagttcttctctccatccatatatattggtgccaaattattttccttcttaagcaaataattaaggagctcgaagcaatatgtaggagcttcttatggacagggaaaagtttgatgaatggagcaggggctgtagcttgggaaaaggtgtgttgctcaaagaaagtggggggtctatgactgatgtatattcctcactggaatgcaacagccatggtgaaacatgtgtgggcaattgagaaaaagaaggacaatttgtgagtgaaatgggttcatagtgtgtatattaagcatcaatcttggtgggagtacaaagctcctttgaatggaagttggtattggaggaaaatggttgagcttaaagacaaaatcaaaaactatgtacaacatagtgagttctcagcacatgattacaaaattgtggagggccaagcttggtttgctcaagagttcgaaaaggtgccatggagcaatgaagtgtggtctagattgaatacaccgaagcatagttttgtactatggctagctatgatgaataggctcaaaaccaaggatcgattactcaagcatggatcgattgacatagacacttgcctcctctgcaactcggctgctgaaacagcagag

SEQ ID NO: 55533 - DNA, 670 bp, Cannabis sativa
  modified_base (621)..(633): a, c, t, g, unknown or other
gaaaacaacaagaatatgtaattattaccaattcctacattgggaacatgttacttttggttttattataaagttttatggtttaatattttatattttgattgatgctttttgtttgattaattatgtgttcttcatcactattttttgattaaagagtggcattatagtactaaattgaattcactacaatatatattgataaatagcatttttttttgcaagaataaatagcatggttaattgagaacactactacaaatatcagaattcgcgaaggttctataaacaatttatttcgggggcagtcgttaaaaaaattaagtaattatttaaaaccgtcgagaaaaatttagtattcccaacggtttaaaatcgtagtaaacaaaataggtaacgttttttaataaaatgtaattttttaatcgtcgcctttaagggtacattaaaaaatcgtcacctacttctcgccacattttccacatgtctacctactttttttttatttctcacatgcccacctatttcttctccatttcccacatcctaaaacgaaaatctttattctccaaaaccccacacatgcctccgcactatgccctcctctctcgccgtcttccnnnnnnnnnnnnnctccctttcttctcgtctctctcgtccatcgatctcc

SEQ ID NO: 55534 - DNA, 714 bp, Cannabis sativa
attttgttataacacatttagactagattattattaaatttttttttgacaaaaaatcagttcagagtcctatttgtgcaattttagaaaaatacaaggtccatttattcatttaacaaaatagagggtccaattagtaacttttgcaaaacataagattcaaaatggtatatacccttattttaatttataatatgaatataacaatatattatttaaataaaaactatattagtttaataaaagtttatttaattttttttaattaatctaaaaatgaaattgaaaatgaaacctcctgtcattaaatcccaaattatatttgctcttaaataaaatatatatatacataaatattttgtaagaatatattgaatactaattataaaaaccccacgtaataatagaattaattaaaatcccacatatactaaactaaaataattttagctacaaaattatacaaattaactattaatcaaataatttgtcaaaaatattttaatgagtttttactaaaatattttaaatatatagttgtcgcataagagtaaataagtggtgaaagtaaaaatacatttaaagtgtgctctaatagtgtgccaagaagtgatataaatttggcacatagtaattaattttgtgccaaatttggcacaatatttgctatgatgtaaaatttacactacaataaatgcactacttttttattta

SEQ ID NO: 55535 - DNA, 1791 bp, Cannabis sativa
cagtgtaattacatggtcagacaaacatgtcaaattgtgtaattacctctaattacacacaatccaattatattatggctttccaaacgcaccctaaagaaatacataacagtatttaaagatgaaaaggaaaactttgtaaataatactctttccaaacagtccttaatattctttcaattattttatacccacaaattactgtaattattataaaccacacaataatgtaagttttataactcgcaacacattaacatttttatatgggttttttttcgtaaatatggaaaaatatggtaaagtttacttttatatagtataatatcaaaaaatatgggattaaaaaataattaaattagaaaaaaatgaaaaaaataataaataaattcaataaaacttgtaataatattttttgtcggaaaagtcgttggtgtcagaaaagtcaccggaaaaatcgttagtatcaaaaaagtcaccgaaaaagtcagttgccggaaaagtcactggaaaagtcactaaaagtacatgtctcaaatataaataaaaatagaaccagttcaataacataatgaataaaaacaaataatacaaaataacttaaaccaattataattaaaataaaactagttcgataacatactataatggaaaaaaaaaaacacgaaataactcaaactgattataactaaaatagaaccaattatataacataatgaatacaaataagtaacacgcaacaactcaaactaattacagttaaaaaaacaaagagaaaatcagtttctaaaacactgaaacataaattaaaaacaaaactagttccacaacaaaatacctcatagcacataatatcttataaaaccagttataatttttttaaaaaaaaactaaagtggggcttaattctaaaaaatattgaggcagaaatataaaaagaactggtttaataacaaaataaataaatacaaataataacacacaataactcaaatataatataaattataaagaaaccggttatatttatcaactaaaagacaaaaaaattgattctgtaaagcaactaagataaaaacctacacacaaaaactagttaaataaaataactcaaacaaaaatattcattcaacatgctcaaacctacaaaataattacacgcataccatatctacaccaaaattattcattcaatatgttatataacccggtttgagttattttgtattatttatttttattcattgtaacactgttatagaaccggttctattttaattataactggttttagttcttttgtgttatgttacggaactggttatatttcaattataaacagtttgagttattttatgttatttatttttattcattatataatataacaggttctatttttatttatatctgagacatctacttccggtgacttttccagtgactctttcagcaatgaagaccttttcggtaacttttctgggaactgttctggtaacagtgacttttttggcaacttttctggtgacaataacttttctggcaccgatgactttccaacactggtgaattatctggcaaaacttattattattttgaaaaatatgagatttccatcttttttacaaaaatatggtataaaaaagcccatataaatgtaaaaaaaaaaaaaaaaaaatcccataacctcatgatattattttcatatattgtctaatttcacttataattttgcaaactggccccttggaaaggcatatatttcccgaccataatagaagcccaaacatt

SEQ ID NO: 55536 - DNA, 650 bp, Cannabis sativa
atgttatgttttattaaaacctttaataattcattattgacgaatgaaatatagacatgtgaatataatggtaatcataattcattatataattcattatctaagtgtaccaaatttgacattttcaaaaattacaaatatagtgctatatatgttatgtttatttagatatataattaattaattccactatctactctcagcttgaacgcgtaaaacaaaggaaaaaaagtaaaaggaaaatagggctgcagaagtatatgttatgtttgggtgcatgggagggctttcattatttttattaccaagttttgttcgcagttgcatataaatacctaagtaaaaattttggcggtaaaaatacattcggttaagggaacttctataggtacctaatcgttaagtgtcagataagtgtttacgtgtcatcatctcattgatcgaacttattaattttttttatttatttaaaaaaatcatttacatacttaaaatttaaataaaaattcattgataaatatatttttttaaaaaaacaacaaaatcaaagatatattaaatttttattgaattaaagttttttaaaaaaactaacctctaaatcagagagcaaagagaggaaatagagattgaatataggattggttttc

SEQ ID NO: 55537 - DNA, 1737 bp, Cannabis sativa
atattttttagcctatctgatttctttttctttctctaaaatgatacacgatattatcattattttttgccaatttaatgagatgatgatgaacaaggcgggttaggattggtgcaactggattcatgcaaagatggtgaggaggtcgtggttcaggtaaagagaagtcgaggatgatgatgtgatgagagtgaggtgggcggaggcttttctaggctcaggtcgtttctggatttgatgatggtgggaaaagaagagaggagaaatgtgattgggggtctaataatgggatttctgacgaatggaggtggaggggtagatggtggtcagggtggttatggttcaggcaaggggaaggtagagaccaggtggctatggtggttaggacagaataggaagaagacaggaaaataggattttctgagaaaaagaaattcagggtatttgagattattttggttaggatattatttgaaaaattatgttttagttttggttttttaattttttttttcaaaaattccttccagcttacaaagaatttagcctgttgtagaaatatttcctcaaaaatccagcaaaaatattactgcagcatgcaaacttctccaaatcaacgacaaaaagccttttgttcatgcatgcccagtttagctgcagcaaaattcaataaaaaatctaacaaaatcttcaaactgccaaatcacatccaaaactctaaattatgctccaagaacacctaaaacataaaaccaagtgtaaaatcctcccaaaaactaaaaataaaaataaaaataaaacaaaataaacataaacataaagaaaaataactctaacatgattatatataattttaactttaatattttattaatttttttctttaacaaaaatatttacaaaatttgttttcttccaacattcggttgcttcaaaaaggatttgacaaatccaagcataaggtaacccaaccacctttcgcttcatgcatcctccaaagtgattgaggtctttctcgatcaacatcaccacccaaataatactttagacgctgctcattcactttaaattcctttctgaattgctttataaacattcacaatttcatggggataaactttggttctctcatgagaatcatgatttgtcacaatataattatcacaatatagcttatttttgttttttgttttttttttatgaatcagctttagctcaatataagctggttttgaatgataaatataatggtttgccaagtaattttgcatgtggtatttgcttagatttatattcagtaaataaagacaatgaatctttgctaccaacatctgaggttagaattaacaaccacaacatgaaattgcagacatacgaagaagacgagagaaaataattaaattttcaaaattttaattttaaataaaaaaaatagaaaacaaaactcagttatcgaacatacttttttttgaaattttacctaacacactttcaaaagatttctttaatttttattaaaaacaaaaattcaatttaaaaaatactaatataattaatattatatatgtttgtatgtatactaatccattttcactttcattatttaaccaactaaaatacaaaaaaaatactcttataagtgaaagtaaaaatgatgctctcacttaatgactataaatatatatatatatatatatatatatactagtaaaaaagtatactaaattttatgctagt

SEQ ID NO: 55538 - DNA, 1465 bp, Cannabis sativa
tttctttttctacataatctcacaccttttttttttcggttcaattcataatgtatgattcataataatctcagatctgctttagtataatcataaaaataagtatttatcaattaataaataataacttaaaaaattgatcatatttataataatattaaaattaataatttgtttattaaaaaataaaattcttttaataggataatcgaaaagttatattattagttattaagatgcttaatatttatactattaataaataatatctagaattttaaattgttctattaaaaaattaattattaatataaaaataaataagtatggtgatatagaaaaaaaattagattattattattgttgttatttgctaagaattatttaagtgaactgtattctttcccataattaatattatttttctgactcgattattcaaaattattgtcatcgttctatttcacacgatgtcattatcgtattgtatttatagttgatcgtcaaattattgtctccaataagtttattcaatacataaaataatgagttataattacataatttatacataattatttaaaaatatttagttataaaaaatagatctaaaaatattgagaaatttatttaaaaaaaataaaaaactcactatctaatgttgaatgatctataaatcgattgaaaactcattatacaatatttgtaattatattctctactcaattatatattgtaattattttttttattattgattattataaattatatcgtcagagttaggattttttttcttcacttttttacatttttttaaaaaaatattgttgagactttattagacttagtttgataaatttattaattattttgttaattaatttttaattggcattatggacttaattattaaaaaatgaaaaaaaatcgattaagtaattaaaaaaactattatagttttattaattataattataaggatgaattaatttattaatactatagttatagatattatatgtacatatagggtaggtcattatatattagattttagtttactttttttttcaaaaaaatatggtcctgaaaaatgatttaaaaattagaaaaaaaaatacaatttttggttcaatgttatatttatatataatgaatagataaaatagagtttggaaatattatttaaataataccaatattatttattattttttctattctatcaaataaaataggatagagtttgaaatttaaaaaattaatttatgcagtcacttttaactaattttttcatgtgtatatataaattatttttgagtaacaattatattatataaatttttatcgtagctttcttgagaaaaagatatttttttatagttagttattaaattagattttttatttcgttttaaattaaatatagattttttttattagttacttatttttagaaaac

SEQ ID NO: 55539 - DNA, 1553 bp, Cannabis sativa
aacacatgtcctcctgctaagtcaccttacatgccctcttctgacattgtagatgagatcttttacttgaagagtgataccatgaagagactcaaagaggagatcattaatggtggttctccaagtaatgtcactacgtttgaaatacttgcagcctttgtttggaaagcaaggttgagagccttagagctcaaccatgatggaaaaacatgtctatacttcgccacagggctaaggaagttgatagaccctcctctacctgaagggtattatggaaatgcatttttgacatctgcagtggaactcactggtagagaactcgaagaaaaatctttatctgaaatagtcaatatgataaaagagaagaagaaggacgttttggacaacaactacatcaaaaaatctattgatatttgtgaaacaaaattagcccacggtgataatccaaagattaaagctacaggagcactcatggcattaactgattggaggaatttggggttggtttcagatgagtttggatcaggatggaacattgagaatgtaacgtcgttgccatgggactgttttggatcagtagatttgtgcactttcttgcctgctccaaaatctgatccttcattgaaaggtggagttgggatattggtctctcttccaagactagccatgcctaaattcaagcaagagattgatactcttaactaatgcttcttaattgttaagcttgatttgttattaataatttattgtttgaaagataagttttataatagctcgatgacacatatatatgtgtattaatatagtataaattttcatatacattaaaaatcataatgtactaataattaagatataataataaagcatttgcttactttgtgaacttcttttggccaaattttataccagccgcaggttatcattccatcgcatggactgtcttgttcattgacatgtgttagggttgaagattgagtattttcatgttaattatattttgttatatgtttttacgttgttattaatttatttattttacatttcaatgtttttatttttggtaagatgatgttttaaatggtgttgaagttgttggtgcaaaaaatgaagatagagttgaaactattgggttaaatgacaatattcaagctaaacaagttatattttatttcatctataaattattttaatattgtttacggctcagttttcaatatacttatttctatgattattttatttgtaaaccagtattattagggtttctgatttattgtgtttattaagattttaaattttaatttttttttgggtatatattgaaatatgatgctctccaagatagagggcgggggcggggataatactatctgcaccgtatccaaccccgatatagatatatatctttttattcttaacatatgtatagtatatatataattgataatcaaaattattttgattatcatccataatcaaaattatatatcatatgcttaaattatgaagatctaatgacgatagttaactgatgatcattgtggattaca

SEQ ID NO: 55540 - DNA, 746 bp, Cannabis sativa
tggcttctcgctccaacttagagttttgtcagtttgattcagcctggcattgtcgaagttgcctattttctaactctaccagtgggacatatctggtgggatcataagcatcttcacttcttctctctgggatgggattttctcaccaacaagattgtgataccatcgttcctccctaaaaacgttgtgtttccgtcgtgttggttctctgatagtttctttccaggataatgggtagtttcctctggatgatttccttcatgtggaatgttatctgccattgatatgggtttgtaattgtatttataaagagagattttttaggctatcaatgaaagcaccaaactattaactcagatttttgttaactaaataaatagtcttttatgtaataaatatactacaacatttattaataataatgaacactaaatattttacgtagttttgtagttaaatctacatactctacgagtccatattattagggatatttatttgaattcagggtgtaattcttaataaagatagttaatagaattttctctcaatttttcgctctccttttcccattaattctgcacctatttatatgtgtataggttgacaattatttttattgggatatattcacttacaacttctcatgaaacgtggacattctccacatttcatttatatggacataggataatatctaataactacccaagtgctctttatctttatccttcaaacagttatgc

SEQ ID NO: 55541 - DNA, 3858 bp, Cannabis sativa
  modified_base (1448)..(1453): a, c, t, g, unknown or other
ttattaattttttttagaagtgttccatatatatatagacaattttttattggttgaacaattaaatatgaaaaataaaataacttgataacaactccactttaatataaatattaaaaaaaataaataaataacttcatattaatacgtaaattaattagtcaattaacatattacatcaactcaaatgaaactaaaaaacaacgcataaataatcccaaaaaaaaaaagtaaaagcaactactaaatactagtgcattaaaaaaaatatgtgctcatgaaaaattaaacatatacttattttatttttatgtggttaaacaactaaataacaacaagcaaacaattagataacacatggtgttaacttaaaaaaaacacaaattatctttgaaaacaatacaataacaatctcaatatatgtatctattaaaaactaaatagatatactcaattttttcttggttaaacaactaaataacaacaaataaataaatttacaataatttcactataatatgcaatttaaataggtatcataaaataacttcacatattgcatcaattacaaggataaataaagccacaaataatatagaaactaaatttaaaaagaattacaaaatgtttgtacaacaactcaaaaatatatgttccatgaaaaactaaatataagttcatttttcttttggttgaacaactaattaataacgaaccaacaactaaataacaatttcactttaatatgcacatttttttctggagtatgggaattaattaggaattaatatccaagcagcataaaataaaatacaaataacaaaaatcaacaacaaataataagaatacaaaataaaaataacatgaaaacatcaaaaagaccgtatttttgttaaataaaatcataaaatcgtaaaatgttaaatttcgtaaaatcgtattttttaatttttttgttattcttattgttgctccagtttattttcaatatacgtggcggtcgttatgtgtgacatgtggctgacatggacacatcacccggagatgagttgaagacttatctaaaccaccttaagaaatagagtacaattcaaagtactagctcccgaacatgagcaaaaggcctatctccttctccgggggctaaggtacggatgggcttctccgagccagtaaggttggagttgaaaagtcactttgtatttaatgcggcatggagaaaatgtttgggaacgcccataagaggacgtgtcaggcgtcataaacctgatttagggcgattacacgataatcaagggagctagtgacggctccattatgaagaatcacatcaatcaagaaggaatgaaggctaatctcacctaacacctacgcggcctactacgcaggttgtgcatgcccaattttgtactttctgggaacttgtgcatgcccatagttggcacttnnnnnnaagttactccttttcttcttcccagcaatcgctataaatacccctcataaaaattttgagggggatcgaaaaaaaaatacaaaaacattctctgtaagaaatactctctcattaataacagagactcatggactacggctcattaatgcccgaatcacgtaaaaactacctgcattaattatccctaagctctcattattacattattcatttggttgccgaaaatctcggtcaatattttggtgctttcattgagagctgtgggaagcattgtccaaaaacgataatagaagatctaagatacaatggtggaaactcgaaaccacacacgccaacctcgtcccactaagatcctcagaacccagaggacgaagaagcagcctcacgagtaaacttgggttcagaatagcgagacaaatcaaatgaggaggaatacgaagaaaacctagaagggtatgatgcttgtgatgatggtagctatagcgagttattagccctaagcagaaagcaactgatcatgaggccaaattggccgcacaaaaagagcaaaatagaaggatgcaagagataatggtcgccatgcaaaaggccatggaaacggctggaatccacgtacatcccaaggctgtgcctcagggactagaggaaacacaagaagagtcctcaccaagcacccaaaggcctacaaatagggatccaagcccaatacggtatctttctaaatggaaccctaagaaaaatcctacctcattccctgaaaagaacaaaaaagcctgagatccgtgaaaggtctgctctgacttcccgaaagggaaaggtccgcagaggggcaagcttcctcgggagagtattggccctcaagaccaagaggactgaaagagcgtatcaatgcatcaggagcccggggaaagagggaggaaaagttagaagcatccccctgccacttaagacaaaagcttaatgataagcacggtgacttgagaaagcacctagaaaggaagaagtaggcaataccagtgtccgaaggtgccctgaatgagggaatcttggcgaagttggcgatcctcagcaaagacatcactagggtcgtgcagagatagaagggagatgactcagagtctaaatgcgaggaccgagagccctacgccaggaacatccgggaggcagaactccctaaaaatttcaaaatgcccgagatggcagtgtacacaggggactcagaccccagcgaccatctatctcgattcaacagagtaatgactgtcatgagagtcagcaatgacacaaagtgtctatgctttccactgacattaggtggatctaccgaagaatggtttaagaagttggaacccagatttgtagactgttggaacaagttgcaagtcagtttttgacgacaatttgtgacggcgaggaagaataaccttgaactaagtgccttgaccaacataaaacaattaccaacggagaccttgaagaatttcataaagagattcaaagaggaggcttcaaaaaccgaaaaggttgatgacggacaatagttagccttactccaatctgggatccgaaccagaacccctttctagagagttacaacaggaagagcagctagcctccaagactttagaagagggtctagaatacattaatctggaggaagcacagatagtggcttacagagggtattcccaacgcgagtgtcaggatatgcaacaggagcacaacttcctggagctgcattccctactgctccccaaacaagtggaatatagttctccgcgactctgtgatacaatcagaatcttactctggccctgcactatcacattttgaggcccccgtaagcgatctccctaggataagcgcgcaactcccaactcaatctacaccaaccacaagcatggcaggagcaccacaaagttctcggtgtaagaggtcttccaaaggtactaaacgatgtaaggaaaagagacaaaggagagggtataagccccaatatactcaatatattgagctaacaaactctcaagagcgcctgtattttgcgactcagaaaaatacacattaccgaaaacctcctccttcgtacagggacagctcctggagagatcctagcaaaaggtgtgactatcacaacgatattggtcataccatgaacgaatgcaaaaatctaaaggatgaaattaaaggcttaatccgattgggccacttatatgaatggatcaaaaataggttgccacgcgtgaatccagcccaaactggagtcccagtgcctcagggaggaaccacaataacgtcggagggccaggaacctcccggagggatgccccatcagcaggcacccgaactgccacctaagactaatgggagagtcgctatgatctctggaggtcctcatattggga

SEQ ID NO: 55542 - DNA, 3221 bp, Cannabis sativa
  modified_base (2863)..(2863): a, c, t, g, unknown or other
tgatgatgatgatgttccaatctgctttcatgcgaaagtaataaagcttgaacttcatcaattgagaggtcttcacttcttgctgtgatcccagagaccacagaatcaaaatcaggacctaacccatttagaacctgaagaacaagatcttgatcttgaactggagcaccagccacagtgagtgcatcagcaatagtctgaactttctccacatactcgaatatggatagattgcctttgtgaacatgagagaattggccttttagttgtagtaatcgagcttttgtttggctagagaatttttgttctaacgcgcgccaaagtgagtgaaacgaagtatgatttgcaacagatgcaagaatgacttcagacatggaagaccgaagccatgagagcagcaattgatccttctttttccactgagtatactcagaatttacagttctattgacaagattctgaggtgggggtgtgtcggtgaagaggatttcatccagatcatgtccgatcacagttggtatgacttgagatttccaggagagaaagttgttacgatcgagtttgatggtaaggttggatgtgagagaatgagaaaacgggttccaaggaggaaccacaggaggattcgaaggagtctccatggcagcagtagcagtagttccaggatcagttaaggaagatgacatattgaatgtcagtaggcgattgataccatgttaagactagcaagaaaggtgcagagcaccaaggaagaaggaaacagagttttaatgcagcaaaagctacaccctctcattaatatgcctttatttatatccaagaattaaagacaacagtacaactaacataactgacaaaaacagaaataaccaacacttaacagaaaattcctaactaatagcttaactaactttcaacactaacatccccaccagccaactcagccgacgtgcaccttagctagaatattgatattaactaatttaagtttaattagacttgcttacacttatacatggcaaaagaagcaacatcattcaatgcctaaacaacactttaatacttgtgtaagagtggaagaattaatatagaagggagagtagagcacagagtagaaaatctgttttctttctaaatgtattgatcgaattggaaaaatgagcgaaaggaaaaattcactaatatatattttctaaattagtttagttcaaacaatgaaattaaaaattcactaatatatattttctagtaaggatcgtgagtacatagtacaaaatcatataacaattacttctcacataatctacctatctagctatttatcaacaattaatcatatatatatttataattatatatatatatatatatatatattctccaactccagtctccagtctccaccacatttcagagtttatctgtagttgtagtttcaacactacttatatatggcagtttaacatatatatcatcatcactttgttcaaaaaaaaaaaaaccatataccatcatcactgccaaaacttaaattaatattcctcccatcagtcaaaatacccctttttaaaacctctcaataatttaattcgctaattagaaatcgattaaactaaaattaattttaaattttcacgtgttatagaatgaaatcttaatcctccatagtccatacacaaaaaaaagtactaaaagaaatccagctttaaaaaaaaaaaacagatttttctatagcataggagagagaacccaattgaaaccaaaactcattggtacatataacattattatttaggtcagtaaaaaaaagttccagctatttatatacaatattcctctatatatatacaaatgtatattcacaagacttaattattataattaacttacaattgaaagaggatttgttaagttataaatctcacctaaagacttaaatcttttgtgctttctgggaggcccaatctcaaatatggtggttggatcatgatcatcatcattggaagcagtgctaatcagatcatacggtgtcgtatcgctcatcgccggttgatattcgacttggagaagtgctactacgatgtcgtttcggttgctgagttccgagtcgccactactgagttggatgagttgctcggccgcgttgatttctaagtcggagaaaacaggcctagaagacagccaggatgatgaggacgaggaaatggtcttcttcctcttcttggttttggttttgcatgatgttgttgtttccttagccatgttgtttaactttttgaatgtagagagagaaagaaagataataaatataagtcattttgaaccatcaatattttataagctattgggcaagtgtttaaattttcaaaaatttattggcggactttaattacctcacgtatgattatttctaaaatagacaaaaatgcttttttttttttaaataaaaaattatttttgatattgaaaattttgttaaattaagtattttttttataccaaatatgagaatacattgttttttttctttctaatttctatttatatacatacttttttcattctcaccaaaattcaacttctagagcatcatcatcaggagtagtggctccataccctgattgttgtgggattgttgagaggttcaataatctctttgacttttaatgaattcaagataagttgagtttagacatattcaatatctcttattacttaagtcgtttcgttgcattagagtccttgtatcaaatcatgtaattataagagcgtgtgatcaaaatattctaagaatgaatagggatcgaattcttattttttttgataatattttaatcgaattattatttttttattattttanaaaattaatttatatttgacaaatacaaattataagatattattaaaataataaaatacttactataatagagagcacggttagaacaacaataaaaataattctttattttaattttttagttattttaattaaaataaaaaaataaaaaacaccgttaaagatattagttatattagttaatcattataacaaaattttgtgctgcatatttcaagttgataattattataacaaaattgttaatcatttataattttattaagagttagtcccacattgctaatgtgtagaaataaattgtgatatataagatgaaagggctactcctcccattgccaattggttttgggatgga

SEQ ID NO: 55543 - DNA, 720 bp, Cannabis sativa
tttttttaattacctctttttttctccactaaaatcttattttaaattttttttaatataaatattagttacaaaaattataatatattttattgtaatttatctcttaattgtcaaattttcacactaactaactaatactttttctttcttaagttttaaagacactaattattttgctaattttcaaacataattgtactaaatgaacaaataattgtgatttaaaaagcaattttattgtacctatgcatggttgtatttaaaagttggacattagtaaaaatgggaaaatgtaagaaattttttttttaaaaaaaatcaatttttcatgttccatatgaaattttttcttgaactaacttttttcgccaaaaatgagaaatcaattttatttattattattttccacattttattccttgcatttttttaattacctctttttttctccactaaaatctaactttaaaatattttaatatatatattagttacaaagatcataatatattttattgtaattaaatgtgtttgtagtaatcaactacaaataaattttcactatatagttatataaatatatttctttatgtaattacacttaattttgttttttttattatttaataatagaagatgtttatacatgttgttgtatggtatgtgtatgatcatagatatatagtctacaacttttattattatattaattaaagg

SEQ ID NO: 55544 - DNA, 3259 bp, Cannabis sativa
tgtaaaaataaaaaaatctcttaaaatttataatttatcgtcatgcatgactttgaagacaacaagaggagtgctatatatattaatcaagtcaattaaatattgttttatttgctttaagtataattattatttaagtagtttggagaatatcgtgtttatatggaatgatgtgatttattggaataaaaaataaatgaattacatttgtatatatatatataagaaattaagattaatatatatattatatgcgcatgtcaagagtacgtagtaagattttaacatttttttttcatgggaataaataaagcccgatcgaagatatatttatataacttttggagcattaatgtgtaggttacattagaaaacgatattattgatcagctgtgagtaaagaaacaagaggaaaagagtgtactgctgtatattgcaggtaggtggctcaattaggcctactgttctatattgatatatttataacaagaggttaatacaaagaaatattacagcagagggaaaaacccttgggaccacaacaggtgtcaatcaattacaaggaatatatccgttacactaacagaatagactaggacaaaatagcaaaacggaaatgagaacctcttggaaccttttggtcattagcacctgattagagtgcagctaataataccgttactctgttattactttcttaacaccacccctcaaaggcaggggtgagtttgtcactcctagtttgtcaatgagaaacttgaatcttgaatgtgtaagacctttagtcagacaatcggcaatttgttcatgtgaaggaacatatctgatctcaactttcttttgtagtactttatctctaatgaagtgaatatctagctcaatgtgctttgtccgagcatgatacacagggtttgaggcaagtgcgcttgcactcatgttgtcgcaccatataacagggacagctgatggtgtaaatttcatctcttgtaataagactcaagccaagcaatttcagaggccacttgaacaagagatctatattccgattctgtgctccatcgttccacaacggattgtttctttgaagaccatgtgaccaatgtttccccatagtatacacagtagcctccaactgattttttgtcatccggacagcatgcccaatcgacatcacaataagcaatgataggcagtctgtcactatatttaatatgaataccgtgatgcattgtaccttttaagtaccttaggaccctcttttttgcactccagtgtacagatgttggacactttagaaattgactgagtttatttacagcaaaagcaatgtccggtcaagtgtgagtaacatatggcattgctccaattacactttgataggctgaggggtctggtagttcttcaccatcatgaatggacatcggtttcccacctgttatgggtgtcgggcttgccttgatgttggtcatctcaacacgtttgagtaaatcagcagcaaactttcctggggatagatagataccagtagcatcaagaaaaacctcaatgccaaggaaataatgtagttcccccaagtccttgagttcaaaagtgtgttgagtttggtgatgaacaacatcaattccttagagtcattcccagtaattatgatatcatctacgtagattaataccatgatcacatatttgggtgtttgtagcatgaaaaatgaagtgtctacccgagaattgataatcttccagctaagaagtgtgtttttgagtcggtcataccaaggggactatttttatacaatgatttcaggagcttgcacatatggtctggtttctgtttgtcttcgaacccttatggttgattcatatagacatcttcttcaatctttccatttaggaaagcattgttaatgtcaagctatctcacttcccatccctttgcaatagaaactgtatggacaactctgattgttgaggacctaataacaaggctaaaagtctctccgaaatcaagcccaagcctttgatggaaccccttggctaccaaccttgctttttagtctttcaacgaagccatctgtgttgtatttaatcttgtacacccacttgtttccaactatatactgaccttctcgtcttggaactaagacccaagttttatttttgatcaaggctttgttcacttctcccatagctccagttccatcccttatgtgcgagagcttcaaagacatttatgggttcttcaagatgcgtattccatctggtgtgagttaagtacgttttaggcttgaacacccctgcctttgatcttgttaccatgggatggctcggttgtaaggcaagttgttcagtctgtcgtgaaaaatgttgctgagatgcactagaattgaccgttgttgctggtgaaatgggattagtagcattaaaatctaaatcaacaaatagattatttgtgagatctacctgatctggttgtgactgatttgacaatactcgagttggtgctacttgagaagcttcaaattcttgtgttgtaccagccctggattcattgatagggtcactgttggagagtattggctgatcttgtggtcttggctggaagatagaaattaagttgaaaccaggcagttagtgtttggaccgtagtttctttttctttctggtaattgtttagaaagccagtttggaaagggaaatcctgctcattaaaaacaacattcctagatatgtataacctacaatttgagcttagacacttatagcctttgtgaaattcactatacccaaggttgacacatttagtagagtggtattggaatttatgagactgataaggccttaagcatgggtagcaagctgagcaaaaaactttaagaaattgataatcaggtttctttccaaaaaggacttcaagaggggtttttccatatcaaaaccggtgttggtagtctattaatcaggaagacagtagtttggaatgcatttacccaatatctcagatgcatgatagcttgagctaagagggttaagcacatttcgacaatatgtctatgctttcactctactctaccattttgaacagatgtatgtgggcaagagtgaacaaaaaggataccattttgttccaccaaattactaaatgattgatactctccccccaattagtttgtaatttcttaatcttcctttcaaatagattttctaccatgtttttgaactagggttgtacatcggtcggtttgggcggtttatcctatata

SEQ ID NO: 55545 - DNA, 1219 bp, Cannabis sativa
ctaaaagtgggatagaaagtctcaatatatcttttatcccattttttatttttgttaactaaaaaagtgggataaaagttcctctttcttgtagtgataaaatatatatggtattcaaaactaataataacataaatatcgcatcatatatgccatatataagtctaaaaattaaaaaacaaatactacaagaaaatggcaatttaaaactgttatatttatctaaaagtattttaaaattcattaagtgtaatttgtttttttttcctgttggtcaacaataaattattaatcacatacgctgcttttgagtctttaattaataatgaaaaaaagcatcaatttttccaaggtaaatagtttactctcaataaaatgtttatgtttaaatatagtatacttttctatgtggaatgatccggtggagattcttttcaaatagccaatcactgaagagagagagagggagagatatatagaatagtaaaactaatctcatcgacccaacaatcaatttcttaactatttctaattagtagtttgtttcttttgcatatgtagtttaatataaatattcaccaaatttgttaagctctatatgtgaatgtgctgtataataatcacttttaaattctttcaaccatatatttagtaatgatctctatatttatctatcacagttgattaggttagtatatagccatcaactatacgttaatgttagtctcgatcaagcctagaataattgtatgttaagacagaaaattaaccaaagaaaaagataaatatttattttcttcaaaacattctctcccagccaagaaaacaaaatgaaaccctacataaattatcaagttaaggtttttcttttttttttttttggaaatacgtgggctagttgtcaatgattctatttcaactgcttgcaccatcaaattgtgtctctcctttctctatgagaagatgattttgatcacgacacgtgttcatatcgattatgggaaaaagctttagatcaatggatcctcttttcgccatgttcagctaattggtggtattaaataaaggaattaaattaatagatagattttaacgttttcactatattttatctccaaaatatatagggaaagagaatatataagcaagcagcagtcaacgacagtactcaacatatcaacagcctaagaggtcccaacgtgtaggaaaggtctacctg

SEQ ID NO: 55546 - DNA, 1725 bp, Cannabis sativa
aaaatggaaaaggaataaagagagagggggaggtcagctaggactagaaataatcagaaatggatttcgattttctcaaaaattggatttttgttgaaaatgtaatagttggtaaaatgaccaaaatggctatagggccaaatataaacatatccttaaaatcaaggataaatttgtcatttcaccacaggcatatataacacataattttagatttctcatttatcatattaataccagaattaaatcctgaaaatgtattttgcgccccaaacccggttcggcccaaaatacccagttgtaagtataccgcgctgacttgttagaaaatacctacagatagacagaatacatatactatgtaataatatagcccataagcacgatatatcatttaattataattttacccttctcaggtcaaaattacgaaaatacccctagtacaccaacaaggtcttaaaatgcaatttaacagtatagtttcacatattaaagtatataataatataattccacattaacacatagtcaaactagttagggttgctaatccgatttcttaaccttagggtattacaattatctcctccttatagaaatctctcatctcctgaaaaatttacacctgaacaactctggatatttctactgcatatcggtctcgagttcccaggtttcctcttatactttattgttcctccacaatactttgatcagtgcaattgtcatgtttcttaagactttttctcttctatctaatacttgcactggttgctcctcgtatgaaagatctggctaaagttccaatgcttcatagcgctcaaaatatgggacatatctaagatacatttctgaaacatcaagacacctggaacacatcatgtacagctgtcaacacaagaggcataaccaacatgtacgctacttgccttatcctctcgaggatctcgaaaggtccaatgagcctcaggctaagttttcctttcttgccaaagcgcttaatgcctttcataggcgatattcaaagaaacaccatatttacgatctgaaaaatcaatatcccttcacttttgatcatcataactcttttatctactatgaggtgcgagaattcgtgctcgaattttattaactgcctcacttgttctctgaacaggttcgcgacctactttctttcacctacttcatcccagtgaataggcgatctgcatttcctttcaaaaagtagtttataaggagtcatcccgattgttgcctgataactattgttgtacaagaactcgattaggggactttacccatgatccttcaaaatataaatcacatgcccaaagcatgtcttctagaatctaaatggtcctttcggactgtccatctatctgaggatggaaagctgtgctaaatttcagttgactacccatggctcaatgtaagctctcttagaatattaatgtgaacttcgatccctataaaaaaaaaatggacgttggaacaccatcgagacgaactatttctctaacatacagttctgcatattgatcaatggaaaaatttgtctaaataggtaaaaagaacgttgactttgtaaacatgtcaactatgacccacacagagtcgtactgtcccgtagtcctaggcaatccaaccacgaagtccatggaaatatctttccatttctattccagaaggttcaatggctacagcaaacctgcaggcctttgg

SEQ ID NO: 55547 - DNA, 1832 bp, Cannabis sativa
  modified_base (26)..(32): a, c, t, g, unknown or other
ctctctcactctcactctctctctcnnnnnnnctctctctctctctctctcgcaaaaccgactgcaccaagttgctaatgctcttgaaagagctccatatttatagaaggaaaacatcacctcccaaccatatgtaataataagaggtaactcatattccaaccatttctaattaatgagaggtagctcatcttccaaccatatgtaataaatgaaagagcataagtcaataattattacataacttcaatgacaaatgtagcaaataataaatttcgaatatcttgattattgaactatatatttacgactttaaagtaatttgaccaatagtttgatgatattaatgtaacttaagttcaccaagatgggagattgataactatattagttggagtatttttatttttaaacttatgttgagatgtagttttgttaagatttccccgtattgtaattttacggcccataatatggctaaatgagcatatgccaacaacctctcttgtttgatcgaggtgtcgtcaatactaaaaaatgttttatgtaatgaccataaggtctaattatcttaattaatgaaacactaattttcaaaaaacaaaaatggagtgacatttttgtagtttctaatcaaatagacaatttacctcttttttcttttaactattatatatattaaatatatatatttatagatataattatatttaatacaattttgtgatttttataggagaaatttgactttatatatttattaggctaaaatttatcccctaatcattattgtactaatattgttagattaggtcaatttttcattaaacccaagattatccctctattttttcaactcactgttgtctctctctccctccattctcgttcgctttcttcaacagaaccgaaccgccatgaccaccgccaccatccaagaccacagtcgccatccaagactactgccaccatccaacaccaccgccaccatcaaagaccactcaactcgctaaaaaactaattggaccaaccctctcgactccatttaatcggtccgagcccatgtcaatctccttcctcaaccacgaacagagagactaccgacatgaacaaagaccacaaacacaaactacaaacacagaccacgaatggagagaacacgaacgaacacgttctctataattttctagttttttaattttcttgagtcagtctgatagtgtccgatataggtccgacataaatttgataagaggttctaacatttatgtttttgaggttgatggaaaaggttcgatagtggtctgatataagttcgatggtggtctgatgcatagtaattgattagtggacatatttcgtgtccgataagatctgtccgaatagggtccgatgggtgtatatacatatttattatgtatatatatacatgtgccttttcttttctctttcttggtctaatacttgtaatatattattatgtttatttaaatacatattgttgtatatgtatatatatatatatttatatataaatttgtttacattttatatcatagttttaatctcttaagtaattactcgatgctaacgtgggtttcgactaattttttagtttttcttagttttaaggagaggtacagtttaaagaagattttttttttatatttttttatttctttctttctttaaatgggatcactttttttgcttatttgtacgattttgaataccctattagacccttatttggacagtatctgttgtcacaggaattttgacaacaccaattttgtgcgagtattcaagggttgcttggataccaaaaaata

SEQ ID NO: 55548 - DNA, 1157 bp, Cannabis sativa
tttgtaccctgagtaccactgagtgatataccacacacaccctgtaatttctcatacttgtgctggtaacaccgtaatgtactccttaataatatacactataccaatgcactctgtaccatatccgtacaagtgttggtagtgtaacaaacatataagcatgcatatacactcaacatatacatgcattcgcatattcatatcacatattatacacagttcttacctcctttctgaactcaagtgagttggctgaccttaacggaaagtctcgtgctggatggatgcactaattacataacatacccgggtaaatcacatgttaaaaaccctaatctgggtaacccgaacctacaactctagattttgttattatcactagggactacattatcctaggaaacagggaaacaccgaactaaggcactgaaaagggcaagaattgagaaaatgggttgtttggggaatctgccaaaactggttaatcggttttatgggtactggcaaactaaccgggttgcactagttttacccaaacaatccgtaaccttctcaaaacttatccaaatgccaccaaactttctagagtacctaaacagagcatacacaatattttccaaccagcagaatccaaaaaagcatcctaaatcaaaacatgccatggatgagccaagcttgagtttcaaactcaaactttttcatccataaccccacagctcaaaaccaacaaccagatgaacaattaagttcaaaataagcttagaatttgaattacaacaaaacctaaccctaacaactcctatatctcaaaatcacataattaaccaaatttaaagcttaaaagatacaagactatatgttctagggttaccttagcttcaagaacacttgaattcctagctgaattccagaaaaatgaagaagaaaaggtgattcctccttggttttttgctggttcgaagagagagaagagaaagagagggtattatttgatttttttggctttcttgtttttcctctaaatgaaaaaggattttctaaattaatccttgctgaaaaaaatagaagctaggtgtcaacacccaaggcagccaccaaatcacccatttgccaaattactaaaatgccctttttcttataacttaagcaaaataaag

SEQ ID NO: 55549 - DNA, 914 bp, Cannabis sativa
  modified_base (34)..(44): a, c, t, g, unknown or other
aaaacggtcggttttaagataggttctggattgnnnnnnnnnnnttcggattgcaccaatccagaccataaactgaattttagatttttatataaaaaaatcgaccaaaccgatcgatactcaatcctagggcacggtactctgattcaatactggatcgagaccgaacaacttatttcttggaagactaaaacataagtatatcaccaagatagacacaataatccctacagattttctgtcatcaagattactagcccaatctgcattagagtagccagtgatgttcattctatcactgcaccggatatggatgccttgtgttctggttcccttcagatatctcaaaatcctcttagttgcattacaatgtgtgtctgttggacctttaagaaattgactaataaagtttatagagtagtttatatctggccgtgtatgacacatgtattggagtgctccaatgagacttctgtagactgttggattgttcattttctttccatcattgatggacaaagatttcccagcagcagtaggtgttggatagggtttcaggtgttgcagattatttttctttagaaaatcttcaatgtacttagtttgagtgagatagaggcgtgtttcatctcttacaacttcaatgccaagaaagaaatggagagcaccaagatccttgagtgtaaagtgtttgttttgttgttgaacaaactcattcaatttttgattgtggttaccaataacaataatataatccatatagattagcagaaggatgatgatattattgctgatataaaaaaacaaggatgtgtcacctttggaatttttaaagttccaattcagcggagtgttcttcaacttgtcaaaccaagctcttggagcatgcttcaatcaatacaaggatttgtgca

SEQ ID NO: 55550 - DNA, 1623 bp, Cannabis sativa
atttgtcattgtaatctctctacaaagtataaatacaacaagtttttacttagcctcctttgagctgagaatcacttttccatttctgtgtaaaccttcacttggtatcagagccaaaaaggcctgcatcaatgtcctcccattctcagactccacaagttatgaatactggtgcagcaggtgctgcaactccaaccattcccgctgtccaacccaactacactcaacctttcagtactttgaataagcccttccctctcacgctcgacagaaagaactatatactgtggaaaaccatggtttccactatcatacgagatcatcgcctcgatgggtttgtcaatggtacaagaccctgtccagcagagttcatccctactccagcaacagcagaaggagagccaggctttggagttactatcaatccagagtatgaatattggattgttagtgaccaactcttaatgggttggttgtatagttccatgacagaaggaatcgcaacagaggtgatgggctgtgattcatcagctgcactatggaaagctttggaaaacttgtacggtgcacacttaaaatcaaagatggatgatactcgaactctcattcagacaacacgcaaaggctctatgtccatggaagaatacttgaagcagaagaaggcctggtctgattcacttgccttggcaggggacccttacccaaagaaccaactcatatctaatgtgacttctggtcttgacattgaatatctacctatagtcttgcagattgaagctcgatcctccactacttggcaagaactacaggggatcttactcgcctttgacagcaagatggagcggcttcagaacttgagcctcaacaccaacaacaaatctgctaactcttcagtcactcccaatgatgatctagctaatcgctccaacactggtaattgtggtcgaggcaactatcatccaaatcagaatcactatcactctaatcagaaccaagcaggaggcggtcgaggaaattactctcgtggtggtggaaatcaaagtggaagaggtcgtggtggtcgttcaaatggacccaaacccacttgccaggtatgtgggcgctatggtcactccgcatctatctgttacaacagatacgatgaggcgtacatgggatctgaccccaaggttggtggctcaacaaatcagaaaaacaatcagcaagcagcagcatatacggcttcacctgagatagttgatagtgaagcttagttcgtggacagcggtgcaagcatgttacgaaaattatgaacaatacgtaagttcacgtaatcaggtgaggtcgaaccacagtgaattgaactgaataccactaaattagacttatgattctatttggtagataaataattttgatagattttaaataaagaaaagaaactagaaaattaaagaaagcaataaaggtgtttaatcaaggatgagaaattaaggaaaagaatcctgttgatttaattacccaattgttaatgcaaattactactcatctttctttaagtgaatgacagattataaaattaacctaactcttttcagatcttttaggtcctaaatcacatgttatctaatcatctctaagata

SEQ ID NO: 55551 - DNA, 2173 bp, Cannabis sativa
ttaggaggcaaaattactaattgatacagatacgtcatcatttaaacagaataataggacggaacctaacagaaagactaaatttctataaatgtaaaagttcaagggattcttaacaatcagtatattgtaagggccaaaattaatattaagttgagaggacaaaattactaattattctatatatatataatacatatttaaatataacagataggctttaccaattataatatttattccttgaaatctattaagtactaaatattttaagaagtacactattcattcatattttcaacatagtacttaaatcttaaaatattgtgattataaagtaatggtaaaccttcttcatataagttactgaattgaaagtaaaattgtatcatcttcccaactaaagaagccttttttatttgaccttgatagtagaacagtaaagcaatttattcacatgtgaataacatattacataatttcaagaacaaagacattactttagcagtaactagtaatactaatgcatgtatcttttggtagccttacataaaccctctttaatataattccatggtcggggtaagatttattgttttattataaagtaatatcttagtaaaccccagtgctcaagtccttcagtgcatgatgtagttcataattaagcttacaatttcataacatcaacgtaagattttccatcaagctcacgagaaaatatacccttgatgtagtctttactttcttgtgttttgtatagcccaggattttcttgagtgatcaaactgttcaccgggcctatagtgcaatctatatttgtattaagaaatgtggcaagagagagcctttcctgcgccgagtttactattgctctgtgctcaatgctaggatatattccatttgttaaaatctgcaagcattatatatacaatataataagaggatttctacttaaagtcatctataatatatgggtaaatactattttaaactttgtattttacaaaagttatcaattgaaccctttgttttattaaataataaaataaactctgtatttttttaaaatggtacaaatagaaccctgaattggttttttatcaaaataaaatttaataataatttgatctaaatgtatcataacaaaactgtttatattttttatatctgttcgtgttagcaattattttcaagttagttatattaagaaaaaaaattgtctaaaatcaaactcagggtcttattttaccattttaaacaatacagggtccattttgtcatttaacaaaacagaaggtctaatcagtaacttttgcaaaacagaaggttcaaaataatatttataaatgaatgaaacattaataattagtaactatgagattatttacctctagtacatctcctatattgacaatgaaagcatttgggagaggcttgacagggatccacatgccatctttcttgacttggaggccatctacttggtttatttgaaggagaatggtaaggcctacggcatcagagtgaggggtgacacctataacttgctctggttgagggcatggagggtaatagttgatactcattgattgcaatccatcttcaaataacttggaaatttccttgctttttattcccagaacattttccatttgggagattatatctttggctagcttttccagttctaatgaataaatttccaaactttccctgcaatgtgaattaactataaatatatagtaaacaccttataaggtgtaattgtcaatgaattaaacaaaaattaataaacctcaaaagaagagggaggtttggaaataagtgaggcttcctgaaggcaagtggtaaagttatgagaaataagtcatcattccagtcaagcttttgttcctcagaaaaaacaaaagagtctccaaagccttctatatctcctggattattctgccatagctttttcttctcctccattggcagtttaaacaattcttctaccccttcttttattttctctaccaatgaattactaataccatgatttaccaactgcaaattattgttattagtatagtaataacttaattataaattgagaaaaaactataatactatatacatataaaagggacccaattttgtccgtggttgaagtacgtcagttgttagatgg

SEQ ID NO: 55552 - DNA, 1064 bp, Cannabis sativa
aaaatagggttgaggttgaaaacgctactgctgttcaggtattacaagctggtccgattgagaaaatggagaggggtcaactattaatgttgttggttgtagttggattactcctaaaagaattgcattgagacaaatggaaacaaaggggacaaatgatgatcaaaaagtgaagagcactagtaatggatatgctattttgcttgctgcagcagatgaagaggtattgtatcctaattctgaatcagtgaatgatggaagcaaataacattattgggtggaatgtaagaggcctgaataagaaggacaaacagaaagctattcttgatatttatagattgaataaaataggctttggtgctttgtttgagactaaagttaaacatgagagaataaatgaaatgatgctagataatttttcaaattggtattgttataaatctagcagtgttatttctggtaggattttgttaatatggaaggataagcttgtgtgggtggatatatggtgcattgcaaagtgaagttttgtgggcagaaacaaggctttatgctcacgactgtttagggcagtaactcaatagaggatcgtaaaagtctctaggaaagtcttgctagtattgagacgctgaaagatccgtggatcatttttggtgactttaatgcaatgtttagttttcttgaaagatgcggtggaagacctatctagaacaatgacattgtggatgctcaatcttggcttgccttgggtcaagttgaggaatttaaaagctcgggctctttctacacttggacaaacaagcatgaggttggggataggatatattctaaactagataaagtttttataaataatatctggttgaataattttcctaacttagatgcttgttttaagtgggaggtcatctcatatcattgtctttgcttaatctgaaatgaagtgcaatgaaatataggggttaaaccctttcgatttgggaatcattggtgtaatatcccagaaaataaataatatttaaatggacatattttataaaatatgtaattacttgggaaatgaa

SEQ ID NO: 55553 - DNA, 1026 bp, Cannabis sativa
  modified_base (391)..(393): a, c, t, g, unknown or other
  modified_base (591)..(597): a, c, t, g, unknown or other
tttatagggtttaaattgcaaaaaatggtatttgtgaaaaatagacaaatggttgagaaaaatagcaaaaatctaactactattgggcccacatcatggccgaccactatgtgtattttggtccaatttttatcaatcttttattccaaataattcaaccctaaccctaagagaagtagtataaaaggaaaagaaagtctcattatccaactaatgcttcaaaggcaagaaatctgtttttctttctctctaggtttttgagacttcttcttcttcctttcatctctattttcgaaatccttagctttcttcacaaaacaaaattcagaggctagtgattgagtacatgcccacacataacatgttagtcctcaatcatagtatgtaagannntgaagaatccaaacaacaagaaggtgaattggggtcagatcttggtaatactctgctatagaaaggatacaagggttagagatatgagcagaaggagtcatttaattcctctacaaccactgtaaggtttctcataccttttatgtgtttattttaatctttttagaaattcatattaggatgttaaaaacatacttnnnnnnnaatctagatcctggtaaattatattccaacacttgctccattagaaagttcaaaatcgcgtctctaagcctaaaaaattgtgattagaaagtggtggagtaacaaagattaagcgagggttatctcctgaacttaggtagtaaggactcgaactatcttcatgagcagggcgatgtagaagattttgattgttgttgttttcaacagtaattgaagaagctggaggaatgatcgaatcgttgtttgttggagcatctgaggttgtcagtgaagtatgtggcagaggattttggtcagaactcctagaaccagtagcgtaagttcgaaccatggtgaatatcaatggcagaaccgagtatagacgatgaagatgaagaagaagagagagaaagaaaatttttaagaatctgataccatataaattgaatt

SEQ ID NO: 55554 - DNA, 1034 bp, Cannabis sativa
  modified_base (976)..(981): a, c, t, g, unknown or other
ttcaaggactattcagagattgaatgtggttattttggcagcagtttgttataatatttggctaaacaggaacagatgtaatttggagggatactctaattccagtttgcatatagtcgatgagattaagtgtaccgtgaaatatagaatacacactgttaaaaatagaaaattgaggaaggatgaaagactatgcatacaaaatttattacgtaattagagctattgtttgtgttagttctacagtgagttgcctgctggtttgcagcaagtaggatgctgctttgttgtaaatattgctttagtttgtgattaatgaagcattcttccttcttgataaaaaaaatgaatatttttaagtgaaataatatttacaccctaaaatataaatatatcttgcataaaatacatatatatatttaactcatttttttttctcacgttgtgaaaaaatgcacacatgtaaaacagaatatatcttaaatattaatacaaaataattaaaaaacaatatagaaaaatcttagagtgaaaataaaataaaattattatttaaaaaaatataagaaaacgagattaaaaaaattaataaaaattaacagagaagaaatatatattaaaaaaaagtattaagtgtaaattttaaaataattttagttgatttattttattagggtgtataaataaatttgtggagtataaatataaagttttttaatttattttagttctcccatcttaaattgaacaaattaaattaattatcactatatatttttgtccaacatcaataaattactgatacaatacatacaattaaagtaaaatcaattttaactcaatatataaatatattagagcttattttcgtgtgtaattaatgactaaaactttaattagttcaataaatattaatttattattagaacataatgaaaataagggatttcttcatttttacatttcaaaataattnnnnnnttttttgtatttttacgaaattctgcataataaaaactcctattgcaactagc

SEQ ID NO: 55555 - DNA, 1384 bp, Cannabis sativa
  modified_base (45)..(48): a, c, t, g, unknown or other
atatttagggtgttaatcaacattcttgtgagtagatctaagatnnnngtaaaataattcccaacacttggaccccagccttagccctagatctggactccaacctcagtcgaacctcggagctcggctcagaattcaaaccctagtcgaacttgaacctcgggcctcgactcggactcagacctcgacctcgactctgcatctgcatgcggacgtaggccctagccccggacccaaacccaaaccccgacccaagacctgaagttgacttggactcggactcgacccagacatgtatctgtaccctgacctagagcgggaccctgaacttgaagctcgaccttgaccatatttaaataaaaacaaaaataataaattttacaaaacacacttttttcttcttttctttaaattaaaaaaataaaaattttactaaacgccaccgttgttaactattaaagatttttttttcataaaattattttctgcatgaaaattaattttgagaatgtttttttaattttttttttgacgcggtgatcaaaatcacacaagattaacaaatcagcaatccataatcggcaaaaatgtagacaataaagctataacgtcttagaacaacaccacatcacattgaagaaataccttcccattattaatagttgtctcgagagctagcaaaattgaaaaaatattacaaggccaaatcgaaaaatacagttatgttagaatgataatctttaaataaaaattaatatacaaaattcaaaattaatacacaacccatattactaactcaacattactaaaaactaaaaaatcaataaaatttctaagtataattagccaaaggtattaccctttggctagtaacaacatactagcaccctaatataaaactgctacaaatcaatatcaatcaaattatatttaaaattaaagttaccggtaaattctctgtaattgtaggtcctctacaaaataacctacaaaataacaaaaaataaaactctattaccacacaatataatgaaaaaaaaataatgtgaaagaacgatccatattaaatataaagacttaaaaaacttgaaatacttatctgttttttttttgtttttttaataagtgaactgaatttattaaaacaaagaaagctaaatagttgtcacaagggggacaacctccctcaaaacagtcctcttacagcagcgtaaaattctggcacaacgagccaaaccgtccgcaacaaaattttcacctagaggaataaacacaacattacaatacacaaacttagtaaaagtgaaaaagtcgttgaagtagaaatcatgataaaaaagattacttctcttaccaattgaccataccaccaaactaccctaaa

SEQ ID NO: 55556 - DNA, 1137 bp, Cannabis sativa
  modified_base (875)..(881): a, c, t, g, unknown or other
agaatcaacccctgcaaaacaaatagttgaattctattagatcatcatcattttctatcacatgggtttcttttattttatcaaaaaaattgggataataacatacctgaattgccagaaactgtcttcataatcttcttcctggttctctcatcatgaaagttcactttcaacacaacttgctgtaacaaaacagtcccatattagtttgatggcaaaatataaatcataaaccaaataaaaaaaatgaaactgatgataatattagctaaccttcattatgagagtatgtaagcttttgtgagatctgagctcttgaagcttttaattttagaaacactcaacaaatttagctagtataatacttaaagagaggaatatatgatatatgggaagttatgaagggatattgatgctttggtaaatggaaagagaagtagacttgtttgtatttatagttagtgagtcaacgttgaggtcaatgagtatggtatagttttggtcaagaaagtcctctcaatgggacctataagaccactagtttgtaacattcgcagaaagaaagagtaacactttctggaacaaacaagttttttcttgaaaaataaaaaagaaaatgtactttattttctaatttctgggaagccgccagaaactattatttgtgtggttttgccaatagaaaaaaaaaaagttgtaacacgagtttttacatggcaacatgaatacgacacaaattttacgtttaaaaactaagcataggttgaaaatgagttgttacgattgatacaagtaaaaatttatcgaacccaatatgactcgcttaacacgaacttgacatgtttagcatgattttttaaaataaaataaaaaannnnnnntaataatataattatgtaaaaataatttaataattcagttaaaaaaaaattaaaaatattttgaaaattcaacttttattatataaaaaaaattatatatacatagatatatataagtttttttcaatagaatcttaaattttttttttttctacaaattttttttcagtaataataaaacgggttaaagtagtcaatacgagtacgatatttttttataaattgtgttaggattgagaaaattggacgtgaatca

SEQ ID NO: 55557 - DNA, 5870 bp, Cannabis sativa
taactaatctaattaattacatctgcctgggattattgattccatccagcatgtggatattctgatttctttaatttttaattttgtaaagatattttaaatttttttaaaaaataaaattaaaggaataaacttacaaatttatttatcgatttttttatcaaaaacttatttattaaaattggtgaaaatatataatgttaaatttaatcctataaatgcttttaaaatttaaaatgatatcaattagacaatagaaactcaaaactcaattgattctaaaagaaacaatatggccctagtattatattttaatttcgactaaaattttaattttttcaatccagtccattctaaaaccaaacacaagattacttaatcctattcagtccaatccttttcctacactcatacactcattttggaacagttaagaggttgaagaaaaatggactacaaaagtttggaaaagttgtgctcggtgcaacgtcataatctttagttggattctagttctagacaagttgaatattcaccaaattgtacaaatgagaaaagcttatcaagctttatctctaggttggtgtgtatgttgtaaaaactatgaggaaacttaaaggaatgctctctcagccaattgttgtgggttagtcttcttaaagagtttggtattcaatggtgtatgcaccaatccagcaatcagttgctattatgcaaacttaaaggggaaaagaggagttctagattctggtagcagccactctggctatttggttggagagaaatggaaagaacttttaaggcatcgaaaatgaagcaacataactacgggagaacgttaaattttggatcacaacttgggtttacaagacaaaaggctttgaggacctaacttttcaagatatagttctaaatgtctaggggaactgtacttaatgtattataattataattttgtgcttataattcttatgtctagtttgttcccacagtttttctccgccataagtgaggctcccaaataaatttgagagaaggtcaatctaacttgataagcctcctatacattttggatgtaataggaggacacataaactaggatagaaggctttttatttttatctagttgccttttattttaattgttgttttgtcttatttttagtacatcctagctaacagtattttgtgttatccagtacctataaataaggagggattcatttgtgggggaatttggaaatagaaaaaaatagactttaggagagagcagccctctcaaaaggttgtaattggagatacgcatctcgaaagctagattgttcatttatttcatcatccataaatagataattttatcctctaagaatatcttatcaaattggtgcggtgaactgcggacacgatgccaaagaaacctgtggagaagggtgacgctactactaggtttgaggatcattttgaagctctgaaaactggagtctctcgaatcaagaactcaatggaggagatggtaaccaagattgaacaacggcttcaagaaaccttgcaacaacagttcaagattctctagaataaccaagaaagatcaagaactcttcaagaatcaagggacgaggtcaatcgagttgttggaacccaagagcaagggaaaaacaaggacttggtagcaccatttgggccccaatagactggaacacaaccaagcatgagagataagtctaatgggacatctcctacagtaggattcaagggaactcgacatttagatgagggatcccttgatcgaggacaacaagagactcgttttcgtcgtgagaatcgacttaagaagttgaagatgccaacgtttgatggcgataaccccgatgggtggatattgcaagcaaaaagagttctagttttggccatgattacgacgaagaagagaagattgaagcgactttcatttcattttctggcgacgccttgctttggtatcaatatgagagcaacaaacgagacatctataactgggaggaattgaagaaattgttgctctgccatttccgagacactcaagaagggtcactgtatgatcagttttaactgttaaacaagagggctttgttagcacccttgaagacagtggatccaaccatacaattgagcactttcttgaatggtttgctgccatctttacgagttgaatagtgaattcagagaccaaggaatgtggatgaggcaatggatatcgttcaagacatcaaagaaaggaatagagccttcgtatcgatattattcctcaaattgtgtggcgcaacctgacttatcagcgggagctaaaaagacatcaactagaactttccttgcaaattcaaccactaaggtggggaagctcaccagttcagaaattcaacatatacaacaaaagggattgtgtttccgctatgatgacaagtggtcactaggacattgctggaagaaaaggaagctacaagttatcattgtactcgaggatgttgaagaaaatgggttcgataatgaaacgaaggatgacggtgttgatgccatagacttggacacaattgaagtgcacaaatcaatagaggtatcttaccaatttgtgactggattgtctagcaattccaccatgaaactcaagggtcaactcggcacaaagaaagtggtaatcctaatcaactccaaggccactcataatttcatttctaagtccttagtcactaagctgcacatcccaatagttgagaccaaggctaatgaggttacaatgggaaatggtgattcgatgaaatgtgaaggcatttgtaagaatttgaatattcactttcaaagagtggacatttgggatgatttcttgcccttgccattaggtagtgccgacattatccttggtttacaatggttgactacactaggaatgaccaagacaaatttgacggaacaaaccatggaatttcagcttggtgaacagagcgtaacaattagaggcaattcttctcttgaccgatctttggcgtctttaaaaactatggcaaagactcttcaagcagagaaataagtcattgttcacaaaaccatgtctttcttttcaccttgaggacaatgtaaaggtttttcgggggggtattgataagcctcctatacattttcgatataataggaagacacataagctaggagagagggcttttatttttatctagttggcttttattgttgtcttatttatagtttatcctagctaacactattttatgttatcccgtgcctataaataagggggaaggagagagcagccctcttgaaaaggttgcaattggagatctagcatcttgaaagctagattgttcttttatattatcatcaataaagaggtagtgtttgagggatttcataactctgtgttcagatttggatagattattttattctctaagaataatttcttatcattacctttgtctatttttaagaaaagttaagttaataaataaactatgttggagtttgctggttaaatgtgaagaaaagataaccctaagggttggtttagtggtaaggaggaatgattgaaagtgctggtaggtattgttccacgattcaaatcaccctagactccaaaacttcggtccacttccagtcaaaatgctagtgccaaaaaatttaaataacaaaaataatacgaaattgtgaagtaaatgaaatgtatgaaaagttatgtactacaatttacaggtttataaagcaatagagagcctttaaaaagttaagacaagagtagatcatttgtgataaacaactaatgtgtaaccacgaattagtacgattggattagccatgcaacaaagaatcaatgctgcagtgagtattttgttcaaaaatttctaattttggcaacttgtttaaaaagataacaaaaatataaaagaatatatacaatagttaatcataaacagattacttcgctaagtttctctagaaacagtaggccagaattccaagtttgtttttatcattgaagaatcttcaccactattggggaacaatgttctaatgcacaaggccagaattccgatttatcattgaagaatcttcaccgttgcttggtaaagattttcgaaaggcttgtcttatcccaaagattattttcattcgaacccaaaaacaatttgagaacgaaaaagttgtagcttttcgtaagaagaaaaacgttgttccaatgcatgtataaatcatttgaaaattccaacataatgtgctaaaaacaataccatatcctgattactataagaagtttctctaaagacaaagtgctagaatttagaagttggttatatacattgaaaaatacttcaccattgcctagtgaattttttttgaagactcgtcctatctcaataattattttcgttcaaacctacaaacaaatcataaatgaaaaaatgaaaaagagtatcatgttttggaaaacattgttctaatgtattttgagtaatttcagaattctaacataaagtgctttaaacaataccatatttgagttagttattaatcattgaaaatgttgatacataaacatggaagctcataaaaaaatacacataccaaagaaacataataactgatcactggcacagtggcttaagaaacataattcttgtaaactcttgtattataaagaagttaaacagtcagtagttttcttcatacacaaaagctagataaagtacaggccatcgcatatacttctttccttctttaggcttacttctagtttcaagaaagttaatctaactatttgttttctttttggtggtgacaggctacaagatatctattataccactgacaatcagaaaaaggataagagcaatttagtaaaaccttcacaaatattaagtactacaacggttattcacatagcaacatagtcacgtttattgggaatctgatagagcttgatgaacaagaatttcaataaacgtctatcagaaggtactactttcaactaaccaccatgggttaacatttgttacattaatgaaaggacaactgtggactttatacattccaaaaaagggtcaacgcggaaaagtgttgggatacacttctttggttataaatgccccactaagagaatatacaattcacatttgcaatcctttctcgaatttgtagattttaatgaaacaactaacatcgttttcatattacatccaacaacactattttgcagcagataaaaacaaatatggcaaaagttcaaaagatccctcaaaacaaaatctcaaagacttctcatttcgtaaggcaaagtagattttatggtggggtttacaggataatgtttctattagaagatactatgtagcatctatacatagatatgcatacatataaatcatggatgataagtactaaaacatagcaagtttcaaggattcaacttctgcattcccagtttcccacaaaataaataaataaataaataattgttcacggagaaacccaattgtcattatttcattaagcttaattttccaactctaacaataacgaaatgaagacaatgtagcaaagatatgataccaagctccataattctatcaaaagtaagaagctttaagttgctaaccttttagatgctcttccttcacaacaggcttgatcacagcctcttcttcttccccgtccttcaccgcaagtatagcaccaccgccatggccaccagcaacatcaccaccctcttccttatcatcgggataccgtacaacgacaacaggacaaacacagtgatgaacacaataatcactgacactcccaagttttccatcgttaccgcgtcgcacagccccaaaacccctgct

SEQ ID NO: 55558 - DNA, 1137 bp, Cannabis sativa
aaaaaaaaattcaaaaggtgaaaaaatcatatttatttatttatatatatttatagtgtgttatgcatgatgttaaatgtattatgtatggaatattattttaccctaaaaaatgattttaatgttctaagacagaaagggtacaatcttaccatgagaacagccttagtacagtctctagtgaattgaaaatctgcatactcagattcacttctctctgtgcatagcaaccaatcaacaatgtcttcctttccttcttctggagctcttttcagatgctcatcaatgacttgattgaagaagtcatccaactcatggaagcttctctcaaatcttgcatgaacaccactcaaccgatcaataatccaacccaagtaaggaagaatatcagaagccgtgaagctccctaatacatttattgctcgatgaataatatcttcaaactcatcattgtctagcccacactcctgaaacctctttccaaaggcagtccttagagtcacacttgccgtgagactatacatcttttcactgagatttacaacactatttgtactgtctttaagggaacaaatcagagaacctatctcttcttctctaacaaactgaaatgattcaacacttttgacactaaaaagcttgagaacacagatttttcgaacctgtctccagtgctgaccataaggtgagagagctatgtcatggttgttataagaaagttttgccaaaccagctaaggttggtctgctgcaacactccaagtcatgaacttttaacacctctttagcagcctctgctgaagagatcactatggcttgtcgccttccgaatcggaggtgcataacatcaccatatgttttggagagtttccatagagattggtgggttgtgaaaccaagttggtgtatgttgcctatgataggaagctttaaagggcctggaggaagttgtgatgatgtgttgtattgttttgctttaagctttttttgcatgagaaataagagagaaagaataagaaaaagaagaagaaacgacatggtgtagagagaataatgttaggaaagtaccaccactctagaaattatttatttctagctatatcgatctacatattaccaagaatatataagaggtgcc

SEQ ID NO: 55559 - DNA, 937 bp, Cannabis sativa
  modified_base (26)..(29): a, c, t, g, unknown or other
aactagcttaaccatctctaaaacannnngaatttcactccgaaagacaccccgaatcagatcggacttgaggagaaaaacccgaaattcccccctactggccaaaccggtcgaccgtttttctgggtgcctaaaaaacggtcgatcgttttttcctggcagtagggaatttctggtttttcaccccaaaaaccaatccaacctcttccaaacctgctcaaaccttccaaaatagtataataacataaatataacatatcccaagcatcaaattacagtagtttaatctctaactcaaaatcataagctcaagtgaaggaaactcatttcatttagcttcctcactcacaaaaccatcccaacagccatgaattcaattaaaacatacacaaacaaacataatccaactaagatagcatactcagatctcatctaagcctacagccctgaaaacttacaaaaactaacaaaaacctagctttagaaacctagtaattcaccaaaacaaaaggaggaacttacctcaaggttctaggttggcttggtggttgagtttagctctgaaatggtaggttttataaagaaaagaattcccctaatggctggttcaagcttgcacgagagagagaaggagaggagttgaagatgatgaagttacttagattccaagtaacttaaataataaaaatttctcttctttttctttgttttctatttattttttttttttaaaaaaaaagtcacaacccttaaataaaaataaaaaaggaataaaagaataattattttaagaataatttaattaacctcaaagctaaataatctctaaaataacctaatgtcattttagtaatttcactaatccatcaacccgacattctaataaaattctaacctaatccggaataattcttccattaacgtcgtgacattacta

SEQ ID NO: 55560 - DNA, 1182 bp, Cannabis sativa
  modified_base (27)..(28): a, c, t, g, unknown or other
tttatttttattgttttagaattcatnntaggatgttaataaaacatagtaaaataaattccaacactcagtgcttcttcctcctttttttccatcagtggagcttctactcaggctagatggccctgctttggtgatcggccacccaaatccaccaaagatttggaacccccaccctcaaaaatctcaggtaccctctatgtgtatttttcttttttgaaaatatcctctctgtgttttttgtctcactttctgagatttatttgttgatggcagctaggatatagttgttgttagcgatgtgtttgatgttgaacttggagcagtgcatattaggatattagttctatgactgtgttttaagttattgatacttactcttccgttaaatgtctaaaacatacgtgtatatatacatatatattgtatcctgcatattaggaataatggtatctttattagtcttgaaattgcaatgaacataatgtgaatttgggctttattaatttgcttgaaaatatcaggagcatccaaagatgcagggtgtttcaaataaaattcaagaacatgatgttgccattgttggagggggaatggttgagttggcccttgcttgttccttgggtgagtagtctttcatgtagattttagttatagcttcattgggatcatttctgtgtacttccttttttgtttgggataaatctagcttcagttacaatttttatatgagatatggctactttctcgttgatagcttatgcatattggttatctcaatcatttgtttgttccatcaatggtttaagtgttttaagtaggttgtcaagacatttaggccaccccaacctgatttttttgtggattaactttgatctcatgatggtgcccccttgcaattcaaagagatgacttttggatgaaatgcaatagcttctatactgaatatgcattcatgtgttttaattttatctagattccctttggttcgatcagcattggaaaaattttgtgacattgttctttcattcaatttgtaaatgaatctgaatatgtttagcttgataaattaataaaatattgtgtgggattaggagataataacaaaattagttttgctaatattatttcttttcatagtaaacttcatattgttagaaaattaataatatacccaagatc

SEQ ID NO: 55561 - DNA, 1339 bp, Cannabis sativa
actgaagagcaccaagggtactccgttatagagtaatgtcagcaaagggttcaccatcctttaaggataatttctggtttgcagtagtgggatttggacaactcttggatccatcaagctgaactttgacaagaagatcagctatatatttactctgtgataagtacattcccttagaatttctatgtacttctatcccaagaaagtagtgaagaggtcctaagtcctttaaggcaaaggatttatttagatctgctataagtttggagattagagtggagttgggaccagttactaagatgtcatccacatataccaataatatgatgaaggtagtggcagatccaaaggtaaacaaggaagtatcggaccgtgaagcagtgaacccccattccaacaaagtatgttttaacttctcattccaagcacgtggggcttgcttgagaccataaatggccttgtgaagaagacaaacatgattaggtttagatgggtcttcaaaaccttgaggttgtctcatgtaaacaatttcctaaagatcaccatttaggaatgcattgcttacatccagctatttgaccacccaatttgatgttacaacaagagttagaacagcccttactgttgttggtttcaccactagactaaaagtctcttggcaatcaattcccggtgtttgtaagtaacctttggcaacaagtctagacttataggtgttgagagatccatcagcattaagcttgattctatagacccatttattatcaattatggtcatgtatggttcataggcactaaagtccatgtttttgccttgataagagcagtattttccctttgcacagactgcaaccacttaggatccttgagagcttacttgacattcatgggttcacttagtaataaagattctttaagaggatgcttagtagagagatatgccttgggtttatggatgccactctgagatctggtctgcatagagtgtgttctagcagctggtcttatagttgtgcttgatatgtttgtcacctcagtaggaataacagcagcagattgtgtaggagcagctgatatagttgttgtgtcaggtgtaggtgagggattgggaatttcaggtactgagtttggatttgggtttgctggtgcagatggtgatagtgtagttactggtggagtaatttgggtgtttggggattggataatatcggagaatgagtggataacaggtgtcggttgtgagatatgtggtaaaataggtgaagtagcaggtctggtattttctggtggggcaggttcagtggtatgtagctcagagggtgaaggtgagtatgatgca

SEQ ID NO: 55562 - DNA, 1109 bp, Cannabis sativa
cagtggtacaaaaggtttgatgagtttgtactcagaaatggtttcaaaaggagctcttatgacagctgtgtttatgtcaaaaacaacaaaactagtgcttatctcttattgtatatggatgacatgcttatttcatgtaaagacatacgagagataaacaaaattaaagctatgctgaacaaggaattcgaaatgaaagaccttggttcagctaagaggattttaggtattgacatcattagagacagatcaaagagaattcttaaattgtctcaacatggttacatatctaaaatcctcaacaggtttggctttgatcaagttaaacctgtcaagaccccctacacaccactgttcaaaatgtccaaatcacaggcccctaaagatgatgaagaagctgagtacatgaacagggtgccttacccaagtgtggtgggtagtctcatgtatctcatgatttgcaccagaccaatatcagttatggtgttagcatggtaagcagattcatgggacaacctgagaaggagcattggaatgtggtaaaatgggttatgaggtatttacaaggcactagacaacttggattagtctatggagcaaactcaaaatctgtcaacatagcaggctttgttgattctgattatgcaggtgatctcgacactagaaggtcacaatctgggtatatttttcagtcaaatggatgctctatttgctggaaatcgaacctgcaatccattattgctctatctacaacagaagcagagtacattgcatgtactgaagcagtgaaagaagccctgtggctcaagggaatcttcatggaatttggtctggaccaaagatgcataactgtacaatgtgacagtcaaagtgctttgcacttgagcaagaaccaagttttccatgagagaactaaacacatagatgtgaagctgcattttatcagagatgtcctagttggaggaaaagttaaattggagaaggtatctactgagaataatgcagctgatattctaactaaggcacttcctacatctaaattctatcattgcttgaagcttctgaatgaattggatgtccaacaagattgatttaccacattgtttgta

SEQ ID NO: 55563 - DNA, 1876 bp, Cannabis sativa
atttttaaaaggattaaagaacagttaaatcgttctgataagtatattgttgtgaaagacgaaaaaataccaggatatactctttgtttggtcaaaaaatacataaaaagtgaaaatggaataaagcgtaaggttcttatttctaatgaccatgatgatgtacgatgtgactgctattggtttgagacaaaaggaatcccatgcagacatatttttatttcattaaagaatttggagataatgaatttttcaacttgtttggtgaagagctggtggctaaacgatgctaaagatatgcaatctactactcttggtattgaaagaaggtgtcctcatcctgaagtcattgaaaattctaggtacagtagtgttacctcccaaacatgtatcacatcttaccttgcttcaagatctcaagaagcattcgagaaggtcatgtcagttatatctaacttgaatgcagaattggaaaaaatacctttagacaaagagttcaatattcttgacaaaaatgaaggagaattccctaataatatattggactctaagatcttaaaaacaagaggcaggccaactatagcaagctcatctcgatcatcctctcaaggaaaggacaaaaataaacgtaaaagcgacgatagacattgtgccatctgtagtgggactgatcacgataaaagaaactgtcctacaaagccaaagttgactaccgatagtcctatgaagccaaaattaccaagcaagaaaaatgatcacgccaagaaaaaaaatgaaaggtaatatgtaataccttatgtttaagtatttttttcaatttgctatttaattctttctcttattttctattttcaagacttattatatttattttggaaatttatagatcaatgaaaaagttggtaaaattaaattattattatgtttttttgtgtgtatactgttttattattatttttttttgtctaattatctagagaaagagtccaatattcttgacaaaaaaccaatatttctataaaaaaaaaagccctcagaaaacctctaatttttcagatgacacaatcaaccaacagccacaaatgaaaactccaatcagaaaatcaggagatcccccaaaaccagcctgtaaaaattcaattgaccattctcaagcccaatcggatgatcctcggaagatctattcgaataccacgctaaaaacggagacccacccagatcccaatccatttgcctggtcgttccccaagctgggtgtcgacgaaatcgaaggccggggcaaagggtgacaccgagaaccatccgaatcgaatccagattacgcagaagatgttccaccagggggaggaggagaaacgggtccggaagccatgggttgattttgagtttcgtccttgtgcttagtagatttttccccaccaagcaggtatttttttttctctcttatagattaattatgttcattcaaaaaagtttattttattatttggatgagttttggtcttttgaatggttttctcttatagatttgttagtcttttaaatggcagattttacccttccagagatccttggatggacctaattagtatgttctttcaatcaccatcgcaaatttaaatggtaaattttaaactttaatttaaaaggttgctttagacaacttcttcagacaccatcccaaattcatcaggtttggttaaagagaagattgctaatgggccaatcaagtaggagagattccttaaattgagctacttgttgaatgttttaactaaaaatctagattgcgtaactacaattacagtaaaatttaagaataaataaactttaaattttaaaactatttaaaaatcaactaataaatccttacaatatc

SEQ ID NO: 55564 - DNA, 1362 bp, Cannabis sativa
aaaaaaaaaaaaactggtttaaagtgtaaaaataaaaaagcccattttttatataaaaaagaaagcataaaaaaatatcttcaaaacaactatcaccgtatctcacttgtaccactacatttaaagttgatataatcattgtatctcatttttagtcatcgttaatatcattttgttttgtacataaaataaatgaaacaattgtcggtaagtacttattttgaatatgtaagtgaattatttgttataaattaattaattgaatcattagttatcatacatagttatatgtttttttaaaaaaaaaaaaataataataattaataaccactatttcttttgacaaaattaatgatttttttttctgaaacaaattaatgatttttaattaaataaaatagaataataagaataattaactaattatctctaaataaataaagttgtataaaaatagaaaaataagagaattaaggagataatttaaagtagaattaaaaaaaatgagagaattaagaacaaaataaataaaagtatttgaagcaattttaggctatcatgtcactgtcttatgtctaagtttacatacatagatatatacatatatagattatacataaatatatacatggaacacttctcaatagatattacccattaatggttactgaacaatttaactataaatattaaattattagattttgattcaataacgaataataaaagagaaatttaaatttctgtacttaatttagctgttaaattaaaaaaatatatatatatcaaaaaatatcactttttatactatattaaaaatatatttatatacaaaatacttaagccaaatttaatttttttttagtcaaaaacttttaattttttttttcaactgatgcaataatcgatcccaactcatataatataaaaatgagaattttttttttttaattagataaaaaaatcgagcataaaaactcaatctttcaaaatattactcatgaataggtaatagctattaaaagtgtacccatttagatatatagaagatatagattatatttcactttttctttttcttgtataaaaacaatctctctatatatatataatataaacaaatatttgaattggaaaaataaaagggttattatctattaaaaaaaatactcttattcctattatttaaaagaatatcgtacatatattattaaaaaaatagttattaataaatatctaatttaaattttaattcataaataatctaattacagtaaatatttcaattgatatttatactaatttaaaatttaaataatgaattttattgttataaatatttttaacttatttttttcctta

SEQ ID NO: 55565 - DNA, 1338 bp, Cannabis sativa
actgccgacacttcatgttgttcccttggatgtggtgaaatatatgaactcaacttatgagcagatcaatacgtggaaactaaatgaaccaccaattatgggatagaacaaaaggttctaggatgaccaggatagcaatcaaagtgagtatgagaaatggcaaccttatcttgagtgttcaagatgtaaaaaggcaccatttgggctaatgtagagctaaatcttgttattgtgggatagcggttaatctgaaaagaacttgcccacagttaagaaagactgatgttaaagaagaaaagtgtacgagtcctacccaagtgctaattatgattcaaagggacctgggtatcagtcctttgactgactcaagttagaattttatgggtaagattatagttgttgtttcaattgatatcgatatcaaacattttacactcaatgagaggggatatcaaaatatctgcatatgggcagtgcgtgtatgttatttagtgataattcatctaataaggtagacagattagaaattaaatttgttaatattcccaagtggaacataggatctgagtagttaatggaaatatccatcgtatttatttagagaacggagtattttgatataaagtgatctagtgttagtataagtggaacaaattatgagtattgttaaaaaccctaggtgaattaaaggcaacgattatgtgggtggatctattcactaccagagggcatgagtcaagctgtgacaattagagtcccgtgatccgcggaggaaagaccaagagctgtataatccacattgcccgggaaaaggttgtatgtagtgattttaaaattatatatgcatgggactacatggtgttgaggacttgaatgaattgattgggactacctatattaggaaaaaaagtatcctgtttcggtagcccatcatgaaagaactccacagttaagtgtccttgacttggggtgattatatttaggaagtttttccatgtagcgtgtgagtaagaataaagcacattggaaacacttggatcggtctgtagggccagttatcagtctaggaagtagctaaaatgatgcacttgtataagagccattatttcgtgggtgtaaggggcccaatgtaggctttaagcggggacattactagggtaacgtataaaagaacaccagggagagtagtgatatcactaaggtaaggaagattacttggattacatatggtgatacgataatgatagaaaatacttttatatttgatcgaatggtcaatctggtatataaggagactattgaaattttggaaatggattaccttattaagcaatgatg

SEQ ID NO: 55566 - DNA, 1869 bp, Cannabis sativa
gtattaatttagtgttagttattagttacatactaattttttttaaaagaaattagaaaaataagtattaaaaaaaataagaaggttaagcatgacacatcaactccttaaaatcttcctttatatatatattgattgatgatattaatattgattgatgattgatattgatattgatttataaattcttatatcttacatattttatatttattattatactatatatatatatgatataatacaactttaaacataatatatatatatatgatataatacaactttaaacatataatatatattaatcttatattaatatataatatgtcacatttaaatattttaatctatattatattataataaataatataacaatttttttataaataaaattcacccaattaaaataaactattaaaatattcacattctctttctcctcccttccaccaatttcttcatctctattttatatgaatcataatagcttataatattcatcatattttaatttccgtaccaaacttatcttcctatccctccaattaaaagtgggttttttttttcttagttagaagaaacaaatgaagttgaaggttcaataaagatgtaaataaatagtagaaaagtaaaaaataaatcatttaatataaagtgtgctctaattatgtgccaaaattgatataaatttggcatataacaaattttgtgccaaatttagcacaatgatataaaatttaaaccacaataaatgcactatttttttatttacatttatgtcatttgtattgttttattaatatatttaattacgatattaaattatagaatatttatattattttttattgtcttacatattaaaataataaaaaattgattataaagttattagtttttatttttttaataaaacattatttaaatattaaattttacattaaaattttgtaattgtatattgaagcataaagttaaaatttaatataaatttaccacaaaaatattttttatgtcaaaatataacacaatttttaaatcttccattagaaatagccttagttaaagaaaaaaaacatattgataaatacaattacatacaatgtttgtggaacattgctgagttagtggagagtgagacaaaggccgatgcttgttaatgggtaaaaccaatggttgattggtgatgttatcaatgactcatatcatatttgataatcaaccttgtttctattttaatataccaacttccttttctttattctatatattccttgtcaacttaaaacaaaattattttgagtactcttcagaagttgagatgtacagctttaattattttatattattatgaaatattagtattatgtaatattataatttagagaaagaaaatagagaagatattaaaattttctgagtgttttatttcaatagtaatcttctatttatacacatacaaaagtcaaatattaagaaattaagaaaaaatgaaactaataaaaaggaaatgttaattacattaataataataaataaaaaatttggacatctacataattaataatatttataacatatatattttttttaattattgtatccttttaaaaacttttgggtggactacatctcatctaattataattagattatatttttaaatataagaagttttcggatatgaaattgtaattatttataaattcttaatatttacaaaacagtgaataattacaaaaaaaaaaaaaaatagtacttaatattgatagtataattacacccaattcttataatatacaaattatagagtgtaattaaagtctatcaattacttctaattacatacatatagtgtaatta

SEQ ID NO: 55567 - DNA, 1242 bp, Cannabis sativa
  modified_base (43)..(44): a, c, t, g, unknown or other
  modified_base (580)..(598): a, c, t, g, unknown or other
tattaggatgttaatgaaatatatttgttagtaaatctagatnntggtaaaatatttccaacactaagagcatctcaaatggtaaaattttaaaggatactttgttaggtagatatattatatggcaaaatattgagatgttataccattggagagaaaataatattattctaaaaatttgtatggatgctatattgtggcattgtatgggacaatattgtcccacatggattaaatgtaaatatattgagccatatataagaacatgggctacttcactcatcaccaattggttttgagatggaaccccatgattctcaatatggtatcagagtcatatccctagcgggcttttgatccacacctatcaaagtgttagctagccgcaagcgagcaaaatggtactcccagctacgaacaagaataagtgagcaaatggaactcccagccacaaaacaaacaaaaataagtgagcaaatggcactacttatgataaggtgattcaagagtgagcaaaaatagccaccatcttgagggggaatattggacaatattgtcccacatagattaaatgtaaaannnnnnnnnnnnnnnnnnnaacatgggctactccactcatcacaaattggttttgagatggaactccatgattctcaacacattgatgctattcattttttttaataaaaaattgaagctaaaaaattattgtagctaaaaattaagatatatatatttaataataatgtgtaagatcataattatagtatttttaaagagtgttatacattggagtgtttttagaagtaagagtgccaaaaatgatgaagaagaaaaataaaataaaatattatattttcaaatgatgtgtaaatttttagcatccttaaaggattttaccattggagatgctcattttttataatcaagttctaatgtgtattgtgattagtaataatacaattcaaagaacatttatttatttaacaaatgaacatgattctttgttactgtacaatgaatgttgtcgtaatggcaccatagttagaaataggaaaatttacaaaaatattgaattttgggggcagtattacatttatactgctacgcgaagtttttacaaaaatacagtaatatttttaacataagtcacaatgtgccatgtggcactttcagatttgttacactttttggagttagttaagttagttgataaggggacttattgttggaaattatttt

SEQ ID NO: 55568 - DNA, 517 bp, Cannabis sativa
tatccgatggggttcgatactatccgaatggagggtccgatggattctagtatgtttggaattggaccccatcggacccccatcaaacatgaaatacatccaccaatcagctactatgcatcggaccaccattgaatctatatcgaaccactatcaaaacttcaccatcaacttaaaaacttaaattttggaacctcctatcgaacctatatcgggcctatatcagacattatcgaaccaacttgtaaagatagaaaacaccagaaaatcatagagaatgtcttcattcatgttctctccattcatggtatgcatttgtggtctccaatagtggtggaagtctctctgttcttagttgagaaagagattggcgaggtctaggtcgaattgaaagggggccttctcgatcgatcggattggtttggtctcggttggatggtggcgatggtcgcggtggtcgcagtcttggatcctttaatgggttttcattgggtattttagtgagaaccaatgagag

SEQ ID NO: 55569 - DNA, 876 bp, Cannabis sativa
gctaataatatagtgaagttggggctcttgtgtgttatgtctttttcatttttgcttcttacaatattctcctttaggctatgtttggtaaggagtgaacgtataaaatttggagaatatgatgaacacagatatgggggcggttagaaaatgatggaggaaaaaaagagaaatattaaaaggtattaatagtgcctaattacttgtgaaatgtaattttgctacaactcaatatcaaatcttacttgttttactttaataaatattataaaaattactaattaattataggatgatacttcagcgctagacaccaccatgggtgccttgtggcaatgcttaggaaaaaattctcatattatagttacttttcatgacactcccaacaactatactctactcgattgtttaaaattttaaacgtatccacatacaaaaataattattaaaatttaataattaataatatatgttaaaagcaataaatagtattctataaatattaagcgtgaatagtaattttataaagaaaaaatttttaaaatgaagaagaaagagtttagagtactgatttggtggtatcagtgatacttgtcaaagagaactcttaagtattgttcagatggaagaatgtactttctccttaaatatctaggggttcacttgagacctaccaaatggaaggcctctaattgtggaaccattccttataaagttcataaaattttcataattgggctagtaagaacatttcttttacaaggagagctcttctcatcaatactctcttattgggaatcataaactcttggataggtatctattttacctcaaaaaattatggctgccattgataaatattgcatggactttctt

SEQ ID NO: 55570 - DNA, 679 bp, Cannabis sativa
aaaacagagggtctaaaatggtatttaccctttttttttaagaaataaaaataaacaggttacatcaacaatagattatttgtttgagataacaagaatgaaagaatcgtggacggtagacctcaaagaaaaaacatgcacgtgcaataggttccaaattgatgatatatcgtgtggacatgctatggttgtgatgaaggagatgaacatggactcatacaagtactgttcagattactacacaaagaatattagctagcagcttatgcaggaacagtatacccattaggacaccaaagtgagtgagatgtaccgcaagatgtgaaagatattatagtcttgcctccaaatgaaaggattaaatctggaagactaaaaaaatgaggaggcaagctggatggaaaagaataaacataacaagttcagcaaatgtgaagagttggggcataataagagaacatgtagcagaagacatcgaaaatacaagaaaatccaaacaactatagaactattgtggaacagcagaagaaaactgaacatacattagagcataggatactacattgaatttagatatgtacaaaaaacatcgtaaaccacccaaaccgaataacccgcccaaactaaaccgaaaaaatcgataaaaattacaaaccgaaataacccgaaaaaattacaa

SEQ ID NO: 55571 - DNA, 988 bp, Cannabis sativa
accaaaaattattaatgtaacaaccttagtccataataattaacaatcactactattatattataataaaattctttttgattaaatataatatttatatacgcattataatttgaaatgatataattaattttacataaataaatgtataaattatatgtatgtatatattttattaagatataattatttttatatagatatatattttcttaaacaatacttaaaaatgtataaattagagatgattaagtattattaattcttaacaaaacaaataaagaaaaaaaagctagtctagacgaaaggtataccaataactgaaaaataaataaaatataaaccacttggaaaaggtggagtgcagatttttttttgttgaacagttcaactttttcatttttttcacaatacccaccaacatttatttagtgaatattttaacactttttagtgcctagagggagtggaatttaaggaccaaattaattgctaattattattttaaattcttaaaaacattcttttcttttcttggtaatgtcatttatgacatttcaatactgttataatctcccattttcgatctctttcaattcaacctcgttttaatacacaaaaaataataaacaagttaaaaagagtttttcaatacttgtagttgtaatacttaattacacaactcatctagacttgtgtgactttatacatacaagaaatggactttataatagaatactaattctctacttttaatgtcggaaactatagtgtagttgtgttaatgattcaactttcatggtcatatattataaccctttttatattcactaaattcatgcccacccactacttaacatgttaatttgtcaaagatgatttgggcgcgtttagaaactattatagtaattacactttattttaatatgaaataaaaatgaataatttttttgatatttttttacaataatgtagttttgatggtagt

SEQ ID NO: 55572 - DNA, 1181 bp, Cannabis sativa
caatcgcaaaacctctcaatgcattgccaataacttttaacttcttccaaattcactctcccaaccaagattaaatcatctgcaaagaaaatgtgggagagtatagggccacccctgctaagtctaataccctttatagaacctttacattgtgcatcgatcaaaaatctagacaaaatttttgccgcccaaatgaataagtaaggagacaaggggtcaccctgttgaaggccgcatgagagcgtgatgttaccaaactgaccaacattaaggcagatattgagagaggtggtagtgatacattaggaaatgtccaacctcaaaacttttgcagtgcaccaaacccagcaagcacatggtcaataaaattccagctcagtttgtcataggctttcataaggtcaatgtttatggcaaatcaaccttctttgccttttttcctgttgaaggagtggataatttcttgaatgatcacattgttatcttgaatattcctccccaaaacaaaagcagcttaggtaggacaaatcagagagggcagcagtggcttaattctattagcaatgattttagaaattaccttgtacataacattacacggcgaaataggcctataatggtttaatcttttcgggtttcggaccttggggataaggactatatttgtatcgctgacgcctttatgcataatgcccgtccgaaaaaaatctgagactacatcacagaagtcctcacccacattcccccaatagtgcttgaagaaaagaatagacatcccatccggtcttggggctttattgttacccatggcaaagagagtactatagatttcttcattggtaggccctttcataagatctgcctggtcatcgacaaatatcatatcctgaataaggtagtcacagtttaaatcctgaccactgaccgtaccaaagaaaattccttgaaagaagtcaatgaattccttcccaatcaagtcacgtctagaaatccaaacattatctttgtttaagatattttcaatagcattccgtcttcctccgatagctgccgagaggaagaagaacatcgtgtatttatccccatccaatagccaattaaccctacccctttgcttccaatataactcctttctttaccaggcttcattgagagcacgtcagatttcacattcagaaccc

SEQ ID NO: 55573 - DNA, 1152 bp, Cannabis sativa
tatatatatatatatagttttatagagggaagaggaataataataaaattattgtttgttgaaataaccatatttgttctctttagtactttttattacatcttaattagtaataatatatattattactaaattagagaggatcagttccaattttgggactttgtcaaatggaccaaagacattgtatatacaaaaataaatttgatatgcatatatttatgccctgaatggaatgaaagatactcttcttgttttctgagcttggactaattgtcaccacacatatgtacgtatattcttttacgtaatctccttactaatttattttgatatgtatatttatattgattgttaacgagtaacgatggaattcgtagttcttgcctccccctccataggacaccaaaaatttgaagaaagaaaaagggtttggtaatccttgtattgtatgtcttctatattgtattaaattagtaaattactagttgggctcatattgtaattgtcttctatatatattgtattacaagcagatactttaattagctggtagcactcaatcggactcagtcatgtggatttcttattagtaaggttttatcatattcactttctctggtaacagctattaccaagagataggtgtatttcaacgagccgatgtgttatttgaaaatattatagttttattgtctaaactttaagtgtaattttgtctcatgtggttagtgataagaattcgacagtctatggtttgacaaagcaatgtccttcaattagacgatgagctatcctgattcgaggatgttctaggaccgattgcaaatacctgcatatgtatgcattttgattagggttgtattctatagttatgattttaccatatgtctttctcattctgtctaaaatctattttacagtatagacgcttatgacctccccttctatgccatgctgtaatgattcctctggaattacgagctttaccacaacgatgttgtccatagatcaaattatttcgtggagtggatttcactccatctgtatagatatcattctctacatccagaaagccgtatgctttggaagaagcttgtacagtttaggaaagggttttgattgattaaaaagaagaatctacttcaaccg

SEQ ID NO: 55574 - DNA, 787 bp, Cannabis sativa
tagattgcctaatgtctttagagaaaacctgctgtaaagagcagattgtaactgatgtaacagttgaaggttcggccctgctaggattatgtcatcgacataaactagtaaggcaatgaaggattcattgtgacctttggtaaataaggtgtaatcagcctttgattgcgtgaatccttcctgtatgagagcgtcagaaagctttcggtaccactgccttgaggattgttttaatccgtaaatcgacttgttgagcttacaaacgatgttggaatttttatccatgtgttcgggtagatcgagacctttaggaagttccatataagcttcttcgttgagatcgccatttagaaaggcgttgtccacatcgagttgcaaagtgtgccattgcttgatggttgcaatagcaagaaggagcttgaaagtaaccatttttgcgacaggagaaaaggtatcaaagaagtccaacccttcttgctgcgtataaccttgtgccacgagccttgccttgcatctttcgacggatccgtcactattgtacttaatcttgtatacccatctacatcctatgacccttttgtttcttggaagctgaacatatgtccaagttttattctttagaagggcaaatagctcacgttgcatagcttgattccatacacggtattgagatgcttgattgtagtttgttggttcaaaatgagctgtcaaggcaagaataaacgttttataagtaggcgataaatgttcataagacaaatatttatttagagaatgtggagtagaa

SEQ ID NO: 55575 - DNA, 775 bp, Cannabis sativa
cctggcggaaatgtcaaccgggtcgattctaagcccggataaaccgctttgggagattcatttgctggtggctcacaagtgcgccgtgttccgaattcaccacgcgctcggggacggtatttcgttgatgtcgatgctggtggccggttgccggaaagtcgggaaaccggaggaggcggcgagcatgggtatggttgttagtaagaaaaagaaaagaaaggataattggtgggaatattattgggatgggattgtgagattgattggtgtgatttggtttagctttgtgtttgtggtggagtttgtgatgaagctgatgtgggtttctgaccgtaaaacggtgataagcggcggcgatggggttgagctttggccacgtaagctggctactgctaggtttcgtttggatgatatgaagatcgttaagaaagccatccatgatgctgtaagtccttctcacttttattttttcatttattatttttttattattattattattactattattggcaaagcactttgatttttatcattactgtttgaattaaaaaaataagcattatataagaaagagaattggtaaaaaagttagcattgatcatctttatgatattggtattggtgtaattaaatatcagctttcctataatttaagaaaataaattttaattagtattgtaaactaattgtaaagcgctacggtgttaggtacgagatggaaatttataccgtggggatgggtaaccgcggggacccgcccctaatagggtgg

SEQ ID NO: 55576 - DNA, 1444 bp, Cannabis sativa
gtcatgttaaacggtctgctaacaaagtcacgcactgtatggcacgtggtgcttgttattggtcaggtcgtctctttactgagagtggtattccccttgctcttcaggcctctgtattagcggatgtttctgtctaataaaaattattttcattcaaaataaataaataaataaattctatcaaaatatcaataaaaatataagtaaaagatgtaagtaataactttctaataaaatttctatatataaaaccttccaataaaattaaataaattaagataaaaaatacaagaaaaatctctttttatattcccgttatcagtaattaaaattttggagatacattattgtgattttattgggtttggtgacattcttatacttgtaaaaaaaatttaccatcaagatatttaatttaatgcattgagttaaacaataattatcttatactttcaaaagtcatctttatcaataattaagaaaatatcactatattacaaggacaaaacaaaaataagaatacttactatggaaattttcaatgtttataataataaaagtttgaagagcaaaattctaaaaaaattatagttggaggaacaaattctattacttcttaaaatttttaaataacatttttaccctttaaactatactatattactacaaaaatgctttttagtgacccggtttgagagtgtctaaagtgttttagtaacccttcaatgcgggtcaccaatgtaagtgtcaagaaatatattttttagagttgcaaaatgtgtatcagtatatcttttttttttatttatttttttatttcatatatatagtaactgaaaatgtgtgtcattatattattttttatttcatatatgtagtaacttaaaataggcgttactgtatcaatgtatatattttttatttttttaattttaaaagtataaaataatatattaattattttttttaataatcaatattttctactaatcatgctaaaactcaaagtttacaaatgaataatttttttttaccaataataatctttttcatatacagaattgaaatgcataatttaaacccaacgcaaacaaaatcaatactaattatatcaataatttctcaaaattaatacagctctaactcagtacatcatacatcatacatttttgaaaaagaatatcatttacagtcacacaaggctcatttgcaacatacatttttgaaaaaaaaaaatcaattacagtaaacaaaatcacacacagaatgaagaacaacctagatcaaccacaaacccaaaactcgatcaaacaaaaagcctcatcgaacatagccctttccgtctacttgcacacacacatcaacagagagaaataaataaagatgcaatggagaagaccatcaacgaggaccattcgagcaaaaatgagagagagagagagag

SEQ ID NO: 55577 - DNA, 1776 bp, Cannabis sativa
aatcaagattgcttatatcaagtaattgacattagtgaatcgtactctagcaaccgtcgttattaataagatgattctataactttaatatgtttctggctattttattcataacttgtaaatttaattattcgtacaatgtaaagtcataacctcatatatgaataaagttttttcaatatttacatagaaattattaataaataattcaacattcaactatatattaaattgttcaagttatttttataatcaaaatgtttataaattttcaaggtataaattctaacaagtggtctaaaccttctcaaagctggtttatgggaatttatctccctacagtgcaaagctcttggcttgtttggaggtgcttaactagtgtttttatttttaaagtgaatgctccaatgcaatccatgctatttataaaggtggtgacttatatgaagatgtggtgattgttggagatacttaacactatttttctttatgtaatgttgatttttgtcgaaaatggtcatctactactcttcagtcttgtgtccctgttcttctttctggttctcttctccgttgacgtcatttgtctgtgtgatttctttgcctttgtgtgttttctctactgtcttttagtgtccattttaactctgttttcccttgctcctcttgtcctgtattgtctctctattttttgcttctcccttgtcgtgccccttttcgcttttctctttctttcgttggtctgttgtgggtcttgtgcaggtctctgtgttggtgagtggtgttgggtgtgggtgtggtgtgtttgtattgtgtgttgtggctagaactcgtgtggtgtgggtgttttgtgctttttttttatccttttccttattatcttctccctttttgttggagagtatgtcttttttgtctattttaatggagttagttaatgctactaaccccctgtaaaaagtaaatgcttttcaggaaatgaagcctctgtcactttgactctttgtgcctcctctctcaaggtattatctaccttttgtctctttggaaaagtggtggccccaatgcttgtggatgaagccacagtcattgactttgtggctaaaacttggcataaacctgtgtctgtagtggcctaatttgaggagtacaataactctaactgctttgaatttggttttgaccttgctgaggatagaaattaggcatttgagaatggcccctggtgcataagaggttatactctggttcttcaggcttggtcttcgagagatgaatggaaaatacattttgcttgtatgagactgtggatttaggtccacaacctcccacatgaatatttttccacggcaaatggaaatttcttgggaggcctggctggtaaggtcttgattgtggatttaaaggaagataaatcggcctcctagagcaagtgtcttaagatattggttgagattgatattgctaaacctcaattctcgggttgtttttttgacttggtgtctggtgtaaagaaatgacttcagttcaaattttaaaaaataggtatcttctgctataattgtggttgtttgggccaccaacgcagaggttgtaacctttcttctccagtcacgattgagaacgaaaatggtgtcccctttcctctgtttggactgtggctgtctacttcatcatcgtatctggatgtgttctcgggtgctaattcttttttcccaaccgtgcttcttccttgttgcctgttcctcaacgaagtcgaggctctgcccttccggc

SEQ ID NO: 55578 - DNA, 995 bp, Cannabis sativa
aaacttagtcaaactcttatttcggatggtttcattcaatctctctcggacaattctttgttcataaagaagacaaacaatatcttcttggccattctcatctgtggatgacatagtggttgcaagcaacaatgacaatgccatatcacacttcaaaacatatcttcatgacaaattcaaacttaaagaccttggcactattcgctttttccttggtcttgaagttggtcgcacaaagaaaggcatttcagtctctcaacggccttttacactttaattactacaagatacaggctacattggtgccaaaccagtgtctatctccatggaaacaaacctcaagttaagtaaagataaagggaatcttctcccagatcctacagcctatagaagtctcataggcaaactcatatacttgaccattacgaggcctgatatttcctatgtcatgaaccatctaagtcaatttttaacttgttcacgggttccacatctccatgctgcacatcgtatcttgcagtacctaaaatcaaccccgggccaaggactgtttttcccttccaacacaacagctactatttcagcatatgctgaaacaagcctttccccttccaatgttcaagtatccttcttctcggatgccgattggggggcttgtcaagacacaaggcaatcaatttctggttattgtcttttccttggcaactctctcgtgtcatggaaatcaaaaaaacaacaaactgtttcccactcttctgctgaagcagaatatagagcaatggctaatgccacttctgaactcacttggatcatcgctctcctcaaagattttggcgtcaaccttgctactccaacactgctttattgtgacaacaccgttgccaatcacattagtgaaaatccagtttaccatgaacgcacaaaacatgtggaaattgactgccacttcatacgagagaaggtccaacaaggctcgatcaagctacttcatgtct

SEQ ID NO: 55579 - DNA, 1412 bp, Cannabis sativa
atgttttcaccagtacccactctccatttcaaaccttgaactaaaagctccttcccccaaacaatacttctccatgttaaagatggagtagcacctaacccagctgcaagtaagttcccatttagaaagtatctgtgatgtagaacacgtccaaggagagagtttggagattccaacaatctccaagcttgtttagcaaggagtgcttggttgaaaagtatgaaattccgaaagcctaaaccaccatgaattttagctttgcaaagggaattccaatttttccaatgaattgcattaccagatgatgttgatccccaccagaagtttgacatcatgctttcaatttgattacacaaagtgactggcagacggaagcaactcatagcataagttgggatagcttgcacaaccgctttcaatagaacctctttaccaccaattgagaataattgctctttccagctgctaagtaacttccatattttatcagtaatactgctaaaaagctttattttatccctaccagcaaaagatggcaaaccaagatagtcctcatgacaaggctgtatcggcatgttgagcagttgttggaaaaaatcttggttttgagactttgtatttggagagaaagaaagcacacacttgtcttggttaaccacttgacctgaagcccgtccatagatgtctagaatatgcttaatagatcgtgctgattgatgatttgctcgacaaaagagtacactatcatcagcaaaaaagagatgggacaccgaaggagcagttctagagacttttaacccgtgcaatgatccattttgttctgaagtttgcagcagccttgagagtccttccgcacaaattaaaaaaagataaggtgagagtggatcaccttgtctaataccacgtgtaggtactaactcacccaacacttgtccatttaaaaggaaggaatatgtgactgattgcaggcagcggagtatcaagtcaatgacaacagatccaaatcccatctttaacattacttgagcaagatagggccactcaacacgatcgaaagctttcgacatatccaatttaattgccgcataaccttgtgtgcctcttttacgattcttaagggaatggagcaattcaaatgcaacaaggacattgtcagtgatcaacctttgagacagaaaagcactttgatactcagagataaccaaaggtaagaatggctgaatacgcagaacaattgatttagatattagcttgtaaagaacagtgcacaaactgatcggcctatattgagtgataagttgtggcttcttgacctttggtattagtgtgattatggttttattaaggagtgtaggatctgcaccattgttcaacacatccagaattgcatccgtgacaagtgaacccacaat

SEQ ID NO: 55580 - DNA, 951 bp, Cannabis sativa
cgtacttaacttcataccaaacaaattatttctatctcaactaaaaaagtatatgctattaataaaagtaaaattaaaatctcctaattatatacattcgtaaaattttggtgaatctcttttaattactctaaattaatcttttttaatagtctatattttaattaatgattaaatcaaaataaatattccaaactaattcaaattaaaatattataaatatctttttagactaattataattaatctcttttaattataaatatttttttaatataattttctgcaaaccgaataattagtttactcacttttacaataatttatataaaatcttattttatataaattattgtaaaagtgagtaaacaatacttaattatattaatttacataaaatattgtaacaactttagccaaaaaaaaactctagttaagaagtgagcttgtggattgttttacaaaatgcaaacagacattagctagataataattaatcaaagttttacaatttttaaaattaaaatgttttttcgtttttatatttcaaagcaaatttctttttcagttttacaaaaattcacatggcaacactcaataacttaaattgtaactcaaattcatctaataatccagctcgtagcaaccaactaaagtaacaactttaaccataaaaatgaaaaaaaaaataacatgtacaataattctcctaaaattaagttacttaagttaattaactttaacaaagctactgtccaacgcagattggctctcgtttttaatccattgcccccaatccacgccatttttctctttccaaagctttcttctcttcatgataataactcaccatcgagttaaacaatcacaattctcgactggatatttgatttttttttaaaaaaaaaaaaaaagaacgaaaagagattgcggtgaacgtggatcgaacac

SEQ ID NO: 55581 - DNA, 897 bp, Cannabis sativa
tgttttgaaaaagacagtatataaactgtatagtaaagtagtaataaataccgtgtgacagtataaaagtaataaaatgccaaaatacagtataccatgtaagaattccttattatcaaaaggcatattgccggctaaaccacccaaacttttgggtttgttacagttaaccacaaaaacccaatttttggcggctaaactatctgaaccccagttccgttttgctcagcactattccgtcactcagtctccttttaagtgcaaaattggtttacgtggcacgatccacatcagcaactcatgccaccttggcattaaataaacccctctcccaaaaaaaataaataaaacttaactcaaaaattaaattgaaatcctaaattaaataaaaaaaaaacagaaatatacccaaaaaaaaagacaaaattaaaaactctaaaataaaatcacctcctacacgactacctcaattcaagctcaaagtcctttgaattcaaagctccaatccaagccaaaaatcaagcaattcactccaaaatcacaattgagaaagaagagggtttgagagagagaggggttcaggtttgggggtagaaaaacaagaaaatcacatttcattttcttaaaaaattcaactcttttattaattataaaataagggttgaaagaccattttgcccctagggccaaataactcttccaaactcaaacaaggacatttatgtcattcacacacaatttcaaacccaattaatttcagattattcatcaatatttaaaatgtcactaaatcaattccaatattgcatttcgggcctaaaccaagttcggcccgaaaatactcggttgtgactatatatactgcaccaacctgtcagaacacacctgaaaagacaa

SEQ ID NO: 55582 - DNA, 1166 bp, Cannabis sativa
aagattcaattattttgttgatgcatatctatttttcttatacatgtggtaagcaatagttaaaattttatttttagcattgtaaaatatttaattttttattttttttgaaaacatacgggcttataataaaaataaactaaaaaccttttttaggtgaaacaaataagagttgtactaaatcaatctttcaaggaggtgcaatattaatttttctaaaatttttatgtccctagtatttaagtcttggcttcgcccctgcttgtactagtgactcctgtgatcactaatatcgaataatacaccaaatgtcactcaaaaataaaaacatcaaaatttatcctagcttataattactcgcataaaattacacaaatatcgcaaaacaacacgaacacaaaaattgctctaactaagattgactactcgcataaaatggcacataatgtcgcaaaaaacatacaatccagaaaaaacctatatcccgaaacctaaattcttccaaaattattcttccataatccgaaaaaaacatacaaaacatacaaataaagaaacctagctaaagtcaatatagtagaaatctcgatagccctcatatcattatgacttttgcacaccatattttatatgatgaattgactatagttaattacaatatgaaattgacgatttaaataaagggatatttagcttaaaatttccaaaaattgtagtgttatgatcacgttatgattactataataataatttatgaaccattgagtatggaatagaatcattctcttctctgagtttttcttttcttttttaggggaattatcattttctgataattctaacaattttcttcattcttaaaattaaaaataaaaggcactataattttgaaattttaaagttgtgtctacatccactcatttgaataatgaataacaataataataataaccaagggttcaaacaccattaagtagcttttcttatagcgacttatgagctacccgacttaattacatatattaaatttcaatgaaatcactttttctaatgtttacaaaaattgaattattatattctataataatttataacttaaaattgcctcaaataaagatatagttacgcaattagggagtaaagcaatcgtcatattaacaggaaaa

SEQ ID NO: 55583 - DNA, 1545 bp, Cannabis sativa
cataacgaaaatactaactaagaataagtgtacgtgcattgaacgtaatattaacctattaattataaaaaaaatgttttaaacggattaacctgaccaaaccaacaaaattattgggcgagtaaaactatttctaatttttaattaggtgggttacaattataaatttgtagcccaatatttatattggtttggtaaaaatataccataactcgaccaaaccaattggtgtgcgcccctaatatgaatgacacatcagtcatatcagtattttgttagtcgcatgaaatataggatttattttaagttatatatttcatgtagctaacaaaatactgaaatggttgatatatttcaatgtcggtaattagaaaaaatagtttatttttatttataaattgttaataaggaaatgattttattctacaaaaaattacatatgtaacattgacatgataataatacattattcataatatttggtttgtgataaaacttaacaaagacttataatttaatattgtgaatagttttttttttaaaaaaatatttaacagacaaatatttgaaagctcaatttaattgaagtaatattttagagtaaatatcataaaatattataataattattaatgcattataaatttttgtatttctaaatatctataaatttataacatttttttaatatatattcagataaaattattattataatcaaataataagaattaatatgcagaaaaaataaaagtatcaattcttgttaaaaaaaacagattaattttaatatcaaatatttctcaaaaacaattttttttttaaatcaaataaatttgaatgactatgtttttttgacgaattattaatattatttcaattcactattttttttttatataattttttaactagaaaagaaacaaaaagaactggctattggctattttattactaagtgcaattacacatacttaatttgttacttaacttaacacttatgaaatcgtacttcgcacaaaattctaagtttttataaaccattccaaccgttgattaccccattaaattaaatattatagaatcaatcactaccactaattgcggaaaactttcatagtcgtacacaattcaataacttgatagtttacaataataagatagaaattttaaataaaatgtcaagaatgggattcgaacccatgccatttcggaccagtacctgaaactggcgccttagaccaactcggccatcttgactgcatactcagtcattctatcattattataaacatatacaaaaccccttcacattcacttatcacttcgatgcttcctccttccaaactccatcacataatctctcatctaagaatttgctgattttttttttaatgcaccacatgttgaatgactgaaatgaatgcaatttataataaacattcaagagttcatttttatagccttgaggccttgagatttaatataaatccggactaaaaattttcaaggtaaagaaagaataacagaaactagaagataatt

SEQ ID NO: 55584 - DNA, 898 bp, Cannabis sativa
atatgattagacaacaaggggaaatagatatgagatctaaaagaacaataggctcatcttaagtctatttttatatatattaccgacacatcctgtcgtaccactaaatgttgtcgaatatatgaacccaacttactagtagatcaggaagcgaaaactaaatgaaccaccaattatgggacaggacaaaaagggttctagggtggtcaagatagctgccaaagtgagaataagaaatggtgaccttatcctgagtgttcacgatgcaaaaaggcacaatttgaaccaatgtagagccaaatttggttttattgtgtggtagtcggtcatttaaaaagaacctacccacagttaagaaagattgatgttaaagaagaaaagtgtacggatcccgcccaagtgtcagttatgatttaaggggacccgaatatcggtccttcgaccgactcaagttagaatttatgggcaatattataattgttattgatattaaacattatacatttagttagagacatcaagaaatctgaatggactatggatgtatcttacttagtggtaacctatttaataggatagacagattaggaagatgacaatatgagttaaattgttgatattccctagtggaatatagaacatgcgtagttaatggaggcatcgatctaattgattcaaataaaaaaatcttttgtttagaagtgatctagcgttaccaacggtaagacaatttatgtgtactgtctggaattctagatgaattgaagacgacgattgtgtagtaattttgagattatgtaggcgtgggacaacctacgttagcaaaaagtatcttgtttgtgtagctcaccatgaaggaactccatggttgagtgtccttgacttggggtgatttcat

SEQ ID NO: 55585 - DNA, 1004 bp, Cannabis sativa
tcatatcttgaaatcgatcaatttaaagatgtacaacttggtaacttgaatcaataaaatctactagtagcactttcattccctatatataattatataaatataaaaagaacatttgttataaaggtttaaaatgtttgaatgagcagataacgatgctatgttttttggaaacttcatgtttacaccattgaagaatgtgaaggcaaaacctgtttcgctgagatgatgcaggttttatcttttttgtgtaatctttttaaagtttctgatacatatttgtttattttttttttcaattaaataaattattattacttaaaaaggaaaataattgaatgtaaaagcccatttattgttgtacttcaaaagagatgatccttttctttcaaaaaaaaaaaaaaaaacaaagaaaagatgatatttatttaggcctctttggtttggattttgagtaagttagaataaacttttttttttttgtaaacttttaaagctattcttacgtaaacacctaaaattataattatttatttatttttatgtttagggttatatctttatatataaaatatagctatgtaattcttagtttaacaaattttgttggcttactattttttttttctatgttgaagttaacaatgttaccttcacgttaacttaacaaaaaagtgaataaataaataggaacaatcaaaccaaaactcctcttttgttgaaaaaaaaaattgaaactcctcttttgtcactctttagtcttcatccaatttgcatataataaattaagtattaggtgcatttacaaataactttaacttattatatacatgttgtaatttcagtgaaattttacaaatctttgggtgagaagaaagtgtatgagtgttattgtgataaatctaatacgcaagtatacgaatcattttaacaagtaatactcaggtaagtgagaacgttcccacggggactgtagttaagtacctgttatcccaaattttgca

SEQ ID NO: 55586 - DNA, 842 bp, Cannabis sativa
  modified_base (45)..(48): a, c, t, g, unknown or other
ctataaataatttcatgattaacataaacaactgctaatttccannnnaactaagcgggctttacaaaaagtgcacccatatatatatgataatgctaataacatagaaataacttagttaaaaataaaaaataaatctcacagactaaatatatatatcgtaatattttttttttttataataatcaaaatattaatagtatttaaatttatatagatatttaaaaagtattcaaatctatatattctatagttttatataaaggagagatatgaggtagtgatatgacgctctaaaatctctcccattagcattatttattctcctcttaattctccccttaattcttaattttttattccatcaataaatattaatattaactaattaagaaaaattcaataaaacttttatatataaattaaatatatacttattaattcaacatatatataaatcataatatattatatgttgaatatatttgaaaaaatataatttataatatatatctatttttcttgttaaaaaaatatatccgtttaaagtagaaatacattgaaaacaaactatttaacccgtgtagaaaaacaaataaacatagcttttatttttcttttaaaaaaatataaataattagtctcacatgtcttatttttcaaaatatatatattcttctaaataattagtatcgtataattttttttatagcttcacatttttttaaatctctcttccattccattcatggagcaaaaaatattaatgtagcgtctccttcaacaataatctttaattgtattgagataataaaaaagtggtttgaataatagaaacacat

SEQ ID NO: 55587 - DNA, 1659 bp, Cannabis sativa
aaaataaaagtattaccaaacggcaccttaattttccaattgtttttattgatagtcttcattgtgcttacaattttattcttgtaaagttttaaaaaatttcaaataattaatgacgaaaatacgtttgaagttttttgaacaggtatgactatctagaatatcaagaattctatttttaattgtaaattattcaaaaaaaattcaaaaatttactcaaatagtactataaatataacaaatactgttatgaaaaaatatcatagtatataattttgaatttaaaaattaatcaaataattataatagaaagttgtaattatcactgttctctcgtaagactttatttgctctgtaaatccgtatttatatatttttacactatatcaagtgaactaatttaatctattgtatcacgtgatcgaatattgaatgtaaaaggtagatccacatctcatgtgatggactctaaaccaaaattgattactaattaaaatctatattgaactccctatcaaaataaataaataaataaaaaaacaaaacaaaacaaaatctgtattaaattctattccatcaattcaatgacaagttgatattataaattatctaatattaagaattacaatttaaataaacatattgttcaccgataaagtattttttttttaaaaggtacgataaagtatttaaagtgctataaatataatgtatatttgccgatgttataaaatttaactttaatagtagtataatatggtctaaatttgacacttactaactaaattttagacaaaatataaaattggtcaaattttaaaccacaataaatatcatcttttaatttactctattatcattcattattgcaattaataagtttttatacttttgttaagcaaaagaaactttttatatttttatttataaatttaatatggtttacatatatttaaaataaaaatgtaatgttttgttaattttttaccgtaaaaaaaaaagtttattttactttagatcaaatataacattaactactttttagctaaatttaacataaattttatagtgtaaaatagtaagatgttctatacttctctaaagtgcattagggcctgtttggtacgtaggattggactggattggactaaactggacgagattggattatgctgaagataatcttgtgtttgatttaaaaatagactggactattttatttatttccttttagattaaaaacttaaattaaaataaaaatatataatattaaattaaaagtaaaatatataataataaacaaataaaaaataaatgattcaccaaaaaaataataattaaattataaaattaaataaaataatatatcctatataatcaaatatatatcataaatatataataaaatagtttagcatattttttatttaataaataattaaaataataaaataaaaatacttgaataatataaaattatttatgttaaacactaatttaatcactaatttaatatgaatattaattttttaaaatatttttataaattttctaatcatttaaaaatgttgactggggttttcggcaaccagttaaataatatataagaagagctgtagaaagtttaatgcatgcgatttttacgtggttggggcatta

SEQ ID NO: 55588 - DNA, 929 bp, Cannabis sativa
taaattcaatctttatatttatctcattatcacaataactaaaatataacaattgaatgtgaaaaaaaataaacattagggctcggtttggatgggttaacacgactaaaccgacgaattcattgagcgggttgaaacttttttttttgttaattgggcgggttgcacttagatttttataacccgatctttacattatgttaaataaaatgtaacgtgaccaaaccgacggacgtacacccttaggtaatacccattgctgggcattaaaaaaattaataatataacaatcgaataaccttttatagcaagttaccaacaatatttttttttttaaaaaaaaaatatatatttatcttttgtaaaattaaaaataagtaaaaattacgtaacatatgggatttattttactgtttacttttttatggcatttttaaataaagcctttgtcatatgggctttttgttttgtgttcctttctatcggttttatcaaagccatatatttgttatatttggcccatttcctatattttattctttttttttaaaaaaaaaaaaattaagctacagctaatatagcatttgcatggaatagcttagctttgtactcattgtttcttacagttcaatcaatctcattgtcatttcatattctgagcaagaggttttctctcacttttactctctctcaacttctctttgtttccccttagtttcagcttagggtttattcttttccttcatatttttcttgttcttcgtcttcaagcttcgacggtgctgccattgttgctgtttttctaagcttcgactggtgctgccgtggatgggttattcggttgttgtcattttggagctcagttacttgtttaagtgaggtaagttttcagttgttcattattattttttttttgtaatgtctttagt

SEQ ID NO: 55589 - DNA, 1572 bp, Cannabis sativa
taaaataatttatagattataaattgtttacataataaaaccaaaatataatataatataaatataggtacgtaaaggatgaaaatgatgggtgatgaatggtgagttgtagctttatggatttgcacgtacagtactcagagaccatgtgaatgctgaccatattggccatgatcttaatcttcaatatcatttgctatagcttcacccaattctaagctcatcattaattaatgtttttgtttttggaatatataaatatatattcttacttgattccatcgaatatattttattctaccatcaataccttgatattttattttaatctatcagtatttcattcattcatttattttacattggaatattattgtgaaaaataatcacaagtatgagtaatataattgattcaagtcggttgctacatattgaaattttacgaataatatatatataaagatatttattgaaatttattttagagattatgttttgttttgtgttgtaattttttttttcaaacggtttaattaatttgctgttaaattttagactatgtatatgctattttgtttttagcctaattaaataatctaatacacaagaaaggagaaaaaaattaaggggtcgaccaaaaacaaccatttacaccttcagtcacattgctatatgtcaataaatgaatgaacaaatctaggtgggtatatgttgagcctaaaaagtttttgatgttaatgttatactatataaatctatacacatatatatatataattaattacttatattatatataggaccatatgtatgttcctacccattttataaggttacccttcaataccttccaagggctgcttataagcacaaactatagaataaacctcttgcccccattctataaacttaattagggtttgtttgaatatcactaaatattttaatttaataattattatataactatttttaaaatattagacaatattaaccctggctttgacatttacttattatttttggcatgcatatatgttaatttattggctcttggtcttggatttttcattattaattaagtgaagaattaatatatattattgtataaattttgacggattgcatactcatttttgatgtcatatatatataaatatattttattttagatgaatttataattaactacgtgcctgtgttagaacccttaatataataggtgcagtaattgtcttttcccaaagatacttccctttcactactactattcctttccataaaattaaagcccaaaagtatatatgtatgtatactgatattgatgcttttttttttgaccaataaatttggaatccaaataaaattgaattaactaattatatttagtagcatgtgtcaattttataaatatttatgtatttggacttgtcaatataaacattattgccaaacctatcttaacactgcagatgatgatataataaaaataatttcttttttaacaaatttaataataaaataagtcttatcaaaataataataataataataataagatttttttttttt

SEQ ID NO: 55590 - DNA, 924 bp, Cannabis sativa
agttttataacttagtattatgttgtttgtttatttcatattagtatttttgttattgttattttgtactttcaaatatgttagtattttaaatctctaagtatttttttttagataaattttaatttgagaactaaaatgtaagattatttttttaaataaaataaaataagaattagaatacaaaaaaagaaaaaaaaaattgcactaaattggtgtagattcaaaatttaacactattaatagtgtagaatttggtggacatcgatttcgtgcataatataatgtgtcattggagtgaaattgtgtgataattctacactaatttagtaaaatagtacatcattagagacactcttaacataacaaaatgacaatagataagagccattgttggagaaaaacgattaactataattattagcccactgtgttgtctatactcacaattagggaccggcaacatttaatctaatttaactgaattgaacagatctaatctaatttaattatatatataaaaaaattagatatttaattacatttgaattgaatgttaaaagttagattttgattgaatttgataggttatgggatgccaatctcaaaagaatacccaagtgcacctaaccaaatctcaacatagatcctttgctaccatcacggggacttcaaactgacatcgacatattaatcgagcaggtttgtgcttttggttcaaggcttcagggcctggattgcattctagttgtggtaccgttgattcgcccaaagcacgatgttcagattcccatctcaaaactttcatttttgacatgtacgttcttcttttacttcaaattgatgttggagttgttagataaccaaccatataattttagagtctggtaaattatggtgcataacccatcgtgtaatttctca

SEQ ID NO: 55591 - DNA, 852 bp, Cannabis sativa
aatatgatagcaaaatttcttccatggctttcttcttctatatcatctgatgagcatcagagcatgtgcaagttgttgggcaaggtcataccagaagagaagcttctacagcaggtaaggactcttacatggacttaatagtatagttaattaaacgataatgggctgatcttcacatataacatgaaggttgtattttcctggatggaaggggtaaaaacatccgatactcataaacctagcaaagataattccacaggtcaatgccatgctgttgggcctaatgctgtggtccgtcagacagagatgggacacaatgcatgtcaatcctccaagattggtaaaagaaagcatattgagatgaattgtgatccaatgacttcctccgttttaagtcctattgatgaaataatgctttggcataatgctataaaaagagagttgaatgatatagctgatgctgctaggaagatcaaactctgtggacattctgatttggcagaatttaataagaggctacaattcattgcagatgtctgcatctttcacaggttcaatttcttgctatgtttcttaattaatcttctttcttacctcatcaacatgccttttatgtaaagcagcaatttcattgcgtaaatgcacaaatataataatcatcttcatggacaacatttactaatagaaaatcttttttctgggtcatgtgtaatgcatgtattaatttgtcaccccattggaatgtttgattcataaattgttctggttcttttataattagttaaaagaaagtggtgaagcatactttaattacttaaaactcttatgaaatatgattgcctaaactttgtg

SEQ ID NO: 55592 - DNA, 789 bp, Cannabis sativa
gagccaatgggttctcaaagacccatattactggaacgtcacgttcaaggagaaattatggtggcaataatcaaaattcaaaaagaaggaacgaaaaagctaataatatcatagggtatatacctagaagtgaggatgtatatgatccaactagatatgtaccattagtagaattggaaaatagacaactccggcaatgcttagccgaatctaaccgacaaaatgttgagttggaaagagaggctgcaacggctagggcgaatcaaggaactaatactcaaaattaacctgatcctggagtaagaagaccacggggcagacctcaaggttcaagaaccaggagacagggagcaaattaaggaaatccccaaaacacccaggagcaataacttgggggtactatggatgttctagtggatgcacaataaaataatcaagagcaacatcgagatgttcctcaaagattccaagaatttatgaatcaagggaatgaacgtaatgatgtactagaagcttctcgtaggaatgaggacatgaggcagccccgacctagggaacaggaaattcctcgtgataatgagagaaaccctaggactcaacctaggacaagtggggtaccaccgagacaccttcagtgtccttctcgatcaaagagggaaggtgtatacatgtacctaaatagaggacgtgtatctaaccttttccgaaggagaaggccagtacaaaatgaagcaagttctagctcgggacactcgaggtcttgaggacacaataaattaggtaggcaaa

SEQ ID NO: 55593 - DNA, 1061 bp, Cannabis sativa
gttaatcaacatacttgtgaatagatctaagatcctagtaaaataatatccaaccaaacttactcactgttcaaagcttaaaatctacttagatgatgctgctcggtgtttccttgggtttcttcgaaggatttgagagaagaagactacttgttctgattcttcaaaaaagaaaatggataaaagtggttgattagggattttcaccctatttataagaagatttatgacccaaagtaatcatttcaaaattttaaatacctcggtttccccctaaaagtgtacgttgtacactctattacctgaatggtaactgtcaaaatgtgctaatttttaggcatggttcgaggcacatctcaacaagcattaatgagccaaaaattgaagagacccttggtaagagtcacatcggatcatcaagcgacagttcaaacatataccacccgttcagataaggatccagaccgagtgaagttcacatacgacaacaaaggtcccgcatagacttaggggcaaatgttatcccattttttacgctatgacgtggcagaacacacgagggacatgtgtccaacattccttgcatcggggcagagactaatgttcggaacagacttcaggtaacacatctacacgtataatctctaattacccaagcagggtaaaaggcagagtacccgaatagaggaaagtttgactttctgaactacttatcagagcttgactacttcaaaataatatcgtgaagcccaagcatgaagacaatccctacaatcgtgagattgagtcataggaatgtgacaacctattctattttcctattttgtacattgtaagcaaaagggaaaccttccctcatgcattaaggccctataaatagtgatctagcctcactgtaaaagagatcgaaagaattgcttcagagagagaaatcaaagagaattactcagagacttcgttgtaacagctttgagagagaaaacactgtgttcttgttctcgagttaatacaatctaaggggagtaggctattaccatactaacggggtcgaacctcttcaa

SEQ ID NO: 55594 - DNA, 1097 bp, Cannabis sativa
tttctaaataagggcccaaaataattttttttttctatggcccattaaaagtcagggccggccctgagcatagcagatatgttttgtgattgtgattttgggatatgagatgagatccttagcttattgttgcacaaatattttgccttcaatgcaaaactaagtttaattctcgattatagagaaatacttaagtttaatttttaatagtaataatgcctatattatatttctgaaacttacggaatttgactgttaagtattaagtcattattcacatgtcattttttttattagtatatttaaattaattttaaataaaagataaaatttaatgctctggaccaatcaagaattgtcatgtgaccattgacttgatatttaacgataaggtatttacggaagttctgaaaatataatttaagtattattactgtcaaaaattaaatttaaatatttatgccgcaaattattctataaattccttcaattatctactaatgcatcctatgtattgaaattttaattcacaatattttcttaagctattttgagtttgtttttaatcttcaattataaataattttatttttgtatctcttattttttaattccctatatttgttgagtacctagttttcaactattgttaaacaattatgatgttttgacacttttttctgaaagggactatgttttcaacaacattataactgtagctttcaacttaccaacttaaaattaaaaatgaaggcatatttttttagttagttagttcattaattaattaacaaaaaagtgtcaaccatgatagggattttgaacttttattaataattcctttatgtgactcttcatgcaagatgggactgttcaatctttcacataaatttgtttgaaatttccttttttttttaaaaaaaaatataaaataaaacttaattaccaaatggagacagaattttgccaaaagaataatcattaaaacatcatgttaaaacttagtagtatatataattttttttgaaaaaaaaaaaatggtgaagggtcagtgtattaaatgtactatgtatatattttatttatttttttattat

SEQ ID NO: 55595 - DNA, 524 bp, Cannabis sativa
gatatcctgcaaaattttaaaaaattcaacaaaatttaacacgctaaaaaataagattcaaataaattattacacgtataatttttttgttttaacacgtgtaaaaatgaacgatttgaaccctgtttttaatattataaattattttaaatttttaaaatttttataaattatcttaaataattatttataaaattagactaaaaattattttaagtactaaaaaaaatagtttggaagtgcatggatatggatagcgtgtattgtagaaggtacctacactctactttcaccgttataatttcaagcggcacttacgttacgtcttcttttgtctttctcatccacaacaaccagcttcgtcttaaaaaataacaattaaaaaataataattataataacattttctattccaattaatttttattttatttctttacaaattatatccaattaattttagtatagaactaggttgattctgcaagactgcaaccgcatacaaaatttttattaggttattt

SEQ ID NO: 55596 - DNA, 975 bp, Cannabis sativa
ttacattataaattatttaaaagtctaaattaaaagaagtagagatatttattggaccatattcaatatttttagatttattcaaatccgattcaattatatattgtatattagaatttaacatccgatccaatccacttaattttgagtcatctaatcgattcaacatctattgaatgttgaatttgatcaattctatcaattaaatgtattttatgtatagctttggtttaattcgagtttatctaatattttaaatatagtattttttatatcgaattagatcaattcaatattttagattcaatatatgttttgaatccaataaagaaagagtaaaattttaatgttaatttttatatatatatacatattttaaatatataacaatataaaatctaattactcatccaaactaaataaaaatactcattagttagattgaatgttgaatgtatttaatttttggatacctcatctaacattcgatctgatctaattagatattcaaaataataccaatttgatccgcccacaattagatattcaaaaatgacactaatttgatccgattacaattggatattaaaaaataacatcaatttagctcgatcacaatgggatattcaatgcttggcggtcggttgaaattggattagtcggttgctattagattggatcgatttatgaacacctctagtcttggtatcagtatttaggagagctttttattcctttttttttatgatcgtgtatgtgatgtagttatttaaaatcacatgtaaatatttaaaaaattctcaatagtttacaatgccagaaataaaactcaaatagtaacttatcaagcgcgtataagtactattactcgaataagaaactttatttttggcacattaaactattcaaaattttttaaaaatttacaaatgactctaaataactataacgtatacgttcatagaagaaaaaaaa

SEQ ID NO: 55597 - DNA, 514 bp, Cannabis sativa
tatatatatatatattaaagtattatattatcgcaattcatatttaaattgaaattacttatttttagagtttataacattattttaattaaattttaaactacatattaaaattaattaataattttatcacattattattttaatttatctataattaatttattattcattaataattaattttataacatttaaccattaaatacctatattaaaatttataattcacaataatataatatatatttaacaatttattatttttaaaataaatatttttgtgttataaaattttaatttaactttttccttattgcattatttctaccaaacttttggcagcataatagcttaaaaattataaatctaaaatttttaaaacttaaaaaaacataaaaaaaacattccagaacaatatatgcacaaaaaataatacacccatccgaccgttgcacatttaatcacagaacctacttcactatatatccatatttaagatattcatactcca

SEQ ID NO: 55598 - DNA, 1626 bp, Cannabis sativa
tgtcccatctgccagaacatggtaatgcgcgtaccacaaagagatatacacgggctataattaaatcaagatgcatgttgcagactaggaacacattatttttcagacggataaaggtgtgtactgttacatggagactcttagagtcagaagtaacccactctcctgccgaacctgagattaataactcgctaagtcaagttggtccgagaacaaaagcgcaaattgaagcccgcgagcgtgtaacatctggaatcgaaaccccagggaaccgagagtaagtgttgcctttttcatcactcagagccaacagactaaggtttatgtttcgtggaaagctcctaagtttggaagacgtgtacttgtctggaagcaaaagctagaataaaaaatcttaagtatcctaagtattaattcctggaattaagtactaagaagcttaaaaggtggatttgcttctcagcacttcctcacacgagggacacataacgtgcaacttagaacggtcctaattaaagcttaagccttggagttcaggccattggaaccaagaactcaagacatccaaagtcacctgaaagcagttatgcaaacaacaagcatttgcaaaaggcaaagtaatgtaaaagcattctggcaaaagaagtgaaaaagaagttaaaagttattacaaatcgcctcgcggttaaggcatttagattgtccccacaaataccaaaacgagaccaatggcccccaaataagaattaatatttaaaaagaaggagagagatgtttgaaattttggaattaggcctggtctaacggaagttgggcaggatcgacttcaatagtagcatccccggaattgctagaattctcagcagccggaggttcagaagattcaaccgtttccaaagcttaaacttgggctagatatgcctcttcttcttccccgagaatcttcaaaacagtgagatctttcttcaacaagtaatggaacgtgtgaattaaaaattgatccacgcaccgccttcgatactcttccgcggcttcagcagcctcctagagggcaaccctcgttttctcttcatttttgcattgggtcttgagggctaatctttgggactgcttgatgaggttgggataagaaaatgctaagtgacacctgagtgatcctttgacattcttgtctactgtagcagcacccatgagtgacacctgtttagatcagataggtcacccattggacgcctccgcccaaaaggtagcatcttgtcgtgggtcttaatgtcgtgtatttaatgtatttatcccaatagttggcccatctttgcacaaaaaacctagcgggtcacaggtatgcccgaacccgagtttaagcttatatatacccctcttactcttcacgtaagggggaggagaaaaaaacacttttgagaaatcctctttaagctttcttcctcactaagagaaacttagaagggaagatattatagtaagagctagagttcttcaagctgtaaaactttacttgtaatacattcaaatcctctaaaggccaatacattgaatcatggacttggaatctttactctcgaaccacgtaaaaatgtccatctcaattatttaatttctcatttaatt

SEQ ID NO: 55599 - DNA, 756 bp, Cannabis sativa
tataaattgaagttagaatctattcttagacttaatttcttagttgtttaagttctatttggttagaaatagaactgttgtatctataaatattaaaagaattgagtttaatgaatttattctacttgattatgtgatttggagtaatttgaagaattcatatgaattgaaaccttgaatatattgtgtatgtgagattaaactgttctggaagttctaggttgttttggtgatgctagggtcgaattttgggaggaggaaagaacttttggttgctgccctgccagaaccggtcgaccaattggtcctggtgtaccataaccggtcgatcggttgccagaattggtcgaccggttgcctacaggggagagtttttcagtttttcctccaggctggttttagggctcggggtggttttcggtgttcagtgtggaatatttagaagttgtaaaacctaaccaagaactattggaagttaatgattgtccagttttgggaattaaagattattctaaagattttaataaatgtatttattgagtgctgttgtcgtgacataggacccaggatcgtcaagctttgattccacttagacgtgatgcacgctaaacttctggactgaggtaagaagagtattaagcactatatatggcaaacgttatgataattatagactcaattatgattgagatctcggtatgtgtttgttgtaacataatctcaatcgagattaatgatatgtattggttgtgactc

SEQ ID NO: 55600 - DNA, 728 bp, Cannabis sativa
ttgctaagacttgcctcaaagggttgtttgtcaagacctcgatactgtgagcctgaaaataaggtcgcaattttctcgacgatatcaccaaggcgaacgcctatttttccatttggggatagcgggtctcagcatctagtaatcgtttactgacataatacaccaggtattgtcgcccttgatcttcgcgtattagtaccgaactaatcgcgtattctgacactgctaagtagatggataagacttcgccggtcaagggctttgataagattggaggttgccccaaatgcgtctttaaggcttgaaaggcctcctcgcatttttcggtccatcggaacttcttattaccctttaaaatctgaaaaaactctttgcacttatcagaagatcgcgatataaagcgatttaaggcagcgacttcacctgtgaggctttggacctcttttggcttagttggtgatggcatttccaccaatgcactgaccttcgcggggttggcttctattcctcgttgattaaccatgaacccaaggaatttcccagaaccaactccaaagacgcactttagagggtttagtcacatcttatatcgacgcaatatatcgaacattgcccgtaaatgggcgatatgatccctcgcgtgttgaaatttcacgagcatatcatcaacatatacttccatggtgttcccaataagatctgcgaacatcatgtttacaagtctctga

SEQ ID NO: 55601 - DNA, 904 bp, Cannabis sativa
ctctctctctctcgttttccctcagccaccaccactcaccacccaccaaaaccagtcggcccaccacccaccacgacctcagctgtgcctcaaccacgtcgaaccacaaccacactcggccggaactctaaaagcttcattttcctcacaaaaactttaattttcttcaccccaaaagcaatgggtaagtgttttttatacaaaatattgttggtttttactgtattgcatagatctacacattatttattgtattatgtcgtttttgagacctgaaatgaaagtagagttcgttgctccactatctatataccaggcattatcttgatgtgtgttagcagaggaagcggagtagtaagcctgctgtagtaagctggctgtccttgacctggaggttgatgtcccaatgaagcgtttggattaggctgttgtccttggcctggtgtaggtgcttgaaaattgatatcaaagcgatgatagtatatggacacgacatggccgactctattgcagagttgacatacgggacggtttcctcttcctcctcctctgccacggccacgacctcgtggtgagtaaccccttccttgagagttaaacccaggaggaccattgctgaagttgacaggccttcgagagttagcagcgaggttggcactgggagtgttgagatcacctggagtaggagtattcagttgttccagtcgcatctcttggctttgcaagagaaattgcacttcctgcaaggttatagggtcatcatgagaagttaaagtaataataacagggtcataatcatgccctaaacctccaagaatgtaaagaatcaactcctcatcagatataagttgtcctgcagcagagagattttctacaaggtttgtcatcttcatcatgtagtcat

SEQ ID NO: 55602 - DNA, 806 bp, Cannabis sativa
taaaatttgaaaaaaaaaaatagacttttggtagtgtattttaaaatagtgatatatggtataattgaggtaaaaaaataaaaaaaaaaaaatagaattttggtgatatatatatatacatatatatattttgaaggatagagaaattaatgagaatgcacttagaatactcttatcaatttcaatattctattttttgaaatacatcacaaaaactttaattttttaattttactttacacacatttatattatatcatatattaatttatttatattttcttttaaatcattttaatttaatattttctaatatattttattaattaaagtaaaagaaaggattcaaaaaataaaaataggtatatagtatataagtagttaatataaaagattgagaaggaaataaagaataaaaaaatatataaagaagctgtaaaaattttgctacatttagaatttacataatttattgataattcataattctcttagttattttacacaaagtatacttctatagctgctcaaattgtgtgtgtatttttttttttaaatagtggataaattttcacttttaaataatatattatgctcaaaatttttaaaataatatgttgcgttaatatttattttttatatatagtatattatatatattcctattaaataatttatttcaactttatttttagcgcaataattttttttatataattacattatacactagattgaaaaaaaaaaacttaaaattataacgtctgccaattactatagaatcacactaataatactatatatcg

SEQ ID NO: 55603 - DNA, 1048 bp, Cannabis sativa
cggacccggacccagacctggaccaggacttgaaacccgagacccgaacccagacccagacccgggagccggacctgaaacctggacccaggacccagacccggacccaggaccagacccgggatcgggacccgggacccggaccaaaactcagacccaaacccagaccgggacaaggacctgggacccggacctggacccgaaccatgctcggaccgagatccaacccgaacccgaacccaaactcaagacccgaacccacaccgggacctgagacctggacctggatccggacccgaacccagacccggacctagatctttacacaatctattaatacatgtcaataccaaacatagtattgtatttaatgataacaaaacattaaaatggatataaaataagttaatattaaaattcttaagaaaaaatagtcgggtcggatcagatccaatctgaataagtcaggtcagaatctgatccgatgcgagtatctgatctagtgggacggggcagggcagatccttaaatgatctggatcaggtcagatcatagccggatcagatctgacccgacccattgacactcctaacaagatggcaccaaaacaggaaactcttttcaagtattgactgagcaacttggtgtacagaaaactgaagcaagtgacaaaatgaaagagttggttaatgctagtgcagaagaagtgaagacgagaagagggggagatcctcctctacaaaatggatagactactatgctaaaatatctaaggagtcaacaaccaacacaagcaaagtttggtcaagcaattgatctatactcagaatgttggtcttgttggtctcctcgagacaagagtcaagatttcaaaaattggaaccttgtactcaaacatttttgatggatggtgtttcactagtaacattgtttagcacaaagaaggaagaatagtggtcgcatgtaatcctaacaccttttccatcaacatactcaaatgtacaagtcaacttatgttgggttttatgcccaaaataaaactccattt

SEQ ID NO: 55604 - DNA, 948 bp, Cannabis sativa
gagagagagagagagtccaagatcgtagtgagtgtctgtggaaggatgtaaaaagggagtattactcttgaagtaattaccctaaatgtgagacatttcttggtaatactttactatgttaagttgtaattttaggctcattctattgtgtactattgattattcctattgaataaagatcctatcattcattcattatcaagctaaattttctttgtccaattaagttcaagttttacttttgtgattggttttagttttgaattgtgtttcttggatattgttactgttgtaacaatgtgttttgatgctgtaacaacgtgttttgagggtgaggattcaccacaaccttgaaaagatttccaaacattaaaaatatcattaagcacaatatcaaagttattataatgaacatctttgccattgacagtaagaaccatagtatacagagacaatcaatcaaacaaagttgtaacattcttgaaccccaaccgaaccgaaggcaaaattaaaatgtctaaaccctaattgaaccaaaggaaaagagaaaggccatgaaacagggccattgcctgctacatgaggctgatcactatataattattctagtatgtacacaaagtggggtaattatattataattttacatttaatacatgtttgtttgtgtttggtagcaattatatgttaccacattaaattgtcacgcgtgatcgtggtaagacatcttcatttttattttttatagtggtaccattttcacatttattatccaatatccatgtaggtaatatctaagatatgttagagctattttcaaaattatcccatctaataaagcatatgcctagttggcatgcactttgagaataatatatattacaaattacaaagttattaataatttgatagttatccaatatcactaattaataatatatatacaca

SEQ ID NO: 55605 - DNA, 991 bp, Cannabis sativa
gtagcatttctaaatatttttatttctggtgaactcatacatcttttgtattcagaatactaatttatacaatgaagttgatatttcatcaaaaaataaaaatactttaataaggtgtgaacaatatttatactttttatgtatttttaattactaaaatatctcttacactatcacttacacacacaatcactatcatttactgtgtataccacctattaactttttttttctttttttctttcgtttttcatttttaaatttaccattcaatttttttttctttttctttctcaatttttcattttaaaactattttccagtcattatacttttgaaacccacgattaaaacccacaaaaactacctcccacccataaccttcgccatcttcttcttccaactgcctattttatcaatttttttatatcatcttccacttctccatcttcattgccaaaaaaaacttcaaaaatgggtcataaatcagttgttaacaaggctaaagggaaacgtccagttatcaacgatgatgatcccgatttcacttcccccatgtctaaaggtggtcgtcgtacaataaaaaagaagtcaaaagtgtcttcgtctgaaaaaaattcaacttcaatggccaaaaaggaaaggaaagaagaagtcaacttcaaggcaactgtaattaatctgtaatgcaactgttatacgagttgtgagtcaactaacataaaatcacaaaacaactaataattccacatatttaatacaaataaatattacaacaatcgtattttatctatttaggtcgtatatttgataacttcgagctctgtttttataatattatgatattgtagtatcaaaccatcattgaactaatgtgcaacttaattgtaattaaaaatgtgaaatgtgaatgtgtatctgtaagaactatttgtcaatattttttttttgtcactgatcaataattacttgtaccttaatagtaatacgt

SEQ ID NO: 55606 - DNA, 605 bp, Cannabis sativa
tacacacttcttttttatttgacagttacatttacagtataaactttttgattctacacacaaacattgttcaatacaccaagaaatgaaactagttacacttaaaaatgttaccatttgttactctttctcacatttattaaattagctagtaacatttgctaaaaatatataagatatattggtcactaaatcttcaaatgtcactgtatgatttgtattgataacatttcaaatgtcaataaaagttactacaagaatcttaatttttgctggcaagaaaacaaggcataatttgctggtgcaattttgttggcgaatttatgcaccaacaagttctctcggtaataaatggtcgggaaaagaatttttgtcaacaaatcatgtaattgcaccgaccaacgagtttataccagcgagtttcgttgctggcgtaggctccaacactgccattggtgggtcgactgagaagttccccggtgacttttgtcggcgaggtaagttgccggcaaaattttcgtgccttattttatttcttgcaaaatttttgttggtgcatgttacttcgctatcgagaaattttttttcaatttttgtaaaaataa

SEQ ID NO: 55607 - DNA, 1097 bp, Cannabis sativa
ataccaacattgatttgccaacacatcacaaataaattctattttaccagcgcaatacaatttttgcaagcacaaaaatgtgctagcaaaagtgacttttcttgtagtgacttcctatctgatccacacttatatatacagatagtgaccatgtccactatgatacagttcatgattggtgagcaaaaagccaacgatcttgagaggtattgagccatatatgagaacataggctactcaacttatcactaattgattttaagatggaatcccataattctcaacaatataaaactccaagaaacagtgttagagagttagagaataagttaggttcgctattgttagattatgattcctagtgcaagttcttagatttagagacatattaaagagattgtttactcttgtagtaacttcccttatgtgagctgaaattgtaatatagctagtctcttaattagttgtgatccaaaccagtgtattctcatgcatctatatttttctcaactttgttcattaataatttcatcttattctttgcaaatcaatttattttattgttattgcattaattacttgtttgaattgtttgttacgttgattttcgacgaggtttaatctgtaacattaattttgcatcgatcattagtggtatgttgatttttttttttaaatttatattctgaataaataaatttactctttatttacatattattgatcaagtttagtctttctttgttccataaaaaaggaaaaaaaaaaaaagtctactcttgctttatatatatattaaataaattgtgtttactttctatcaagctttaataaaatcttattaatgtaaaacaaatgtattttagtctttgattgttcctctatatacaattggtctttctttattatacataaatatatatattaattaaatatagcttgagtttactttctatttctgtcatattttaattaaattaatctacaaataaatataagctagtgatgagggtaagaataaatattaaatatttcttccaatctgattcacacacaccaagcgtaatgagtgagtaatgctttgctaggtaatatta

SEQ ID NO: 55608 - DNA, 1076 bp, Cannabis sativa
atttttgtgtgattaaacttatattagaaaaaaaaagaattagaaaaaaaactataacaattgcaaatctataaaaaattcatcaaatttaaaataattgtcatcaccgtatcttacttgtcactaaatttaaaattgttgtcatcaccgtatctcacttgtaatcgtcactatcttaaaaaaaatataacgattgataaatttatatgtatatatatatataaaataataataccaaatagagagaatgaagagaataaatgataatataagaataattaatttaaattgtaagataatatcatgcaattagaaaattcttttgaataaactttcaacaaaattttaaaaggtaatagatattttaatttgtaaatataaaaaaaaaaataataagaaaattagaaagaaaaaaatatagaaaatagataaataataaaaaaaaaataattaggtgtagatattagatatatatatttttatgttatattagatgactatgtaacaaaaagtattttttaaaaaaaaatattacaattcacatttaaattcattacttatatagctcttttattttttataaagtgcatagctccaatcactgttgtatggggagtaaaattgcagttaaacatattttataatgctagaaagctcgtgcttcgcgtatggttgtttaaattttatgctcacaatattcatataaaaaattaataaaaaataataagtagctcataaaaactttgtaatcttcatttttatcttttgaaagcttgagttttagaaggtggatatttgctaaaaaaaatatatatatattaataatttatatttgagaaaatattattcaaaacaaaaaaatatactttcactaaatatatatttgacaaaatcaacgttaaaaatatcgtaaatcataaaaataaaagaaagttgtaaacttgatctagtaagtatatgtacagctaaaaaatttactaaatactatataatagtacaatatatatatataaatatgggtgactactcaatggttacatttttattaaccatgatggttacatttatgttgacct

SEQ ID NO: 55609 - DNA, 678 bp, Cannabis sativa
gagcgtgagtccttaaaagctctgcaacaattggactgcgcataggtccttgcatcagttttgcatttaagggaataaattcttcataaggaatccccaaaatcggtaagccgccaatgaccttcaggtcatacaaagaaatacccatttcgccgctgctatggtgaaaagtgttcgctaagggcccccaaagttctgtgaaagctctccacacagttggttccattaagaaggggtacctagatactgatatggcaccataaatctcagcatcacgtagggtacctggatgctgacgtaaaatcatctctgtccattccattagataagggagaaattgggccctccccctaaaagaaaaatttccagtaaccttcttatccagcagaatgcggtgaaggctgggaaagaactcactattaactttgtgagtaatgtcagcatcaactttgttatcaaccaattcaagaactctagctttgaaatctgcgccataatgtcgcacgtgttggatggcctcttgatcgttagaataacaatatcgcaagtcaccagaactaacatcctcagtttttgataaagaaacaaggtcatgtgggaccactgaaatccgaacttctttcagtggtacagaccgtggataagatggcccatacttaatttcagatcccgtctcgt

SEQ ID NO: 55610 - DNA, 975 bp, Cannabis sativa
atcacacatagggtcggccctgaggccttgagttgaaatgggccataattaaaaaaaaaaatttagacctttactataaagataaatgatttttttaaaaattattaaaaaaatgtgtatcttttaaaaggtattttttttattaggcctttaaattgagtgggccttaggtgatgccctaactcggtcctgatcacacatagcatttatctaattaccgaaactcaataatggggttatagtttggtagctataagtgtaatataaatcttacaaatcaccgacacatgagcaatctagaacaaaacacattggattagactatttatttatttgaatcatatgtatattcattcttattcttatcatcttaattaattgtttttaactaactttgacagttgctggttgaggagatgaacatcttaacaactgtgttcttgaaactgaacaatgaaaaggtttactatccaaactcggtcttgtccacaaaacccatcagcaactactacagaagttcagatatgggtgatgcagtcgagttttcgatcgatttcaatacaacagtcgaaaagatagcacagctcaaagaaaaattcaagaagtgggtttttacttactaatattaataatgtcttttcaatgtcaatattttgtaactctatttacacattttggttttgtttttttttgtgtgtttttaggtacatagaaaagacaccattacattggcatcctactcatagtgtggtggtgattgagattgagaatgtgaacaagttgaaaatggctctttatgttaatcacaccataacttttcaagaattcggggagaagaatcgaaggcgaaccgagctggttatggaggttaaaagggttttggaagagctaaatataaaatattatcttctacctcaaacaattcatgtcaaccccattgaattggactcaagtttggttcaaaaatgatttgtt

SEQ ID NO: 55611 - DNA, 1597 bp, Cannabis sativa
  modified_base (227)..(233): a, c, t, g, unknown or other
tctattattcttcaccaattgagcaatagtgataagtaccatgcccacacatagcaagtcaagtactcaatcatagtgcagaagacgatggtaaccaaacccgaagaagagaaagagatccagacttagatcttgttattactctgcgatagaaaggaacaagggttagagatctgagcataaggagtcatattattctgctaccatcaatgtaaggttttctaaannnnnnngtgtttaatttcatcgtattagaaaattcatatttagggtgttaatgaaacatacatgtatgaaaatctagggtaaaataaattccaacaggacagaccttgtgtcaaaggtctaacgacgataatagccaaatcctggcaaccagcgacatgggggcattccagggatctcaggctcaacagcaccccttctatccatcccatggcccaccaatcaatagcaggagtccccatggttggccagactcctccagcagtccttatggtcgaccagactcctctagcagtccccatggccggccagagaagagcactccctcttcaaggggaacgagtcacttaaaaatcaattttcaaccgacgaggactgagagcaggtggaaatacccaaaataacaatttgagaggtgaagttaatcacttcagacagttagatccaccaaactccaataattggtgcgatcaactccatgtcaacgcacaaactccaccagccaagcagagaagtatgggcagccaggccctacccagcttagggctggccgaccatgtacaagcacgagacttagggttggccgaccttgagtataccctctcccagagtatggccgaccaggctttgaccaatccaaggttacaactcagttagagaaggccaatcaactaggcccctatagtaacaaattcttttgtgcaaacatagttggatcaaatacgagacatgctcaagggcctagctggtccaaaaccttcataacttgagctagacagggctaggagatcaccattctcggcatacatcaatgcttttcccttgcctaaattcaagatgccggcttggaagatgtacaaaggaaaagaagaccctctagacacctaaagtactttgagatccaaacatttctcctacaagtatctagagacgtgcgatgctaattctttctggtaatagctaaaataacctaataatggtattttaggctggccctaggaagatttaattcttgagaagagctctcctaagagttttatattcagttctctacttcaagacaaacacctggccgactggaggatcttgtcaaaatatagcgaagacaagatgaatccttgaaggactacattcaacggttcatgactgagaccacagaggtcacatgcttgatagaagaaggctgatatgcgaccatactcagaggcatcctaccattgagtgacttctggaaagatgtcaggaggatcttaacaaacaacatggaggagttccttgagcgagctggtggcttcataaagttgaaagaagatgtctggcaagcccaaacaagagggcaaggcaatggcaaacaaacatagggccccattgc

SEQ ID NO: 55612 - DNA, 1641 bp, Cannabis sativa
  modified_base (26)..(55): a, c, t, g, unknown or other
  modified_base (1368)..(1382): a, c, t, g, unknown or other
tttctgatcttttattaattagtaannnnnnnnnnnnnnnnnnnnnnnnnnnnnngggcacaaaatccaacagaaactttgtgagtttgtgtaggggatccacttgttcactatatggattttcttgatttcattcataggtttgttgatatccttttaaagaatgtggttgaattggttatggtgattctttggaggatttggttcaaacgtaataaaatggtcaataacaacattgaattgtctcttgtactcactgtacattaggcccacaattaccttggatcatttcacaacaaataggtttcgacggcagctcccccacctgtcagttggtagtggacgcccctgctggcgggtcagtaccttggatagccccttgtcaagcagtgctaaaatggaaatctccaccacttggctttctcaaagtcaatacggatgtcactattatttctttgggtaattgtagtggcataggtatggtgattcgtgattatttgaaaattgttatagcttcggtaagttggtatttggatggttattttattcctaaagtggttgaagctttggctatccgcaaagcattgattcaatgcatctcttttgggtatgttaacattattattgagtatgactgcttgaatattgtgcttacatttaaaaataaagtttctgtcaatatttctttgagtctagttttagatgatatttttagtcttcgtaataggctcgaagatgttaattttgtgcattgtaacaaatcttgtaatgatgttgtccattctttggccaaactcgctttaacaataggataaaatgtaatttggtggccaaaaaatcttatttgtattcaaaacttaataatagcgagtacttgttatttttagtatttggtggttgagattttttttaaaaaaaaaataaataaatatattaagtatgatataatattttatatatagcaatattttttttttattaaggttttgttttttttttttcaaattatgtatgataagttttaaatgacatttaaagccatgacatttaaaagctaactatatcagaaattattcaggtatggaatggaattatttaagctaataatgcataacacatatacatataagaattgaaaataatggttacaattacaccaaatttgtatttactattatatttattatatgcccatttatgttgaatctcaccttacatgcatgccaaaattatgtaggtagcatttggttgcaggtaaataaaatagaaagtaatagaaatataacaatttttattttatttctttattgagtaatttgcggcttaaatatataaatttaacttccaattgcaaataaatatctaagnnnnnnnnnnnnnnntaataatacttaagttataatttaaaacttctgtaggtacctagttaaataaattaccacatggtaattcttgattggtccaagtcattaaatttttattatttaaaaaaatagttcaaatataccaatatgaaaatgacacgtggatataatggcttaatatttaacggttagatacttatagagttccagaaacataacttaagtattattagcgccaaaaattaaacttaggcatttatttgcaactgggagttaa

SEQ ID NO: 55613 - DNA, 824 bp, Cannabis sativa
taccttttatgtgtttattttctttaaaaacatacttgttagtaaatcgagatcctggtaaaatatattccaacaagcccatgcttctatctcctcgagcaaggccattgacaccttgtcggccgcagtgggataggttggatctaaatttgcccaggcgtacgggattgcttgctggcacaaacttaagactctccttccccctgattcggatctaatcaatcttgggagtccataagagatgcttttgaagaacttggactacaacttcatggtaagttggtcgtattattattattatttcttttctcttttctcacattcatttgttcataattctccaggcttctttcatttcttttgcttccaatcgatgacttttgaagcggctcaaatatttggagggcgaggtccagaaattactatcccaatgcaggaatgtgattaagcaacaggacgacgcctagtaggaaatcactggcctcaaacaagaagctaagaagtcaaaagaagaagccgagaagaccatttaggcctaagctggtgaatttgagaagaagctcgctgagaaggagatcgagaccacagaacgatgcaacaaggtcggccttcgtactttatatcgagcctggatggcgaatcctaatatagacacaagcttcctggaggagagggaagaggaaactctggctttctggaagaagtccagggcagaggaggaaggggtcgaggcagaggaagaagaagaagaaaatccatccaagtctcccaccatgtagacttggttttttatttatctcccttttattatttttttaaaaaat

SEQ ID NO: 55614 - DNA, 832 bp, Cannabis sativa
gaccacagagttgtcacagttgatcaaatggattcataaagcaaaaatcagcaagtttaaaaagaaagtaatggcaacaactacaacaagcttggtctactaaatttggtatgcaaggaatgataaattgtggaacaatcatgtagaaagcattgatgtaattgtacaaaaagtgatacatagtgtcaaacatagaatagagttgttttggccaaacaaggtgggacaacaagatagagattgatttcacaagttgtgaaaagccatacttgagatcttttaattaaaagatgcccatttaaatgtatttgattgtaaatgtttgtaaaatatcaataaacttgctgatttatcaaaaatcaaaaaaaaaaaaaaaaaaaaaagattaacatttctactcaattgcactaccgggctcccaatatgtgattatggactactcctacgggtaaggtaataataaacaagtctaagcacccatgcatatattacaattaagctaaagcttaaccatctcaaaactgagatcaattgatctaacattaactaagtgatattgacttagaaaggatataacggtaagtttatgatatcgttttcactgtcctgaaaaagacattctacttatccaagtgtaagtaaaccacatcgttgattatcatgttagtgtaaattcagtgtacggataaatcatgagactaaatagcttgaagcatataatcatgagtaattatatgtttagctggatttaatagaatatatatatcaaatatataattataaaagtaatcatgtcaattaagcaaaataaaatgatttatgatcttttatt

SEQ ID NO: 55615 - DNA, 796 bp, Cannabis sativa
agtagtgagttggaaaatatggaatacttatttttacactgtagcctttcttctcacctaggggactgattctaatcaatgataatgggattacaatgtgaaattgggttaagttcatttggagcctaaagaagagagaggtggatgtgaacgaattttttttgtttacctaaattatagtggacaccatttggcgtgtccagaataaaaatatatataacagcaataacacacacatatatatatatattcatgttcatatgatataaagattcttatttaattaagattcatacaaaaatcgtttaatccaataattaatcaattataatcaagtaatacgagagaacaaattgtaagttattgaggtgagcataatttaaacaataaatttgtataatatgtctatcttagcttacttgatacatcatgttaatgtcgaaagcaaaagaacaattgaaagaatactttatttttcattactattcaggaaaggaaatacaaggctatatatacactatcaatgagctgaagcgactcaacaacaactaacaaaaacttagttgacacgaacagaaagttagttgacactattaaaaaaacaaaacagaaagagctaacaacttgtaacggtctaactaactaagccaaagctaaactaagtacccttaacaactcttttcaaacttagggtagtagaaagaccacactaagtttgtctcttaaaatagggaacctagaactagaaattggtttagaagtaagtctgcacgttgacctttagcaggaacatgat

SEQ ID NO: 55616 - DNA, 1853 bp, Cannabis sativa
ttcagtttttaattttctttattacaatttatttttgaaattttttttttttgtgcgtgcttttttttttatatataaaaagttgtataatgaattttttaaaaaatttgttagagttctccatatagatttattatgctttaaaaaaatatatattttttaaatgattcaaaaataaatttaaaattatttcatatataatttataaatagcagtttgtttactagtttattttatgattattgttgctttacttaatttattcttatttgcttttataaaggcttagctaattattacattattgtagaacatttcttctcacttttgcaatctactttagcccctctttctctatgttcctttcttttgctctttgagttctatgttcgcataattatctgtctataaataataatatactaaaaaacaaggaaaaaagagttatagtttagaacctcagtgagttcaatttacataaatgaagttatggtttaggcaaaatcttataaaattatagtttccacaaaaagacaaaacaattaactaaactcaaaaaccttatctaaaagaaacataactaccacatggtgaaggagataaagttttctcctttttgtattataaccaataaaataaaacagatagaggtctgagtaaccatggtagccttgagctgccaatttcaaccaactatcattaacagttatctaagcactaaacgcagaccatctagctctatcttttgttcagctcaaccctctcaaagcaatatcaaggttttactaattttcttatgaaataatctgatgtttgtattgtgtaatattgaatattccatgtttctataggtcattataaatggtgcagctaaggaaatacaaagggctgcagtaattgcagtgaccaaagttagaggaatggaagtggctggtgctgttgattcttatctagttggagaagatattggcaagaatctgtctctctctctatcaaccttaactaattagttagttaatctaatccaataatgcttatctaccttttttttttgtcaaactgatttatgttattgttttgtcaaattaggtatgtgacatggaagagcctctcgaaattcccataatgaatgatctcaccatggtcttaggttccatctctcaggtaattcttgatatgaaatgtattaacacatttgttgttatctattctactaaaccattcataactctaaaataaattaatacacaagaggattaagtaagcaatctgcaaatgaatgtgtttgcttttcttttttggtctattacctacatggttatacttatatatagccaataaagaagaaaatagaaatacataaaattataaatgataaaacaacaattattttcgtacacttgacgtatacgttattatataagaataattacacgatgaatatatgttctgaaaaatttatatatgaaacacattattcataataatttattaaaaaagttgtaagcaaaagtgctacactactaaatacaaaaatttcagtgcccagtttaattctctagctctctaatactattaacacatgattaaattatataaccattactggtgcattgcacttttttttttcccttatagcttctaaaaagccagagtgccagactgtcgttcccaattgagttcataaatgaattaataatgtttgtgtaattatatggtaaatgattgaggcaggttttaactaagaaaaattttcagttttgtcatttgcattgtagcttattttcattctctctggcaataacatacaatttttagtggttgatcaacaaacatgaacatcatggaccaat

SEQ ID NO: 55617 - DNA, 1287 bp, Cannabis sativa
atttaagaattagattgtggtgttcatcaactacctggaaaaaaatgtggccccttttcaaaccaaaaaagtgaggctctatatatgttacactatttacaattttcgtattttttttaattatttttagattgttaaagattatttttaaactatttaaagtattataaattaattttttcgttaagtatcatatcaatgccacatgtgtaacactaattttaaaaatataatttaatattttttttttagttttacaacttttttaattatgctaattaatttttagtttaataatattttagaaatacatacttttttattttaaattatggtaatatagtaactggcaaaatatatagccatatcattattttaaattaacatctgtaataaaatttgataaaaaagattaatttatacaattctgtaaataattcagagttcatttttaataagctcacaaatttaagaatacatactatataatgtgtttgctactgtcttttatatatatggcctgataaaacatccttctcagccagtccccatgaggcccccatatatataaatatatagatatacatatgtatatgtatatgtgtgtgtgcctgtgtggctgagtggttagtggggtctatcctccaatatttaagggcaaatgcaaattgagatactacaatgatatccaacatagcaactgtgttatatttttatataatagtatatagtactatacattccatgcatgtaattaactaaacagaaatagaagaccaatgatactccaacccatgatcaatttgtagtctactatttcacaccttataaggtatatatattaatttgataccgaattttgtatattttcttctagtgaaaaaaatgatctgttttattttatgtgattataaatacttaaatcgatattaaatatatatatatattgatttatcacgtacaataaatgattatttgaatcttaattatatattagttattctcgagtacatttaagtttttttttttaaaaaaaagaaaaataatctaaaaattagttataagatgtctttactaactatatatgatgtacacttataaaagaaaataatacgaaaaagttggcagtacataatgtacatatatgtattttaagtataccataattaaatttctatgtaaaataaatctcctaacaaaaaatatcatatatgtgtacaatttctaaaagagatacatcaaacatcacttcattcaaaagaaatatagaatatatttatatatata

SEQ ID NO: 55618 - DNA, 929 bp, Cannabis sativa
ctctgtgcaactttgctaaagtaatgctgaaaaattggtctgatttaacataggggggatttagctattcaagtctattattcctttgattacttttccttgcaattaattttccagcatttgtagcaatatttcaatcttaattccagttcaatcaattttattctactttacaacatccaatcaatttattttcttaaaatccaaattgttaaataattggttttgcattaaattttacttgctatccctatggagacgatcttacttaccactttattatttgtgtgactatgtatactttcatatattaattttcacaataacagatgataacatgcgagcttttatttgtcagtttccccatatgcgctctgcagaggagggaaacatttatcttggacttccaagatccatgagccatgacaagtcaactgttttggggtattcgaaagagagggttcgcaaacattttaaaggttggaaagggaaactcctctcgagaattggaaaagaagttcttgttaaaacggtggctcaatctttaccaatctatgctatgagtgttttcctacatcctttggagattaatcagtatatcaagcgtatgatgaccaaatttcattggaaatcctctaatagttctcgtcaaaggattcattagatgtcctaggattgaattttttttatcaagaaagggaattcattaatcaatactaacaaattacatcaaatccggggaatacctctccaaacccaaccactcttgcaaattcttaacacattctacaatttttttggacaatttagaaaccttaacaattaaaacccttgtcttaatgttctctttgaaaattagatcaatacaataaggtgacatatatttaccttcaaacacacataaatttctattcaaccatgtgacagtc

SEQ ID NO: 55619 - DNA, 1035 bp, Cannabis sativa
  modified_base (625)..(625): a, c, t, g, unknown or other
  modified_base (672)..(679): a, c, t, g, unknown or other
tgatatacaatttaatttataaaataaattgttcaaataatcatattactttaattaccaaaatctaaaaacgaaaattaaaaccttaaatgaagctaacatttacgtagctctcaacgtaacattcatctagtgtacatataaatcaatatctatatatacaggaaagtattagggaggttaggtggcactcttcattttatttcatcaactttttttattttctcaaaattctatattttttatttatttatattcataaaaatttattataattagtaatgataaatattcaattacaacctttcaatttattttattataattagttataataaatattcaattattttttttattaaagcgtttatatattacaaccatattttacctaggactcgaacccaggacctccaacacacacacccacttatggccacttgacctagcctcaagtggttagaaatattcagttaacacatttcaacttattcataattttaatactttcaacttatccacaacttttttatttattgcatttttatcactatatatatttcctcttttgtgcaacctattttgatgtgtgctctactatatatatacatatatggaacacttnttaatgggtattacccattgatggttactaaacaaatttaactatannnnnnnnttttaaaaatattaaaccattagattttgatccaatgaagaataataacaaagaattttaaatttctatacttaattcagctacttaattacaaataatatcaaaaaatatctctttttacactatatcaaaaatatgtttatatacaaaaaatataagtcaaactcaactttttttttatctttctttattgtcgaaagactttttttcttaattttttttaactggtgaaacaatctcaacccatataatgtaaaaataagagatttttctaagtagatataacaattaagcataaaaactcaaattttcgtaatactactcatccaggggtaatatgttggaaattattttac

SEQ ID NO: 55620 - DNA, 959 bp, Cannabis sativa
  modified_base (692)..(696): a, c, t, g, unknown or other
aaaagtataatataaaataccgtattttttgtaaataaaatcataaaaatcgtaaagatatttaaaattctgtacaaccgtatttttgtaatttttttattgttctggtgtatttgtgaaataattccttaaaaattcgtataaaataaatggatttgaatttattttaaatgagtttgggtcatttttggattgacacagctaatccgcttattaaattggtcatttcgattgacacacttaacttgaaaatgacacgatagtaatttataaaaaagtatacacccttcaattaattatatttatccccttagaaaaattattaattttttaattaaatatgacataaatatgtgaaattgctcataaatatgtcataataatattgtaaagatgttaaacttgttataaacatgttaataagttaataagttcatcaaataatgcatgattctttatattaatcaattaatcaggtcgggtcatgtcaactcgtttataaacggattgggtttaggatttagcttttaacacgacccctccaaacaagcacaaacttattgcccaatgtctcttttattacgaagaccactgggccgcaaagcttatcccggagttatgttttatttgcattcatgctttttgaaaagagctgctaaatcaagttctagtttaggtgaaggaagtatgannnnnttaccaatagttgagacccaatcgggagatgtttcagcttatattcctactaatgtaatttcgattacagatggacaaatattcttatttgccgatctgttcaatgctggaattcgcctttatttagttaacatgtacctatttgaacaacctcaattaatcttgtctttctttgataagaatcaacacgctctttataaagttccctcttggaatgaatttcaataggatccagagaaaccatgtcttcatccataagatcc

SEQ ID NO: 55621 - DNA, 6816 bp, Cannabis sativa
tttgacacttaattacatcaataataacctaaaaaatattattggacttaggttaggccttgaaatttagtggctataaaaaaatatttttgagcccttattttaaaaaaatgtattattttttaaaattaataaaaaatatgtaattttaagaggggaagattttttttggcccataagttaggtgggccctagacacaaacctaatccgcctatgcctaaggtcgggtgaattgatgctttttaacatttctcatataataaattacacataaagtcggtacacacttatgtaagtgagattcatcttaattaattgatacaaaataattgtattatatttaatacaaaacataattttataatatatttacattaatttttaatttgtgtttgagtacacaattataaattttgatataaaatttaacttcatcattaactttattatataaaataataaaaaataaatataaaaagttaatagtataatgtaataattagagataaaatattaaaaatgacataaaataaatataaaaataataaatttattgtgatataaattttgtattatatcattgtaattaaatttagattaacttttacaaatttaaattatttttgttgcacacaattaaaataattttttttataaaagtgaactatattttaaaaataaatcaccaatttggctcctagtgtcaaatttgtgtaaggatataatttatcctaatctataatatcccaaaatttcccttttaaaatttgataagatttaattgagtaataaaaacaaacagttggtgttcatattcatattattattatcaaaaaccaaaaaagaaagaaagaagaaaaatcaaagccaaaattcaccatcattcgtatttatgtggggacccttttgcgtgtttgcttccgtaatcttcatggggtggctggattttatttcttaaatgaaagaatatatatataacaagtccaatgtagactctgtactctctgcactatcctttttttttttcttggacattaatggtgattagacagagtctatcttttaatagcagaaagaaaccccctttcgagctctgattctcattcaatattccatttgctttcaaattagttgttgttgttgttgttcatccatgactgaacagatgaaacaaggttcaaggcaccattcggaggtacaacactttttcttgagcttttgctttttttttttatgtatttggtttgtgggttttggttgaattttgcgaaagtgagaaactttgcagagaagttgggctgaattgtgttgtttcgattggtcgtgcctacagctcttctggcccaaagttgtgatgaggaaattgttgaatatcagtgataagaattcagattatagtgccgatcctgaagaagaagacgatgatgataacgattccgattccgataatggttagattcactctctaactcactctaaattatactttgaataacccattttgagattttccttgattgaaaagaaaaatcatttttttttctttgctcagatttttctcaacgttcaaggaaatcaaggtttgggagagagaatgaagaagatgatagaatggatgatcctaatggtaatatttccattcctagaaattttacattttctgaaatttatatatatattatataattaagtataatggatctactgctacagtactttttactattgcttttgaaattttggtgaatttggttgagaagagagaatgaatgagtataaggcagctctgcacaattttgaaacagagcaaaatccaataacacttgtcaattattggctgtttttttggaagtttctcttgtcattttcatttgtaagaagcatatttgttcagttatggcaacaggttttttctgcataatcttaaccaactggtcttagtgtaattaggattgtgaaagatctaactttttgtatgtcttattaacagaatgtaaatatatagtttatgtgattacatataactaaaatagtagttttgtaatattttataacatttattttggtgtaacttttgtaaaataatgaggtagttttggaatattttaatacagatggttaaacctccatttactataatatatattctctctctctctctctctctctcttttgacaaaagataaaattttatatctaatatatgctcactcatttaaactattaatgagtacaagtaaatatattattaaataaataaataactatttgtattcttagttgcttactctatattttttattatgtattagttgtttttataaaccatgaataataatattaaaagctatgaaaaatgtttcttcattataatcacaatcttccatcttcacattttatttagtccatcttaagttccatttgataattttatacaaatggtattggatgttttgtgagagtaaaagtctgctaacaaatatggttttattctctgaaattatgaggaatttcttctcaatttgcataaaaaagcatacatgatttctaaaaatgaaaattaaaagagaaagaaaaataaaaagtggaaaaatattgtgatgaaggatcattagatatcaatttaatttaaaaaattggatcaaattaaaatcataacacttgatatgtaattgtgttattggaatatctaactcaatatatgctataaactcaaaatgttattgctaattatcttgaaattggaactgttttaatcttcttcttcttcccttttcttggtaggtactagttggtgttacataccatgttaacaatttcatgattttaacattaaataagctctttcatgtgtttatatagtttcaatatttagtaagctttgtcatgtatttcattcttcagttcttgtgttcttgtttgtaaaataaaattcagatactcttccaaggttgcgaagacgaaaatcagaaacatttagagcacaatatataaactcaaaggaactcaggtacagtgcacccgctccctatttttccaagtctacatgtaagtctaaatcttagttgcactgattcttattagtgccaagaaagagtatttgtttattattggactgtgctaatcacttgtctttgtttttccatgtttttttgttctcttcttttatagaatatgcgttgcgacatggaatgtaggaggaaaacttcccccggaagaccttgacattgatgaatggataggcatcaccgatccagctgatatatatgtgctcgggtaagtattttaccctttttctttctgaatttcttatgcatttcatgttttgattatgtgtggataatgttctcaaattactatcattttaaccatgctagctttccacttttgttagcaaaaataaacaaaggggtagcatttttccaactctaaatgtcgatagtcaaactgttctaacaaataattcggtattgaaaaagacaatgtcattagaaaagttaagagatcatgctcttacaaatgcttttcaataaccaggcttcaagagattgtgccactaaatgctggaaatatctttggtgctgaagacaagcgcccggttgcaatgtgggaaaatattattcgagaaacacttaataggattcgacctacaacaaacaagattaaatcgttcagtgatcctccatctccttcaaagtttaagccatctgatgatatacctgatattgaagaagagatattagttgatagtgatagcgatagtgatttaaacgacgaactctatgatattggtgaagaagttcatccattaataaatgaagaagcatcagaagtgttctgtaactgcaaggatgattttgatgttgaagcaacagatcaaagcacaagtgaggatgtgattttggatgctgaaatggttggcaaagcaaatctaagcaggcaatattcttcttcaaagaggttgaatcgacttaattgtttaaaaacttacgatgatctattaatcgaacaaggtctagctaatgtgaaattaaaaaagatgcttagtggaactgaaaggattggtttaagttggccagagcctccattaaacttgttatcacaacatttgttagagagaccaacttcctttaagccaactaaatcattcaaaccatcaaaatcttttagaacatatacttctttcaagtcaacagatggagcatcagatctagctttgcttgcagaaattgatctcgaatctcttatgaagcgaaaacgaagatcatcgtttgtaaggatagtaagtaagcagatggttggtattttccttaccatatgggttcgtaggagcttgcgaagacacattcagaatgtcaaggtgtctactgttggtgttggtgttatgggttacattggtaacaaggtaagcttttctcttattttttctcaacaaaacaagttttactatattttactcattgtgaaccgattttgcttaaaataacttcatttgcttatcgacatttcagggatcagtttctgtgagcatgtctatttatcagacaatgttttgtttcatatgcactcatttgacatcaggtgaaaaagaagtagacaaacttaaaagaaacaccgatgtccaagaaatacatcgaagaagtcgtttccattcagtttcctctataggccttcccaaaagcattcgggaccacgagtgagtacttatggaatttcgttttatgcaattcaacttttgtcattcatttcagtaattgaattagattgacttggattgaacatgattttgtgtatcttacccttgtgttagactatgactaagtaatactctattgcttttctcttgcagaaaaattatttggttaggggatctgaattaccgaatcaatttgccacatgaaaaagtaagagaattaatttcgaagaagatgtgggctgagttgattgaaagtgaccaggtgggtttgtatttcttcatataggacttgattaatgtgtacatattcttcattaactatgaataagcttatgcctatgtatttggcggttttgaagtttaaaccactctccatgtcttactagttaagatttattatcatgcttttatttctgatatgcactagaaaatacatgttcaatcccaattgactgtgatctgaaaaatttaccttatacattattgagaatcatggggttacatctcaaaaccaattggtaatgagtggagtagccagcccatattcttatatatggctcaatactttaccatttattcaatgtaggacaatgtccacaatatatttcttactgtattagtaagtagtataactgaacgaaaaaaactgttttgtattgaactttcaaatgaagaacacattgttgcttgtgtggcttaaaacaaatcccaggtctcgtggtgttacgccatatatgctttcgtagttcaaactattcagttgaattttacaaactttagttatgtattgaaataatagatggagaaagatcagtgattcatttagatgcagtggttaggcttataatttgctctcatgggtactttctaaggatttgttagagttttgttagtctcgaaattacgtgtaattaaagatgaaattctggtttatagagcaactgcacttttattgcttctctaaatttattactttcaagttgatttaagcagtaagatcttctgtagcttcttaagacatttgaaatatttttcgcagcttgttcgagagcttagaaaaggtcgagcatttggtggatggtctgagggtgctttaagatttccaccaacttataaatacgagatcaattctaacaagtacattggtgatgaaccgaaagctgggagacgaactccagcatggtatattatctgcttttattgtgctctttttcgaattcaattttaagtgatctttctgccaataatgaatcaggtttttacttcggtttttgtttttccttccctgtttttcgaaagactaaagtgcatatactttgccattaataatttgggaagtgatcaaattaagtttgaaccttcttctatcaggtgtgatcgcattctttcttatggtaaaggattgaggcaattgagctatagacgggcagaacttaaactttctgatcatcgccctgtgacagcgacgtacttggttgaagttgaggtgttttcttctcgaaagctacaacgtgccctcacatttactaatgcagagattgagaatgatgatattgtaacagacatggatactaaagttggaatgagcagtttacatttgatacaggtgagtagttttgttacattagaagttccaaaatataggcttgtattgtgcatgttagagtttgtcttcacattccacttctatacatactctactatttttgctcttgcctgcctatgaggatacaccgaaaaatagtttatatgtcccattttcgcttgtagcgaataagacgagctcgagcttctcctatcaacctcgacacttcttcgtatgttttcccttgatccatgtcaagcctcctcaccgaacaacaggcgtacatgtaggtaaaaggatttcctttttggcttatttcgagtaagctaatgaacacagttgaaaaagcaaagaaatggaaacctacattgcttatgttgtgtccaaaatcctaagcacagttattcctttctttcaaccataggtttaggcaatttcgaagcttgcataccataactcaaagagaagtgctaccgtcaacctcctgttacaacctctacgcctgaaaacacatgtcggaattttttttcaaat

SEQ ID NO: 55622 - DNA, 1197 bp, Cannabis sativa
tatatatttatgagggagacaattgactatatttataaatatatttggaacggttgttttttttttttttcgtttaggcaaaaagcagctatgttgttatggatggcaaattttgtttttatctaaaatcaatcttatatttgtattattatttgactatgttcatatatatatattgactttaattttagtggtgtcaattgaacttctattttttttcttttgaacataagtcaattgtactttattatacacttcttttgtaattttctaataatgttatcttaatgtaatatagttcatgcctaaaatagtcaatttacatggaaacaatatgctttcaatgattagtcatctcaatccttaccaaaataataataataataataataataataacaataaataaaataattaatcatctcaaacaattttttttttttaaaaaaaatcttaaccatcaaacaccaagcaacaagtattctataaaggtggagcaaaatatttattcaatgatagcatcagctgtcaacaaattttgaatataactgggattacttggccaccaaacaatactactacgtgcttaaaaaccaagtttagctagggtataagcagcaccactacaagatctattacaatggacaaaactaatacatggagcctattacaaagaccaatgatatcatctaaaatataagacccaaaaaagtgatgatcgaatcactgtttttaattttaagcacaacattcaaacaatcagactcaaagatgatgttgtcataccaaaaagaggcaatgaatcaaagcatctcgaattgcgaaagcttcagtgacttcaggaacaaaataaccttccaagtgccaacttgagaatgttttagccactcctaaatgattacgaattaccatagtactcaaaccacaacccttactcgttgaattaattgcagcgtctgtattcacattgaaaaagccaggagggggaggagcccatttggagattggtggaactgaactcagttacaccgccaatcctccatgaggcacatccactctcggttaggaagggaaaccagtcaccacctaatgtttgttttgccaaatgattaccctccaccgtcggtgcctcaatctcgtgactatcatgaaggttaaagatttggctctaatgttgacgattttatggaatttagt

SEQ ID NO: 55623 - DNA, 1793 bp, Cannabis sativa
tggcagaagtaggcccatcatccgaaggtgaacaaaacacttaaccaaatctcctctggaagacccaataactatgaaccaagggtaagctccaggacatgaggaaatagccccacttcctctccgggaggtgaacggcaaatgaacccctccggactagcaaagttggaggtgaacggtcacttcgcatttaatgcagcatgaaaaaaatgtctggaaatgcccataagaggacgtgtcagacgtcacaaacccaactttgggcgattacacgataatcaagggtgctagttacgactccattatgaataatcacatcaattaagaggggatgaaggctaatctcacctaaaacctaggcagcctactatgcaggttatgcatgccctattttataccttttgggaacttgtgcgtgcccatagatagcacttgaagacaagtaaaccatttcttctttccaccaattgctataagtacccctcaataaaattagggaggggatcgaaaaaagaagacacaaaaaatattctttgtaagaaacacccacttattaataacagagactcatggactacaactcattaatgcctgaaccacataaaaatatctgcattaattatccctaaactatcattattacattaaatatttggttgtcgaaaatctcagttaatattttagtgcttccattgagagctgtgggaatcattatccaaagaacgacaacaaaagatttaaagtacaatggtggagactcggaaccatacacgtcagccttgcccccctcatcccataagatctttagaatccaagggacgaagaagcaacttcatgagtaaacatggactctgaagagcaagacaaaacaaatgagaaggagtacgaagaaaaccaaaaagggtatgaggcttatgacgatggcaattataccgaactacttgccctaaggcaaaaggcagctgatcacgaggttgaactgcatgcgcaaaaggaccaaaataggaggatgcaagagataatggtcgccatgcagaaggctatggaaatggctggaatccacgtgcatcctaaggtcgtgcctccaggaccatgagaaagagaggaagagtcctcaccaagtacccaaaagcataaaaatagggaaccaagccctttacgatatccctctgaagggaaccatgtgagaaatcctacgtaattccctaaaaagaacaaaaatgcttaggatccgcgaaagagtctgctctgatttcccaaaaagggaagggtccgccgaggggcaggctccatagagagagcactagccctcaggaccgagaggactaaaaaagcatatcagtgcatcaagaacctggggaaagaggcaggaaaattcacaagcatccccctaccgacttaagagagaagcttaacaataagcatcgtgaccttaggaaacacttagagaaaaagaagcaagcaatatcggtgttggagggtgccttaaatgaaggaatcttggtagaattggcaatcctctgcaaagacatcgctagggtctcgcaaaggcaaaatgcagatgacttgaagtctgactgtgaggatcggaagccctgcgccaggaatatcctggaggcagaactcccccaaaatttcaaaatgctcaaattggcagtatacacgggagatacggaccccgatgaccatctgtctcgattcaatagagtaatgactgtcatgagagtcagtaatgacgcaaagtgcttatgtttcccattaacgttgggtggatccgctgaggaatggttcaa

SEQ ID NO: 55624 - DNA, 934 bp, Cannabis sativa
tttttaaaaaaaaaaaaaatttgggcaacaacccaccacgtgatctcctccttcccagtatatataggatttttctaaggtgagaaattttgaaaatgtcctatctccgaggatttattataaaatgggtctcactatatttttgtggatataaaagaggtacatggccactacaatgtggtgtagtgtaggagattattattaatttatatcgtgggtcccagttatttaatattttgtttttttttttaatttaaaaaactcatttttttattattcaatgattcaaccaaaaagatacattttcaaaataatagattatataattacatgttagtgttaacaataaacataacaaaaaattttaaaattacagttgtttgaagaaatcactcaataaattttaatgttttatagctttctttgtttttgtttttcttttttttaaattagatcaaatatatttttcttgacaaaagaaacatggtgaagaagaagaagatcgatggagaagaaaatgtcgtcggtgaacagtctaatggagaagaaaatatttgagaacaatcgcaccaaaggaaattaatttttgaatgaagaaattgtaggagaatggtgagagaaaaaatcgcacaagaagagaagaagggagtgaattgttcaatttggaagaatgggttgaaatatatatggaaataccacttatatacaaatctaagtatttccatctttttagttcataatttagtttccaaattttaaaatatttctttatttatccaaatttttctaattaagtttaaaattaatttatataaaaaccccaaatgaaaaatgataagatccacatgttagcaattaatgttttaccttataattttgattcccaatcatttcattactgatgaaaagttatcattttatagcatctccaatg

SEQ ID NO: 55625 - DNA, 1329 bp, Cannabis sativa
cacagtttgtggtaaaattctcatatcttcgaaaatggtgttataaagttgttacatactgtttgaatttcctttaatattcttggtgattgagtccattttttttcctgaataagtggtatggcctcattccactagttcattagcttgataaaataatttctgactattcttctaattatgattttttcatcaaggacaaagacaagcggacattgtgtactttttgttggcaaaaatatcaaggttatttattggtttcctatttggtggtattttcggatttggttggtgtatttttttagattttgtagggatatgttgtttcctttttccatttatggtaaccttatttgaccaattttcgaaatatttttttggtttccttttttttttcctcatgtggtcaccaaggtaaggaagttactttccttttttttttcttttttttcttttttttgattattggatatttaattttaagtgctatatatgttcaactacccaccatatccatgatcaccacaattcattcctctatcatttttttaagagactaatctttttcaagtttgagagtgtgtttgctttctagggtttcaaagaaaaatggcaaaaactaaaaatgctcaatcgtccaagaagccttctcttggctctgcctcagcttctccgatcaccccacctgcgccagctgctccagtgaccagagttcctagatcgtcgtctactctgacgaaaactgtcagaaagtttaagatccaagatcgaaagtcaacttacaacctcgtttctcctctgaccattgcctctccgattgctactccaactcttgggtttggtgatcatgatgaatctcattcatctgatcacacattgtcgaagtctacttcttcgaatggtgctccaaatgttgagaaatcaatagtgaccttgcccacggtgagttctcgaacaaggtccaaggtatccacacctcaaaaacacaaagtggttctgcccaaaagtgtctccaaaggaaaaaaggtggtgtcttcatcttcaaaggccaaaagtctaaaagaaaaccccccttccgtctcatcattggattgtgaacctgaagaagagaccgaggaggatcacgaatcagagggtatgtctgattcaagtgaagagtttgtggccaaagaacaaccctctactgatgattctgggtctaaaagtgaagagcttgaagctgaacctgccagtgcagaatcaattgttgtccctactacagctccaaagtaggacaaaggaaaacgacccattgtttttccaagtcctattcttcctcaaaaaagaaag

SEQ ID NO: 55626 - DNA, 1144 bp, Cannabis sativa
aggtacaattacaatgattgacaaatcatgtacaaatgagtaatgaataaataatggtaacaagtaacagagagtaaccagtaaccagtggcatgaatatcattctctagcacctcctctcaaactaagtggggtattgaccacacctagtttgtcaacaagaaaatggaaccttgaattggacagacttttggtcaagcaatctgctgtttgatcatggctgggaatgtatctgatatccaatgttttggctagaactttgtccctcacgaaatgcacatccaattcaatgtgcttagttcttgcatgatagactggattagaggccaaggcactagcacccatgttgtcacaccaaataattggagtatgttgcagaggaaaactcagttctttgagtaaagactgaatccatgtgatttctgcagcaacttgagcaagtgctctgtattctgattctgtactgcaccttgagattacagcttgctttttcgatgaccaagacaccaaagaatccccaaaataaacacagtagccagctactgatcttctatcatcagggcaacatgcccagtcagcatcagaataacctgtaagagttagtctgtcactgtatttgatgtgtaagccatgatcttgtgtaccctttaaatatctcaatattctctttgcagcagaccaatgaacatcagtaggagccttaagaaactggctgaatttgttcacagagaaactgatgttaggtctagtatgagtaagatactgaagagccccaattaaacttctataatctgtaggatttttcattggtgtgccatcttgtatagacaatgcctttcctactatcatgggagtcgagcaagctttcagacgtgccatgtcagttttatcaagcaaatctgctatatattttccctgagacaaaaaccttccagtgtcatctctgcacacttagattcccaaaaaataatgcagcaacccaaggtccttcaaggcaaagactttgttgagtttgcttgtaaactgtttaagcttgactgagttgttgcctgtaacaattatatcatctacatagatgagaacaaacacaatgtcagtagcatttttgtagaaaaacaaggaggtatctgccttagaatttctg

SEQ ID NO: 55627 - DNA, 883 bp, Cannabis sativa
ggtctactacttttaagtaatagacaagtgttatttaatgaattcactgttttaagaacatgttattatatttcttagattatcttcttatgatacccacaaatattttctggtccaaactattattattagattagattagatttgttgattttaaaagtaaatttctatttggagattagattagattacacacaaattttattctgtttaaatactatatgtcaatgttgtgtatttgtaattgcattgagtttttaatatataaagttgaacaatgtttaagtcacattgatgtatttaattggtttgcacaatttttatgcatttcttttgtgtttaattgttatttatttttaagaattttaggcttaagtcttgtaattatatgtagattgaatagatggcaggaacagatagtgtggtatttattatcgacaataacgaaacttatatttgacctcaaaaatatgaacaaattttgaatgcagaaaaagacatattttgatggagatgaagaaattcgtaaagcacaagatactactatagaaagcaactatgaaactttgaatgatagtattgagtttagcatttcaagagatcaaattcgtgaaatggctaatgttcgtgatgaaattattgatcatatatggacagcaaatcgacgatgaagataatgagtgaaacttattaacaattagaacttttttaatattgttcatcaagattggaaaattattagttcatattttaattatgaatttgtcggttttctgttatagataatgagttccgtgattttaaattacttgaatttttttaagatgttaatgagtattttttatttgatttttttataatttttatatatttgtttaaaaat

SEQ ID NO: 55628 - DNA, 854 bp, Cannabis sativa
tttttctacaaatcacgattacttccctttccaatttgcatgccctcactgtcactgacctacttttagcgtatttcatcaaattacatatttaacctctgagacatttataattcatcatctcagtcgtcgaaacctcaatcgcaaagttttttaccgttaaaaaatcttcatcaaaacagtaagtgactcattctcttgttcctgccattttattctgcatttgtagtctaatcttcgtaattgattgcttcattatcttctttttttttggatattctctaggtaatttttgttttgtttggataattttagggttaagaatttttttaggtttattagattcataggcttctagtttaggttgaatttactttttccgaaaattgggattattctcgtctacaaatatgacccaatttatttctgaaattccaaccccaaacttcctagaaactgtatgtcttgaaaatttagcccttccatttgaatccaaaactcacatacctaaatccaaacttgagataaacgatgccaaaattagggatcatttaatagaaatcaatcaagctgaaatttccaatcgctataggtagtttttgcaagaaataaccaagggtaaacatcgttatctgcgagatgcatcttggcctgaacccaaacctttagcttctattctacaagctaaacttttgtttttaccttgactcactgttgctttttcgccaagtgacatgaatttcaaaatcatgacaactcaagctcgtaaatcaaagacccccaggatcctacagtcaccttcgaggcaaaactgattgaatccaaagtcagatcgatagctccttttgttggaa

SEQ ID NO: 55629 - DNA, 1253 bp, Cannabis sativa
gagagagtgtgttttttaaatttgttgcatttgcttctttcaatccacctcaaaagccttgataaggtttgagtagaagctttccaccccaaccaatctttaatcctctgaaggcaatggcaatgttgagagaaagaacaagagaaaaatagatgatcacaagtttcttcctgagcattacataacacacatcctggatcattgatgatcccaaatctatgcagtcgttctcttgtccttaatctaccctgtatagcaatccacaaaaataaagctgcattttggaatgttaaacttcccccagacttccttactccaatgcagttttggttgtggaggaactaaatgtttatatccaagggaaagatgatacctggattgtgtgaactgttgaacattcaccattgttttaatctgactcttggcctctactatttttttccagtaccaactcccttgaatgggggcattgtagccccaccaatcctcttcccgaatgtatacactatgtatccatcgaacccacatgttatcttccttgttagcaatcgcccacacatatttaaacattgctgctctgttccattccgctacctttttgaacctaattccaccttcaaacttaccttggcaaacaaactcccaagctattaaacccaaaccagtcattgaatgttggcccttccatagaaacgctctacatatagcttctatgtcattcactatcttcttaggtaaaatcattatctggctccaatatgagtgaatggtcatgagaattgaattcactagaaccgcccttccagcaaatgagagattcctagtactccaagttttaattcgggatgtcattttctcagcaagctctttgtaatctgtgcttgaaattcttttggcacatatcggcactcccaggtatctaaatggggcattgtgtctaccaaaaccagacatatataatattcgttgcatttccctgtcattcattccactaaagtagacaacagttttggtaggattaggatgcaaacctgaggatagtgagaatagcttcagaccttgcagcatgagatacacacttttgaagtccattgaacagcaagatggaacccgaactgatcagcccgaacaggtaactgatgcattcctctcctattataagatgttattgggaagctccatggaaaacaggaaaaaagtcatccgtagtgttgttaatgtgggaccaaaagtcacaaatcagcaagctgaaa

SEQ ID NO: 55630 - DNA, 766 bp, Cannabis sativa
cttaaaattagattattgtaagtgtaaattgaaattctgggtagcattcttcgtatgagaagaattgagtcagtatatttaatgctagaacaagcttgatattggtttatagagaaattagattgtttgttttaaataaattcgataaaaatttgactctaggggtttcattactgcaaagtaacaatgaatagtttttttcatggtcgaaaaattagctttacaaaaggtgaattgaaatgtgtaggagtctattaacaattaatgccatttaataatgaggctttttcttcttcataatgctgcaatcattttgatttgactaacttattgcattttaaaacgttgaaattgctttctttttcttcttatgctgttatacttaattgtggggtttatctaatatagcaaatttaattttttctgttatgtgaagtttcttttcattgagggaggtctgcagtgttggttgcacagttgggtcaactgtttcagaaatcatggggagtgcattcaaccctcaaatactagtggagaagctggcaaagctcaacaattctcagactagcatagagagtatcctagtgactgatgaaatatgaacttgaaatgaattgtattaaaatgtttgtctcatctgatttgtgattttgatagtaaagttttttttttttgagtatcacaagctcatatttttcattattggacttcggtggcaacaacaactgaattcatcttgtcatttactttttctgatataaaattc

SEQ ID NO: 55631 - DNA, 1250 bp, Cannabis sativa
atccataattttttggtgataatatatttaataagattattgttatcacttttaaaatatcatcatatattatctatgatcatatatttaataagactattattatcacttttaaaatatatttaatatgattattattattacttcgagaacatgtgtggacttctatattataaatgaagggttctagaaactttaataattatccaacttattaaatcatgtgtgtgtatttaacattatttataatctaaagtttaaaaatttaagtaaatatgaacataacatattgataataaaatcttcatttgcaataattattacagtttcgaattgttgtcaatttttcccattttgcgacggtcgaataggcgatggttatagaaactgatggaaatactttatccaataatttaaaactgtcgagaaaaccatttttagtagtgaacggggaatgattgattctatccctattcaatatgaattgctacctacaaaatgctctaaatgtggtggttttgggcataggtcttatgtatgtcgattaggttagaaatggaaagccaagagcactaaaattgagaataaggaggctgttataaaggggaaaaagtttgttgtatcttagagtccaaataagggtcatgatgacgtttctaagattcttgaacagggtgagtgttgttcaaatccaattttggaagggagggttaccgaaacttaatcaggaacagatgataatcaataagtcatgattaaaacagaggaaggtcaagaagataactgagaaataccaaagaggatgagtagtcagattcaaaaaagattagaaaaagcagcataataatgagtttcgtgtttcactacctagtccaaaatgtttcctcaaaaatgaatgtttggaatggtaagttcttttctagggcttgaaaagagactcttatcaaggctgcagttcaggctataccctcctatgcaatgtcttgttttaaactgcctagatctaactgtagaaacctccaaaggcttatttccaatttttggtggggaacttctaataataagaataaaatccactggaaatattggtcaagcttatgtgtctctaaattttttagggggctaggttttcgatctatcatccatcacaatcagtgtaactattttaagcatgttaacatgatttttaactgactgtgcagctcgttgctaatcaacgagtttatagaaaatcgtgattaattaaaatt

SEQ ID NO: 55632 - DNA, 832 bp, Cannabis sativa
  modified_base (346)..(351): a, c, t, g, unknown or other
tcttgttttagtgagattcatccccaagagattgacgttcattagcaatttaaagtcgtagaatctcaaaagataagtattattgtaagtgttttattcttagtagcgtccatctgaacagtggatgctaagagtaggacttacaaggtatgaaacaatggtagaagctcattaaataagaatgaccttgacgctcaactaaaatgaagcaacgtcggattctctttttgatcgaataaaaggttaccggaatgatgaccattttagttgagctgactactctattcaatgattgatatctttgactctcgcccaatacgaagcactgtatcagtttgttggaaannnnnnaaattatttaggattgtttgtttttgtattttcacttattattcctacttgcaaatttcttaataatttctgaacgtgtatgattttgtattaaaccttacttaatttctatttattggtacttgtagtacccaatatgactatgaataaccccatggtgtcactgttgactgacaacaagctctctggagctaactttgtcaaatggaaagagaacattaatattgctctcatatgtgaaaattccctatttgtgttgacttaataggctcctgagcatccaggtgagaaagcgaccaaggtagttaaggaaaagttcgagcgttggcagaatgctaacaacaaagctcgatagtttatgttgtctagcacggtcgacaccttgaagataaggtttgctaacactctcacgactgtagatatcatgaaccagctgactgaactgttcgagatggcatcagatcaagctcggtttgaggca

SEQ ID NO: 55633 - DNA, 1077 bp, Cannabis sativa
  modified_base (1032)..(1051): a, c, t, g, unknown or other
agggcataaaacccaacatgaccaacatcaagcaacaaccaggagagtcccttaaagcgtacttgagttgattcagtacaattgctgcaaaagtcagaaacttgaatgataatatacaagttacagcccttcaggctcggatcacaacttatttatctactgtaggggtgaattatgggatgatttgtaaggtcaccctgtgagaaatattaatgaatttaatgaaagagcacaaatttttttgcataaagaagaagcacggaatgagatgaagctgttaaagactgactcaagagataaatcaagcacaagtactgcaacaacgagcaccatgataacaaaggtggaaaaatctaatgtataccaaaagaaaggatgagccaaaagattcatccaaggaaaaaaagaaacaaaagaatcatgagaagtatgtactcatttattcagtttatattgaattgaatgaaactcgcgagaacatctacctcgctaatgaaaatagggtcgaattttgtagaccagaaccgatgagacatgcgaggaataagtgagattcaactaaatattgccatttccacaaagatattgggataccatcaaagaattccgtcaattgaaagatgaaattgaaagtttgatctcccagggatacattaggcaatacgtgagaactcaaaaaaaatgagcctaatcagcctaatacttgaataacccgagattgcaacctccccccgttgagggtgaggatatctttattatttttggagggcctctgcatagacctcattctccgcatcagaagatcccatttcctacagccgagacctcattcctagcctcaagaaatttgtccacaccagagattggctggtccaaaggtcttcttttgcaagcttgggtcttgggccagttgggttctttagtaaaatccatgaccacgctgacggggattaccttcttctcggatttcttgtcagcctgagaaggacctctaaacttgctctcaaaatctatgtgttgggttttatgccnnnnnnnnnnnnnnnnnnnntataatcaaatttacttattaatata

SEQ ID NO: 55634 - DNA, 597 bp, Cannabis sativa
aaaatatttttttataaatattaattaaataatttaatattcaaaagtaaccaatttaaaacaactgatataatctgcacttgtacggagttgattagatttgagctattgtgcagatggattggatccaaaatatgaaatttccacttagtgcggattagattgactatgagcaaaatagtgcgaattaaattggatgaacacctttaatattaattgtggttatataattaagtgttattattttaacattataactatgattataatgtaaatttaaatttattatagatatgtaacaaatatatttttattattattttttaaaaacaataaaataaaaaaaagttttatgttactattgtgacaatcttggttaacaaaataatattttttttaaaataaaaaactagtataatatttctaaaaaagataaaagtattataaaatttaaaggtatgattaaattaatattaaaattattaattatatgtttttatataagtaatacttaaattaaataatttttaataaaaattgatatgatttattaaataaaaaaaaatactaatgatacagctaaaacatatataacca

SEQ ID NO: 55635 - DNA, 1220 bp, Cannabis sativa
ggtttcttaccaccccaagatatttttaatacacattttttttaagcattcaatacatataaatttaagattatttattataaatttaaatttatattatattaataaagtaccatcgataataaagtaccatcaataatccattgttatttaagattattaataaatttttagaaaattttaaatattttttttgatatcatcgataataaagtaccatcaactatttattataaatttatatttatattatattaaatgtggttatataataaaatttattatttctttttaaatattataatttaaatttaaacttactacacatatatatctgaaataagatgaggaatacctgtttttttgtatccattaataaaaaatactcttatattatatttcattaacatataccacttttgtgaatgggttgcctaatataccctcacttttcacttaaatatagcacataaattacactaacttaaagggtatatataatagagccatcatctataaaagtggttatatcttaaagaatatgaaaataaaagtaaaaattaaaatatataaagtaaagtgggtatagaatgtaatttccactatatatctctctcttatcttttatggtatagtaaatgtaacaatataacattacaatttaaatttaaaccgagtaaataaatctaaaataaaaattctattatcatttttttttactcaatctacacaaatctaaaagactggtacgtattgcggttactcagaaaatatattttaattattattgtttttatttttttaaaattaaaaaaatactttattaaaaaaatatttaaaaaagtatatgataattctaaataatgaaaagtattataaaattaaaaatattacggttaaactaaaattacaattaatagaatatttttttttatataaatagcacttaacttaaatatttttttaataaaaacaatattatttattgaataatatccaaaaaaaaaactaattatacaactaaaaatatacataactaaaataaaactaagaatataactaagtatatgcgtgtattacatgtaatattaactagtataagaaaaagtagttaccgtataataaaatatttaaatttattttcgtcattgtaaattatttaaatttttttaagaattaaccgataattttaaataactacaaaatatattatcataata

SEQ ID NO: 55636 - DNA, 892 bp, Cannabis sativa
tttgaaaaatgtgttgcttttatggaaaggatggacaatggtaatgatgatgatttggagtacggaccatggatgaagggtgctaggcttccaacaacgggttatgataagtatagaacagatttttctaaagctgatgcctggccttttgttacccgacttgctcgcaaggctctagtgtcatctattcctaatttggtttcaagatctcagccccatccatctaccctctatcaaagtgaatcttctaatgctgcccctaatccaagaagtgttgtcaataataatgcttttgactccctgacagtgcttacttcccacacacgccctcctaaccattatcaatcccccccaattaaccacatcaatgtcactgctggtcacaccaattgctatccttccattcccaatactattaactccaaccgtgacaggcccccacttacatccccaatatcttactgcatctcacccaatcaacaacctccaccaaataacagtttcctttcaaaaaaccatgcccattccgactccacacaaccttccttaagtcagcccctctctcaaaatgttgatgttaaaggcaaacagaaaattcttgagaatcacccaacatcacttgcttcctgcccactcacttcctccaaatcaattacctcgacacctccattattcacagacctctcacatatttatgtgcctgacattcactcctctacttttgcaacttacccaccagttctcaattctattgccataaccccacaccttcagcaaaacaccctcaccatgccttcacagcaccttgccacgcactccgccactgctgtttcttttgctaaagaaaatcagtcaccaaataccacctctaaacggccaaatgactctctct

SEQ ID NO: 55637 - DNA, 741 bp, Cannabis sativa
tttttttttgcaggtaatattttcgatggcagacgagtatgtgccagactacgtggacaaaaaggcattggtggaaaggttaaaagaaaaaaatggaatcatttccagttcccttttactacatgattttatgtcacaacaattattgtggaggaaaaactttattttaaaatgtgattgattgtttttatttttgacagattgtgcaaagcaatggggggagcagaaaaagttgaagtggaatatggaaatcactccctctcaaacagagtagatgaagctgtcaaggcaatcattgactttgttaagagagatggccccaagggttgggatgatccctggaattagtttttagctttggtaatgtaatactaatgcccttgctgtaactttccactattctctttctactgcttttgatttgttatcttattgttttaaacgttttgcctaattcaattgtgcagattttttttgtcctatctcttcaatgtgtttatttaatttgtttcaatttcattgggtttagtgatctgattggtgaggtggtgtcatctcattaatttagtgggaactttttttttttctattatttcttttccatcatgcttaggctttctcatcaaaggttggagttattttgttgatgggttttgtcgtgtcacatctaatctttttaggtctattcagattcgatccaattatatattcgatgttaaattttgggaaatttacaaaaat

SEQ ID NO: 55638 - DNA, 1162 bp, Cannabis sativa
gaaggggcctggacgaacaatacgccccacccccggtctctgcattcatgatctagttcaaacagatcccaatgtgacataggccgatcaacaagccgaacaagttaatccatttgtgtaagcacaactagatcaacttaaaaacatggtacaaggcctaaccagcccataactcaatgacctcgaacttggtcgagcacgcagatcacccttctcccctgagatggaagtcctcgaattaccccgaaagttcaaaatgctaacctagaaattgtatacgggaaaagaagatcctttatcacatcttaagtattttgtgatgcagatggatctacaaggggtataaaaggtgatgtccaatgtaaaatatttcctaccacactcgcagaagccgcccagcagtggtatttcaagttccctccagcgaggtttaactcatggaatgccttctcctcagagttccacgcacaattttcctcctcccgtcaacttccctcacatctagaagacctggttgaagtaaagcaaacaccaggggaacccctcaaagcttatataagcaggtatatgactgaagctacaaaagttaaggggtagactaaagaaggaaggttagttgcaatactaggggcattgagccacttggagaacggtggaaggacatcaaaaggctgacattagggttaatggttgaattgttagattgagtagatggattcattatgctcaaagaaggtgtccggcgggcaaatattgttggacaaaagaaaagccatcaacgtgccacctcggtaggaacatctgtttagaatccacaagaccctgacgactcaaattcaaacaggaagaggtataataatggtaacaagcaaagtaatggaaagaatggaaaattcactggtaatgccgaatagcaccccagggaaaatgcctcaaaatttactaccttgtcagtcctaatagacgatctaaagacaatctacgggaaaacttaatctatggtcccgtacaagaaactatctcccatgaagaaggatgtaagtaaaagagatacatccatgttctgccattttaatgcggactaaggccgcgacacgaacgaatgtaataacctaaagtgagaaattgagtttttgatcagaaataataattcgcacttaca

SEQ ID NO: 55639 - DNA, 1788 bp, Cannabis sativa
ttctacaatgcaccatctacttgtttcggcatctagaataattttttaatttaatttttttcatattcatgtacgttataactatttaaaatatcatacaaaattttgaacgtaattttcgacgtgttaaacttttctgaatttcttaaaattttacaagatatcttaaacaactataatttacattactatggaaaaaaaaaatgagtaaaaaattatttcagatactaaaatatatagagatgtatcaatgcatctattttaagggggtgaattataaaatttttctatattttgtggtgaatttttattatatagtacgtcaaaaaaaattattatataatcattttttttttaatgttatctaattttcaataagattttttttttgtttttgtttttatagatgtataaatagatactttcctttttggattaatgattatatccattcaaaataataagataatgatgatgagtaaggcagttatactaattataatattgaaatattgaaaaaagaaatgttatatggtggtttatattaaatttttgaaaaatttgaataattattataaattaaaagaaaattagagttattatgtttctaaatcataaaaataaaaaatagagagacaaaaataatgccctaattggacttttctattattttattttttatacccttttctcatgtgagagtaatatatattattttataggattttttctttttaaaaaataaaataaattaaaaattatggcaattatttttttaataaagagaaaaataattattaattaatagtaaaggaaaaggatataagaggataattatagccacgtcagatgaaagcattcacttatgttcacacgtaagactaagctgaagattaaaaggttttttttttttcattaaatacaatttaaaataaataaataaaacctttgtacttttttggaaggctaattagaagtggtggttctaatttatttatttattttttttagtatttttaggtaacctcacatagcaattaacaaatcaatttaaattatataaaaaaattaataataatatataaagtgatccctttaaaattatattatttttatatataatattgaaaaataagtgagtaatttccttaaaattatatttacaactcaaagataaatctacgatgaggttgtaattttttatttttttttttgctaagaaacattcattagatagaaaaattaaatttcacggtcattaaacaatatgttcttaggaatggaggaggtagataatcgaccaaatgagttgtgaataaactactacttagccacattatgtgccatataattacaagttctagaaatattacaaaatgtacaactagcgaaaaagaggatatggctttattacaaaaaaaattgagtaatttcaatctcccgcctagggtccaccctagtgatggtattaattactgccttggattcactttcgacaataataaatttactttcttgttccattgtcacctctaaagctaaacaaacagtagccacctcactgcaaagagcgtctgagattgtaattaacctcccaaaaaatttgcttcagatgaccttcattccaacgcccatctttaatgaaatcggccacacaccatagagaaccaagaccataaaggcttgtgatagatcggaaagtaattaatctcagaagccgatcgatacaaggatgaatttgagtaccatcactcacctgtcatctgactcctaaatttatatctttat

SEQ ID NO: 55640 - DNA, 1179 bp, Cannabis sativa
ctgccatctgaattgtattttttcttgaataaccatttacaaccaataggagttctaccttcaggaaggggcacaagaacccatgttttattccttacaagagctgccatttcaaaattcatagcattcagccatttgctatattgcattgtagctttgtaagaggtaagtgttgaagtggctaaaagaattctggccttggatatacctggtttggccctggtgaccatgacaggtgagggtactctgtttatggtttaggcagcagttctaaccctttcatcccaaaaagataagggtaaagatccatgtgcaaggagagtgagggctatttcaactaaatgcctatgttttctcttagcaactccattttgctgatgagttgtgggacaagatagtctatgattaatgccattaaacactaagtattttccaaaggcttgatactctccccaatagttagattggacaactttgattgatggttcaaattctttttccacttgagttctaaaattgataaaagtctgaagagcttcagacttagatttgagtagagaaacccgtgtgtatctagaatatgcatcaataaagtgtatgtagtaactgaaaccatttgaggagagaataggagaaggaccccaaagatcagtgtgtattaattcaaggggtttagtgtacacaattgtagacaacgaaaaaggaaatttatgtatttttcctttacaaaaagcttcacaaaagtcatgggcagttttattattatgaggtccattacaaatatacataatatgcttcacagtcttagctgccgagtgagctaatctgctatgcccaagagaaaacatggaattgacattacccgaggaagcttgaatgtggttgatggagtacactacatctgtaggatagaattcaaaataggcattattatcactagagaattgggagacactaatcaagtttttagtgatatttgaaacatgaaggaagtgatctagatgtaatgtttgtgaagtgaaaggtgcgtggaaggttttcttaccaacatgttgaatggagagaccaacaccatctcccatatgaatctcctcatgaccataatatggttctctttgagtaaagacagattcatcagcagtgcaatggctggttgcacctaagtcaggataccaggaa

SEQ ID NO: 55641 - DNA, 1307 bp, Cannabis sativa
  modified_base (953)..(954): a, c, t, g, unknown or other
acaagatccactttcaaaaaatcagccaacaagttggagaagctagagaaaagttcaaaggctagagtgcaataatcaaggcaatcaaaggaatctcgatgatgctagagaaaatttgaataaagcccttgcaagagaggatatcttttggagacaaaagtcgagagtttcctggcttaaagagggagacaagtgtacaaagttttctacggcttcaatagtggtccgcagaagaataattttcatacaagtaataaaaaaaagagaatgaagattgggagagtaaccgaaaggctattgttgatctgtttattcaacagttcaaccatactttctctgacaatcgatcaaacacttcactgacactgctcaagaaaacttgttgctggattttgtcccaaaggagaaggagattgaagcatgcttataatcaatgaaaaattacaaggctcttagtttagatggtatgcctacgggattctacattcaacattggtacattgctaaaacaaatgtgtttgatatggtatcccacttttttaggaatttgaaactactacaattcatataaaatacaaacataattctaattcctaaaaaatattgtcacagttgagtgaatgactataggtcaatagtactgtgcaacgtttcttacaagtgcatattaaaaattttagctcttcgactcaaacctttacttttgactatcatctccccaactcaaacaacgtttgtaaaggggcacttaattacataaaacactgttgttgcccgtgacattgtacattctatgggcaaaaagagaagaaagaagggatttatgattatcaaactcgacatggaaaaagcttacgacaagatgagcaggaggctcatccttgatgtattgggtggtttgggcttccatgatacttttgtaaaatggattaagggtgttcgcggtgcgggtnntgcggtttttgaccatttttttaaaccaacccgcacatgcggtttttctaatttctcaaaccgcacccgcaccgcgaaactaaaaaaccgcaaaaaccgcactgcgaaaaatgatgcggtgcggtgcgatttttgtggtttttgcggtttggactatcacaaatacaacaaagcttgaggaacacttgttaaaaataccataaggcttgaaaataaatatgaaagacaaaataagtttcaataatataataattaatgggctttgggttgaacattcacatatgggacctaactaaatataaaaatttgtatttttataatgtgcggtgcgatgcggtttgaaccgcatatta

SEQ ID NO: 55642 - DNA, 2336 bp, Cannabis sativa
taataagattatttataattttcatcttttggttaatttaattatatttatattaattaagattaattagctttatatgagaaagcttgaagttgaagtgatgggttcatagtcatacatgctaggattgacaacactaatgaacgactattagagagcaccaagtctttgttactattaaaacaacatgttaacaaccaggcttatattaaattaacatattattaaccactagttaacaaattagcggtcaatgactcaatataaccttctttaattcttttttaataaaaattgtgaaagaaaaagaaaaggaggagacaactttattttatgatcacaacctaacttttgtttacatttaaacaaagctaatattaatcattcatgcatatgtatcaatgtgtaacccctgcatggtttgaacttaatttgatgccaattcaacgaatccttgtatattattattgaaatattaaggtatcaacaatttggttaaccttaattagcatatatataaatatatattaatttatatgcatgcatgtatattatatttattatatgacaagtttacattaaaaaaattgccaaagactataaatttatataatttatattatttaatttattatacattttattaattatgaaaatatattcttaattttatatacaaactatatattgtaaaataaataataaacatataacacatataaatataaataataaacatgtatgtgatatttatacatttctattttaaattttaataaacacatcataatcatagcgtatattatcataataaatatattagattaataattaataaatattaataataataatataaacatagtaattatacctaatgtcacatttaattacaatttcatttatttttttgaataactaataagcataagtaattcattttcaaaattgttatgactttttaataaataaattatatttattttattgaaatattattagatcaataaacatattatacattaataatactaataaaatatttaataaatgtatatacactttataaaacataaataaaattgtaaatttgtttgtatgtatatcttttttaatttttaaattttagtaaacattttattttagtaatatatcaaaatataaatattaaattttatatttatatatttaactttttgagtttattattttttagaaaattaattaaaaattatgaacatgttaaaatcctaaatatatatgtttatttgtaaatattcataaaattatatagaattatgtaatattatatatttttttacacattttttataatatattaattagattaataaacgacctcaaatacatcggcgtcaatcaataattaaatggtgttctagtctctagataataaatataatgataataaatacgatgaagaatatagttttgaacaacatttctattagctgacttaatcaattgattgacttgtgattatataataacctctaaaatatttccattataaaatttattccaactgcttctctaattaaattgttgtccttatctatggcactaaaggtagtttactatatagaagaaaaaaatataaaatagtttagctgtcaattttaattcaaatgtttttctttgaacatattttttaatacaaatgttaattaagtattaaaaaaatacactaaatttgtagaagatataaattaaggataaaaattacgtacgtgtagagaaaagccgattaggttcttgttcatgaggatttatatgtatataatattttgctttcaatttgccagataagattaattagtgtgccataaataaatatatataatttcttgtttttcatcttaaacttttccaacaaattttcattaattaattcaatttttttaatttactacatttaattatttattttttcggtgccaaccaaaagtaagtaaagaaaacaaaaaattatccaccagtaaaaatatattctttacatggtgagtgcacgcatgtattatgtatatattttaattaaataattaattatattatttgtaaaaaggcgtgtattataaagatgagcatcgtaatatgtggggcaacattttggatttgttttctttatacttcgttacagccacatgcaaaagtgcctattataagatacacacatgatttaatcaagtaactaattaagaggtaacaaaaaattaaggttaattagcaattttttcccccgaactttgacatgtactaaatcgtgccctctaaatttttttggccgttagaaattcccctcgaattattgagat

SEQ ID NO: 55643 - DNA, 1404 bp, Cannabis sativa
tttttttttttgtttttacaaaaatgtaaaataaatattatttaaattttaatacaatatcaattttaattcttttatccccatataacaaataattattctcatcacataaattaacttaaggtaatacttgattataataacatctttattgaagtaactaccttttgcctttttggaaaagttgtggccccaatgagtgtggaagttactactgtccaggaatttgtggacaaaacatggcatattcctgtgtctatagtggccattcctggtgaggcttttaattccaactactttgaactgggttttaatgatgaggaggtccgtacttgggctctagagaagggcccttggtgtgttaggggatatacactggtcctacaagcttggtctccacgggagggtggaaaactacaatttactcatctgaaactgtgtatccagatacacaacctccctcatgagtacttctctgtagacaatggtaagttcttgggtagcttggctggtgaagtgttgcaagtggatttagatgaagacaaaccggcttcctggagtaactttctcaaggtttgggtagtgattgacattgccgaaccactattttctgggtgtttcttcgacttggcttctggggtcaagttttggcttcaattcaaatttgaaagaattggcattttctgctacaactgtggatgcctgggtcatcaacgacgggggtgctccctctcctcccctgtcacggtggagaaaggaaatggaattccgtttccactctttggtccgtggctctcaacatcctcgtcttacctagatgttttctcgggggccaatactttcgtgccaagccgtggcttttcgtcgaccttcccctaacatcgacttcccggcctggcctcctcggcgtcgaagggtggtaacggagtgatttccaggcgaacagctcccactgtgggtggtttttcgagaatgagtaagagagtgacccgtcgctctcctgcgtcgatggggtttctgaagtcggcagcgtgggtgcccagatcgaagcagggtggtggtacggccaaaatttctggtaatggtaatggtgttcttggtgagcaaatagagaatggaaaagcttctgaaaattttcctgatatatcgttgagaaagaccttacactgtttctcgaatagtgtgaggaattcaaacccacctaatgtctctgaagcggtcaaagagacgcatcacgtgatgcacgtgcagaaggaagttggctcggttctctctttgcgtgggccgattgaagatcaacaaatgggaaatgggccgtttaactatgggcttcaggttacaattaataaatctcatggagagggctgctcacacaggtttattgggccggttggaagtgggctt

SEQ ID NO: 55644 - DNA, 573 bp, Cannabis sativa
tgccataaaaattgacatggttaatgcttatgatagactaagttggagatttattgaccatgtgctttcttgttatgggatccctcagaaatttcacaggtgggtctcccagtgtatctccaccacctctctcaatatctgccttaatggaggttaggttggattgattaaatcctcttgcggcttacgttagggtgacccgctttcccctatctctttatttgggttgtcgaagttttatcaaggcttttagagaatgctctttgcaagggcactattcagggtataagacttagcagaggcgacccagttctttcccatatcttctttgcggatgacctaattctggttggtagagcaaatttgaatgaagcgaaatgtgtttggcactgttttgagaaattttgttcttggtccgtccaacaagttaataagctcaaaacctcaattttctttagcaaaaatactcccactggcatgaaagagggatcaaggaagctttaggaattggatcgcctgaaggttttatcaagtacttgggcctccccctatttagatcaagacagaaggatg

SEQ ID NO: 55645 - DNA, 1117 bp, Cannabis sativa
taatgctaccccaacaactcgactatatacgagaattgtttgagagcgcttgataagtgaagaagcgaatgaccacaacatcaaaattccaacagagctcttcaagcacaaactgtagcatcaacatcaaacataaagcacattctgtctagcactttctaaatagttttcctaccatcgatctccattgttgcaggacctagggacgaagttacatatatagtggcttaggggggcaagccccgagccaaattcaatcttaatgcttagccttgtttcatttgaaccaaaccatccgcatcacactaacgaatgtctcaatcttaacttctggtaattcaaaaatacatgtagcaatcacctcttcaaccatatttttgcttcaccttgccaccttaccaacccaagttgtacgtttccaataagaggttgagaaggacatgcaaacagagcacgtataacaaattcatcttcagagccattctagaaacatcttaggtttacacttatacctctattgttaagaatcttagcagcgtaaaagagatatcggatgcccttttccatgcagttcacaatgtggagttgccaactagctaagctaggtagtttgttgttagagcatcactaacgaggcttcatatttggtgatgccgtggaattgaccctccaacgtagctgcaaacattatactaaattgtcgtgagtgctacagtgcacgatatatatgctgtgcactgtacacacgacatacttttttattttttattttattttttatatataattaatttttgtatatatttatattattaattatatttattaaattataatgtgtctttttaaaagtggtgcactgatatactcctacttgtttcgaaatttgagatttttttttatagtagcctacattatacttatttaagacatcatgcaaaattttgaaaaattctgataaatttaacacgccgaaaataaggttcaaattgtctattacacaagtaactcttttattcggagagtacattgtaaaaacaccttttaatttattgtgtgtaaatttaaatatgaatactataaattatttttatggtaataaaaataaattttcaat

SEQ ID NO: 55646 - DNA, 1130 bp, Cannabis sativa
aacaaatattaaaaatatagatgtgaaataaaaaattaaggtattcataaccaattaattaggagtttatttgtaaaaaatgacatatgatgcatttatgtaatggttaataaaaattagagaagcataagtttttccactagtatatatagtaacattcttacttaaacacttttagttttacagccaccacaaatttatcttttacataataagatagaaaataatttttttaagtaattgtttgctaatatattaaaaacaataaattctaaataattagctagcatatatttatagatgactttctttatgacaatcagatgttatttatttaaattttaattatcattatcataatataatttaaaatattacttaagtattatagtttagcctcttaattataacattggtataattaatatatattaattatggtgtaatttaattaatatcaaattttatatattttaatttaataattattgtaaattttttttaattatgtataagatatatggtctaaaataatactataaacactatttatacttcaatgctcaaatctactacattattaatgtgattaatataattgggacccattattattaatgtgttgcatgtgcatggctccaccgtacgtacgttgcggcagtgatggagtagttaacagtaataaattcacatataataaattaatatctaataaatatgcatgcatgcatggtagatatatatatatatatgtacggacacgtgtgaaattgctctccctctctcgtacgtacgtagccatgggacttaatatatataaaagaaaactatatgaatattaataaaagcacaaaaaattgtatgatgggtacaatttttttacttttaagtaagattttttttagtaaaaatatataactaattacaatttagaaattctcctatatatactaactaagcactaatattaactatggcccaatttaattaacatagaaaagtgtgaactatttataagatatatatatgtcatcttaaaaaataatactaattaaaagcttaataacaatgctcatgctcatctactatatatgcatgcaggctattatatatgcatgtgattataataa

SEQ ID NO: 55647 - DNA, 736 bp, Cannabis sativa
tgggggggtggcgttactttggcgggatgctgaggatattcaattgttacattttggcactaactatattgatgtctctgtccaaaaccgtgactatggggagtggaggttgactggactttatggcgaacctaatcgaagcttgaggaagcgtacttgggatttaattcggactttgaagagggataacaacttgccgtggtgtatagtgggtgatatgaacaatgtcacttctcagcaagataaacatggaggtaatctttatccgaattggttgattgagggtttttgtgataccttggatgaatgtgggttgtatgatatggagttgaatgggtatccttatacttgggaacgtggtagagggacggattcttgggtggaagctagacttgacagagcggttgtatctcaaggttggcttagtaaatttcctttggctaagttatataaccttgaagtgtctacttcagatcactgcccattacatctagttccggtttctgagtcaattcatgtacctaaacgcacctttaggttcgaaaactcgtggttgaaagaacctatgtgctttcaagttgttgaggataattgggagctgtctcatggccttccaatcacggaaaaaataaaggcttgtggtagtgctttgttagattgggggaaagactacacaggtaactttgggaagcggatcaaagcttgtaaggtagagattaagaaatggaagagagga

SEQ ID NO: 55648 - DNA, 1711 bp, Cannabis sativa
atggaggtctatgatttgtcaattacacagaacattgtctctcttgtgatcacatatatgccatcgaagagcacaagggtgtttttagaaaaccgccacctatcagaggaaatcatgacaaaagagacccaaaaaaactgtaagtaccacgaagacattggccacataatgcttgaatattggtttttgcaagatgaaatagaagaattaatttgatgagaaaattttggccaatacaagaagaacaacggagaagccaatctctaagcagatagtttaaataatgcagaggaagcgagtggctccagagctcctcgcattggtggacctcacgtcaggagagattcaaaaaaagcgcaagagcaaaatgtgttatcctcaaatttaaatgtatttttagtcacaatacttgttgagactaaaactaaattagttacaacctgtatctaaatacaatgtttaagtcacaagtaattttttcagtgactaatagacatttagtcacaaaaaaaattatgtttgtgactaaaaaattatcactaaaggtagctattttgtgtagtgataaatggacatgaaattaatgggattttgttaataatatatatatttaataaataattttacaataaaaatgatacaccataaataaattattattattattattattattaatgcataaaaaattgccaaattaattatgtatcaaaaaagaaagtttcatgggtcatcaattctctaatctttctcacctcatcattatcttaaaaataaggtaaatattatacatatagatatgtaatattaatttatagtattgttatagtaatattttaccatttatagtataaaaatttaaaaaaaaatctagaaaagctaatatcaaccaaataaatatgaaattaaatgtgtatagattatctttaattatagtgttgatcctatgttttacaaaattgaacataaaaatatctcttgagtttgatatttgtcaaatttccaaaatacaatgtatcatgatggtacatttgcaaaatccagagtatcattataatttattttataaaatacaaatttaaatttttatttgcaataagctgggtctaaaattttctatactttattacaaattttatatataggttcaaaactctatatactttattacatattcatccaaagggacaatatatacagggtacatttagaagtatatgtgaaattactgaagtaataattatactatattttaaaatataaaatgtatttggatatgaggtagtaattatttataaattcttaatgtcttctttgataaaatagttagcaattaaataaaattaattttttacataacatttaaaataaattttttagtaattacaagtataattatacctaattcttatagagtataattgagatattctattacttctaatgacacgcttacaatataattacatgatcaaacaaacacgtaaaattatgtaataacatttaattacactcaattctaattctccttttcaaactcgtcttactagttttgttccataaagcaagacaatagaatggatgtattgggccagtctcaaattttcaagggaaatttacgcctggtactatcttttctatttttatttcatttttactgttgaacgttatttattacatttttactgtatcttaactttttgctaaacca

SEQ ID NO: 55649 - DNA, 1604 bp, Cannabis sativa
atgttttgagatttcacatttaggggctgtaacttatcgtctccagtcacggtggcaaaggtcgatggtgttccttaccccatgttcggaccttggctctccttgtcctcggcgtatgacgacgtgttttctgggccgtcgtacggtgttcctcgtcgtcaaacggtgatgaaaagctctgatgtcgacggtgatggttcaaagaccgggcgtgctctgaaggtccggcgtccgagatgtcccgtgaatgcgacttctcgtgctgctgctgtccctgggaagtcgcaggtgtggttccctaaacagcgtgctgaaggagtcgagtcgggagtttccattccgagcttggatggtacgtctggggctctggtgattagaaaagggtctgaacttgtatctgttttgagaggtgatgaggtggactgttcattgggcagggataaggtttttaaaaatgtagccgtttctaacttggatttgcttgttgggccttcgtgtgggccgggtgtgagtgggtctgggccgtatggccaagtggtgcaaggtgaaaaaggagagttacaaaaagacaaattaagtgggcctcctaatttgaattgtgaacctattcgaactgggcctgaggctgggattaataaagtcattatcactccctctttaaaagaaagtgagggcccgtttgtatcttttaaggctcctcctagtattgggccagtttccttggagaaactaagtgatgagaatcgtggcccctcctctccacggcccaattttgagcatgcatcttcaatgctccccaatgaagatagagccttggctcattttttcaaagctcaagaagacttaatgaatgttctcaagcattttgggaagttggatttatatgagattcgaaagataggaggggatattggtgttccggcgtcatctgatgtcaatgaaaggacgactcctttcaaaaaaaggaaatttgaatcctcggcttctctttgctctaggcctcacaaaattcatcgcaagtatcctggtgttgttcgtgactttccctgggactctagacgagaagggaatgaggcagaattggtggttgatgagccttctgaagatagttctaattcccctagccggtccggtatcttaaagaatcccatgattggttcctttgtgattgatggtactgcttcaagtggatctgcttactctcacacccctgtggaggagaatgttgaatctcctccacaggagccatgagaggcctagcatggaactgtagagggttagggcagacctctacagttcgggaactgaagtccctcatccggtcgcgctctcctgattttgtctttctaaccgagctgaaagtggatgctaatcctctggtatgtattctaaagtcccttcacttttattttcatatttgtgttccgtctgttggcactgcgagaggaattattctggcttggaagtttgggtttagttttgagtgtatctcttgctcgtgcaatcatatctcggggttagtatactctgatcccccctctcatccgtggctcctttcgtgtgtttacggtcctccctacttgcatgcaaagaaaaaattttgg

SEQ ID NO: 55650 - DNA, 1333 bp, Cannabis sativa
aaacaaaaatgagtaaaccatttgctggtctttcaatgcataagtatatgatattgctattgtagtaattaataaattacagatatatgtgcatgttttattataatatcatatagtggcgaacatatctatatagctcataattatatagaccattatggctgtagatacaaaggtcaacacacaatcagttttcatattttattcttgcaaaaagacattagatggagtagactgtagacacactattgtgaatttgtgagcgtgtctagctaattaattaatttcatcatgagcatatatgcatgtttggtccaatcgcttcaagctaggggaccatataattataacatatatatatctcaaccgattgtcttgcaggtatatatatataagaattgccttgcaagtatatatttatatattagtaagtcaagttgctcaaaataaatacatattgatcaaataattaagctgaattaattcaaataatgatataacaatttgtttttaccctacttaattcgtaacatgatctacccaactacgtattagctaatagtcatttctaacccgagaaacccaggatcaaccaaaatcaaccaaaggcaatcaaatcaaccaaaaacctagaattccatatatatttccaacaatatatataattataaaaaccaatgcttgatatagtggtcaaactggtcttccgtagttctaatctaatccgagaaaccaaatccaattataataatgaacaaaaacaatacacaaaacaaccaaaataggaaacgcaagagagagatacctgatcgagcgtggtcggaccttggagcgatcttcgaatcttgaggaaaatagtgctgaaaccagaacccgccccttattgacttagtcaagtctcaagatctagggcacataacatcaacatcaaccaaaagaagaggaccaaaactcaaccaagactgagagaggagagagagagaatgtgtgtgtgagtttgtaagtgagagaaagaagagtagtatgttaatggtgaagtaagatttacctggtgaagctagtcatggaaggctctgagctgaggaagtgaccgagagagagaagcaaaatgaaaaaagtgtttttaaaaatttttaaaatcatcaaaaatctgtttttaaaatttacttcattttgttttttaattttaaaaacaaaaattgaaataaagttaccgaacatgatttttatttatatttttaaatttttgattaaaaaaacaaaaaactatttttaaaatggttaccgaacgaggctttagtatataaacaatcacaaaattaataaacttgaa

SEQ ID NO: 55651 - DNA, 1387 bp, Cannabis sativa
ataaagatagaaggatgctaatttcaattttattttggacaacctctcagctaagttgcaggagtggaaagcaaaaatcttgtttaaggcgggccgggctactctcatcaaatatgtgggcctgtcgatgccgatgtacgctatgcaaactactaaactatccaaacgtctggttaccaaaatcaataatatgatgcgtgacttctggtgggattttgagaaagacaatcatgggatttacctaaaagcgtgggataaaatttgccttccaaaatctcttgggtgcctgggttttagaaaatctagagaaatgaaccaagcttttttggctaattgggggtggaacatccttaatggaagtcagtctctgtgttgtagggtgctttaagcgaaatacctcaaaggaaaagagttctttaactgtggtttcaaagactctaattcttagtttttgaaaaacattgttaaaatcaagtccatcttaaggaaaggtgcttgcaaactggtggcggatgggaaggatacataaatttgggaggaaccttggatccctcatatgaagaatttcctctctaagcccattggatctcttgccagggaccacagacttgttgcggagatgctttctacagatggaggttgggatagtcacaagttgaatttcctttttgatcgtgagacttttttttacgattttaggaggtggtgctccctctagcatgggtcaagataagtggatttggactcttgaaaaggacgggaggttgtcctgtaaatctgcttatcttacttaggccttggaaagagctcccttttgtgaggttgctctctctctttggaataagctttggaacagaaaagttttggagtgtcataaggtactttggtggtgcattctctccaatgccctccctgtcaggtctgtaattaggaaaagatttcatatcgagggggcgagatggcctttgtgtggaaaggaggaggaaactatggaatatttctttcttacttgtgatgtgactttccatgtttggcgatcttctccttggggtatctatccgatctgtgacactggtatccggatgtgggattgggtcaaatttatttgggacctgaaacataaggggattgatgtggaggaggttttcctgtatgcctcacttatggtcgacaccatctagcgcactcgaaatgggaaggttcataataatctcactttagatgtgaagaagtgcattgactctattcaattttcttttgcagaattacatgctactattttcccttaccctgtcccttgcctgaggagtgctggtctccccccccccctcaggattggatcaaactgaattgcgatgtaaaagtggggcttgatagcatgtgtata

SEQ ID NO: 55652 - DNA, 1700 bp, Cannabis sativa
ttttaaattatatgattatttattgaatctttctcaattaaattatagaacacctaacataaaactaaatatacgtgtcttacgtgattatgagaaaagagtgattttattaacaagataagaccagagctccaaacctatttatctatctctttttttaatatgtaactattgttttaatatgtgtgtctattttctctttttttttattctttttcaaccctatttatctatttgctcacttagataatttttttaatataaaattgaaattttaatttttgattatgtaacttaagttttaatattttttgttataaaaaaaaataataattgataattgatattctaaattatatatttttaaattttaaaataaacaatttctcattatcacattgccaaagatattaattaaatcatatcatataaaatatattagagggaatgctactgaagaaggtatcgtatagaaacccctattgcaactagggctgcaattactttagaaactcaaatcgtaaatttgaaaaaaaaaaaataaaaaaaactaagtaattcccctaagttttattaaataaataaaagacatattctatttcatatagtaatttaaaaaataaataaatacccaccgcgaaacacgaattgtttactaattttttgataaaatcgtagcatttatcccattactaaaatttaattccatagtattataacggagagtaatagttcaatggtaccattttttgaggagtccctccccctagggtaactagattttaataagattccaagacataaaaaatgaaaaacctcacaacaaacatagtaatcttaataatcattaccatagcggagatagtcatgttatttttagatctactcacgcacaataataatcactataatcgccaccataaagctcctgaaaatcaactaagcttcaacctgcagcaaccaacatccaatccaacaatattgacgatagcaccatgccaccatcattatcacttagtatcctatttccaaacactttccaacttggataccaaaatcaggactgtttcctgttataatgatactatcactacagggacaaataaataaataacaaaaacaataatacactcaaaaagaaatttctcataattgttaaatctacgaccataaatattgccagtcgccatgaataggaagaaaattgcttacaacagttaaaaaaactattatgaacacagaattttcccttttcaaactacaaaatggaccaagatggcttatataagccaattaacacttatattgccaagccatgtaaacagtgggaattgagccaaagctataaacaacaaaagataatggtgcctgctcgaatcataactcctcacctctgcaaacaggactctcttcatggttttcaccaagaaaatccccatgcataagcaggtccaaggcatcaaaaagtaatacgagtaactccacagaattcgccctatgactgccaagcacaacccagtgaagcagtaccctccatatgccacaatgtctagcaagggtgcctcaccgctccccagtgagagcagcgttattttaagcagcgccacttgtagaaaccagccaagcaacccctttacaaacaaccaatttagagcttctggactaaacctgacagcaacaaagaagtggtttgagaaaac

SEQ ID NO: 55653 - DNA, 2281 bp, Cannabis sativa
ctcaatattgatttgattgacgcgattcaacttgtgtttcgaagatatttcaatgctcaatcaagttatgccttacaattcttacagaaataagcttcgtttaacccagagcagattccgccgtcgcgacccaggctcccaaaattaacgattaacctcaaaaattaattttcatccttagatcattatctacgatcaacaatagccaacttgtatttttctcttattttcgatggcttctttcatctataaaaggagagctcccttagttcattgttcatttgtcagatttagaaaactacctacaaggtcaaagcatctctctctagtttctctctctagaaaccagagtttagacacttagcctttttctataataccatcttgtgagaaataaaaactcgaagtatacatggctctattactatcgtggtatggggagtgaactattataaattttgtgtccctctaaattatgtacttacattcattatttatcttgccaatttagcgagctggtattgactactttttagtgttaacacaaagtgcaactgctttagctgcaaatcctgtgtttcatgccgagggtgaagacatagagattgatcatcattttggaagagaccaaatccttgcaaaataactttcaattcgttatgtaccctcttaatatcaaattgttgatatactaactaagcctttagctacagatgaattcaactatctcaagtgcaaacatcaattaggtacctcgctatttcatatgacaggagatataaaccaataacctaattggtctgattacctagtcttttggtagttaaagttagttaaacaaatagttaaagttaagataattctattagctttccgttaagcaacttgtatatggctcttgtattggaaattagtataaataaaggtccctaagctaattaattggttaagcttccttggcaatattttcaaagctctgctctctctttctcttcctcttctttcctctgtttctttcggccactgttaagcttctacatccattaatgaaatgttgcatctcatccttgcatgttggtattgaattcaactcgacataggcttgaagaaaatttattgatttagcaacacaaatatacatctatgagaacaccaaaagtattttccctcaacaaaataaatacacaaaatagagctgaaacgttggacactgaaaaaagcttcttaaaataaagcttacaaagttataaaaatatataatatctatacatagatttctatataaacttctgtgactagtaagatttagctggatgagcttgaggaatctaagtaagaaatcctgcgtcgtttgcataagagcgttgttcttggcgagtactcagccaaagcagaagccttatccagaacagagctcaaagtctcatgcacagaactcacaagagttcggcatgtctcagcatcattactctttcctttagagcaggcgaaaacaaatgagatgtttagcctgtctcccaatgttgatatttctgtcctgatcatttgcaagggaaggcccttaagagcttgccttaaatcagagagaagctctggtcgataactgcagcagacgcaagctttgaacaagacatttccattccctgctccattgtcatcatcaaatcgttgaacttggacttcatcatcatctgcaggaataagcaatcctttgcttgcttctgcagcatttttcttcagttgtttcacttgccttatgacttcggctagtaatgttgctttgtccatctgtaatatataacaactaagttaagtacgtattgcaagacatatatttatcatagcttgaacatagcaagtgtagagttctgcttagaattattctacaaaaaacaattatgtataacataacaaagtatgttcacacaaaataaatttagtattcaatacatcttatcattggctataataatagttgaccttgttatcatttacagccaaagaagccgaattaggccaactataaaaaaaaacttagtttcagcccacataaataagttaatatattaaactaatccgcttgatttcttaaaaggaacagcttatttagtgacccgccacctcattaataataaaagaataaatcatttcagcttgtgagattaaaaaatgaagtggttattcttctcccagacgtatgtttctgcttacatccccattaataatataatatgtcaaactactcacttgacatgtacaccgccaagcaactaagccatat

SEQ ID NO: 55654 - DNA, 1409 bp, Cannabis sativa
aactttattacatatatactacaacacggtaaaagcaacttttatacactttaagtttattttattacacttttaccacttgcatacacaatctctgccgtacatatccgtcgaaaaatctgatcggcttggccaaatagtctccatcgtttctgaggcagccaaacagagtcttaagaagaaaggaatgcacttccctccatgtcagaaggccgattacatgagagccaaatggctctctcctcacttcagaaaagaccccatcgccatcgctgttccagaatcggaatcggagaaggtcaagtctgacctcgaatctcaggacgacgacgggtttagcgattgcggtgaattggagccgattttcggcgagaagagcctgccgtcggagaacgatctcggcggagctgccgcccaaaaagcttttccggcggatgagaaaatttcgtcagagccggttacggcgtgacagccaccggcgattgaaccgaagagtgtagagagacgaactaaaatcgttaccggattagcttctctactcaaataaaaaaaaagttttgcatttacatcttttcttgtaggatttggttctttccaaccatggggcgagccatcagcggagagcgaccgaggccaccacctccaacggagaagaaagtctgcattccacagattactctagcacgattatttatgtgaaaaagacataaaaaccagaaagttaatcaatatattctagaatacaaatctcacctggagtttgtggctcaccagatttacaactttctctacaccaattcaattcaccaaagcaaccacaacccatcgccaagctaaattttactttcctgaacaatatcacccatcaacatcacattaaatatcaaacccaccccacaaaaagattcaacttctaaattgggcaacaagtttcaaaatgtagaaaccaaaattttatatttatatattaaaattcaatgaccaaaaaaaaaagagaaagaaataaagaaaagcaacaagaagggaggaagtgaatgaatggacaaaatagaggcacgccagtacataagaggggatttcacactggaaagtcctaagtcctaagtcttgtgaaaataccacctacctttgtgtagtggcaaatgataaaacccaaatagttaagcaagagagagacctaaatgcatctttggaaaataattgtgaaatgaagatggtcaatttttcaaatcaattattttatcagcagaagaattggactaagtaagaaaggaaaaataataaatcaagtaaaataaaataaaattggcaagacatagcagaaaaaaaaataatgttgtttagtagttttattatagttttgctacttgcatatgttatttcattataaaactaatatgcaactattt

SEQ ID NO: 55655 - DNA, 1179 bp, Cannabis sativa
aatatttttactatttttttttatttacatatttacatttctttattgtttcaatattgttaatgttatattatattttcgcaacgtgtaaataaccgtctataaagaaaaattataaaaaatgtaaaagaaaaaactcaaaattttgtaaaaaagtaaatttttgattgtgtttaaatatttttgaaataatccaaagatttttgttagatcaaaacaacaataattaaagaaatttaaattcaatctttgatgcccttagtctaaatgagcactactcctaataatagagtatacatgatagattgatcaaaagaaagtatgaacaaaaatatttgttatcctaaatttttattttatttaattttttttttctaataattcatacaattttataaatagcaaactaaaacaatagcttacaacttaattgagacatcttgtccattagaaacacaacctagattaatatcaaaaaaatgagtttaataattgaccatttgattcctagatcgtttgataaaaaattaaaataaaatcatgaaaaaaattgtagtgtattacaatattaagtttaaaaatacttatattcaatttcttccaccgtttaaaaaacacaacagtataaattattttagtgcaaaatatgtaattgtactactaataacctttgatttgatgactagcaatcaaaaaataaaagatatatcaaataggttctatttaaatcctattagataggatattagcactacaatatagaaaatatcatgttaactatttagtgtaaaaagacaattagaggaaggattagtggtggtggttgtattgctaaatattcatatgaataaccttctttgtcttgataagaaagaaatcaatttattaattatgattgagatcacaaagtagtgtgtttggtggcaaaatacatttacatatatatatatatataatatggcttagttttattaatttattatatatataagaataagaattataatgttcaaacaaggatttaattttcccccctatttctacatcaaaagaataattaattattattataagaattcaaattaattaattagttcaaggtctcaatgttcacttgaatgtcgagaacgacccttttataaaaataaaacaaaatttctttaaaaaataaaaaataaa

SEQ ID NO: 55656 - DNA, 987 bp, Cannabis sativa
cttgggccaagtattgggctccatgaaactagtccaccaaaaacgaaatgactttcgaatattatatgcttctctactccttgcatacaaagccacgtgctctttttatttatatacaaaagctattgtgcacataatacgggtggtgacaaaaattcatggaaattttcatattcaatgtatggccattggactctatctcaatagcaaaaagaattgggcccattgttctaatgaaaagactaggcccagcgagcctgtacggttttgtatttttcaatctcctttttgtttttttgtagcggcaggtaatggcctttcaatactcaggctcctcccagttcttcctctttgtacacggtaaagtcgctcaatcaaagcagtacattaaagtcaaaaaattcattgaagaggcagaccaacagattaagaaatcaaaaactcattaccgtttggtttctcatttatgatggattttatgagccgtttcggttcgacccagcggtgtcatttggaattctctgatcggcttcatcttctggcgatagaaaagtccatcaggtgggtttcgatgccatattctccatctctccatgcgctctccaaataccagatgaatatccactttattcaccctaaacggatctgcaattcattgatttagagcttcgtgacctccattgacgaccagatacatttctccaatggaacgtcggagtttgaagtgcgaagtgcggaatgtactgtacgccttgattttgcgaatattggagccttcgttgctatttttgggatcgcttctttgtggctgcgagaacaacgatgggttgctccctcatttcaaccttcttctttatgccataattttgattgtgcgatcatgccactgaaatcataattgtcatcttcgtgaacgtttttatatatgctctgtttttatacgggtcgcagaaatgcatctatgcttgagcggctccaaaataagag

SEQ ID NO: 55657 - DNA, 1333 bp, Cannabis sativa
ttaattaatttgctattttgatatatatcttattaatttgggaatatacaaacgcaaattcttacatataattttttctttttgagagattcttgcatataattaatgttagtgcatgtttaatatgatgaaaatatttgttatctaaattagatgaagcttccggttgaaaaaaaaagtagctagatgaagcttttcttcaaatttcagatttttttttgggtcttaattagagatattaaatagggtatttagataaatatgggaaaaataaaattaatttacatatttgagaaaacctataataaaaaaaaatatgatatttaaaataaaaacttaatatatatgggatatatgacaccttaaattaccataaaatatattaaaattctttttatattttttttaaaaataaaataaataaaactacaataatcgccagagttttcactagggccgaaaagtcaccggagtttgctctcagaaaaagtcgtcggagtagctgtcggtgtcagaaaattcgttggaattgttgatggcgccaacaaagtagtcgggattggcattgtcgctggaaaaattaccagaaaaatcaccaaggaaccggtatgaaaccggtttcttcatcaataaaccaatttcttagtgaatttttttgataattttttcagcgacaatatcaattctgacgattttttcggtgctggcagcaactccgatgacttttttaacaccgacaactacttcgacgacgactttttcagcaccgataacaaactccgatgacttttctaacaatagtgacaaataaaacttcctaaaaataaataaaaatattaaatatgagctttgaaaatctaatttatttatatatagcatatcaaatactctaaaaatacttaaaaataaaaaaaaaaaatcatataactaattgatcaaacttaaaaatataattaagtaaatagtttataaaatctcataataataactgtaatttcttctattaaaattatacttttatgatgtttcttagtttttttcttttatattacgaatttacctattgtcgtgcgtaaaccattaacgtattaattattacttacaatttcatattaatatgtgtatatatacatcatgaattgataattgtaaaagaaaattaagaactggctgtgtattccgttttcaatttttaaaattgtatctttaaaagtcagaatagaaaacagtttttttatcattttaaaaatttaatggtgtttggcacaaatttttaaaaactatttttagattttttttcttaagaaaaaaactcaattattttaacaccata

SEQ ID NO: 55658 - DNA, 1180 bp, Cannabis sativa
  modified_base (27)..(30): a, c, t, g, unknown or other
actaatcagattgtaaagagttttatnnnnggcataaaacccaacagatacttggtcctgccaatatgatgtcgtcaacataaacaagtagtgcaacaaatgattcaccgtgccctctagtaaaaagggtgtaatctgcctttgattgaacgaaaccttcttgaagtagtgtttgagagcttgcgataccattgtcttgatgattgcttcaatccatagattgatttgttgagtttgcataccaagttagaatttggttctactgaatccagtagcttgagaccttttgggagttccatgtagacttcttcatgaagatctccgttgaggaaggcgttgtccacatcaatttgtaatgtgtgccattgttggatggtggcaatggcgagtagtagcttgaatgtaaccattttagctacaggtgagaaagtgtcgaagaagtctagtctttcttgctgcgtgtatccttaagcaacgagacgtgccttgcatcgctcaacagatccatcactattgtatttaattttgtatacccagcgacaacctatgactcttttgttaggaggcaagcgaacatatgtccatgtcttgttcttcagaaaagcaaataattcacgctgcattgcttgattccatacacggtattgtgaagcctggttgtagttttgtaggttcgaaatgagctgttaaagcaaggatgaaagatttataagtggtagataaccgatcataagatataaatttatttaaaggatggggagtagaggttttatcctgaataacagagtgacattcatagtcacgtaaataggctggctgccttattactcggcttgttcttcttggaagattatctgattgtggttgctgaattgggggatctgttgccgcattctgttctgtttctgaggggaagtttgcttcttgcgagtgtgagtcattatcttgagatgaatcactggtttcattctcttcttcggctgctggagaaaaatctgctatacttgcatcattaatattagcagtaggtaacacaatatgagagaaagggtcaatatgcaggctgtcattgttaagtttgtaaaggatatatgttttcatgaaaaacaacattcctagatatgaggaattgtttgttgtttatatcatacaacttatatccctttactccttgaggata

SEQ ID NO: 55659 - DNA, 800 bp, Cannabis sativa
gtgaacacccctagttctaacattatttttgcataatttaatcatatcaaaagatccagaagaaaataaccggaataaaactacaccatctacggttctaaatctacaacttcaagctttgatgggggagatgaggaggatgatgagagaagagttaacaagcataccgtgtggacatgccttagctgcaatctggttgtgcaaccataattcccatctctatgtacacccttattacaaaaaagaggctttcaaaaagagttaagcaaacacaatttttccagtcccaagtcctgacaagtggccaaaaatgggagaaaatccaattcttcctcctggagaaaacattttgccagggagacctaagaaaagaagaagaagaagcgttgatgagccaccacctccaacttgtacaaaggctagaagaactgttgcacaaggtgatggagctggaatctgctccaccgaacaatgtcggagggtctaatgcataggatgcagcattttgatgtagtattttgaattagtattttgacttagtccttaggaatgtattaggattgtagaaacaattagtgcacaagatgttgtattttgaattactgcacttgatggttttggattgcagaaacaattaactattaagcctaatttatgttttttgttaggtattttgtattacattttcatgtccagtgcaaaagtatgcacataatatgaacatctggtatttatttatgggaaaggagattatatcaaaataaagatgactacatttcatactctttcattgatcaaca

SEQ ID NO: 55660 - DNA, 870 bp, Cannabis sativa
taattaatcatagataattataatgaatctctacactgattaataatttataaaccctataccatatcatagcatatacaataaatgatattacaaaaatacgttttactattttagcatcacctaagtattttccataattaattcaagtattaactaaataaattcatgaaaaatacaaaaataatagaaaatctattctaacacagttcatattctgtactaagccctaaataattaacttttaattttctgaacaatctaagtattttcataattaaatttagaattaacacaaaaaattcatgaaaaatacaaaattgactaaaatccaaatctaccaattttgtaacagtttaaatatcataaccaatcatataaataattgtagatttttctgagtaacctaagtatttttcataattaatttaggaaataaactaaataattcataataattccaaataaattcagaaaattatcaaacttcaccaaacaccctaaaataatatgtagaatcgaaatctacaaaaaaaaatgggaaaaaaacctcagatctacccagatcgtggtcgccggagttatgccggcgtagtcatcttctccggcgccggtgagctccaatgtccttctacagcccgtttcgatgcgtcttttcgattggaaaatgttcccaaggattccagacctcaaagaagccaaataccactgatatttcgtcttgaaatggctggtttgagattgtcttctccaaacacggtacaccgccaaatatggagccaaaactgtgatttttcgtttcggagctctttacaccgtttcttcacgtcaaaactgatcattggggtcccataaacttaaacacaacct

SEQ ID NO: 55661 - DNA, 1290 bp, Cannabis sativa
aatatatatataaaaaaaattttgactaattttttttttttctgaatgctgaaataaataggagttcatcaatacattttttttaagggagtgcatggtaaaattaccctaaattttatataaaattaaaattggatttcttaagaaaattttaacaaaattttaagttagtaaataattttttttttaaaattaggttaataagtaatttttctcctgatctttgacatataccaaatcgtgcctctaaactttttttactattaaaaattcctcctgaattattgagatggttagatttaaggacttttgtctaatttaattcaattttactattttagtgattgtttatatactaaatcatgctctccttaaatttaacaataggagtatcatttcgttcatgataaattagccttagcacgtacaagtgtggttatggaaagagccaacattaactattcacccaaacaaaacggtacgctttttagttttagttattttccttatcaaatcaacctcgttaacacaagacaccatagctaccttttttccccttcctattccttaacgctgccaggcctaattcacttcttacggcttgtttcttcttcttaaatctagggcttgcttcttcttcttcttcttcacgacggtttaggatcatggatgcacgccaccaagcttaggagcaactccaaagatcactacagaaggtgttgatttttctaattgtaagtttgaggtagtccactgcgtggtttctgtagctactgtgtcttttgatgcttacagaaaatgattcacattccatcccatagcagaatgagaattcaaattttgcggatgttctaaaccttttgttatgatggatatacaattatacatagttgagatttttaatgcttttcgctatggctgagcttattgaaaaggagaaagtgggaggttgaaattaaaagctaatttgctctcttcgtctctctcgctttctctgtgccaacactttcatagtattattgtgtatctgggtctgtctttattgtctttattgggtctgtcgactatgccatcttctgaaattttcatttgggtcattcttattttaatcgaaatgcaagattaacttatctttgatttatttaattatttatctctttatcctgtataatgagatcgtagattcttgatgcattacgtggtatcagtcaattcttgccttttctatattcctcaaccaaaaaattccaaccccaacgcaagtctagcaaatagacaggtttacttgct

SEQ ID NO: 55662 - DNA, 1322 bp, Cannabis sativa
gatgtacgaatgtactcctatttacgtcgacacctgacaaacttttttagtctattttttatatagtcgtgtatattatagttatttaagatatcctataagaaatttaaaaacatttaatactcctaaaacaatatgcacttcttttaaaaatggcgcactaatatactctacttgttttggcattcacaagacttgtttagtctttttttttaatggtggtgtacattatagttatttaagacgtcttgttaaatttcgaaaaatttagaaaaatttaacacgccgaaaataaaattcaaactttttgtcgcgtgactcttttatttagagaggtgcattgtaaaaatatcttataatattttttttttgtgtaaatttaaatgtgaataccataaattattttattttcaattataatttaagtaaaaaattattatatatatttttattttcttaaaaaaattacaataaaaatattacaaatttaagcacatattaaaattaaaattagacacattagacatcatattcttgttaatcaagagtacacaaactttatattacacagtagaacattataaaattaaaacattgtcaatagtacataataatagtattacaaacttaaacatacacttaaaattaaaatcaaacacaccgaacacactaaacggaaaagtaataacatagatatgaacctttattgataaaatatgatacaataattcaataaagtagaagactatttcctgatcgagatagttataatatgaactataaacttgcgagtcatttttagctctttcaccttgatcttgagatcgttggccttcatcttcaacgccatgtcccgaatattgagatgctcgatattgttatcccttatattatgattcctgatattgagattcctgatatggatatccctgatattaagatttctcatattgagatccttctctttgttctccaacgtcttcaaatgtttgtgctttcattgtaaattcatatttttttttgctttgaatgtactgatgaaactctgaatcagatatagaatttaaattcgtgaataaaatattttagtcaaccattattctgtaacgttcatttctatctttgtttctcttttcaataacttgaatgagttctttattttgttctattaatttgttgaatctaccattacctaattatttttcttttgcttttttcacaccacatggtcaatctgttggataagtattaattttctcattgttcatgtttagatcaaatgaacttataccggtggatgttgatgttggagactaaaaatt

SEQ ID NO: 55663 - DNA, 928 bp, Cannabis sativa
aagaaattctccttgtacttgatcttgtacgcgagaagaaggcatatagtctctatactctgcttaccacggtccacatagtctcctagtaacagatagtttgcttcaggtggaaatccaccatactcaaacaatcttaacaaatctgaaaactgaccatgaacatctcctgcaaacgaatgcttaaagatatcattaaaacaacacattaaccaatataataatctagctcaaatgtaagttctcgtagaaacaaattggcacccataagtaaaaaaaaacaattaacattttcattcttttttgagatcatgaacacaagattttcagctgcatttagtatactctgtaaatgaataggaaaaatgattcaattaacacagatttaccaagagtaatattgacataccaaataataacactcaaatcaggaaaaagacccaaagcacccaaatttacaagattgcttatgtatgttaactttgaaatactttttaaacattgttatacagaacccaaattaaattattgtgagtttcaaaaaaataacactcaaatcagaaaaaaggcccaaagcacttggctcataagattaaacatgcttaaaagagtgaaattgacttacaaaaatgatatgaatgagttaaactccttgcaatgcttgattatctttagtatagcctgttcaacaaaataaaaaaataaattaaaaagtctatagcacacaaattgaaaaatagtactgaattagattcaaccataaacagaattatccctgcatggcttttctagaaattctctttatagtgttctgagattgcccttctgcttccatagctcacaagaatcaaaatcaatcatttatatatatattttaccattcaaaaataataacaatatattttaccttcgtgaagaacattgctag

SEQ ID NO: 55664 - DNA, 1257 bp, Cannabis sativa
taatctggccagaacaggagcaatagagatccaaacaatcacgaagagtttctacctctcccacagtagctttacaaaaaaggaaagtatccacaaacataaaatgagaaacagaggggctttggtgacacaccttaaaaccatgaagctgcccatcaatttcttttcaaaacagaagacgtgctaacacttcgctgccaagaatgaaaagaaaaagggaaagcagatctccttgacgcagttcatgagagggcttaaattgcttcaaaggccccccattgagcaggatagagaagctaacgaattggatacatttggcaaccaagtttcatattcaaaacaaccaatggaagaagaacaatataattaacatagtaacttattatttaacttgttgaatctaaagaataaattgagttgactttaattaacttataaaagtttgaaaagccaatttaacatgaaaatatgtggattgttaaaaaaaaaagtcaactcttgatgaacaatagcaaagttctattatctaacaaaaaaaataactacagaaaaatacaaagattatggtagaacaaattaatgttacaataattggacataaagttaaactgcaaataaataggagatgtagaagatgaagaaatattacaacataatactgaaaacatacattcccataaaaaaaaacaaaaaaaaaaaaagaagaaaaaattgaaagaaaatacaagtataggttaacatgtttaattggtcaattttaacgcgactcatatatctaatttgcatcaaaaaatatcaactctaatttggtatattgtattcatgtatcaacttattgtgtttacatgtcgactatacttatcttacactatatattacatatcatatatttgatttatgtatacatatatttacaccacatatatacatatatttagtaatacccattgaaaagtatttcatatatattattgggtaatttttttaaatttaattatgtgcaccactctaaaaaatatattatcaaataataataataagagacaaaaataactatttaattgagaaataacaataaaaacatacattatttcttatattttattactttagcttggtcaaatgtagtatctaacagtcttttcataattttattaatttaaactttggggagttatatttacaccccatcaaattataactacatccctaaaatataattacttaattgatcttttataaaatgaccaaaataga

SEQ ID NO: 55665 - DNA, 930 bp, Cannabis sativa
tgtattcgtttgaatctgaggacattcagctgcaatcttctcctcaaattcaaccctctcagtctacacttacaccgcagccctctgtcaatgcctttgtggcatcttctcagcctattacaagtgaatccatagccaataattgtccaagttgtagtcgtaatactaataatcttacagtttgggatgtttggcacaataggcttggccatccatctaagaaaattgtaaagtctgtactacaatcttgtaatatctcaatcaataaagaatctaattctgtttgtgaagcctgctgtttaggaaagatccacaagctgccttttcctaaggcatcccaaacagtttacaccgagcctctacaacttgttgtatcagatttatggggaccctcccatatagattctttcaatggatataaatactatgtccactttgttgatttcttttctcgattcacttggatatatctgttgaaaaacaaatctgaagctttaaaagtatttttaaacttcaaaaatgaggctgagttgcaacttggcttcaagttaaagtgtcttcaaacagactggggtggggagtataggtcatttactagtcacttacaagaaatgggagtcactcatattcatccttgcccaactacacatgagcaaaatgggatagctgagagaaagcatagacacattgttgaaaatggtctagctttgcttgctcaagcacatctaccatttaaattttgggatgaggcttttagaacctcagtttaccttcataacagacttcctacacctctattaagcaacaaatctcccatagaagttctgttcaatatcaaaccagattacaactggtttagaacctttggttgcacttgctaccctaacataagaccctataacaagcacaaactccaatttaggtcaactc

SEQ ID NO: 55666 - DNA, 867 bp, Cannabis sativa
tttaacaaggttgatgtcttgttatttttctattgaattatagttgtctttgtattattttatagttatttttaagtttttgtttaggtgttttataataatttttcttttatttttatgtgtttttttacaattattgtttagtttatgtgcattttttatagtatatattcttaaattattccacataattttttagttgtagggtttaggtttaaggtgcatttgtttcaaaatattattccacatagtatgtgcatttgttttatatattatttttatattttttttagttatttttaagtggattttaaaatatttttttgttcaacattagttattttttatttatgtgtattttttatagtgtatatttttagtttcctcctgataattttctttttgttatatgtgtgttgctttatagtttagatacatatttttagtttattttttgacatattttattaaaatacaataataagattttttttttttttttaattgacacaatgtgcagtagtagatattgacatattaattatatatttcccattatattatatacctcattttgaaaccataagattttattatttttattattaatgtaattttttatttaacttttaaaaaataaattattattttaactgtcactaacttaaaaaacgaaaagaaaaaaaaaagttaaaagtatgaagttataacaacaaatttcataaaaaaaaaaaaaaagtaacgtggtaatacaaaaatacaaaaagataaatcaagttgtcaaaactaaataaaaataaaaattcgtaatacaaaaatatataggatattagcggctaaaccacctgaattttacggtttgtaaca

SEQ ID NO: 55667 - DNA, 901 bp, Cannabis sativa
agcttcaagcattttctgagacatgtctgcacagaagaaaagtaacataatcagaaaaaaaaagcatgagagatacgagggcatgacgatcaagaaaattaaatacaagatggagtaccctgcactttggcaggggcatttgctcgaacaagaactgatggggcatcgtcatccgacgaatcttcctgctcctctaggatggccttccccttttcttccttaggggtggatggccaagcaggtagaccgggctctctgatctagaatgaatgttcaatcggtctttgctcggtcgggagggttttcttccttttgagcgacgtttcctcctctgaacattcctgaacctcatcctcctgctcagaatattcctgagcatattgtttggctccagctcctcccttcaacttagcctcgcgcttaagttcaatgagctccttctcctgctcagaatattcctgagcatgctgcttggccccagctccttccttcaacttagccttatgattcagttgaatgagatccttctctttcttagctccctcagcccgacaagcactggaatttttcttcctccccttcagaagcggggatataaagtctgctggataaagtccacaaagttggcctctgaggtcaacaaagtgatattgcaagcagcatccgacagttggacaatccattaagctctctccctaagagccagtgtaaggggtggacggtaatatatcgggatctgctgaaactgagaatgagtagtgcccatgcctttcacaaaataatactcatcaacaaaacccccgagttttctcacaaccttgtccacagtgcctatcaacaacttgaaatttggctgagagaagtagaagtaccctgacctgctttgcttgggggtagactt

SEQ ID NO: 55668 - DNA, 772 bp, Cannabis sativa
gcgggctgcccgccgctaatgacattttttttaaaaaaaaaataaaacccccaattaatactaccatttgctgtagtgatatggtatagtatgtatggcttgtcctcaaatattaaaagagtatttgatatgtgaatgtgacgagggaagcttattaattatatatagtacgtgcgtgtatctcatttatcaaactgcacgcctcgcattacacaatattattattaacacactttccaattattaagtacttaatttcaataaaataataaagatttgtacaattaattgaggccagcgacaagactatgacaaataataattaaataaataagattttttttttaatttttaacctttaaaacagtttttattttttaataaaattcacataaaaatttatatataatatgtaataaaacaacttaaattgcatccaaaatctacatagtaactcatataaaaattacaggagcaattaccgaaagcaacttaaaccataaattttttttaaaaaattaaaaaaatagtatatgaagtaatttttcaacaaataattagtatgcaaatctacattttgtgtgataattacttactacttaactaaaaagaagaaaatttaatctttcaaaaacaaacaaataataaactaattattaatgtatatatttagacacaaaaatacttataaaaataagcaagcatgcatatatataaaacagacaagaaatcgtatggattagatagcaagaaaatacattcataaataaaa

SEQ ID NO: 55669 - DNA, 1324 bp, Cannabis sativa
tcgcaaataagtcttctaatatctgaatagttcttttctgatttcccatcagtttgagggtgaaaagctatactgaactttcagttttgtgcccatagctctctgaagacttacccagaattttgatgtaaactttggatttctgtttgaaacaatggatttaggagctccatggagacaagctgtctccttcacatacagctctgcatactgatccactgtataagtagtctttactggtagaaaatgagctgacttcgtggcacagtccactatgacctatactgaatcatacattcgcgtggttctaaggaaactaaccacgaagtccattgcaatatcatcccacttccattcaggaagggctaatgattgtaataaccctaccgacctttgatgttcagcttagatttgccgacaggttaaatatttagtcacgtaatccactacatctttcttcattccacaccaccaataatagggtttcaatcctgatacattttggtggttcttgggtgtaacaaataaggtgtagcgtgagcttcatcaaggatttccttttaagctcaccatcatttggaatacaaacccgagctttgtaaagtaacattccattatttgagatcgaaaagtctttaggtcgactggccaatacctcatcccaaattttaactagcttaggatcttccaactgtggccttctgattctttctaacaaatcttattgaagtgtcaaattgtataattttcctaccacaaatttaatttcagccttaaccatttttgaagctagttgaggagctatcattacggtgctgaaaacctgtctgagacattttctgtttaaagcgtctgccactacattggctttttttagatgatacagaatttcacaatcataatctttaactaattccagccaccgcatctgtctcatatttaaatctttcttgttaaagaaatacttgaggctcttatgatgagtgtaaatcttacacttttcaccataaaggtagtgtcgccatatatttttagagcaaaactacagcaactagctctaaatcatgcattgggtaatgctgctcatattcctttagttgatgagaggcataagctatgactctgtcagcttgtatcagaacgcatcccagaccctatctggatgcatcacaataaacaacgaatttttcttgatctgatgtgctaacaccggtgctgttatcaatcgctgtttcaattcctgaaaactcgcttcacacttgtcagaccatatgaccactgattctttttagttaattctattaggggcatagagattttagaa

SEQ ID NO: 55670 - DNA, 1122 bp, Cannabis sativa
aatcaaagaacttaatgaacacaaatagaagttcatgtatacttataattcaagctgatctactaatgatcatcattgtgatatgataaacgcttttcatggtaaatggcaagtttgaagaaagatatttattacatatcagtccagtcatgcataatctaattatacatagtgtctttactacatattcatctacatatgtgatctgaatcaaaatcacacacactaaaagtatagtgcatagtaaaccatacttaagagttccatattaaagattctcaatactttaatatactacctacttgttttattcatatcgtataaacttaattctcttattttatgattgtatttcatatactcttttaatatattatccattaattacttgctcttagggcataaattctaacacaatcaacatagagagcaacatatcgaaagagtggttactcaacctattcaaaactttggaatgtataagcttttccagagcattccaggctgactttttacagccaggatacagctcaaactcctccttaaatagatcatcatacctgctgttgtcattgattgggggtcaattgaaagaattattagtgctagtagagtcgtcaaacctaggatctcctcttaacatgtctgccaacacatctgccattttttctttgtctttttcaacaagttgaatagctagctgagaaaaagtccccttggaaaaaccaagggttgtacgaatgtttgatcccactgataaacaaatgaacccttatatttttaggtgtgtgaaaatttatattcaaacacggatgcaagggcatcgagataatctgaaagggtttaagtggttcttggcaactgcaacaagctcgtcaacaccatttcataactcggttgagcgctaattcagagtcatctaacttctatagatcggtatcttcctctataagtaattaataaaaaatttaaaatacaataaaaaatgtgcaagtgttctaatccacattctcattctattagttaaagggtaaagaacctatcccatttaggtttataatatagatatagtacaatctatgctcttaagattgttttatttttgtaaaaatttcggcagca

SEQ ID NO: 55671 - DNA, 1817 bp, Cannabis sativa
  modified_base (615)..(626): a, c, t, g, unknown or other
ggtaaataacaagctcaaaagaaatagccgtgcatgtgtaagttctaaaaaaagggaaaatattcatttaaaaaaatgaaaacaaagcaggatataagtccaagactaaaggctgcgtagccagctagttgtcttaaaacaaaataaagtattaccaagtttaaagaccatttggtcgaccatattgtattgaaaaaaggcccatgggctgaaaaaaaaaaagaaaattcacacagcaggagtcccaggttctttgtacggatcaacttggtcattggaggtcggggtctcagttttttggttatttagagctgaggagttagctgcctcaaggttttatttgtcttcttgtcaacatagtaactatgatacgcctctttggtttcatcgaggtaatcaaagtgcccctcggggttggccttccaaaatttgtagaaagcctccagggcgaccgactccaaactttcaacctccttctcaagcacttcctcccttgtcttcttagatttgatgtcctcttccatgtgttaggttttgtgccctatataaaacctatttcaatataatctactttactaattaatataagatcagaaatcgcttttatgttgcatnnnnnnnnnnnnttatttcatgattatatgtataaattctatttagtacagaaaatatataaatatgtatttttgttcatgattatattgtcgttagcacagtagaatataatcatgattatttttcaaaagcattaattcccatgatttttcagttcacttgatttaggttgacatgataatcgacgataaggtatacttacaacttggataagtgttatgtcctttctaggacattggtaaagtataccagtatcagatgtatggagtatttttatacccgaaattcagttgtacttcagaaagtgacacatatcaatctcggggaatgtgaaccaatagatataataatgattatatcattaaatgcaaaattgaataactcatcaaatatagaataaatagagtatatttgtaactccctaactgtataggcttaagagcgggacaaggatacactaaaactattgattcatgtattgacgagaaaccatcttgcctcagaaggcataatcccaagggagctacaaacaacgcatagtaagacatctaccttgctacacataagaaactattgacgaggcaaattggttgttggaatacttagcgtataattcacgttataataactaaatgaaatagcttgagaactttgagcacatgattgtccagtctgcaaggccttatgatcaaagagcagttcttaagtttgctcagtacactggtgctcatgcaattgctggaatacatgtaaaccaagtcattcatttatgtacaaagtgacatgcctctagcgagatgcttctatctcatgtccgtatccattacttcaaaggtaagagtaacaaacggttatgcaaatttttagctatacacatgttaaaatggacgtggtcaaagcccacgtttcttggagaccgttatgtatttcagattcaaatgtaaacaatttccaatatatattcttataaataggggcagattatacagaaaaaagggacaaaaaaatccttgagagaaaagaaatcacttattttaaaaccataattctatatctagaaatatcttaataagatagacttgtggactatgcagagttaactagaaaaccgcgtaaaaaactttgtgtcattattgttattattattcttctcaaatttcttatagtttttgtgtctaatttattacgataaaggcttatta

SEQ ID NO: 55672 - DNA, 660 bp, Cannabis sativa
  modified_base (468)..(471): a, c, t, g, unknown or other
ttaattatataaacaacagagaatcctccattccgccgcatctgccctaaacaagggaagagtctcgtcgtgtatcccaaaggataattttataccttattatattattataaatatcctttgggccaattaacaacttaatgacagagtttatatcccactttatcaatctgtacggccgaccgtagaccttattaatcataattagttcataaattatagctaatactatactactactctgttttcataatattattacaactgacgtgaactgccttatttattcgtagaggggtctaattgaatttttttagtgatgcaattatattattatataagacgtcttcaacttaataatataaggtgaattaaatataaatatcttaccgatcaatatctatttttttataaagtgtgtctatataacagaatttttagaaaaatttatgggtgactttttatttnnnntaaaaataaaatggtttattattaaaaataaaatggtttatgtgaaattcatgcatcactttttatttatatataataaaataaatactattaaattcaaaaaatatgattgggtttttacatctacgattgggttttctttaattatttattgtattcattttcctattacaatttggacattctcat

SEQ ID NO: 55673 - DNA, 1146 bp, Cannabis sativa
ggtggtacttagtatctgttttaggatatttaggtgtttaatggcctattttggagctaatggaagttaggttttgtccggttataggaattagggttagttcccagaatatcaagttaaagtattcattgggttgttgttgttgtgacataggacccgggatcgtcaagctttgtttttcaacttaggccagcatgcacgcttaatctttggactgaggtaagaaaagtattaagcactgtttatgaataatgatttgatcgttatagtcttgattatgatcaagatcccgatatgtattgttgcaactcgagtataatcgaaataatgttgagaaacgattattatcgttgtgactcgattatgatcgaggaaaaaatgatatgaaacgattatcattgttgtgactcgattatgattgagggaaattatatggaacaattattatcgttatgactcgattatgatcgagtaaaagatacggttattaccgttaggagtaattactcctaaaattgcagatagattttttacttatcgttcgctgtatcgggcaacgatagtgacatatgtagctcgtgattaacgagtggtaagggtactttatgaagtaccaggattgtgtgattacaaagttgtgaaattgattaagtatgttattatgtgatgagttgtaatcaaatacatttgttatagtgtgactaaacgagttgtgtactgcttgtgaaattagacacttttcctgcagtctcagtgactttttgcaagatgtaagaatacgtgtttataatgatgtgtgattagaatgctttatgaagtattgagattatgaggttatggtaatgtgtgaattagaatgctttataaagcactgaaagtaagtgtttataatgacgtatgattagggtgctttatgaaacactgagattgttgattatgaatagctataaatcttcttaattttgtaataagtgtgcttacataaacattaatttgtatatgtacactgaatatgtatgacctattggtaggtatattatattgtaatgaaattcgctagcactttccataatttttatttagtagcttttcttgctgagtaattgtgactcacgggtgcttcgtggtgcaggtaaggaagttaga

SEQ ID NO: 55674 - DNA, 1265 bp, Cannabis sativa
ttaaatatgtggattacataaaaataatattatgaaaaaatatttttttagtttaaatttgaattacattgtttttttttttttttttgtaagtaagctgaatttttattaaacctcaacaaatataattactaatccacagactaaaacaccttccaaaaagcattaaaaaccctcctgtacaattttgcagaaccaaatcttaaacctattacagaacttttttgtatctacaaaacataatcttcctatcattataccattttgatttcttttataactttatgtatagtatatacaatttgattccaaaaagcctcatttcagacactccagatatggcattttgctgcatttagaacagcaacatacaccaatatcttcaatacttgcttctctttatccacttcaagattcctgcaagcttatattggtttgaaccaataccaagtcagcccaatataactctttgattaccctcctgctaaagtaacattggaagaaaaggtgttggtgactttctaacttagttgcacaaattacacacatgtcctcatttgttacccctaatctgaccagtctatccctagtcaagagtctctcccaagcagccatccaaactatgaattgattttttggctcacttaacactatggcattctatctttgtcgctcttgaggccataactttgagtaaatcaaagtaactcataatctcatttgtattacttcagcttgactcatttttccttgataatatttttcactataattatctttttccaataccaactccccttgtggagcctcatagctccactaatccttatctttaatgtagatcgagtgtatacacctgacttaaagattgtctttcttcaaagccaagtcccaaacatatcggacaaaggctgctatgttcaacttttcaatgttactgaagcctagcccacttgcccttttagatttgcacacttcactccaagctatctgtcccaaaccaagggcttctgcagtgcctttctgtggaaaggcacgacagatacaatttattttataaagaataaatttctaaagaatggtaatttgagcccaataaaaatgtataaaatttatgagaatacttcagccagcatatataggatatgtttccagtgttccaagttttgatccgagttgtcattttatccacaatgctatcacattctttcttagagatttttttaacttgaatcacaatgttaaactaataataataataataa

SEQ ID NO: 55675 - DNA, 748 bp, Cannabis sativa
taacgcataaatatatactcttctctgtatggatatgtcttctaccgtcatgactactttcatatttaatattagtaacaaataattattatatatatattaatagaaaagaagaacaagtgtactatactgattgaagtatatgctctaataagtactgaatcatcaatctgtacaagtagataatgaaatgaaataaggatatataaatatatatatatatatatatatatttatagcaaattaagattgggaatattttcgtctttaaattatgagaggatattctcttctctagctagctctttatacgtacttgcaataaatacatactataatgtataaatatgtatatattatttttttaaaaggaataatcaaaggtatagtttgagaaccatccatataataatccatgcattttctctaaaaaaatattcacttatacataaaataatttctttatttatacattaattataaaaaatatacaattttatacaataaatattcttatagcaattcatagagcaactcaaaatggcaactcaattcaattaatccacgttgagatcccaatacatgtaacaactcaaatcgcaatccaactcaatttttaatttatattgcaatttgttcagtaacccaaatcgcaaccttaatcaataattttaagttacggaagagtaattcccaaaaaaaaaaaaaatacatctatataatacatccatatttatatgtatatata

SEQ ID NO: 55676 - DNA, 869 bp, Cannabis sativa
ataaagaagtcacagcactcaagaggtacttggactcatgtgccatatgagcctcatatgaacattattgacaataaatgggttcaccgaatcaaactcaattcagatggaagtatagacagactcaaatcccgattggtggccaagggttatcttcaagctcctggcattgactatgccgaaacattcagtcccgttgtcaagccagtcacggttcgaatggtgcttactcttgctgtcacttttcaatgggaagtcaaacaattagatgtgtctaatgcatttcttaatggagttcttcaagaaactgtatacatgttacaaccaaaaggttttgaagacccaactaaacctactcatgtctgtcacttgcataaggctatctacggtcttaaacaggcaccacgagcgtggaatgacaaactcaaagctacacttcttgactggggattcactgcctctagagcagattcctccctcttcatctatggttctggacataacttgcttgtgtttttagtttacgttgatgatatccttattaccgggcctaataacactctcattgccaagttaattactgatctaaatcgctcattcgagctaaaggatcttggagccattcactattttctcggtgttgaagttcatcgcacctctgcaggaatgtatttgtctcaaagcaaatacattactgacttacttgtcaaagtccaactcgagggagcaaagccatgttctaatcccacaagcagtgctcacaaattatcacttcatgaagggacaccattcgaagatcactccctgtatcgcagtaccctgggagctttacaatatctaactcttacacggccagatgtggcctttat

SEQ ID NO: 55677 - DNA, 577 bp, Cannabis sativa
gatttcttttttccagtcgttgatgagacaacaattactgttgacgaaaatcgaagtggtcattacgacgaaatgtttaaggagatcgaagctgagttgtaccctggctgtgattggatgtcgtcactcaattttctagccaaattgatgcatttaaaagtgcaaggaaaaattccaaacaatatatttgatgaattattgaaattgttgaagttttcctttccaaaggagaacaaaatacctacatcacattatgaggccaagaaaaagctaagtaaattaggtttggggtatcaatcaattcttatctgaagcttctgaagctgaaaatgagctttctgactcttcaagaaagaggaaacgcggttgtaatgtccttaatgacttagaggataggaggaaaaaatcttcagtgccactacctcttctgtgtgatgtccgttccagtaaaatagttggaatagagagtggcgctttttctcgtctaattggaagagagataagaattcacgtccctggacattatggtagttttgagaaagttccaaggatgtatcgtgattcagtcttcaacaga

SEQ ID NO: 55678 - DNA, 1407 bp, Cannabis sativa
ttagttcccatcaatgggtattacccattaagaattgttccatatatataaaggagaataataagacggttacatgtcactctaaaattgtttcaaagctatttttctcttctctcgttaattcgcttattttttaattttaattctttttataaatctcttatattatatttgtaaatcaatttaaaatatctatgccgaaatcaatttaaaaatatctatactaaaattaaaaaaattaaatatataacttaattttaaatatatatatatatatatatgcacgtgtatctatataatttaaaaaaaattaaaaaaaaaaaaactaaccatacataacataatcctaaatatatatatatatatataaatatatattgatttaaaaatatattatattttcttcttcattcttatttttttttcttttaacatatatttcaatctttccctcactaataaaaatatttctctgcgatcgatggacaaagagtgtaaacaagacatatacacaagcactttgacgaattaatgacatcaacaaataattttgaagagttttaatagtttttatgatgggtagtaattttactcacatgatatgatatttttaagttttcgctgcacaagtaattttcctttcaataattcaaaattttattattttaacttttcattctctctctactattctcgattaactatatgatgaaatcacttaaatatattatgtatgtatgttttataaaactatttaacaactattatttgtaaagctttcatctcaattttttctttgagtcaatcatatgattatcataggaaaatagatataaattttatttgtatataatttaaaattgttaaatttaataaatggtatatttatatgttggaagtaaatccaactaacactttcctaactgtaagtctgctacaaaagaagacaacttgcacaagtacaacaactacaatacagttacaaattaaagatcctaactaaaataacagaaaactgaagacatatacctgccaactcatctatccgagactacttacccttctcctatcccagcagtataaataactgctcctgggttcattttttgcccagatctgaagactagagagagagagtgaaccatgtaattgctctgagttcaaagataagaactcagagttgagaaaaagagagaaagagtgagaatctgtgagaagagaaagattgttcttgagagagacagaagtagaaaccagagaaaaacaatagcagaaaagaatagtcttaccagttaatcttgtagctgaaagctccatgaaagcttgtattgaatctgaatttaatagtgcaagggcttagctcatttctgaggcgagctcaagaggactaccccatcaactaagggg

SEQ ID NO: 55679 - DNA, 1949 bp, Cannabis sativa
tcgaagggaacatccttctaaattcggaaagcatggatcttgtcccactcagttgaaaccctcagcgggtggacgatcaaagaaggagaaccccgactgctaggataagatgaaggacgagccataaagggagatagagcaagctaggaggtctgcaaagccccaaaagggagggtggaagtatgagtaggtgaaggtgggatggagcctaggttcacgtccaagtcaaccgccggaggatcctcatgctgggagatgctctcggggttgatcaactcagctagtactgagttaagggagtcatccccaataattttgacggtcaaagcagtatcttatggagagttgagtagcaccccaatggaatcatccgctgccgagtcatgctgagacgattgtccaaagtccgattggttatcccgtcgggccccaccgtcttactcctcttgcctttttctttattcttaggcgattttgccataagtctcttctggcgggcggcattctagtccttaatttcttcaacagacaactcagacaatttcattttaggaagacggtgggggtaagtctctgcaaggcaggaatgtaccttagaaaattcgatcaaaactggttcgaccgtttgttttaaatgcttcaaggcacattttatgaaatcaggccaaataaaataataatgataaggaatggggatacgtaagggaatcctgagctcgctaggccaggcagaggatcgaatcaaagcttcgtccgacagaagatacatgatcgaccaaaactttggttctagagcagtgactttacgaactttgtcagaaaaaacttccccaataacagttttctcattatccgcagaagctgcacattaaaaaaaatttattagaaagaaagatcgaaagctgctaaataaaagtattaatggaaatgcaggggaaaaatatgagcaagaatatcccaataaaaaaagtggggaaggggaaagaataccaggagctccctagctccgactgataaaaggggcagtaggatcatcagaaacaaactcaacaggccctttagcaaaaaagaacctattcttccacaccttatgagaagtctccaagtcagtaataatagcgcagttccgcctagaccgtagatggtaacgcccttgctcactctccattaaggaataaaatgaataatatctgatacctatcacttaactccagccttatctcccaaaactattagacctagaaggataacccacacattaggaagtaattgaacaggggcaagggagtaatgcaaaaggaattccttaattaactgaggaatgggcgaccttaatttaattctcgattcaaacaataagagtgcatgcacaaccactcgacctgagctgtgttagccctctcatgtgacttagggagcctaacttccactcccgatgggaaacgacaaaaggacactaaggaatcaagctcaaaatgagttaataccgatgggctactcgacttatgatccaagtacgaacgtcccaaggtaagtttttacgcttttgctttcttttgaggaggcgcaacaagagtcacctcctctgaagacgcagcctgatcgctgacgcctgtgccatccccaaagcgggagcgggggataatcgaaatgctgcccaagcactcaacttccaggtccacaggaatgttagcgttatcatcctccatagaaggggtaccagaaactaacaaggactcgacaaacccaagagcagtacttgaagaaagagaatcggaaactggggaagaagcgcctggacgatccacatttgctattataaaactaataaaagggaaaaatacttgggactcggaattaaaccatacgtctaaaggaaaacctaatcaaacattcaaattgtcctttccaaaaaaaaaaaataaactaagaggcaaaaagggctataa

SEQ ID NO: 55680 - DNA, 1233 bp, Cannabis sativa
  modified_base (42)..(65): a, c, t, g, unknown or other
ttttgaagcaatttaattcacttatattattattattattannnnnnnnnnnnnnnnnnnnnnnnttattattattattattatacgaaaaacaaaagtaacataattataatatgaatatgaaatttttgagttaaaccacaaaattgtatgatattatgattcactatggaagaaaaataaatcataaaaaaatgaattgttaaaggacaagcatgtaatgattggttcacaaaagaaataatagcaacacaaaaacaaataataataagaaatagatatataataggacaatataacttgaccaaaaattgagaagagtgactatttggtggtgtatctgaggccattttttaaaaaataaagaaagaaagaaatatatatatatataaaaaaaagaagactgactcttttatatttgtaagacaaataatatactattactaactttattcacttgttatttttattttaatttttgaagcaatttaattcacttatatcattattattattattattattattatgcaaaaaaagtaacataattataacatgactatgaaattttttgagttgaactactataattgtatgatattctgactcattatgaaagaaaattcctcaccaaaaaaagaaatatgaaacaaaaataaatgatttaagaaaagggagattttgagttaaaggacaaaagtatttaatcacaaaagaaataataataataaaaagataataaaacaaagtaatttagacaaaaaataaagaagaatgactccttttatatatgctatatagatataaaattatttgaggtaaatacttttgaaaaaatcaatattaattattggaaaaaacaaaaattttaaaaatataatactaattttagttaccaatttaaaatagtgaaaatttgaccaaattatttatttaaatttttacaacacatactgaaatttttaattttttttttattgtagggtagattttttttaaaacatactgtgtaagttttataccgtgtattgtattattttcactactgtcggttattatttttttttagtagttgttccacttttattttaattgttttgttttgttgttttacagttgttatataaaaagacagtattttagaaaaaaaatttgtctgacaataaaattgtaaatttttgtccaaaatttaatatttttttttgtaaaaactctttatttatatttattgag

SEQ ID NO: 55681 - DNA, 888 bp, Cannabis sativa
atatttataaaaagaattaaaaaatagataaaattattttaagtgattttagagtgatattttattaattaaaatgaaagaattaaggagaaaataaatagagtacttattttgagtaattttagagtatcatgtcagcatctcatacctatcctttatactaggttgaagttacgtgctatgcacgtatacttagttatattttagttatttttttcaaatcatatattataatttttaattattataatatacaataatattgataatttaattaaataaataattttattttaaaaaacaaataaatatttaatataaagtaaataaaaagaacataatgatgtattaaaataaaaacaatgtgtagagttttagaaataagctcttaattcttgtatataatttcaaataattataagatgtgtttctaatttttgtcaatttagtgacttaaatattaggcttagtagccttgttggataaatcaacaaccaccgagtgttgtgatattttgttattataatgaaataattatcaataaataatagtaaatagcctatccagtgagtgtttatacgaagatattttttttgagtaaatactattttagatcttgtgacttgcaaaagttaccgactgaactatctattttgtcaaataataaattggcttctgtattcaccaaactatctcataatttattgatacttgattagagaaaaaattcattcattaatttgttgcctaaaatctaatgttacaaaaagaaaagaaaaaatttaataactttagtacaaggtcatgaacaaatatttactacccacctgatgcttcttataatccattgagctgccaagtaatacctgcaagaaaaataacaattat

SEQ ID NO: 55682 - DNA, 1478 bp, Cannabis sativa
  modified_base (534)..(539): a, c, t, g, unknown or other
atgcacgatgtacctcctggtactcgtattggtaacattgtaactaccctaaaaccctacattgtactaacactcttaaaattacattttcgttagtgttagtagtgtaaacaattaaaaacatgcatacatccacatatatatatatactttatgcaatcttatctagtttccgtgctcaggcgtgccagtcagcttgagtggaacaacagctcgacgtattacagggccctattccacaatatttaaaattcgattagagacatgccaaaatacttatcggggacttaaaaccaaaactaagaataacactatcgatgaataggatggtaataccctaaagatcacaaaaacacaagtaccaaaatccatgcatataacctattttgagctagagaaaaatcaagaagaagagggctaaaatgatataccttgaattggagtcctctattttgctaggatcacacaaaattaagctgaaaactccaaagcttcagctggttccttaaagaattcgagagagagagagagagnnnnnnagagagagagtgtgtgtgtgtgtaggttttctaggtttttctattatctttctctaataaataaaactcatcttacttcattaaaatcaatcctaatattcagcctataatgtccacaaaagacaaaaaaaagggtttctaacaaaatgacctttttatccttaaatatagttcaaatgtttaagaccatccaagggtagtttagtcatttaccaaccctgactaatccccgatacttccaatgcctaacaatggtaccctgctattaacattctaaatcatacaaaacgtaactctctaatggcccacgtcgctttccaccgctactgaacacaattacagaaaaatgagaaattcatatgtatagcataatttatacatgttgaaattaaataaatctccgcaaatatgcaaatcataattaataattaaatctcataaataaaccctagttacttgataatctaacttattaatataaacagtctttacatttagtccttctgttaggtttcgttccattattccgtttaaatgatgacgtgtctttgtcaattagcaactttaccccttaaactttgacaactatcaaatcgtactccatcaaaataaaaataagaaagattcaatattttttagtaactcttaaaaaattaatattgatcttaagaaaaaatcttttgaatgtttaagaaaatttaaaaattaattaaacaatataaaaaattatttattttttattaaaaaattcatttaaatattaaaaaaatatattaaaaaatcaattttcctaaaaactaaattctacgagaataaacttgggtatgttttatttttatgaaaaaaatatagatttatttaagtaaacataacattttttttttaaataattttatatttttattgaatttttaattatttgttaagatatgagtttat

SEQ ID NO: 55683 - DNA, 1435 bp, Cannabis sativa
gagaaataaaaggagtgcagagctagggtttatattgtaaacacttgtattacttaaacactcacctgtaaggccaatacaacggactcctggatcagagattattaacccccgaatcacgtaaaaaataacctatcttctatttattattttattcctttcttaagctctattttattagtttccgaaaatctttgtaaacactataaaactttaagggttgaatattcccaaagctattcctatgagttctcctttatgcttagagataggagaaataagcttttagacaaaagtgttatacaatattcaaatcatggtagttcccactaaacaacactcaaagttgtgagtgagtgtttctattcttcttctatttcatcatgatattatatatatgtgtgtgttatattacatatgatgtaatctcgggccgagtgttggtataagcgagctaggctcgtgcctaggactcactttttgagggtcccaaaataaaaattaaaaggctccattacatttttatttaattaaacttaaatgtactatgagcaagaattgtccacaagttgattaattgacgcatgttggttcgaatcccgcggcacccttttaattttttttttaataatttacttcacccagcccaattatatacttaaagatttatttaaattaaattttcattttatttttttaatggtttctttttattaatttaaactctattttttaacagcttttcattttttttctaaccttgttgtcatagtaagctttctttgattatttttttatgttagcattgtgggaaaaaattcattaatttaatcatcaaagtatgttcatattaatatatattgtacattctacaaatattatttaattttattgaaaatcttggttaaaatcttataaagatagccttcattacttgattttttttgtttcattattataggtaaaaatgaatattgtgttaggatctcaaaatttaaatagccttagtcccttacatttttaggggtaatctctttcttttattttcatatatatacatataatatatatgatattataatatttatgtaattaatttcttatgttgtctgtgtattattttataatagaattataatttttaattttaaactattgacgtgtaatatctctaactggataattttaaagatgggatggttttttctcttgcctggtgaggcgtttcacccatatcttttgtttttcttgctgcttttctttttcttttattaatcaaaattcagatttgattaagaaacagtgtaattaattaattaagaaaccaacaaatgtaaaattttaatgataaaaacagtcactaactctattagaagagcatattaactttgtttttgaaagttaataatatttgagttcttgcagtgcctgaaaa

SEQ ID NO: 55684 - DNA, 2479 bp, Cannabis sativa
gtgattttataaactagtttaatactaatagattaattaattattaaaaaccgtgatgatattaaaaacttgactaaaataaaacactaaaaataggcatcgtaacgacattaaaaacatgttccaaagatccctgttataaaaggtttacaaaacgactatatatgacattaattaaaaacataaaaatcaaaatacatagcaaatatgacccaaaacaactcatggcgactcggcacataggttggtgggggttaatatatgcattgttagagaagactgttacctcatggttgatttatttcttttacctctgcaccacatagcacccatgagtcacaaagactcaacgagaaaagtaataaaagctaatacatggaataaccaattatttatctcactaatatggaatgagtaagtaataacattcaaaagtggataacataaccaattatatgcatggaaataaaagcaatcatatattgcatggcctaatcaggaaattccgtatcataatctaccatcatacgtaatgtcgatgcatcaactaatcagatgagcctatgccacaatatggcaccatgtattgcatcgcctaaccaagcaagcccgtgccatatctaagcacatatatgtcactgctgcccgtacctaatcagctacgccgctaggaaaaaacctaataatggtttcaatccatgccataacttggcatgatcatatcattgccgcccgtatcttataaggcacgccgccaggaagaaacctaacaacgatttcaatctgtgccataatgtggcacacgcatatcactaccacctgtatcttataaggtatgctgccaggaagaaacctaacaacggtttcaatctgtgtcataacctggcacccacgtgtcactactgctcatacctaattaggtacgttgccaggaagaaacctaacaatggtttcagtctatgccataacttggcatccatatatcacatcacctaatcatgtgcacttgtatatcacattgcctaatcatgtaagcccatgtcatagtccagcattcttatgtcgcattgcataatcaggcaaattcataccatagtttggcattcttatgccacattgcacaatcaagaaaactcatgccatagtgtgacattcatatatcacattacctaattagctgagcttgtatttttgtatataatcagacaatcgataattatgaaacctgcatgtcatgtggtatattatacatttcttaccattgatccagattcatgcatgtcagccaatccaagaggataaatatccctaatgatctcggccttatgttacaacaacggtaaaccaataagtgtttatcccaaaacactacttagcagttgtaaaggataacctagggtttcctaccaaatcatatagtacaaatacactaaaataaaacttataatttggctctaaaacatacaccatatggtatatcttgtcataagcttcaaaatagtatatagaacgtccaaagcgaatacctgagtgaaaagtaacaacaaaaatacgattctcaatttctcaagactgcctagaaacggttaactgcttcccccagaaccggttaaccagttcacaaccagtggacaagttcggaaggtggctaaaagtcacgatttttaaggtttgcactcactgaagcactaccaaaacctgtccaaatcactccaacttcaaaaggcacatatatatatcataaatactgccatccttacgtaacaaaaattaaaatcaagcccttaaatgaaaaatatcattaacgttcagacttaagctttaaaaagttccaaactcaatttctaactcaaaatcacaacaagtaaatatcaaaactagtcccatggctacccaagaacaattctataaggtcagaacctccataactattccaattcacaaaactcttatgtagaaccaatcgtttttagcttaaaatgaaattaatccatactttaagctttctctcttcaaggatttgctatcccgctactactggagcttagatcgctaggttccaagttgaaaattaaagaaaatggatagaggtagatgagggtttcattcgacgaaagttgaagggtttttttttgtatgatttactgttttaaacatagtatatataaacttataaaatacgataagttttataaaaataataatattataattgtttaccgagattttcaactactaaatcattattgtactaagaattatttgaagagagtcaatgcaaatatttttatgtggttggtatttcttacagagaatgtttttctctcttcttttttccccctcacaaatatggtggggggtatttatagtagttcattgagaggaaaaaaggtctctattgtcttgagtggccaccttggctatacataagttcccaaatctatgaagtagggtatgcgtttgttgggttttatgccct

SEQ ID NO: 55685 - DNA, 1047 bp, Cannabis sativa
ggttttgtgattcagaacaggagttggtaatcgattgtgtatgtacacggctgtcctaaatgcctcatcccaaaatttcagtggcatggatgattgagcaagcaaagtgaggccattttcaactatatgcctatgctttctctcagctaggccattttgttcatgggtggttgggcatgggtgtctatgtactaccccaagttgttgcagaaacctaggaaaagttctaaactccccaccccaatcagtttgcaccattttaatttgtgttcctagttgtaactcggcttcagctttaaacatttgaaacactttgagagtttcagatttgtctttgagcatgtatatccatacaaacctagagtatacatccatgaagtgaatgtaatacttgtacccactgtgagagatagtgtgtgaagggccccataaatctgacactacaagttgcagaggggctgtgtactcagtgctagagactttaggaaatggaagtttatgaattttacccaaacaacatgcagggcaaacattttgagacattttattatcaacagagagattacaagttttaagtacagattgaacaacactttttgaggcatgccccaatcgattgtgccaaacatcaaaatctgaaaacttgttgttattacaatgaacacaggatggactattagagactgtgaggacagatggcctattattttgaggagggacaggttctgcaggttcatttctggtggatttattgaggatgtcaacatcttcaaaaatatagaggccattcttgtgtctcccttgaagaagaatctgcctggtgtcctgatccttaacacaacaagtgtcagggtgaaactcaaagaatactctattgtctctagcaaacttagacacacttaacaagtttttggttatggagggcacatgtagtaggttattgagaactaaaggctgtgtagacagattagaagacaagaaagtttgacctatgtgtttaatggacaaacctgatccatcaccaacaaacagttgctcctgtccaag

SEQ ID NO: 55686 - DNA, 798 bp, Cannabis sativa
aatatttactttctataattacaaagagcaaaataaaaaactaggcatgttccctattcttccttaataatgtgtatccatcccatgaaatcgggaatattatcgtatcttgcaagcatgaagatatacatgatatatctctgaaattgttcaactcgcattctctacttggcttatgcgagctgcttacatgatagtgctggtcaggtgttctcgtacaccttactcaaatgtttagctctacttacctcgttcatccgatttctttgcatgattcgttgcgagtggagtcttccgtttaagtcacacaatatattccacgtgtcacccagatagatgtcacgtcaccctgtgtaaaaatttggataacaactataaaaaaaataatcagaaataatactgactcggggagtatgtagattttaactacaaaaatcacgtaaaagtaccttttgttttatttatatatagtaattataagtattttgaatttatttataaggttttaatattgttaacaaatttatgagttagcagtaatattttaaattaatcattttgttaacttaaaaaaaatattactttattattaatttgagataaaaacttttaataattaaaaaagaataatactatattattttattagaatcaaagtaatattgtttattaatgttattttaaacttttgatagcatgtgataagtcaaaattatatatttttataaattttaataaataaatttttgacaataaatttataaataattttttcattattcctttcaaattattttt

SEQ ID NO: 55687 - DNA, 509 bp, Cannabis sativa
  modified_base (331)..(332): a, c, t, g, unknown or other
tcacaagtaactttttgttgtgactaaaaattacttttagtaaaaaaacttatgttaagattaaaagattgtcacttaaagttatttttttttgtagttaatataagatatagaagaaaaaaatataaaaaaaaaagtataaattaaatatatattgttttgaatggaattaaatatatattttatgtaaaataaaaatgattaaaattgaataattttgtaattcttttgggtgtacataaatctctccaatatttactatatatatggaatatttcttaacgggtattaactatcaatgagtaataaataaatttaactataaatattnnttttaaaaatattaaaccattagattttggtcctatggcgaataataaaagagaaatttaaatttttatgctgaattttaaatacttaattagagaaaatatcaaaaaatacgtctttttacaccatattaaaaatatgttcatataaaaaaatatttaagtcaaattcaatttttt

SEQ ID NO: 55688 - DNA, 922 bp, Cannabis sativa
ttcgttccgaggctccccaaacactgtatctctcaccgtgaacccgctgcccacatttcttccgttagaccccgcacctccggtcgctgttgaaccttcgccatgaagacgtcgacccgaaccttgttgccattggagctttctctgagagatgctaactcatcgacaattcggccgttcgatacaaccaatctatccaaaacttctttcaaggattgaagctccaccccgtgagtcttcagtagcaccccgtgttcattgagctggttgttcacccccgacactgccgactgaactcccgtcaccgccacttcgacttctttaacacgagattccatcctcgtaatcaccggcatcaaccaagagcgtcaagctctgataccaattgatacgtacctggtacttaattaacaacaacaacagtaatatatcaatgtaacagtaaagaggaagaggaatacttggaagctttattgaaatgtaaggaaaaaaggagactctagtctcatacaatagagagaaaagttcccatgatgcagagaactttctcagtacttgcataacccaaaacaatagcttcccttggctctaaaaggccaaacaaccaccacaattcccaaactaccctctaacaaactcacccagccaaaagactccacctacccttgattaaccttccttctagcataggtgaaacggataggaggcttaacattcctatcatactagaacatatttcacttgcattagcttttattactagttcttgcgaattttgaaagagtatattaatattagaagacttattttacattgacttacagtattaattttgtttaaaaatttttaaatactttccaagccactatgtcccacacactaacatgtcatttgcacagcaggagatgggaactttattgaa

SEQ ID NO: 55689 - DNA, 952 bp, Cannabis sativa
tgcaattgggattctgataagataacaccagttaagactttctctaagggcaagagcttcagccatcagtggaacaaagtcaccagcagctggaatagaaagaccagcaacaatccttccacaccaatctgaaatgacagccccaaaaccaagttttccttgagaggaacacaaagccgcatctatattaagttgataataacccggattgacttgcttcggttgttcatgatcatataagatttgagacgaactaagcttcttcatacccatctgagctgcattatagtctgaaagataagaattaatccattcaacaacatcaacagaagacatattgaagtttgcaaacagttttttatttctaaaattccatatggcccaaacagtggccaacaacagtgtaagatcctctttgcttagatgagaataaccagcaattaaaaattctttaatgtcaacatgtctatgatttgcataaaagtgtttaagaggagaagctttccaaatcttaacagcactggaacaatctagcaaggcatgagtcactgattcagaaggacaatggcaaagggagcaacagggactggggagagattttttaagaaagagattaagggcagtagggagaatgtggtggtaagccctcaaggctaaagatttaatcttaggaggaagattaagagtccaaagcgcagtccaccattttttaatgaaagaaaagttagaagaggaaggaggaagggaaacagtgtgagcaagatgataacccgttttaaccgagaacatacctgtggtgtccttattccagattagatgatcctctttattaagaccaccaatcgggactttaaggatagaagagacagtgtgagaatcaaaatattgatcaagcttagcacgattccaatgaccattttcatcaatgaagaaacttaccctatccgaagga

SEQ ID NO: 55690 - DNA, 1889 bp, Cannabis sativa
agagttttcctgtttatcaatttcgtgataatttcaaatttggcatcttcaaagttttgatgatctttcttgtttcttgactttgtttccaggtattgttgaatcttcttgcttcctcgatctctgataccactgtaggaaattaagcattccagtaatgcccctgcaccaacaccacaaagttaaaaaacccaaggtcaaaattgaccatccatctcttgtgcggatcaagagaggttccctcaaaacactagcctttaaaggcagtataaaaactcttttatttggttcaaaccctagcagccaaatcactttcttttcctctaaacctagcagccgaaaggaccctttcagcctctcttcttcttattctcttcttcctttgaaacactagcagccactccattttcttctcaaagaaaagcttcagccgaatatctctttcttctccctttctttctccaagctttaaaaccagtagaaaaaccaaagaataacacagagaagaaagcaaaaataaaaccagcaaagagaaaaaactatagacaccacaataattgattttggagttccctctaaatcagaggtacgtctccgtcaagcgaccctcaaagtttcttaaatctccactatgaatgtcaaaaccgagttacaagattatggagattccatgacacaaacgagcaggtaatctctaagtttttctctcttttcttcttcctttatttttctggttttattacaatatatctctctaactctctctttgttttctctctgatttctgaggtgattctccaaagcaaaatggatgctgcaactcacaatggcttggccgagtctctctattcaaatcagcaggttgctcctttatttatagtgtttgttgactgtgattttttgttgtgttttttagctgagaaaatagttataaaattgttattaatattttcttgtcttgctgaaaattggttagagtcttgaaatatttttatttacttctttattgtaaagtgtttaaagatctaagcctatgaaaacagaaccgactactccaagagttgtaatggtctgttgaggcttgtaaaacttcttattttattttccttgtaacttgtttaagagatagttagcatgggaatttatctaacagactttctttaagaacacaagttatacaagtattggctttcattaaattaggggtcctttgatagtgtgtttactatttgctaatgagcttgttttctttacagtacaagtaaggatgtgtaatgatttagtggttttctcatttaggaaaagaagtcacacctgcccaccaaaaatgatattttgtaaaccatgttacatatatattatgggttctaggaatttattcaagaaaataaattaaatgttaagataagatgtgtaatttttttttgtagggtaagatcatcccctactcaaatgatgagatgaatcttctatgtgattagtggattgaattcgtctaaacacgcgcagtgtgacaagggctattatgatgatccgtttctattttttttatactttacattataaccaattactttcagataactaacgattaagtatgtttgagtacgtagtttgtatgtatttcagtttttgtcccttttcaatttatgtttatcctttatgctaactattagttacaatatataaattagtaaaatttaattaatgcagtgaaaaaaactagattttttttttatttcatcttttttatttgcaacccaatgacttgcaaaaactgtcgccaaaaaaatatgaaatttataattgaactgaaaactttactatagcgatggtttaaacccctgcctataaaactataggctacagttttaaattgtggcctatac

SEQ ID NO: 55691 - DNA, 1174 bp, Cannabis sativa
tgattggtacttagctacagtcctcgtgggaacgatctcacttacctgagtattacttgttaaaacgatacgtatacttgcgtgttggatttatcacaacaccaattcaattaataatttacataaaacctattattttattaatttaaatgacttgactaacttgttaatggatattttgatctaaattaatcaaagtcacttgttaattataaatatataaatgatttgtaacacgtaaatttgtaattttttctttcatttgtggcataacttagaaacataataagtttataaaaatctgtaaaatctatgatatatgtgagttgatattttacttatgaatttagatgcatatagaagctcatttaatattttagatatttaaatagattagagagaagatcccaagagtgactagtgtgagataacttcattcgtgttgagagagagagagagagatagaaaagtgttaaagaaaaatccctcataaaagaaaaatatagaaaagaattcaaagtttgtataactttgattaacaatcaatgaatgtgacttgaaatcaaagaagatgatgtaatccataccaatggatagtggagaaatcgagtatattagtggtgagctcgacatggatgtagtctatttttttggggctgaacttttagaaaattgtggtgtttttcatctttgtttatttccctaaccctgtttctatttgtttttgatttcgtgtgaattttcttggtgatttgtgtgtgaatctctaaccctagtagctcgcggaggttctaaggagctagatttcttgaagtgtgtttgaactatatatagaatctgatatatagggaaacttacaaaaatactgaaatttgggttaacttttacaaaaatactgtcacacagaaaggtttttaaaaatactgtgtttttataaaaaaccagtaaaacacaaaacaaattaactcaaaacaacagtagaataactaaaaaacactagtagaacaccggtgaaaacttaacacaatatacttatttttgtaaaaaagtgacaaaagttagtataccatgtaaatttccctaaatataaatctgatagggtttgttcttaatcaaggggtttcgggctttatttgttgggctggtactatttcaattgggctcatggatgcat

SEQ ID NO: 55692 - DNA, 756 bp, Cannabis sativa
ataataaaaagtcactaatttttgctaaataattgaaaggtcatcacttaggtcattaaatagtaaatatttatttatattaaaaaaattaattaaaaaatatttaaatgtgaaaatttgagaaataaaaaagattaagaaactcaggtccacataaattttagtaaattttattttatactagtaaacaaacctgtttcacagtggatgtttaaaaaatttaaaattatatatatgaaataatttatgtattttatttgatgataactaaataataaattgtatcaaattttaactttattaattttatatataaatttttaaaaaaatatatgaagttatatgtaaaatcaggccaacccgacctgactatttaaaatctgggtcttatttatgttatgtttaagacacaataatggagtcattgttgacaaactggagaaaaattataatgttaattttaaaaatattgggtacatatgcagttgaaaattataatttcacgaatattgagtacttataccgccaagcattagagttatgaattgaaacacattgatcggaatgttaactatctttctagtatctctactgaagttgtaactaaaaataaaattttatagtcatttgataatggtttgtactcatttgtagttaccacaatttttaaattttatggacaatacaaagactcttcattcaatagttttttaaacttaattagatactaaattttttcttattgttgcatgcatt

SEQ ID NO: 55693 - DNA, 1128 bp, Cannabis sativa
gactacaccgtattccccatttactttactatctcatttttttttctttttaaaggatagccttaaaagaaaaaaaaagttaaactataactacagaaacagaaggagagtatagaaacagaactgttggaacttgctttaaagtttcacgtgagttttaaaaaaaataaacagatgtcatttccgcattattgggacagaagggagacaggactttggtaacagaagatttttattccattgtaataaccttttagagtccattgtgccgagttctatagtaaactctaactcacaatacacgtcactatatgtgtattcttcttttaatttggtgcaattatttttaagttttaatttaattcaattttatattaataatatattgtgtttataaatagtaattgatagaatatttttaaaatgaaatatagattacagtggtgtatgattcattctttaacaaaaatataaaatataagatttatacttttttttttttttgaataaaagtgtttatatatagaagaaagagttagacctcatggtcgttacaaaggatagcattcggaatagtagatacttctaccataccgttaaagttgttggcaaatggccatttagccacattatgggctacaaaattacagtttctagtgataaaagaaaaattacagcaagacataaaagcagagagaattttacattttctagtatagttctcaatcccccacaaggtgtcaccaccttttaggttgttgattacattctcagaatcgctctccactataacaaaaggatgatgtcttgagaccgtcgtctccaaagctaataaataagccgccgcttccccaataagagagtcagcacactgaagttccttagtcgccacccacaagatagactccgtgtgatccctcacaatcaccacaacacacatagaatcacctccgaccctgatgtcgcagttgatttcaatccaatcttctggtggaggggaccaaacaggagaaccagcatcctaaagtggcctggacaaacatgacctataatctacgtagcaacaagagatagagtcaatataatgcattaggctacccatagtgttgttatggactttgtcattac

SEQ ID NO: 55694 - DNA, 1342 bp, Cannabis sativa
  modified_base (566)..(572): a, c, t, g, unknown or other
  modified_base (598)..(598): a, c, t, g, unknown or other
ctttatttcatttaaatgaaacaaagagtcttttcctattttataatttttttcttctatttatttaaataccaattttattttaataattgtaaataattatcaaataaaataaaatttaaatatatttattaattagacccacgtgtactgattaacaaacaaacacttatttctcttttcttctgaaaaaatccaaacttgatgaaaattctcaaataagaggtagtctattttcgcattccaattgacttattaaatcaaatagttgagcctacaagatgatattatctcagacaatgtggggacccatgggtttatgtaaccaagctcctgataagtaatctgaaatttgccaagtacattttctaacttattaattcctcttgactccactataaattcagaatcgtacttctgattacatagaacgctctatatatcaaatatagatacgctatgaattattcgttgttacaatttaaatagtcaatgattctctacagacggtttacattgagtagggacaaaattttagttttaccctcaatgtattttatccttannnnnnntagctacttgtaaataatattttagnaaactaatataattactgaaaggaacgctagctctatcatttatcgcgttaagctaaggaaactattgtttcacttttaaatgttatagaagatatagattccatatctatgattaacgctcatacacactgttattatcaccatccataccaccacactacctactattattatcaccaccactacaaccaccataccaccaccaccaaaaatcaaagatcttaattttttttaggaaaccaaaaccaaaatagaaaataagagtttcatgaggaatcacaccaagggaaagagaaatggagctcaaaacaagtcctggaacaccatcgacaatggctggccgagagctccaccgagcgctgtcgtgcatggtggttgttcccggtcaatggcgttgtatgagggagagaaccacgagatctgaaagttcttgagaagggaaacacaaaactacaactcacttggctcaaagaggctcaaacttggccagatcgaagtcgagaagcctcggctccgacgagcacctgacatcggtgaaatggtgaagggggaacacggggttggggttttcgatgcctggtaatccatgtctggggtccgtgtgggctaaagaggaccgattaaggtggtatgtttagtcctcaccttaggtgggctcctgacagctgtgcaaatggaggatctatgtgggctaaagaggacggaggtggtccattccatgtgggtttagagaagaagaagaa

SEQ ID NO: 55695 - DNA, 1990 bp, Cannabis sativa
  modified_base (1300)..(1302): a, c, t, g, unknown or other
  modified_base (1722)..(1723): a, c, t, g, unknown or other
tgtttaccaactcaaggataatcaagtggtagtatttctggtcctttatgttgatgacattttgatcattggtaacaatatcaagaaaatgactgacataaagaaatggttaaacacccaattcaaaatgaaagacttgggtgaagctaattatgttctcggaatccaaattattagaaaccggaagaacagatcacttgctctctcgcaagcagcttacattgataaggtgctagagcgtttctcaatgagcaatactaaaggggaagttatgccttctagacatggattgtgtctatctaaggaatagtgtcccattgatccccaagagatagaagatatgagaaaatttccttatgcttcagtagttggaagtctaatgtatgctagctatgcacagacattttctattcaatgggaattgtgagcaggtatcagtcaaacctaggaaaagaacattggataggaattaagcatattcagaaatacttaaagaggataagggattatgtgttagtctacaagggtggtactttaaatcccttagcctataccgactcagatttttaggcttgtcttgatgactacgaaatcaacatatgagatggtattcactcttgggggtggagcagttgttttgagaagtgtcaagcaatctggattatctaactctaccatggaggtcgaagacatagctgtcgctgaggctgcaaaggaattggtctggctaagaaaattcttcacagagcttggtggtttccaggaatggaaaaccactaatgttactttgtgacaacacgggtgctatagccaacagtaaagaggatatactacatcatcagagaatatgtggcaagaggagacgtgttggtagaaaaggttgagactgaagacaacctaaccgacctattctccaagactttgacagagactgcatttaaaaagaacagagagaatctaggattaattgaaatctactgattgttttatgttagtgtaagtgtgagtttgttgggttttgtgccctaactaaaactctatttcaatgtaatctggaatattcatttatcaataaaggagcagaactattttattacttgtttaatatatttcttggttcacatgtttgcttcatgatcatttgtttgatttataaattcatttaaatcctcatcacattattattcatgattattgtgttgtctacatagtggaaagtaatcaagattatgtgattaaatattagtcccacaatttatcagcacacaagatttccactgatatgataatcaacaatgtnnnttacttacacttggatagtggtatgtctttttcaaggcattggtaaagtaagcttgtattggatgtattattatacatcgggaccgatattaacatagaaaagatatcgtaaacttaccataatatctttctaagtgaatatcacttagttgatcttagatcaatgatcttaatcttgaggtggttaggttctggttcaattgtattatttgtgtcctttgaattgttcgttaaagtttaccaattagatctttctaatacttatatcttgggaacgtggtagtacaattgagtgagagcgctaatcatagatatggaatctatagcttccataaatgcatataagtgaaatgatgatttccttcgagcttggctaaaaaagattaaatggtagattacaaggagctaagtgttttaagnntaaaatacattgaaaggtagaacagtaaatttatccctactcgatgtagatcatctataaaggatcgatcattgattatttggattgaaacaatgtataattaatagcgtatctatatttggaacatatagagcgttctatataatcaatagtgatcccgcactaattgagaaaatattggcttgtagactcagtgaattggttttaattaataaattagaattctaaattagactatgtctaacttatgaattttcactaagcacg

SEQ ID NO: 55696 - DNA, 606 bp, Cannabis sativa
tattaaattatgaatgataattgagtagctctcaaattacaacacaattttcacatgtaattaattataatcacataattaaaatttagtgatagaaatagttaatatttatacacatcatgtaataaatgtgtgaaatttaagtgtgcatttattattattattattattaaattataccaattacaatattggtgtctctttgaaaattgtctttattttacattctaaaaattaagtataatcttttattaaaaattaattggaggcctaaaaaattagggggttttagatgagcactttatttctataaatataacgttgatatttctttaatggagtattaaactaaattgaaatttgatatttagttttctactatttttcttcataaatttgttaacaataaaaattaaatgagtaattgattggatattcaattaaaaaagttatcaaatccaattagtaattttttaaattttattactagttatattgaatcgaattagaaaataaaatgttggattgaatttgagacccaaccctcttttgaaagctactaaacaatatattctatagttttaaatagtcaaaaagtacacaaaa

SEQ ID NO: 55697 - DNA, 582 bp, Cannabis sativa
aaatttaatagaattacaaatttactaatattgaatacttcactcgctaaaaactaaaaaatcattaggtattacaaaatacaaattcaaaacattagtcacttatgtcatagatatccattatattacatttctatcaaaaaaaaaaaaaattttgaaatccatttctatcaaaatttgaaataatataaattataaaattttgttttaatatttattagttaaattcataacatattctatgttttttttataaatactaaaaggcacatgtgttgtattagtgtccaatatcatcttatattattatattagtgtaattatgtattgagttatgtatattttagtttgataattattgatacatatataaaataaaaaaaaataataatatctgcacacataaattacacacttatatgtcaagccatttttaacaagtatgtctcattttaaataattattattagttaaaattattgggtgattctaaaatgcatcctttaaaatgaatatactgatgcaccctctacttattttggcatccagcaaaatttgttagtctaattttttttcatattc

SEQ ID NO: 55698 - DNA, 731 bp, Cannabis sativa
aattggtgaattcattgaagtttttgaggattccacaaacgaaggttggggcccttttctccgtgttcggatcaaaatttgtgttacaaaacctctacttcgtggagaaatgatacgattaccatctatcaaagacgagttttggattgactaccggtatgaacgcttgcctgaattttgttttgaatgtggcattcttggacatccttatgagcagtgtgttgcttttatggaaaggatggataacggtaatgatgatgatctcccatatggtccttggctcaaaggtacaaggctcccgactaatagttatgaccgataccgtactgacttttctaaggcgaatgcttggccacttttaactcgtttggcaagacaatctttggtctctgctgtcccacgattgtcatcaccaaataatcctcaaccaaattctcttcatgatagtgagaaggcttctactattaccatttctcgtcccccattggctcccactactacacaaaacctcatctctccactgcctccttctacactttctttgactacatctcctcctgccatcaccactgcatttccacattcaccatatatgacagatacacctccttcttccaaccttaataaccgaaacaacaagggtaaaaacattcttggggctcccttcattccaaattcaattctccctaatccttcttcaacagatatcccatcaaattccactactttca

SEQ ID NO: 55699 - DNA, 902 bp, Cannabis sativa
tactacacatattgatttataataatgaaagtggtgatatataaatcaaataacttaatataacttttattaattgctaacattgtccttacccttaatattaatacaaggagaatatataaaatataaagaaacatcttgagctcaaaaagatccacacgaatttcattcaacaatcccaatagccatatttgttaattttattttctataatcatgatttcctagatgttaatttgtccatttagccatatttggcttattttcttaattcaagaggggaaaaaattccaaacttttaatacagaaatgtcataatcttttttattattttattaaaatgtcattatcaaaagttgcttcttactgctaaagagtaacatagcatacatttattttacacacttaaatttcacacaaaaatatctcatgcaacttaaatttgtcactttatattacacttttacaacttaaaagctcttggaaaacaataaataatcaaactcaaactcagatatgtattaagaattgatgagagagagagatactttagagaatagccagggagagttcaccattcggtccaaggttccatactctatgggtgcggacaccagaatacgacaataatattagagatcataccgtaatgaggcggaaattaatattagagatctgcttcctcataatttattgcatcatatattacatctagatgaaagcctcgagtgaaatcacacacttgtttgcttcaaccttggttcgtggccatgcattccaggtcatccgtactccgtcgatacccgcgggatctgtgttggccatctcagacattttttttgtgattctagaatatttagcatcaaatatcagttcaaatattaatgggatttgttttattat

SEQ ID NO: 55700 - DNA, 1123 bp, Cannabis sativa
ttttcatccgatctatgtgattcaacttgagttttgaagctatttaagccttttatcaagtcatgtatcacacactagtctaaattctaaaactatcgtcgccaaaatttacccccatgggatttacaaaataagctctgggtaactcgcggcgggacccgccagacataaaaaattagccatcactaccaaaagctaatttttatcattagatcatcatcaacggtgagaaacactttatttgttgtttatctcctatttttgtgagcctttttcacctataaaaggagagctcccttagttctttttttacattcagaaaactacctacaaggttagagcttctctctctagactttctctttctagagtttaaagtttcttatacttaaactattggtataatttctcgtgagaattaaaactcaaagtagacatagtcccattactatcgcgacatagggggtgaactactataaattgttgtgtctctcttagtaattactttttacttcttattcttgccaatctagcgagtatgtgtggcttagaagtctagtccagattttaagtcaatattttggtgctttcattaagagccacaactcaagaaactcactaagtcaagatggttgcaacacgttctacaaatattgacagatagactccaacacctggctagtcaactggggacacaccagttgatagagttgctcccaagactactcattcaccctaggcaccaggagctggccttggaaccatcttctcatcctctccacaaggccacaaccagtagctcccaagactggcaccaatgaccagatcccacttggggagccacatgtggagatagaagaccatgaggatgccaatcattaggtagctcagctcaaccaaactgtggctaacttgcaactatagttgcgagactctctcaataagcaacacgaacaatttccacactaatttgtggaaaacggaaaagaacattgaaagccaacgtgttgagtaggaacaacaaagagctaacctgtctcatcaaatttgacaggcttatcgctttaattgtggaactaattcctagagagatattttcgagttattgagagagacaccccgt

SEQ ID NO: 55701 - DNA, 1832 bp, Cannabis sativa
ccttgaaacatgtgttatataagaatcctcatttatgttattaagaaaagtcaagaggtattcttcatcaacatcttctaaatcatcaacgtcaacatcttctaaatcatcttcatcaacatattttgaatcatgttcatcaacatcttgtaaatcatcttcatcaatatcttctaaatcatcttcatcaacatcttttgaatcatcttcatcaattatttgtttattcgttctttgtctccccaatcgccgctctaacctcaagtcatagtcattattgtcatcagatcctaagctctctaattgagctctcgttgcgctgatgtgagagttttgggtaattctttggtgattggtgcaacttctctttggtcgcttttgtagcctaacatcagtgtttttatcactacattcctggctaactgcactgctgaatcggatactctttcccttcgctggctttctcctcgctgaagtatgacccattcagctaaaacaatgtaccactagtttttgaaactttccctattaaaaccctagaaaaactgtaaaagaaaatccaaaccaagaacagaagatcagtagagtcgagaacccttacacaaaggtctaaacatgcagaatgatcgtccagggtcaatgtaggactaaaacaaacgctaaaactttggccctctttttataaaccaatatctcactctaaacctaatttctttccgccattcaataataattctcacccaaaaaccctaaattcatacatagtatgaacaaagaagaataattcacgattgtattcaaccaaaacacaccgtaatgaaaaaaaagaaaaaaccatatcaagggaaaattaaatgcattctattttgaacacaacaatcaacaaagaaaaaaaacacacacatatataactacatgcacaccatcccaatcccaatttgtagagtcttagtttaatgcaaataaataaaacgtaaaatcaagcaaagtgatgaagttgatacataataatagatgaatgggtgagagcattaactttagaatgaagaagaaagcctgagattttagggttgatggaaatgaaagacgaatgtggagctgctcttatattttgggttgctgttgctacaggaaaaacctttattattattattattattgattttgaatcatatattttctagatttatcaattacgtttttttataaatttttattttgtgtgagaattagatacaattatatctaatttctcattattaattaataaatttcatttgacatatttttttataaaagaaaattttgaagattcacttatttataaaaatgagtatttaacttattgtttgatttattttatatatacaataaacatactgtggtcaaacataacatcatattatataagtgagatatgacaataacaatactgttgaatgtaatgataactacaagtgagatacggtgatgagaatagttttgaaattatatgataagttttttttttataaatttatcaattcttataacaattcgagagatcaagcctaacattatgttatacaggtcgtgtctgactttcattataataacgaaatttgataaatacgagtttgatttgtctgttggtacgcgcctaattttttatacaataaattaaaaattagattaaaatttagtacaatatattacttagttgtcattaaataaaaattataatttattttatatatataatttaaaatttttatcgcgaagcacaaataatttaaaatttttaccgtgaaacgcaaattatttactagtttaatatacaccaaataatgtat

SEQ ID NO: 55702 - DNA, 833 bp, Cannabis sativa
tattattttatacaatagagttgtaataaatcttaattttcttccattattataaaatctctaacaataaacatttactatgtactttttgctaaagctatgggtacaaattatattagggcttaaataccacagccacaacaatatgttatgtaagtactaaagaaaacattgaatttcagttcttgttcgatcgattggtgagctagaaagttagcatatttgattgttgaagctgacatttttaagtattattttcttttcatgtgtggtctggtgatggtcttaataaattctacctggtttgaaccaatttcatcaacatatgaaattgaaaaggacacaaattaccaaataattataatatgggaatcatagctactaaatagcttggctgatgccagaaaaataattattaattacatccaaaagttcttaagctttaattccattgcctaactaattaggcacacgaattagtagtaaattaggtacatatatacatagtaaattttgtttttaaaaaaaaagattagtagtagattaatactcaatcataaaaaataaaagacacaagttaaattattattatttaaagagaaattaaggaacataaaattttatctcattttttgacaccattgctaaccaattttcatctcatcattttcttcatttttgatgatcgtataggattctataataattattcttttgctatcttttttactaatgatgcaaaaaaagtgattttttttttttagagagtgatatgaatcactctatgacaattgttgacgcagaaaatatccagtcaacaagctaattgtcta

SEQ ID NO: 55703 - DNA, 1107 bp, Cannabis sativa
  modified_base (353)..(354): a, c, t, g, unknown or other
atttatggctagccctaatattagaagtggtcattcattacattaacaaaatagtactcaaaattctcgatattttgtctggattctcgatcagttgtcaaaaatactttatcgcttgagaattattttataaaaattatttaaaaaaaaaaattattttgcaaaataatagtctactttcactactaattaaaacaaggttttgggaaacaatgaactgaaaaaatcgactaattataaattattattcttatattgtgattaaaaggtctgtggcgaaaaatattagtcacataaaaattataatttgttgtgattaaataatgtgtttttagtcacaatatttgttgtgnntaaaactaaattagtaacaacttatatctaaatattatattctagtcacaagtaatttttgttgtgaccaaaaattatatttagtcatcaacaaaattatgttgtgactaaaaaattattactaaaggtaatttttttagtgcgtgctcaatctattgtagtattcgatctgcaatgagtgcatccaagccactagaaagggagatgagaattgtgttgaaagttggttcaagaatacaatcaaaccaactaaaacctcatgaatatggatatgcaaaccctaacaatcgacatactattagagcgtttgcacattgcgaaaaatggccattatcatcccattaaaccgattttttacttcgtataaactactttgagatcgcaccttcaaactaaactcgaatagctcgatcggattatgtttgcaacgtacaccaacatgaaacaacattattttatgtagactttaaaagctagctagtcctaatctaatgggtaggttatcaacaaacaaacaagttatagttaaattgttatctctaaattataattaagttttagaaaagtgtagaagaatgtgtagataattttaattaaagggaatacatataacaaatcccatattgttaaaattataaatttcatgtatagataatgcttaagctggcaatcacactagcatgttattcctgtgaaatagtaataaaactaattataaacaattaagaataaaagatgttattattaatagaa

SEQ ID NO: 55704 - DNA, 1037 bp, Cannabis sativa
  modified_base (213)..(219): a, c, t, g, unknown or other
tcctgggtcgcaggtcctggcgcatgtcttggtccgggttcgcgtctagagctagttttgggtccaggtccaattcttgttccaaggtccttattccggttcttgttgtgaaatcgggtctcgggtccgggtctgggtttgggtcctggtctagaaatggttctaggttagggtcctggtatgattcaaagatctagacaccgactacgggtnnnnnnnaaccctaggtcgtgggtcaagatctgcatcccaatcttgggtctcggtctcgtttcgattcggatcctgggtcccagtccgtgttcaggtatgggtctgggatcgagaccggggtcgggtcttgggtcccaatcccaatcctgggtcttgattctggttctagttttgagtttgggtcctcaatctaggtctggtcttaggtccaggtctaagtctccaatctcagtccgagtcctgggtcagggacttggtccatgtctgtgtctgggttcaggttcgagtccctagtcccgatccgagttttgatttgggtccgcgtctcgatcagggtctgggtctaaggtcctagtctgattccagttcccgaactcaaacctagactcagacttggacccaggtttggggtatgggtctaggtctaggtctgggtccgagtctaggtatgggtcccaaatccaaacactgactacgggtcagttccaagccccgagtccagatctggatcacaatctcgggtcccagtttatttccacttcgggtcccaggtcctaggtcccagtccctgtcctaggttagggtctgggtctagggtcaggtcttgggtctcggtcccaattctgatgcctgtgtcccagtccatgtcctaggttagggtttgagtcccggttcagtttccaatctcggtctaggtcaggatctgtgtttgagtgttggtccaagtttgagtctgagtcttgtgttcggatctgggtctaggttctgaggcgcaggtcatggtccgggtcctaggtcccgatctgggtccatgttcgggtttg

SEQ ID NO: 55705 - DNA, 878 bp, Cannabis sativa
  modified_base (640)..(644): a, c, t, g, unknown or other
  modified_base (798)..(807): a, c, t, g, unknown or other
cgagtctcgacttcgggtctgagtctcgggtccaggtttgggtcctgatctcgggtcccgagtccagtcctggtcttgggtcccaggtctcgggtctcaggtctcgggtctgggtccgagtcttgaattaagtttttttttaaaaaataattgaaatcgggtcggatcagatccgatctgaaaaaaattaggcagggcgaagcggatctgatccaagatccaataagtatccgaatgtttcagatcagaggtaattattcggatcagagttccaatctgctccaactaaatgaatctttttgacatgcctaagatattttctattagtattaagttaaattatgccttttttcccatcttctaataataatagattcacaatttagtcacatatacaaattgaacaaaatgtaggattatatttatagtcggtatataatatgagtgactactcaataattataataatatatataaactaatcaagtccgattctcactataaaaaactattattttcagtgacaattttttagtcataacataaattttttgtgactgaatgtgacttttagtcataacaataaaatacttgtgactaaaacataatatttaattacaaattgtcactaatttagttnnnnncacaacaaatattgtgactaaaaacatatttagtcataacaaattgtaatttttgtgaccaatgcttttagccacggaccttttactaacaatacaataatgataatttataattagccacaattttcttagactaattagtaatttttccccnnnnnnnnnnacatgtactaaatcgtgctccctgaacttttttggccgttaaaaatttcccctcaactattgagattgtta

SEQ ID NO: 55706 - DNA, 2291 bp, Cannabis sativa
  modified_base (1234)..(1239): a, c, t, g, unknown or other
ttaaaatatatataagaccttatatttaattacactatgtaacttaagtagtgatacaccactaatatcctctttagcatttctcattaaaaatctgcctttatttcttttttcctcatttgaaactttgtatcgctactttgtaatcttcgatcatcaaaggccacgtcaagactctaatttgaacaacttatataacattatatatgaaaaaaaaaggaacaaatattgatcgtggcattaaattaaataagtaggtgaaagtcgaagatgattgaggaataaaaggaagatctctcgttatttgtgggaacattaattatatattcttcgtttgtgagtttttatatcaatatagagttaagtaatattaatactatagattaagatggtgagtagagtagtgatcagaggtttatttagctagctctgctttctaggtacattatgcagtcacgcctgaataaatattacagagaagggtaaaaaaaaattattttaattaattaatttggtgtggtcaatattataaattttttttggcttaagaaaatgaaatttgttggatttagaaatttgttaaaattaagctctgcaacaatatgttaattaatgataataataaatcttatttgatatctcactctttgtctcttaggtaaactattatttaattatatgaccatcttcaaagtttgaaatcaaggtgatcctttttaagctgtgttaattattttaatgattagcctccactgttagatattattcagctctgaagctgaacaagagatcttgtcccatggcatctatgtatatttatagtatatagtgatcagagagtttgcattatcttggtactatatatgtaattatatatatatatatgcattcaccaatatgctatgtatgaaaatgacctttccttaattaggagatattgtgcatgagttgtgtagtctcaagtggtggtccttcattctctttggagatatatatagataccagtcaaagtttgattttgtttaatcaattaaattttcagtgaaagagatatatatatatatatttaattatttagcattgctattagacaccagtggtgcctagcaccttctctacatgttgcgttgcgattgactagcgaaacttcttaaaagctattatattaaattatatgggacccgatacttagttgcaccaatattgacacgtaggagggtgctaggcaccactnnnnnnctttagcatttctcttaattattattaagcttaattgaaaatatatgcaaacacaacaaatatgacactgacacctcacattttgtgaactaagtttcttttgtttattaacctttctggtccttgattgtaactcgaaatttcttatttggtctacaaatttacttttatgtttttgttttgttttggtattatcaacatattatgttacacataatcaggttacttattaaccaagtcttttagtaactttccacttccatcaaaatcgatataaggaaaaagcacaacagatatagagaaaacgcgtttttgatggatacatattaatatagtaaaattttaaaaaggaacataatattaatgatgtaaaaattgttggaacataatcaatacattttttatgacgtgattaattggggtggggtgagtttgcggggacccaatttctctatatatataactaattaagagaaaaattggaaaagaagaaaagaaaagaaagacccatcaattgttctgagtgagttgggaaagtcgttatagttcaattgattgaataaatatataatgtatttatttatttatttattgaattagtggatgtgtgtttgtttatttatgaaccaatcaaggagggtccaaaaagctccaactttatgtaataatggacagaatagagtgatgagggaatgttttgtgggtttctaaattcccatgcagttgttgatgtttgttgtggactagatagtagtagttgttgttgttgttttgtagaataataataatactgaaagcaaagtaaaggttttgaagaaggtagagattggtaatatctatctatatctcactgtaatgataataataataattataagaggcaaaatgggggaggctttattcgatgtcgcttgctttgctttgctttgctttggtttggtttgggtccggaagaaaatcgtacacagttcccgattcctttgacagaccctttctcttttcaggtctcgtttttggtggatcacccccatcactcaccccctactactact

SEQ ID NO: 55707 - DNA, 1201 bp, Cannabis sativa
aacctatatgatacccatattgtccttattcccaaaaaatcaaagcctgaatctatgagtgatcttcgtcctattgctctctgtaatgtgatctataaagtagtctcgaaggtactagccaaccgtttgaaaggtgttcttcatcaggttatttctgaatctcaaagtgctttcattccggggcgacttattactgataatatcttaatttcctttgagattatgcattacttgaaacggaagagcacgggaaaggagggagttatggctattaaacttgacatgagtaaggcgtatgatagggttgaatggggttttcttcaggcaattatggagaagatggggtttagtgaggaatggattcagctgattatgtgctgtgtaagctcggtctcctacaatatcctttcaggtggaaaggagttgggtcctattgtgcctaaacgaggtctaagacaaggtgaccctctatcaccttatctttttcttctgtgtgcggaaggtctttcggctcttatctcagattttgagaggcgaggaaagcttaggggttgtaaagttgctcgtggagctcctgttattacccacatgttctttgctgatgatagttatttatactgccgtgctacggaggaggaggcgaataatgtgattgagcttcttcagtgcttccagttggcctctggacaacaggtaaatctgaataagtcctctgttttcttcagtgccaatactgggatggatattcgtgcaagaatctgctctattctgagggttcaagaggcaggagatacaagtacttatctgggtcttcctaacatcttgggaagaaataaaaatgctcttctgggtttcttgaaagataagatgaggaaaaagattcagagttgggaaggcaagtttttgtcaaaggcaggtaaggagctcatgctgaaaactgtcgctcaatctttgcctagttatgccatgaatgtttttttgcttcctctgaagactgttaatgaaatggagcagttaatgtgcaagtattggtggaaatcttcttcacagaacaataaagggattcattggaagagttgggataagttgaagattcataagtcaaaaggagggatgggatttagagatcttcatgattttaatctctccttattgagtaagcaagggtggcgtctgctgtgtaagcctcatactcttgttg

SEQ ID NO: 55708 - DNA, 3102 bp, Cannabis sativa
  modified_base (115)..(115): a, c, t, g, unknown or other
actgaatgacatagcaatgtatttttgaattccataaataacagtataataaatatttaaatagctataaataatttccataattaatcattattaactgctaatttccaaattnaactaagcgggctttacaatcactgtattattaagtggcttaaaacaagtaaatactgtcccatatgtagatttccaattgattaaatatatcctactggattatattatatgtcttatatgatttcattataattattactattggcattaatatcagtaattaaataaatatctatttgaatactacttactgcttaaataatcttaataattttgtcattgttaattggtataaaaatactttattttaaaaaatgttatattaaaataatcaaactttgccatttcattaatatatgggaagatgaaggattgctctaataaaaatttgatataataaatgatatcttaatttatagatggactcttgagtgtcacatactcaccatttgtttctacaatataaatacaaatttctattgacataatattccacatcgaaagagggaggtatggacaatttagaagaaataactccattaatctcaacaaaaaaagatgtggaacaaatcctaagacagctagaggatacaaagtatgacatggatacatgtatgttggatattagtgcagataagaagaaattacaaatattgcattcaagaagcatccatcctctaattaatatttcccccgtatgtgagttgcaaaagcttcaaaatgaatcatgcggaagacttctttttgcgttggaaaaagaagaatactacatccgatttgaactcatcaagcttgaacgagatatcatgttctacaaatggtacaagaagtactttgctaagaaagtataaattagaagtttgtatccatcagtgggtgtgagtatataattatgtatgttttgtttgcagtgaaaaccattatcactgtatttttttccttttttttttgaaacatcgctgtattttttttcttgaatgacaattaatatattattgggaaaaactaacattttgagttagtattttaaattttggtgtgcgatactatgcattgacaaaatatcatgatattaataaaatcattatatcatctccaaaaaaaaataggtgtaaaaaaactgaaaaattttataatagcctttttcggccgacttcaatgaaatattgaaaagaatcatcttcatgattaaattactttttaaaaacaaggaaagaaaaacttttgggttttttattattttttatgcttccaataggtgatatgatagaaaatcgtgttgatcccactacatgtcattgacattcttttttttttttttttaaaaaaaatatatatatataggtatatctatttgcaccctcataaatacaccctgctattaaaaaaaatataaacttaaataacttttaaaattttcttttaatattttcttttaattcttttttctcacattactttatgttaatttcatatttattttgattttattttcataatgcttttttaattcatgtatatattgttttctaagaaaattacatgtaattttttatttaatttttttgtcataatatttaaaatataatttattttcgtttgataggtatattttttaagaatatgaattgaaagaaaaaagttgaaaaaacttagtacaattaaagatatacattttatataaaataaaaattatcaaaatggggtgtatttataaatttttggtgtgtaaataaaattttccatataattattgtgagttgtgataatattttttaattaaaacaaataataaattaaataataatgtgtgagatcataattattgagatttttacccccataaaaaaaatttaaattggagatgctctaaggagctccttatatttttaatagtactatttttttatacaattatcttaaattaatttttaccggacaaattcaaattataatagagtgtcattggtaatgccatcataatatagaattatttaacattctactttgagtgtaaacattaaaggcattatccatatgaacaaagaaatacagtatgaatatatttattcactcgaggtccatttttcactattatgtcacattattgtattattggtaatatgaacaggtaatctttttgggtacataatgggtgggttacacgaaaagtttgatttttagcttcattaatgtcacattaattatgatatctcattggaaacttaattggtgtgttacgtctatatcttgggattgttacttaattactttataagtaatgagtaagatttttcttcattaatatcgacacaatcgattggttttctcaatgtgtttctcacattatatttaagtgaaacaactttcctctcgtgtacgtaacaagtgtacaatgggagaaaataacattagatcaaagattgaagaagtaattcggacgagatccctctcagtgaaaaaagaaaaatacttaagtggagagttgtatgttctaatggatcaaatacaaatacggcttacaaaaatagacgaagaattgtttgcaatgaaagaggtggttactcgtcattcgttctgtccacattggaagcatccatctatagagactctaaaagtccgtgatcttcaacaagaatatggtaaaaaatacattgaagcgattgagaaggagcagagttattggatgagaaaaaaagtggagaattcactagaacttatttatcatgaaaacttgttgtactcgttcctaggatatgtggtgtaatctatttgatgatctaatgaatttattatcccttctggctaagcttctaaatttgtcttatttttacagtttggataactattgtataaaaaactttttttaatgaaaagttctatttaaagggtttggatatcatttgtttaaaaaatgcacataaaaccttaaaggaaattttaatgtctcataactattgtagacggtctttctcgaactatgtgtagacggtctttctcctagctatattgtaacaccctaactaatttaggcgtattacgtga

SEQ ID NO: 55709 - DNA, 903 bp, Cannabis sativa
atgcatggattgcatttgagaatttggatcaagatacctgtagggagtaccacggctataacctgttggtgtttgagaatttggaaaatgatttctgctgacaaaacttccctgagttggttttgtgtgggctaaatttgcttcacttttgttgatatccagggctttggtgtttttctcaatgcgaaccgattgtgccattaaaagagcttctatttctgcaacaaaataggactcttttcttgttgttacagaggtaacaaaaacatcgtattcaggaggcaaaccattaaagattgcttcgatgtgatcttgggaagattgcttgtgtccaatggtagcaagaagatcaattatgcctttgatctttagaagataatcgtttaaagaaccagtcatcttggtgttcctgaattgagttttataaagaccaatattagcagaatttaaagcagtataatactcactcagggcttcccagatttgagcagtagtctcacaaccgatcatgcgatttgttgttttctcggacatggatgagagcaaccaagaaaccagtaagttatcttgttgctcccactcttcgaaagcagagttcacaatgttgttctcttcatcatctgtactgagaaattttagaggaattttggtggcgtccaggaacatttgtaggcgactgccttttattgatgcaagaacttgatgtttccatgacaggtagttatgttcatcaagtttaatcgataaagaatgagagaacgaaacaggattagaacagggaggaaggcatggttcaatcttgatgctcctccattgccggttgctgaagctttcattgttgaaagaattacagctctgataccatgttagattgtatatacagagagagaacgagagagatga

SEQ ID NO: 55710 - DNA, 622 bp, Cannabis sativa
  modified_base (74)..(83): a, c, t, g, unknown or other
tatacaacaaaattaatatacaattcaagtttttttattttattttctaaatggtataccatagtatagaaaannnnnnnnnnataatacaaaatgtatataccaccgataaaagaatttgactgagactttagttcttgttttgggggtaattaattgtaatttggaaatgtgagaaaactagaagaagaaaaaaatgagcagagcttcatcgctttcgattgtgagtaattaaggcaaaatatttggatccaacgaatgaatcgaataaatggatgagaaaaatatttcatcaccttttgagagaaataacgataatttaccaaaaaaatttgaagaaatccaaactaatcggaaagaataaggagaggtgtcatttagattttggagcacagtttctgtttctatttggagaatgaatataatgttaataatatccttatataactaatggtattttaggtactaaaaaaaataaagatcatttcctatattatttttaaaaatggacattaagcttgagtaaaaaaggataaaaggccatttactactatttctctttaaaattgagtatttatgttctacatttatagaatagtattcattgctttaaatatatttt

SEQ ID NO: 55711 - DNA, 1264 bp, Cannabis sativa
ttataattataacttaaatattatgaccgctaaaaattgaactgtattaataacacaaattatttttcaaaaaataaatattggattctatttattatctattaatagtaaaaacattagatttaaaaaaaaaggtaaaaaaattcacaatgtcacactcaccaccgcctcagtgaatctgaatctaaaaaagggaatctttcagacgtaactataatctcacacgcaggtgaccaaaacccgaaccgactaaaaactctctgtctcaaccattggctcgtcacctcacaggcaggtaactttgtcaaaaccccaccacccaccaacaacgcagcccacttgcataaaataaacggaccccacttaacgtcacgtgcaactaaatcaaactaatcaccattaactcaacacgtgtcactatcgtattcgtcaataaatatattaattttttttgtttccaatgcaacgcattacgtgcttttatcgtttatttttttttttattataaaaaaataaataaacaaatcaaataaatctctctgtatcccacaaatctaatatttaatttatttatataaatatatatatatatatatacagagagagtgagaatcgaatcgagagtaagaagaagaagaagaagaagacaagtatggagaaatatagatttgaatggaagattttttctcttataatgatattggtttcttatttgttgtttgtctacgttcaaagctataattccaaggttagtttttctaattcccttaattaatttattaattaattacttaataatctcaattaatatgtgtatatatatatataatcagtatatcacttagaagacgaatatgaagttttgtagatttcaatggaatattcaatatttatatattttttaaaaaaagaaaaaaatattatatttttttttatcatgatattatttaatgtatcatttctagtttttttttttttttttaatttatattacacaattctttgaatactttctttttaatcttatcaacaatctttcttgtaaatggttttattttaagtagtgatacgtttaactttttattataatttttttgttcgaaaatatatgtagaaatattttttaattttttttatagtggtattttttattattacaatattatctttgttaattttttattatttttttttttttttgaatgaaaataataactttattaaatcatcatctcagttaccaaactaggcaacaaatcagttg

SEQ ID NO: 55712 - DNA, 1209 bp, Cannabis sativa
ggttaataactggccaaatcggaacttgatttttttttataacaaattacaagttattcttaaatagagattctactgtatttatgctctcttttcacatacaggtaaaactgagagagatgaagccatgtatgctatcacatgaattaaaaaaagctcttggtatgccagatggtgcacctcccccatggctaatcaatatgcagatgatatggcgaaatttctttcatggtatttttaaatgcagtttaccaatactatgccttattttcagtacttcattgtttctctttctgtcgatatacccattcctggagaagggtattcccttttttcattaattatttgtttcatcaattggatatttttgaaagaattaaaattataacaccatttgaattatctcattaaatacctatagcataatatacgtcaaaggtgacaaaacttccattatacatacaggtaaggaaataggctgcaatctcaaatttttccttcccttggaggggaggaatgactaatctcaagtttctgttttaatgtatatgatatatgttctttggaatggggtgggtgttcaatatgtggttgattttcagattgtaatttttttcacttttatgtttgttagacttacttggttggttggttgggctttattactgaaatatacacttagtggggcagctgttgctagaggaatatctccaaattttgtatatgaatttcttaaactgtaaacgttttttgttttgctttgctgaatttcaatttgaataagatttttttgtcaatactgctataaattttgtttcgtcgtttttgcgcagtctaaaatttatgatattagcaattggtttcttacattttgtatgaggtaactttcttttaagtctttctgcttgaggttatgtattacccacacttcgctatctgctcttttaatcttattatttacttaaaagactttacgcttttactttctaggaagagcctgtggataagacaataacactggggtgatttggaggaggaagaggaagaagaagaagagaaggaggaagaggaagaaaaccaagttggggaagatgaattaggggatggcattcaatctgtggaaagcttctcgaggtatttaaatttaagctttcttttgatttgtataattattccagtataaactacaatcttattggatggcaaacc

SEQ ID NO: 55713 - DNA, 1181 bp, Cannabis sativa
gagagagagagagagagaagagtttgaacaaactcaagcccttatttacaatgacacacactctcacttttctatgtagctactgactagcaacattagtctttatatattgacccaagtgtattcgaaccaacaaacttaacagaatttaactaacaaattctaaccccacatctttatataaaataatcttaaaacaacaaaatagaacaattaaaacaacagtggaataactaaaaaaacaaccgtagaacaacaatgaaaacctaacacagtacaccatataaaaaatacacaatatttttgaaaaaaaaaaattgtccacaataaaaaagaaaaaagttaaaaattttagtatgtagtgtaaaaacctcactaatctatacatggttttagaattacacttcttactaactttagagactttgctcacccaaaaaaaaaaaaatagaaataattacttaaggtaccattttttgtaaaaaaaaaatacatttttatgtttaaggaattttttttttttttttacatttttacgatttttcatagaaacaatataaaaataataagaaaactatataaaagtaatatcaaaataatatcaaaacaacaacaaaaaataacatacagataacaaaaatcaacaacaaactaacaagaaaacaacataaaaagaccatattttctttaaataaaattaaaaaaatcgtaaaaatgtttaaaatttcgtgaaattgtatttttgttatttttgtgtatttgtgaaataatcccaaaaaattaagggattttttctataatatgcattttagactactattttatatttttaccctagtaaggaaaatttaaaaaaaaaaaatagaactttttttttaaaaaatacggtcaaagatcccaatactagaaagtggcacgttggccaaaaattctcaaatggaggttaaatgagagattgacacatatttgtcgaaaggtcccaaataatggaggttaaaggggagacagaagtttttttttttttagttttgatatcatgttagaatttgataaggttcataggattctatctcaaaactaattgacaatgagatgagtagttcattcatcttatatatgatattttattttcatacattagtaatgtggaactaacgctaatactgtttggcttagttttt

SEQ ID NO: 55714 - DNA, 706 bp, Cannabis sativa
aaattaaaagtcacccataaatttctcaaaaaccaagaattttagttatataggcacactttatatagaatagatataaacataccaaatgggatgattactaatatatgtacaatttcatgcaacaatgtatctttcatgttatataaaacttatccaaaaaaagaaaaaatcaaatttgtaatctttaaatttgttcaataattttagaattgttacatactaattccataataaaatagaaaagaatggttttttgttcttaaatcttcaaacaagcccctggccagaaacggtttgatcggattgtattttattactgtcatttaatttttgctattgtgattaattttgtttgtgtaacatgcttttgaatattttattattgtttctgtgacatatttttgagtattctagtcttgtttctgcgacatgttttttagtgttttagcattgtctctataatatgattttaaatattttaatcttgtttgtgtgacattgttttgagtatttcaatcttatttatgtgacatgtttttatttttttgttgattttttttttgttcttcaatgcatcgccattatatcgttgttagtgattgggaataataattttttggctaattaggaatttttttccccaaactttgacatgtactaaattatgccccttgaacttttaaggtcgttaaaaattccccct

SEQ ID NO: 55715 - DNA, 1316 bp, Cannabis sativa
  modified_base (298)..(303): a, c, t, g, unknown or other
  modified_base (371)..(371): a, c, t, g, unknown or other
  modified_base (748)..(763): a, c, t, g, unknown or other
aggttgggatccatgtgtcaagcttataaaaatttggacaacataattgattaattgaagtcatttaattgagtctacaagcagtattaactagtgtggggaccatgggcctatataatcaagcttctaataagtagagctagaatttaacaattaaattctgtaacttattaatttctcatggcaccactatagatttagaaatgcactcttaataatatagaacgctctatatgttcaaagatatagacatgctattaattatccatcgttctaatccaaataatcaaagatcctnnnnnnatgatttacatcgagtatggacaagtttattgttctaccccttattatattttatccttaaaacactnagcttcctataaatgatatttcaataaactaatataattactgaaatcagagctcttctctttatctctatttagccaagctcgaaggaaatcatcatttcacttctatgtccagatagaaactatatattccatatctatgattaccgctcccactcaattatactatcatgttcccaagatgtatatcttggtccaaaacaattggttagctttagcgaacaactctaagaacacaaataacacccttgaggtcgaacctaagcatattaggattccagtcttttgatctaagatcaaccaattgatattgaattagaaagatataacggtaagtttatgatatctttagcaagttcaatatcagtccagtccannnnnnnnnnnnnnnntccgatactagcatactttaccaataccatggaatggaaataatacttatccaaggtgtaagtaaaatttatccctgattatcacgtaagtgtaaatctagtgcactgatgaatcatgagacataatcttttgaagcttataatcacaattaccttccactgtgttgacgtcattgttattgtgagttagaatatgttctgtatttaacaaaaattgtatatcaaacaataagcatgaaacttgatctccagaaagcctatgatattattcaaacttcctactaagttcattcaatggtgatgaactatgctaggactcccaagttttccattatgttcaatggaataatgcatggattttttgagtgaaaaaaggaactgagacaaggtgacccgatgtgtcccttgttgtttgttttgggaatggagtacttgtcaaggatcatgaaggaattggtggcaaacgagatttctactttcatgactaatgtgctgagctacaactcaatcatctcaaatttgcaaatgatgttctattattctgtaatggaga

SEQ ID NO: 55716 - DNA, 919 bp, Cannabis sativa
tcccatgatttgtcagtacactagatttatactgacatgataatcagtgataaaatatacttacaccttagataagtgtcatgtcctttctagggtttgacatgatagtcagaccgtaagatcgttgtgaaatacccgctaagtaggagaggcgtccaatatttactgcacattgtgctggtaggtcctgatctataacgatcaagtaagtttgaaagcataacgtcatagcactccaaaggtttatttgagcgatccactgagtagaaagtttctgctacctaattggattgtaggattgttctgaaataccccctaattaggagagacgcctaaaatcgactgcacattacaccggtataggccctgatctataacaatcgagcaagtttgaaagcatagcgccatagcaatccgaaggtttatttgagctatccaccgagtagcaattttctgctacataattggactgtaggatcgtttcgaaacccctaattaggagaaacatctaagatttactctacacattgcgctagtaggtcctgatctataatgatcgagtaagtttgaaagcataacgtcattaaaattatttgagtgatccaccgagttgcaagtttctgctacctaatcaaatcgtatgatcgttctaaaatacctcctaattatgcgtccaagatttactgcacattgcattggtagatcctgatctataacgatcgagtaagtttgaaagcatagcgtcatagcaatccaaaggtttatttgagcgatctaccgagtagaaaatttctgctacctaatctatagcgatcgagtaggtttgaaaatatttagttttgatcgaattcaaaaatatcactaaaatatatgtatgccatttgtagaaatgatacaattttaatgacaaaagtttaaa

SEQ ID NO: 55717 - DNA, 916 bp, Cannabis sativa
caatacgacctaatacgacgttctaacgcaagacgactactctcccaagccgtcaagtaggattatgtgctttgactccgcagtctcctcccatcactttgctccatggagatggtatcgctccagaaatcattccggttgctaaaactattattaacctcactgcctctttccatggtcaatatgatctatttttctcttttaaatttcatttggtacacttgtattttcacgaaagtgtaaaaagtctcaacattttctctttgttgataattttggggatttctttttaatttaaatgtaaatgctgacctttaaggataaattgatcatgcgaaagacttttacctcaactgcaaccacaaccaccgacgactcccacacaccatttccgtccacaggattgagtcgtatggctgagctctcatcgccgcaaatgaggctgaggttggaatcgatttctatggagtgttggaggtgagtcttgatgaaatgcggattgtcgattagggaacaccagggcttcgaaacacacctgtctttatattcgaattctgccagctctttattaaaaatttgcttgacaaatcaaacaggttttagttttcttcttcactttaatctattggattttcattgaaatgtattttaccattgaaatggattttcttctctttgttaagttttaagtttctttatgccaaattgtagtttcttgcatttgcttaggtaattattagaattagacttttgatggttattgaaattttttaaccatcaacctcttttggtatcaaatggaatctgacatttgtaaaattctgaccaaaaccataactactctcatttcaaaccttatatttcaggatggcttatccttatcgatataaattgtacaagagggtggatgaacctt

SEQ ID NO: 55718 - DNA, 1357 bp, Cannabis sativa
ggtaaaataattcccaacaacttcccacattccaacaacccctttatccacctttgcaccggccatactctcccacacctctagttttttccaacaaacacatggctacgctgctgttgataaggaaaattcagagcccaacatcacacccaaacgaccaagttcaaatctctccttgcgaaaaatgctcaagcgctgccgtggccttgatggttcaacttcttccaacccgtcaatggaagatgttcaagaggatcaagtttctattatactggattcgaacccctcaatcgactttgatgcggaggttgctttgcaaccccgcaactcattatgaaactcataagttggaatgcgcggggtttggggaacccgagtgcattacgccatctacgattgcttgttcaacaacaatcgccccatgttttgtttcttatggaaacaaaactcgctgataactctattacaagattgcgtcatttgttaaagttctctaacggtatggaagttgctcggattggtttaagtggcggcattatgcttctttggtctgatgaaatagatgttactttgctgaatatggggccgactttttttgactgctacatgaagttcaatggcagtccaagctttcactttacggggttttatggggctcctgatcttgctagtaaatctgcctcctggactctttttcaacgctttggtgatgttgctcctctcctcccatggcttgcaatcggagacttcaatgaaattttatctaacaatgataaatctggaggaagtttgaggcgagagtcacacatggaagcctttaaaacatctttagacaaatgttttttgcaagaagtgccttacaatggtgatcctttcacctggacaaagaaccgtactactcctcatgcacttaaagaacgccttgattggtgcttcataaataataaatggtcgtctcactttcacctacccactgttgatcaccttgactatttcaactcagatcatagggccatagctgcgagtttttccttcctttctcagaccgaaactccagcaaggagtaagagcagatttcgttttgaaaagctttggcttgctgacccagaaagtgctgaaatcatcatgaaaagttggaactccagcattatttctgatcctattactgccgtgttagacaacctcagcacttgtgcaaaaaatttgcaaagttggcacatcggaaagtatggaaaaatgaagaagactatcaattctctccagtctaaagtggctgacttgaataactcaaattccagcagctccgatcactttcaagagttacaaaatgcaaaaactgtccttgaggatcttttgg

SEQ ID NO: 55719 - DNA, 938 bp, Cannabis sativa
tggtcttagttgttcggttcagatgttatttgtggggttgtttattgatctgaggttagttacgttgggaatgtgtatgaatataaggactcagattgaaaggctattgaagcaaatattgaggtagacatttctcttatatagggagaggaacttttcgaactagctaaatccttgtactagagcttttcaactataataaagatcaaaagatgaattggaaatacggagattattagattttatttatttttttgcccaatgctacaatatttggggactaggaaactatagcaattgctgtgagggtaattaggagggactcgaatcttataccctgtgggagtaaaccactactgtttgagctaccctttgtatgaaggagactcttaagaaattgcctcaataatataattaatggagaattacattcaaggccattatggagcactaagtcaatgagtagagcattgcattcaactataatagctttgatttaaggcttattgaggcaatcaaaagtaagcagcaaaattcttttgtgtaggagcatttggtgtaaaatcaagtttcaatttaagaaaattatgtgctgactgaagagaaatagatgggaattaattcagaaggatgagaaaagaaaaaatctattgctcgagggaggtcttgccttgaatagtagaattctgtgattgtagtgatattttacacagttgattttgccattgactattgtaattttgtctagttctcaacgtaaatcatagtattgtgagttttcttaattatctttcatttatttttatattgttagtcacattttttggccctaaatttcctttttgacaaaacctccatcatcaatattaatttctctttggatagttttataatcattagtctttaataaactaaaactaattttctcttatcatctt

SEQ ID NO: 55720 - DNA, 1552 bp, Cannabis sativa
gtaaacaaatgtaagggaatgataaccttactattgattcccattacttattagtaaacatgccattaatggcattccttataaaattggtgggagaagttctccctttcttttctcccttggttaatcaagttctctctttcctaattttaataatgtaagtaatcaaatgtacgagaatgattaccttaccattgattgccattacttattagtaaatataccattagggttttaggttttagcgtttgaggttttgtggtttggggaatgggaatgggaatgggcatgggtcggggaatgggaatgggccggggaatgggaatgagaaagggattgggaatgagattgggcaatgggaatgggagtgggaatgggaacaggaatgggaatgggctggggattgggaatgggaacgcaattgcgaatgggaatgggaatgggtcggggaatgcgaatgggaataggaatgagaatgggtatggaaatgggaatggggatggggatggtaatgggaatgggaatgggaacgggaacggaaataggaataggaatgggaatgggaatgggccggggaatgggaatgggaatgaaaatgggaatgagaatgggaatgagaatgggaataggaatgagaatgggctggggtatgggaataggaataggaatgcgaatgcaaataggaatgggaatgggaatcagaatgcgaatgggaatgtgaatggagatgggaatggagatgggaatggaaatcagaatgagaatgggaattggggtttgcggtttggggtttgaggtttacggtttaaggtttagggcttatggtttagggttggggttggggtttaggggatagaggttagaattagggggtagggtttggggtaggggtaggggtttgaggtcaggggtcaggtgtcatgggtcagagttcagggttagggtttaggggaatgggaatgagaatagaatagaataaaataaaatttaaattgcttaaaaattgataaaaaatattttttttttcatgttacattggaatggtctttccttctattttaaaatagaatattcattccaacaaaatggtggaaagtgcattccattgaaataacattctaatactttaaaatgcaactaaacaagagaatggagtgaaaatgatttcttttgcatttgtgtgttaaatcaatttaagtttaacatgttaattaattttttatttattaaaaaaattaaattttaactgagtaaacaaaagtaatatatttaacataaattaaattaattgacttgttagaattagattggtttaatttttaaatgggaattttgattcgagtggaaattacacattttttattaaaagttacgactgtttcttaaaaaaatatatacggtatactatacgggaaaaagtgaaaacaaagtaaacaagataaaaaagagaaaattacactctatacccactttttgtttcatattttaatttttaccttcattttactactctttaatttatacccacttttataagttatattcccattat

SEQ ID NO: 55721 - DNA, 2187 bp, Cannabis sativa
tagtgatgttactccagattttaatcatataatcactttagattgcaattaataaagatgatgattttatttaaaaaaaaaatgcttgattttaatgattatcaaaaataaaaataaaagaaatagaggagagagaggcagagaggcaagcacgcaacaaaagagagaattttatgcaagaattaatacaaaactcctgatttgccgctccgtaagagttggcctaaaccaatcacacaatagaagaaaaaaaaacaagttagtgggaccccatcaatcccttgagcaagaaaaaaataaaaataaataaataaataaacaaaaaaaaccgaaataggttgtcggggtggctggtgggagagaaagaaaataaaattaaaataaaacaaaatacgtaaaaatagtgaaagagagagtttcctgaggaaggagacccaaaagatggtcgaagacaacgtgctctgagatcatcctggaaaaggcagtaatagagaagaaattaaaaaaatacattttttgaaaaataatatgaaatcaaatatgatttcatattattttttgtttgctgccttttgagtctcaatctccacttctatccccagaaactttggagttctatttcgatttcaatttcaatttcgttcattttgtttgtttccagcaaataattatacatatatatattaatcttaataaaataataaaaagtttgtgttgatcaacatcctttttggcccttgtgcatggtaaagttcactattttgtgtctctatctatctttttcaaataaatgtctctcttgttactttacttttttccttaggggatagcttgctgaagagggtattttatagattcttgttctgaattctgtttctatgattacttttcagcgtcatcctagcggtactgtgttctgcatttatcgatgaaaagggtgttgtaaaatcgaatcaaaagtcgtaatgatgagggatccacatgtcattatgattgttcgacgatttgtttataacatagtttttgtttaggtagctttctttgtattttgttaccttgtttgaagagaaagaggacgacaaagaagaaagaagaaacgggtaaaaggaaataaataaataaataaatcaataaaagtaaaagaagagaaacctggcgattttgtatagtacattgtgtagcgtcgtggctttcagcggcaatagtcactgcctctaccattgtagaatcaggttcgtcaagctatgggggatagatggaacccatttggacttgggatttcctatttttttgttttgattctttgttcaggacatcgagtatgttggtcgcttaacgatgaaggtaagcacgcactttttgttatctgggtctgctgtttgttctttttcacttcatcatttggttcaatgaaatgtcgttttgaatttgagctgagatacaggtgtcattttgctcaaattccgggttaggatcaattcagacccatctgggtttttcgagaattggaatcctaatgatgacgatccttgcttttggtcaggagttgattgtgtagatggcaaagtgcataaactgtaagttctccttttctaataaaagagcgagacagagacacacatacataagctaatgatgattactgctcttagttaattttgtcttcatcacgttattaattgtaggagtatgagtaatcttgcactggaagggactttggcacctgaacttgcaaaacttagtaacctaaccgctctgtaaggattccaatgacttcattatatatttattgctaaaacttgtgtaaaataggattttcattgtcatgatattgatataggttacttttatcctcacaacattattgaagtaaattgataaattaaagactaaagaacaagctaataaccaactaataagcaaaaaattagagcattcctattaggcataaggttgtaagatttaatatttatttgcatcaataaggatatgatatctcttatggtgctccgtaccagtgcccttagcatttctccaaaaattaatatcatgatggtttggttttacccctaaagtctttcttttagtaactgatttatccatgcaaaaatatcattattctttgctgaaattattcttggtttcttattacagcataacattttatcctactttgccaactctgat

SEQ ID NO: 55722 - DNA, 804 bp, Cannabis sativa
tatgtcgatgacatattggtgacaggcccaaatcaacacctgatttccaagcttatcaaatatttgaacatggtgttctctctcaaagatctcggtgaagtccattatttccttggggttgaaattgtgagaaaccaatctgggatgtatttgtcacagtccaagtatattacagatttattggttaaactccaaatggaaggagccaaaccgtgttgtaatcctagtagcagctctactgttaaacttagcatcaaagaaggggaaccattagctaatccatcagtgtatcgaagcactataggtgcattacaatatctcagtttcacaaggcccgatattgcattcatcgtgaacaaactaagccagtttcttaaagctcctaccagtttgcattgggaggcatgtaagaaactgcttcgttacttaaaaggcacaataagtgagggactcctactcaaacctgtctctgatttatctattcaatgctattcagatgccgattgggcgagttgcattgatgataggagaagtacggggggatatgttgtgttcttaagtgggaatttggtctcttggtctgttaagaaacagcaagtggtggctagatcaagcaccgaaagtgaatttagggccttagcaaatgctgctgcagaattaaagtggattggaaatctggtaagtgaattaaagttctctcaatctcactctcctgtcatctggatcgacaatcaaagtgctactgcacttgcggcaaacccggtgtttcatgccagatcaaaacacatagaacttgaccttcat

SEQ ID NO: 55723 - DNA, 1427 bp, Cannabis sativa
  modified_base (41)..(46): a, c, t, g, unknown or other
tatttttggagatatagtgacacacaaaaagtgccactatnnnnnntatttttctaaaaaaaataatatttaattattttaatataacttttatatattataaataataatttatattaattatatacaaatacaataaaatataacaataataattttaattaattaaacaatattttgtattaatcattttgccaaaatcaccagagtttacaaatgaacaacttttttaccattactaatctttcttcatacaaagaatctaaatgtatgaacccaaccaaaataacacttgatatcaacacttcaaacccagaaaataagaaataaaattaaaattacaactcaaacctagttacaaaatatatttctaaaaatcacatatataatccaggaacatattgcccaaagaagatgaccaaccctaaaaccaaacccaaatacatgaagaagcaaactcatgcacagcagtaaccagcacaagttaaacaagtcacagtgccaatttcgatgtggaaacccgcgggtgcttgtgcgtgagagagagagagagggagacccactatcaaatatatagagaaatgcctgcttcaacacaattaagagaagaagaaagaaaaaataaaaatcaaatctttgaagaagaagaaaaagaagaaataccaccccccccaaattcactataataaaaatgctatcttatccatccacaccaaaaaacatcaacttgggaaaatgtatgagaaagcccaatattaacaagacaatcactagttagagcttagaatcaaagaattccaaagattctggtttcaaattccaagcagaatttaattttatcttgttaactaccaacaaaaacccagaataaggaacgagccaaagttgcaaacaaagattcccatgtgtttactaatcaaaatcacagagaaagaatctgacaagaaatctagcagtcgagatagagttagtgagtgagtgagagaccttgaattagaaagcaaaacaaggaggaaaccatatgatgatgatgacgacgacgttagtggttcgatgatgacgatcacgatgaaaccctttcaagagcttgtgttttgtattggcaccattcagaccttcatttcaaaccatatgcttaaggaagaagaacatgttggcaccattcagacctccatacacaccaaattttggacggcaaaattttttctggtgaagtctgccgtcggggtgggtagagcgcagagagagagagagagtatcgattgagagtggagggttaggtttggggctttagggtttcatactatcatttttatatcccatttatttatttagttaaataaataaaattaaagctttttttaaaaaaaaaaaaaattaaagaaattaataaattaaataactaatactctgcattttttattaac

SEQ ID NO: 55724 - DNA, 1147 bp, Cannabis sativa
aagtacaataacgggacaaaatcatatccctatatatatatttcaaaatggtacgaaacagactatgaacaggtaaaaaaaatgtaatcaatattgtaataacacctctaaataaaattattattaagttttaatttgacgaaaaatttaactaagggtctattttgtgctattttgaaaaatacaaagtatgaattgtcatttaataaaacgtaaagtataatcagtaacttttacaaaatatttatatttaccctattttaaggtggtaagtaaatggagggtctgcgtgacgtatatacaggccaaaattattcatcaattaatttgatcagaagttattgatcgaaatattagacgctaatgatacttaatagttaatactatttagaggtggcgccttataaatatacatagttagcaatgttttatgatctgatacttaattacacaaataacaatataacactttataggccggtggccggtgatgttaaacaccaccaccactaataccttttaacatttctctaattatatgcatatagcaacctgttcattatccttaaacttctacagacaaacgatattgatatatatatatataataaatattattttgtatcatatattttacaaaggttattgattgatcttttgttgtgataaatgataaattgaaccttagattttccaaaatagtattaaatagtaccctgaattgattttctgtcaaaataaaacttaataataactcgatctagaagtgtaatgacaaatctagttacgttgtttgtgttaaaaattatcttcaaactagttacatatgtatttaaaaaaaatcaaaaattaagctgaaggtcttatttatatactattttgaataagtacaatttttttttttacaattgaacacctattctttgagtgtccatgtagtcaacaatgtttaaaggaggcgaagcaatggcttgattaggggatccaagctgaaaatttgaatggtatcatacggtgaaaatggtaatggcaacaactcttgcatccttagtatacacactacaaaaaaaacttttagtcacaacaaaatttgtgattaaaagtaaaaaagttgtgactaattattaattattattcttatgttgtg

SEQ ID NO: 55725 - DNA, 527 bp, Cannabis sativa
gaagaaaaagaaagggagatatcggatctccctgccgaattcctctcttcggactgaatttaggaagaggtttaccattgagcaggatagagtaagtcacagaagatactcactccataatcatcttgatgaaatgaggactgaaaccgtgggattgaagaaccttctctagaaaactccattcaagcctatcataggctttgttcatatcaactttaatggccatcaaacctcccttcccttttttcttttttatgacttgaaccaattcttgagataggatagaggattcagctatccacccccgggataaaagccgattggagcggagatacgatgcgatccatagtcaaacggagcctttgagaaataattcttgttatgatcttgtaaataaaattacacagagcaataggacggtatttctcgaccaaatcagcattatcacatttagggattaagcacaaaaaagtatgattcagggaaggacttaaatgacctgatcaaaagaaactctgaatgcattc

SEQ ID NO: 55726 - DNA, 4096 bp, Cannabis sativa
ccatattatcaccatcaccaactcgatcaatatttttcgagagggaatcaatatatttataaataacgttcaaagcaaactcacaaattttcctacaaagcatctaataattcttgtcactaaccattgaaagtctaaacaataagtacaataaattaaaggacaaaatccattgcttagttctccttttttatatatataaactatgaacttcttcatcaatttttgaagatcacttctagtggggtttcctaatacattaatttctccattaacaaaaatgaacatatcattataattaggactgaggttttcatcttttaataattatattcattaaagaaataaagaaaaaagtaatacatgcatgataacttgatcatacttatcacgaaagcctatttaaaatttgtgtctacgtatcattaaataggaagattttcataatatatagtttattaaatattctcttttagcctttcatttttccaaattcagactacactttttattgtcatctctagatcagatttctccatatttgatgggctagttatacctataaaattaatattaatctatatctatatctatatatatactactttatcatatttgtacatgtgtctgtcgtgtaaagtttcaatcccatgtagataagatttttgtcaccttttttttttttgccctataagcatcaccctcccctttctctcctagtccattttttaatatatttatggggttttaaagattctcttaggctattggtaagatgtaacgcgcaaaaaaaatatttttgaatttttatttaaaaaaataatatttttcaaatagttgaaaaaatatatataattttaaaagagaaaaaaaaattaaaattttgaattaagtgggcattaagctcaagtctaatctgtctatacctaaagtcgaacttagtaaaatggaagtaggatagagaggatgtagagtaacaaaaagatggataatataaattaagagggagataagtagtaattcataaaaaaaaaaaaagtgggatgatagatcactatttattcatgaaattattaaattattttataataatttttgagagaataatttgtaattttgaacaaataaaattgaagaatatgaatccttttattaatgaaatgatttatatatttgagcggatttattatcctcactttttatatcctttttaatattattcttgccaaacaacagaatttgacctctcccactcatttttcttatttcctttccttcccccactttttcttctcactaaacctagtgtttaggctacgtttggtaaggatgaaaaataggatggatgaagagtttagaaaaggtgaagaatataataactactcttttttgtattgtttagtatgaaaagtaaacctgaaaggataaaaaatgacgttaaatatttattttttaaaaggataattttagtatttcatatatttatttattagaattagtcggtctcacattgttaatatacgtaaataaaatattaagatgaatgagctatacttctcttatttttaatatgttttaagatgaaactcatgcaccttaccaaaacattacttatatttttcttaatttcttacaaaagtgaaggtataattagacttttgggatttggaggagggtctccgtgccttgatctttatcctactaaacaacaaggccggccttgaggtgagacgaaagaggcgtccaccttaggcctccaaccgctcaaaccccatttcaaaaaaaaaaaaattaaaatataattcataataaaataaaaaataatactcataatactaaatatatgttgcaactcaacagtaatttaattagagtaatatttaagaaatttagtgttcaagtcccaacaatctcattggccccattttttttatatatatatatgaatagagatatatatgatcatgtgtggatcattcctttattaaagattcacatcatattccactacaatagagtgatttttgatgctgaaaaacattctttctggaaaaagagttataaacgaatccttttgtttcttatacatagtgtgtgtgtggccctataacactttgtgatgttttttttggcatataattaaagggaccttaatttgaagaagaagaaaaaaaaaagtttatatataaatatttgtgagaaaggtatatattaagagagagaagtcaaaggaagaaaatgtaaggtggaagcaaacttggatccaagagatcaatacagcttttgatatttatttttctttattatcaagatatttttttttttttttttgaatgatttattattatcaagatatggtttttgtcaaaagtggtgactttttttttcttgcttcttatttataacatgacttgtttatttgcaccattattagcattaatttttcttattcattttctttgatgaaatcatgatcaccattattttttttgattagtatcaaagaaattttaaagttttatcatacaatgcatatctatcttctatataaatatataaatctatacattatattagacactagtactatccaacaccatctctcgagataatctcttatgaataatttgggatattttataatagttatttataaataccattttgtgtttaatattttacaaaagttacttattagatcttttattttgttaaatgacaaattaaacctatatttttaaaatggtactatctattttctgtatctatttgtgctagaaattattttcaagttagttatattaaaaaaaataatcaaaaattaagctcagagtactattttgtaccattttagaaaatacaaggtccaatttgctaatttacaaaacagatagcctaatcaataacttttacaaaatacataattcaaaatgatattaacccattaaaaattatgagacaccatacttaattgaatcaataataatattacattttttttaataccactggacttgacactcatttagcatgtattttgctagtatgcattattagtaacactacacacaccagaagaccccctctaaataattagtaattttttataataattattaaattaaaatatttgtgatatttaattacactaatagtagtattttgtggaccaatggtactaagcactattggattggtgttagggttgtttatccaatccaatctacactattttgctcatagtgcatctgatccgcactaagtacggattttatattttggatctaatctaatccacacaatagctcaaatacaatcaaattcgcaaaaatacagattggatagattatttcacataactagcaacaaattaaaataaataaaattaaaaattaaaaataaattaaaaaaaatatatatgtagaaagaaatatttaattttgttttaatttgtacgaagaaaaaagtaaattatatataagaataaaatatacatatttgatttaataagttaataaatatatttgtattatatgtattatatttttaaatgattattttttacattaaaatgttaattatatatattttttaaaaattttatatagatatgtgtgaattagattagatcggttacttttatatatcaatcaaattgaattatatttgatatggtgcaaattgaattaaattatctattttatgaacacctttaattagtgtccttttaacatttctattttttatttgttttcctagagatctataaccaatataacataatgccttctagctaggttattagggcatacaaaatagaaatggtcatttttagcacaagttgataaaaaaaaataaaaataaaattgtaggggccaaaaatgaagggtttactatacatactataatttatcaaacagttgtacaagtgtccccttggcctgaattttagcataaataaataaatgaaatggttgagtagtaattccattaaaaaaaaggttgagtagtaattgaattctttatattattttatttttaaggaaatagttgaagtttgaacatgtttagtcaaaaaataaatcttaattaattg

SEQ ID NO: 55727 - DNA, 1329 bp, Cannabis sativa
aaattaaatttatatgagtagaaggtaaataaaataaggcaattgtttattacttattattattttttttttctactatttctttcttttttttaccaataagttagtatacttattctcattatattttttacatatttggctcaaaatcattcactaattgataactttcatcactaaagtagaagttaggatttatgatctcctatagttaagtgttaaattttgttaaacataaaaactattttattcatataaatttttgttttataaaatattaaccaaattcaaaatttaatatttgctctaattagaagtgtattaatattcacaatttagataatatggaaatttgagtaagcattttttgttttattttaacatttcattatagataattttagacatacaaaagaaactgttttaaattttaatattgaatataaatatgtgctataaaatttttatttgatattaaaatttaaaatttggccccccttacattcaagtcttggctccgcttatgtatatccaaaatgtaattaaaagttggtagttttctctttgagcggttgtgttgggcagctggcttttgtttgtgcttgtctttccttttgaataaaatttatctttttgttcaaaaaaaaaaaatatataattactttgcaatagtacaaatgaaataaaatagaaaaaaaaaaaatagtatgagatgtaaatttttttaattatttagctcttaaatttttttaaaaaaataatctaaataatgaacaccaatttaatatattttatttaagatccaattttaaaattttagcaattacattctcttatatatatatgacaactttaaaaaatatataacaaataatattcattctccttttaaaattttcgaaattaggaaaatgatatttaaattaagtttaatgtaattagcaactaactaatcactctaatttatatttactcaaaataaaaaatcactctaatttatttagaaatttacaattaatgtaaattataatattttttttttttaataaagggaatttgatgacaagttaattgttatgtccgacagtaaactaaatacaactagcacaaaattatattaaatattaccaaatttttaaaaataataaaagttttattacaaaattaacaatataaagttacaacttagaacttaatactatttataaattcaaaaacattgcttagaaaaattggactatatgtattatatgaataattatataaggtatcatttttcataaaatttttacatttttacgttcaaagaatgtttttttacatttttac

SEQ ID NO: 55728 - DNA, 1107 bp, Cannabis sativa
attgtttaattttattattttttatatttttaaggttttccttaaaaataatacaaaaataagaaaataacataaaagttatatgaaaataacattaaaacaacaataaaaaatcaataacaaattaacatgaatacaacataaaaagaccgtattttctgtaaataaaattaaaaaattcgtaaaaatttttaaaattccatgaaatcgtatttttgtaattttttttgttgtttttgtatatttgtaaaattatccctatatttatttgggttacaaaatctattttatacgcgtatacgctagtattttactaaaatttcaaaaaactgtgatttacttatagctcatttatcatttaaataaaaaaaaaatgagttcatttatattttcttaatgaaaggcaaaactattaggtggggtaattagatttatagttctagaatacttagagggtttattttagggaccaaattttagtcaaagagatattattattatttacgtcgatatactagtcattcaaaattagacaacttctatgtgcaaaattctttggacataattacttaattaatcatggtaatctctcgatgtaataatagacctgcaacggtatacgatttgtaattaattacacaacatgcattgcttttgtctcaaattcaagacagattttttttttttttttaatttttatttttatccagataactggttcgaaaattcagacacatacttatcaaaatcattttttttttttaaaaaataaaaaactaagctaatatgacttaaaaaaattgagactattttggtaattatttcgtatttttatatgtttagggtaattaatcatgggtgagctaataataaatatgcattattggagtatatgaataatccatggaagtacgtagtagagtccaaattgtaagaaaaagtcgcaaccttgatttgaataaataatagacatgtactgtactcagtctcatgtatatttacaatcaggaggaggagtaccgtcaacctcatgttacaatttcttattcaatcttcacgcccgaaaatacatgttggaatatattttttcattttttttttcacggg

SEQ ID NO: 55729 - DNA, 1236 bp, Cannabis sativa
tattgaacaatcggttcaaccaagaaaatgggcctcgaattttcaaactcaacgaatctatgatatatcttcaccaaggagaggactcatcagtacatacttcacaaaattgactgaaatgtgggacgaaatcaatcaactccgcccaagaattctatgtacttgtgctgcaactactcaaatccaagcctacatcgatcatgatcaggttcttcaattcttaactggtttaaatgaatcttactatgttgttagagcccagattttactttatgatccttggcaacctttgaacaaggttttctccatgatttttcatcaagaacgccaaagatctattggtactcgcaccaacttacctcttgctgctgcaacaacttccacggccaatacttctacaccaagcaccaattctgaccctactacaaatcttgcttcaaaaaataaaaagatgtgtcccatgtgcatacactaccataaatttgggcatttaaaagataagtattactttctacaggggtttcccccaggctatggtaaaaggcgatcccaagactcttcaacaaaaaaatctgacaccagcaagagtctctctcaggcttctcaagtctctggctcctctactaagataaacccatcacaactcaccagtgatcaatgccaacaattgatatcaatactagcacaacagattcaatccactcccacaacttcgaacaacacccctgctttaaccaacttctctggtaacaaattggattttccctataatttttggattatcgacagtgggggcaacccaccatgtctgttttgatcatagatgctttagttcttttcaatcaaaacaacatgctacttgtgtcacattgcctgatggcacttctgttcaaatagcaaaaattggtattgttattattaatccagaaatcacactaactaatgtactttatgtgcttcaatttcgtttcaattttttatcagtaagttccttgttatatcattgttccagcaaaatggttttcacaactaacaattgtttcattcaggggtcttctcaaacattgaggattgggactgctaagaagtttagcaaactttactacatccaacaagagacagctaccaccaatcagtttctttgtaatgtctcttgtaataaaaaccaatggcattcatgccttggtcatccttcggtattgattactaattagatcaataaaatctttcatttgt

SEQ ID NO: 55730 - DNA, 845 bp, Cannabis sativa
ataatgtactactaaaattatcttgcaaaatcagataaaaggatatataaacttttttaaaaaaagtataataaaaataaatcaatatatataatgtccccacttaatatgacaatttctgtaagattccctaacttttctttctttcttttttgtcagaacaggattggcagccaccccaaaaataaaaaagaaagggctaaaatgcaataaaaaagagagggtaatttttaatttttcaaaaaaaaaagagaaaattttagaatatataacaacaacattaattatcaagatttttttgaaaagctaatgttatatagctagcttgcttatgatatagctaaaaatatatatacatatatagattattaattatcattttaattaaaagtatttatttccattttatttcatcaatagttttcttttttcatattaagataaatgatccattgatgtatatatatatggtgtgtgtatgtacaatatatatacaaatttatatcaaatccatctcactaaagttacataagtgttatttctagagcaaatggaaataatatttccagttatttttacaattataatttatgcatgcattacatatgagacatatcataattcatgatcattacaattataagttatttataattatatataaatatatgatgaagaaattaattgtgagattttttaattagtgatgatcaaggggataacaagttatttataattaagttattatatattataggttaattaagatttttgcctccgaactttgttatgtaccaaatcatgtcttttgaacttttaaggtcgttacaaatgtcacctgaact

SEQ ID NO: 55731 - DNA, 871 bp, Cannabis sativa
tgcttccaattaagcaatggagattggcataccctcttcaacttttttggccaaatgagagccttcatacaaaacatataaacatatcatttagcataatgtaaatagatcaactatacaatattgaaatataaggccacatgatcaaataaaaacataatacaagtacctcatattctgtaatatgtaggctaagagtattccaagagcaattgagattcaaaagaaaattcaacaaatcaatataccaagttgtatcatagccatcataatcttccttagaaatcacaatttttccactcaaggaatttgatggatctattgatatgcttagatcgagacaaccttcgtaacaaaagtattctaatttcggagctgattcaattgtaatattgcacggttcaaagtgacaattcttaaaattaaaacttttcaaccattgtccagagattctgagaggatcgtcatagggatcatatgcataccaagtgctcaaagtaaaattctcaagctgagaaattttagaaataagagcatttaatgataattggaaaacatcactagtatcattaactgagagatttcgaattttctcgcaactagagagatttatattgcacacagaaacaccgcttagtatcaaagattcaagatttacggcttcaacttgtaaaccatttacatttttgtatctatcaattccaagacctcgaggcttaaactttgtagtggaagcttatcatcaccccgcaaaaactcataattatgtagtcgcaatttctcaagagaaggacaacccaacaaaaacttaaacacaacatcatgatcttttgaagtatttgattgttgaattctttccaatgacaaagtt

SEQ ID NO: 55732 - DNA, 728 bp, Cannabis sativa
tacatacttatggtttgattttcttgacgaagattcatcaaactcttcctcagattgaatatatgtggaccattttgttggtgaaatctgattttcaaatctgtccatatagtagctgcagattcatcataaagcaaactagaggaaatttctttagaaacggaattaagaatccaagatataacaatgttattgtttcttatccaagcattgtaaagattatattcagaaatatcaggtttagggatggaaccatccaagaatcctaatttctttttgacagagattgctagttgcattgctcgactccatgaagtgtaattatcttgtcctgttagaggttgagaaaccagaatgttgccggggttatcgccgtggtgaaggtaataaggatcggagggatcttcaagaggatttcttgaattcaggacctgattgcttcgagttgcagagatggaagagccttgaattttggcttctgctccagtttcttgatcgccagtagacattcttgactatgaaaagcgctggaaagaatttccaggaagaagggaagaatttagtgaaggagagatcgaatcagtacgccaccatttccagagaggaatgcatggcctggtgggaagaggcggaagcgtagaagatcagaggagaagtctgcttctccactctgataccatgttgcgatagaaaaaaagtgaaaaagagattgaaagagaaagagagaa

SEQ ID NO: 55733 - DNA, 786 bp, Cannabis sativa
aaaaaacatgtgaaaaaaatgtttttaatgatgcaatcattggggaagttgtctttatcagaccaatcatttgatcttggtactttgtattttttctttttctttgagctgaaattggagttcagtctaaatcaaattggccccaaaacttagtaagtccatgaattaagtcaaatgctctacctcaaagcttgattcaaactgggcccctcttagattagtcagccagcccaaaacctcactccttagcccaatattcaaccctactcaccatcttcactccaatcactatcccagccgcctccatcacccatagtttgccctcaccagccacattcagttcagcccgtcaccaacacgagaattcacctccgattcatcaactcagccaccaagtcgtacaccataaccacaaacccccattatcctaacctccgcctaactcaacccagccaatacccgaagtcacccacgccatcacctgctgaccacgaaccatctccgttcaaccagcaccaacccatcacttccagcttcgtcgtgccctaccaacaccggaagtcaaccattccagcgtgaatcaccaacattctttcacaccaccatcttcatcactgcaccttcctcacgattaagcaatcagcagcaccaatgattcattcttaccatctcagttcgcccataaccacgaacatccattcagcagccactcatcacagtcaagagcagcgatccagtcgagtaaaacaccatcatcaacgactcattcgaatctccctggtttgt

SEQ ID NO: 55734 - DNA, 806 bp, Cannabis sativa
tttggttctcagatatgatggaatccatataaggcttcatcctattcaccataactttggttataatcttgaacaaaacattacataaggctataggacgaagatctgacatacgttctggatttttcttctttggaataagcactacattcgcatcaccacacccatcggtaaggagcccattttcaaagaaagaacggacattcttgaccacttcttctcccacaatcggccaacacttttgaaaaaatgtaggagtcatcccatcaggtcccagactcttatctggatgcatttggaagactgcttttcgcaccccttcttcatcaatcggttgacataattcagaattgatcaagtcagtcaccactctaggaacacaatcaacaacttcattacactcacaacccgaggcttgaaataattcttgaaaataatcagacacaaccaacgacaaactcgactcccatgaaacccaattaccgtgagaatcctttagctaagtaagttgattatttttcttcctactagtggcagccttgtggaaataactgctattgtgatccctctctttcaaccagaactgttttgcccgttgcttccaaaaactctccctttgatcaaaagcatcatacagttttttcttgatttcagcatgtctttgaactgagacggtatccctcaaaccatgaagcttcttcaaatccgccttatagctcttaatacagtgatttaaagaaccagtaagctccttcccccaaatagataacttttcagcacacattaattttgctttgaatattaac

SEQ ID NO: 55735 - DNA, 984 bp, Cannabis sativa
gcatatccttacacccaactaccttacccacacaagccttactagccacaacatcctccaatgtaatatcttcaaaaagctctaacatttccatctcaagaccactgtctctagtcaacagttcatctttctcagtatcaacaaactccacttgaatctcttttcctttttcccccatactaaccagaagaaactccacaataacgaggtaataacaaggatcagacccccaagaaaacccaaagatgcacacaaaaacaccaaagcaaggggcactatgacacactaactagaaccgtaaaaagaacttgtaaacaaaaacattaaaagaaataaggtcaggccttacacacgaaaaacttacatgaagtaagcagactctaccaacggagccatccttgccaatcatattaattattctatgccaatttgttttctctactcctttttaaatgataatcagaagtgttttcattactccaataatccaatttacaatagaaatttagttatacgaattttagtttcgatttagattgttccaataattactatagaaatttttatgtgaaattccgtaaaaatacaaaaaaataaaaataaaaaaataaaaacctgttttgaaatataaaactaaaaaaactctttttattttttatcaacaaaaagaaaaaatattttatttttatttgattctttttacttaccttttattaatattatatcaattgtcatcaactctatacattagccaaatttactttcactaaaaacacatataaaaattattttaattttcttttacttgttagaatttaaaataagatgaataaagttcatctcaaaactaattgacaataaaaggagtaattcattcatcttatatatgataatttatttccacacatggacaatgtggaactaacgaacaacctttaagacaccacaaggcctggaaagttttgctataacaaacgaccttta

SEQ ID NO: 55736 - DNA, 1628 bp, Cannabis sativa
ttcttgttgaagtatcttgtcactcggtgttggtatgctacattagtgatttgcgactcaacacgtttttctttaaggagatccaaggaaaagtttaatagttcttagttttcttcttgatcataaaactctcgtctatgggtcgcaatattaacctccactggcagcattgcctccgagccaaatgccagcgagaatggagtatacctagttgctattttctcagtttttttgttagcccgaagtacgaggagtagttcatcgacccatctgccttttgcagcattgagcttctttttaatagtatccttcaaggtcttattaacagcttctacttgtccattttcctgaggccttgacactaacgagaagctcttaataatcttgttcctctcgcaaaactcagtgaataattcaccatcgaactgagttctttcatcagatactatcttaatgggtattccaaaccttctaattatgtttttgatgacaaagtcgagaaatttcttgtaggttatggaaactagaggttcaacctctgtctactttatgaagaaattgatagccacaactgttactttgctcctccttgccctgtggggagtgccccaatcaaattaatcctccatattgtaaatgggtagggcgaggtcatcattctcagttccgttagtggtatgcgaggtatatgtgaaaacctttgatacttatcaaatttcttgacaaattcgtgcgtgtctttattaattgttggccagtaatatccttgtcaaattatctttttggacaagctttgccaacctgcatgatctccatagaagcccttgtggatttctttgatgatctcgtttgcttctgtggggaggacacaccgtaggagaggcattgagtagcccctttgatacaatttgccttctactatcgtatagcgaggcaccatatacaagagttttcgtgcctcgctttggtccgctggaagtttctcgttgagaagatagttaactatgggtgtcatccaagtgggcgagctatctatcatctcaacttcttccttttgacatatacttggttcgtctaacacttctaccggtaacaagtttagttcatccagttcattctgcaaggccagttttgctaaggcgtcggcattagaattttgttctcttgggatttgttcgattcttaaataatcaaacttttccaagttcttccaaactttctctaggtatttttcaatttttaagtccttagcctgatattcctcaaggaatttatttacaattagttgcgattcattatggcatataagatttttgacctttaacacttcagctactttaaactagcgatcaaggcttcattcagcgtcgttgtttgaagtgttgaattgaaatcttaatgcataatgaaacttaaagccttatggaaaaattagaatcacccccacacccaaaccatgatcgtttgatgctccatccacatacaacttccaagtgtccgcgtctcgccgaataagtgggttctcatgtggagttatcccttttatcaggaaatctgccaaggcttggcctttgatggatgtttgtgggtgataagttatgtcaaactgtcccagttcaattgaccat

SEQ ID NO: 55737 - DNA, 1012 bp, Cannabis sativa
atctcatgtgcgtaaagatgaaacatagggattatccatgtttcacgaatagttacaagtgataagatcccaagagaataacttacatcctagactagtataaatagagacggaacccaatgaataaaggacaaccatttttggaaatcggtagagaattatatctattattcattctgtaaaataatttattgtattctatttaaaatttatcaactcagaataaaatggactcgtggactatgaataattaacttcaaccacataaaaattctctgatcatttattgtactactattattattattattaattattatttaattaatttttttggagatcatttattacaaaaatacttatttattagttaacgaaaatccacgttaacagttacattaaaaattagtaatgatcacaaattaaaaatattgataaatttttttattagtttggttgaataattattttattatttattacatcaggtggaatacgatgataacatcagttttgaatctttatagagataatacaacaagggatgacttatttcatcagtataagagaatcacaagaaggtttttgagtaaattattgcggcataagtacctaatcttttgaatttgtaagtgacataaatctaataatatttttagcgacataagtactaaaaatttataaaactgtaatttttctctaattttgttagtaatgactacgttgttgtctagatcgtgatttacatctacttaattacttcttatatttttttttaaaaaaaaaattataaaaaaatttttaaaattaaatttaataaaattttattatttaattattatcgaataaaatacatcatttatttatataattgaattttttttaacattcacgttgttgtttactagttattaactaatccaaaagggaaatttgattttctatacttaaaaaaccttaatattttattcttaaaccaatacattttaaactaaaaaaaatatgacacttt

SEQ ID NO: 55738 - DNA, 3084 bp, Cannabis sativa
cggccaagtatttgtataattttttttcccttttttgtatttttcggttcttttccctcaagttttatgttgtaagtattattaccattaaaaattaaacttagatatttatttgcaactgtgagttaaatttaaatatttatgtcgcaaaaaactctttttaaaatgtaaaagttatttatttttaggtatttccatttcactgtttctttatttatatattttatttttttgagaaaaggaaattcattgaacaacttaacgattacaaaaaaaatggcaaatctcgttcaattgcgtgacgagcacaaaaaaacaaaagactatttatttgttgaaaatgaaatacaaacttttatttacatactaataaataagaaaaatgctagaagggatcagtggtacttagcactcttctatgtgttaatatcgttattactctaattaaatatcgggtctcataaagtttataataattagagtatcgttagccaatcgcaaagtgacatgtcaagaggtgctaggcactttgcctaatagtaatgatcaataaataactctctcaatacaattttggaagggacaattttggaaattttctttagaaaattgaaattttttactttcatatatatagtgcgaaatagaaataatcaataccttacaattcagtatactaggctaacaaacacgcaatacaattaagaacaatatatcgagagatcacaaaaatcaagtaatgaataaaagttgtaaaacaaagaagaataataccaactttaacgagttcaagccttatgcaatgctctacgtctcagtcggaacaacaacaatcatatctttattgatatcagtgtttatcaatgttacaagaatccttacgaattctcaaagattacaagaaaaggtttctctttctaatttagactctctctctctctcaaccttacactatcgtaattttactcaagcaattatggtaaaaaacggatacatattacaaagttaatggatatttatagatttgcattgtttcctagaaaagctttgaaacaatcatggcacatttattatgccttaaatgttccagctcatcactagcaacaataatacatgtcatctttggtaatccgttttcagtacagacaatctggaagctttaacacggacaagctatctggatacgtacaagcgctcctcccgaatgaacatccttaactgatagtaagctatctagtaatgcatctctggattaatgacaagttattcggaagacactgctttacatgagacaaacttcacgaaagaaccatctgatcggccacaactttaattacaaagcttctaaataagtaccaagctttttgtaactctattttggagtaacataacttcccaaaagacaaaacttgtcactataatcaacaatattgatgaaaggagaataatttttattaaatcaataagccaaaaaacaaccaaagctcagcaaaaagctctaacaaactaaggtacaaactattcataactgctatgatatatcagcagaggggtcacttttgttcttactaaaactcccaaaattaaccataatatcatgtatgatcaagtcattaacataatttatagtgaagaacgacaaacaaacacataaagattcttgtttagccaaatataatagacaacaacaaccataataacatcaaagatttgattctacaaaccattccttaacttttctatccaatttttccaatccatgaaagaaataggagagttagtgaaatcaaaccaattcacaagcgtcaaataggtgtgaaatttgtggaagtcctcatactcttgataaatgcatgtcaactaataacaagctcaagccatagctaattttagaggcagttcaacaatctcttctctaattcattcaatcatgggtggaggaatcacccaaaattttcttggataaataatcagggcatcagcctaatcataatcaattccaatcgaatatgcctcatcaacatcaagctaatccaccaaaaaattaagcttctacttttcagcagttgaatcaacaagctctacatgctcaatctaatgatttataagctactttgtaaattatcaccaatgcacagacttagtttatgactaagataagaacatccattcaaaatcttgagatacaagtgggacagttggccaatatgccttataacagacctcaaggaaatcttccaaataatacagaggtgaatcttaaagaaaattgtaaggagtggtaaagaggtagaagagctagtgaagaagcctattcctgctccaaaagttaatattgaaaataaaggtttaatggaagaaaaggttattgaaaaccttgagaagaagtagcaaccaatcaactatgagcacaacgtcaaaagtcccatatcctcactagctctaaaagaaaatacttgaaaattgttgacggtgagaactcatcaactaagttagtggtcggaaaatgcaaagctaattaaaaatgtgataaagataaagacaaagatgaaggtgaacaaatctctagatattgctctctctattgaattcaagatctgagttacaccaaatgattttccaatccccttcacatatgagatgggggtatttataggctctaatggcctgatgtacaaagtgatcccgtggggataaaatgtcactttcctgctgcatgctgcaggtgctgggggtagtctgacacctggtacccttatctcgtgttaggtggttcctggtccccaactacaggttgtaggagagtggtgcagcgtacccttggtcaggtcgttaggccttgccagtccattgttgttgctacttgtatacctccttgctctcaatcttcagaaggcgataatgctgattctaataatttttttggcgccggcagcaactctggtgattttcccagtgctggcagcaactccggcgactatgccaattccgatgacttgtttcagttagctttattgattagcatttttatttttttataatttttcatagtgtcgaatatggtttcacagggttcataagttc

SEQ ID NO: 55739 - DNA, 1086 bp, Cannabis sativa
  modified_base (408)..(419): a, c, t, g, unknown or other
  modified_base (550)..(553): a, c, t, g, unknown or other
  modified_base (595)..(597): a, c, t, g, unknown or other
atttataggattgaattggaaaagatggtattattaaaaagaagaataagtagttgaaataaagtcacaaaaatctaactagaactttgttcactttaagtgtgcggcctagtgtaattttttgcccaatattttatttcttttttaatctatataattcaaccctaagccatagttgaaaaaactctaaaaaggaacatgatactctcattcatccaacaaatgttataattgactattcaaccaacctagatgagagttctttccttaatgatttcagcctccttcattgttcttcacatttgaaaccttgagtgaatgagtgccgtgcccacacatagcaagtcaagtactctatcatagtaagtaagacgcagtggtaaccaaacctgaaggagagaaagagannnnnnnnnnnntcttgataatgctctgctacaaaaaggaatcaagcgctagagatctcgaacggaaggagtcattatattccgctgcaatcaatataaggttttcttaaacccttatttgtttatttcattgttttagagannnnatatttaggatgttaattcaacttacttgttagtaaatctannncctagtaaaatattcccaacagtcgtaccttaagaatgttcttactcatataataatccttgtggttaggtgtatgggagcctagataaattttttagaacgtacatgtatcatataggcaatatggacacatcgatgtgtacgttatttacttctattatatctattctatataaaatgtgcctatataacagaattcttagtttatgagaaattattgcctgacttttctaatttattttaataaaaataattttattctaaaatattttattataataataaaaatatattttcaaattttgatattaccaattttgcgagccacgtattttgtaggattcaaatcattgattgtgatttattaaccatattaaaacttgaatcgataagaaaatataactactacaaaaacaccctttagaggcggtttttaagccctttcagcgtcggttttcgcgaaattcgctaccgacgctgatcagggcg

SEQ ID NO: 55740 - DNA, 1424 bp, Cannabis sativa
agataaaaaaattataaaaaaaaactcaaaaaaagatagaatgtgccttgcacgtagttgtcgtctagtatatatatatatatatatatcactatacaagagtgtgtaaaataatactaattatcaataaaaaaatatatttagtttgtaacttttatgaattttccaaagctaaaaataataaatgataacaagagaatataaaaataaatatcatttagtaattaaataaattattagtaattatttacattcaataaataattttttatacactttctttatctaataacaaagaaaatacatatatattaattttatatataaaaaaaaagtatttcaattaaaataacatgagtataattaagtagagagagaaatcataaatatttgttatttatgttatttattattaaaaggtttttatcataaataattaattaatttctttattatgtttggaaatataaattttcttttttttagaagtaatattatattatgtttatgtaatttcatataacattattttaggaaataagaaaaaaaacaaacaacaatttataagaaaaagaaaatccattccctcaaaatgtttaattttcgttattttatgaaattatctttttaataaaaaagaaaattacataaactggttatttttaacaaatttattacacatttacgtttatattttcttttacatttttatggggtttataaaaataacacaaaaataacaagaaaataaaaacaataaaaaataataaaaaatatgtaatataaatatacattaaaacactatatgcaaataaaattttaaaaattgtataaataattaaaattatttttgtaattttttttttgttgatgttttttttttttaaaaaaaaaggataaagattgtattggagtaagttgaaatatacccgttttttttttcatcagttaaccaaaagggattttttaatcatataccaaattaacaaattaatattatagttaccgaataaaataaatataccttatatatgtataatcgtaccgaaatttactaaaaatattcctaccgaaccaaaaaaaatgagatctcacaaatttcaatcaaccaccgtctcctcaaaacggtgcacatcttcctagtgcagaaccatatataaccatttgagaacaaaaaaaattaaaaagaaaccttcgactatttcaacctccattaaagctctgcaaaaatgtcgatcgaatttacaaaaaatatcaccattaaagcttgacaaaagtttcaatccacaaaattttaaaacaatctaagacaatcaacaagaaattaaatggtaaactgtattctctaaacataaacttaaaaataaaaagaaatacaacaataaactttgataagtcacaactacacaatttttatcaatttc

SEQ ID NO: 55741 - DNA, 796 bp, Cannabis sativa
aaaaatcatcacctccaaaaaagtcacaagaaaagtcatcgacgccataagtcgtcagaaaatttatcaaaaaattcaccgaagttgttatcattgtcagaaaagtcaccggagttacatgtctcaaatataaattaaaatagaaccggttctataacataataaataaaaacaaataacatagaataacttaaactgattataattaaaatacaactggtctaacataatgaataaaaataaattacataaaaataactcaaaccgattataataaaatagaaccagttttataatataatgagtaaaaataaataacacgtcataactcaaaccggttataattaaaaaatgaagaggagaccagttcctaaaacactgaaacataaattaaaaacaaaactagttccataacaaattgagtaaaaataaataacatataatacctcataaactagttatttttttttgaaaaaaaaaaaaggtgggggatcaattttaaatatactaaaacataaatctaaacaaaactagtttcataacaaaataaataaagaaaaacacacagtaacctaaaatataagataaagaaaccagttatattaatcaactagttaaaaatttaagattaaaaaattagttccataaaataaccaagataaaaacttacacacaaaaatcagttacataaaataaataaatcaaaaactggttctttgaattaactagatcaaaattcaatttctaaaataactaaattaaattccaattcctagaattaattaaatcaaaattc

SEQ ID NO: 55742 - DNA, 606 bp, Cannabis sativa
ttcattttatttattttacctcacacttttacattacatcatacatcaacttttatatttttttctctatcccatctaaatattatattttttaatatattttatatatataaaccaaaaaaaaattaaaatgttaaatgaaaaagaattaaaaaatgagagaaattattaaaataatatttaaagaatgaataatgtttttttatatgaaaaaaaaaatattattcatgggctaaaattttgaactatgtttgctgacttaatggattctttttttaacaacatttctttatatttttacctcttgaactatgagaaatttttatttttatggtttttaaagtataagttagtaaaaatataattttttttcaaaaaatttattttattaaaaaattaaaaaatatgaaaaaaaaaatgcataaggtaactagttactccttttatggtaactagttatccctttagttactataaatgtacctaattatctttacttgattttcttttatttttcaattttttttttttaattttctaataaaataatttttttaaaaaagaaatcatatttttacatataaaatataaaaactcataaaattt

SEQ ID NO: 55743 - DNA, 1050 bp, Cannabis sativa
gggcacaaaacccaacaaaattaattagtagtctatagcattgcatttaaactattaagtaatttacatatagtttcaaagttgtaattaagtctcttagattagttagtaaatagttagttgatagttattttcctgttttttctattattaatgtagcttggcttggtacactataaatacctgtaacatttcttcattcagtttaatatatcaataacacaattcatttcctttgttttactcctaatatggtatcagaggaaatacactgaagcttcaagaactcatactgcagcttcaagattcaagctttctcaaccataatcatggtgcgtactcgagccacaagttctgcaactaattatgatgatccttccagagttgaagctcccacagctcctcgaccatcaacaacttccgctcacaacccatttctaacgaatcctcttccttcctccgttgttcatcgtcctcctccagtcgaaagaccagcatacgaagacgttcgattaccctattaccttagtacagcagaacatcctggtatggttttggtcacatctgtccttacagacaagaatttccagccatggaaaagggactgaaaactcaccattggagccaaaaacaagacccctttccttgaaggtactctccctcaaccccctccccatgattctttttttgattcttggattagctgtaatcaacttgtcatgtcttggatcttgcattcggtttcacctgaaataaaaagcagtatcatgtacttagatactgcatctgaaatgtggaccgtgttaaacaatcggtttaacgaaggtaatggtccacgaatctttgaattaaacgaaacactaacctacctcaatcaaggggatgactctgttagtgcatattttactaaactcactgccatatgggatgaaatcaatcagttaaggccctgcattccttgcacctgtgctgctactgcttagcgcttggatcatcaaaaccatgaccaagttcttcaatttcttaagggcctcaatgactcatatcatg

SEQ ID NO: 55744 - DNA, 1635 bp, Cannabis sativa
  modified_base (517)..(525): a, c, t, g, unknown or other
tcaatcaatacaaggatttgtgcaacttgcatacataatatgatttctcaggatcctcaaagccttcaggctgacacaagtatatatccttttccagattaccatttaggaatgcattgtgaatatccaacctacttcaaccaaattaaacatagttttcattctctaacaactagtagatgagagacttctttctatagtgattttgcacctcttgctgttcttctccatattcaagaatatagtgatagagtaccatgcccacacataacaagtcaagtactcaatcatagtgccgaagacgatggttaaccaacctgaaggggcgaaggagatccaggctcagatcttattattactctgtggcagaaaggaacaatggttagtgatctaagtacaaagagtcatattattctgctaccttcaatgtaaggttttctaaactcttatgtgtttaattttattattttggagaattcatagatagagtgctaatgaaacatacatgttagtaaannnnnnnnntggtaaaataagttccaacacttagtgcatgtagtatagaggtcgtacttttgttaagaacgttcttgattcatctgaagcattgtaggtaggtgtatgggggcctagctgtaggttgactatatgtttatatgatttattcttttcttgttgagtctattgactcataaatatttttgcatgtgtaggtaaggaaaaggcgaaggctagagcagtagtgagtccaaagcttgcgagtcattatacatataaggatggttaggcatggagttttcggtctcaggatgacatgagcttttattttatagttgctaggaaccaattttgtggaaaacgtattttttataatgttgtaaaattttatacaaaatacgtttgttgttttccctattttttctctttgttttccctttatccttcaagccatatctcatcagtgtccatttatacatccttcaaaccatatattgcttacgacaccctgtttgttgtttaatatttttcattaattcttcataattttttttttcatattttctagtttgatttgaatttgaaattgtatataataaatctatacagacttatatgtttgccacaacaaaaaaatacatgttcgcgcctccaaatcagtagtggacctagctagggtttgttagtgtagaataaatagagggagggaattcatttgccggttcagagaaattgtgggagatacgaagagaagataagcctatatatttattacaaaaaaaaattaatttcactactacaaattccgacgatcccaaaaacgctttttgttttgggactgtcactaaaaaaattatttgagtgttgaaaaccatcacctgtagtatactatatgccaaggattttaacacttctataaattaggcaacgatttataaatgtggagaaaaaattgaaaaaaaaataataatacactattcccggtggtttagaaccgtcaggcaaaatattgaccacggttttaaattgtggtccatactttgatcgatggttcgaaaccgtcaggtaaggagataccaaattaaaatcatactctctcatcaacacgcgctcagaccctttacccccccccccccc

SEQ ID NO: 55745 - DNA, 994 bp, Cannabis sativa
ctttcaatactattaaatgtttgtagaatatattagttcatttttgcttgatgtatttcaaagcattccagaatctttatttattttactttgttcgaaagagcaattggaatttggtctgctaaaatttaattgtgttgctatgattttttttttaattatatatttgtcaattttaagctcatatggttttagttatcactgcctatcagcgtccaagcagaaatgatgcttggagtactcgtatgagggaaaaggtgatatatgttaatctatatctttttcggtttgtcttgagaaatatgaagtatttgcattatcttttagctgtcatgctcaagagtattcattttagtagcagcatacctatttttactttgttcgaaagatacatgtttttttctataaagcaattggaactcggtctgccaaaatttaattgtgttgctgtgtgtttgttttttttttttaattttatatttgttaatttaagctcatatggttttagttatcactgcctatattatttgtaaaagtcagtttgctttgctcatttttgtgtggtttgatttgatgatttaattttctgttcaaatgtttcctctggctataatatattatgacttaaatatataataattaccttttgataaagttgaagaggtttagcagaaatagaggcggtgccctgaaaatcaaactgggttttaagaatattaatcttggatagtggttgttcttcgtatggtatgaccccaaagtgacgaagataatgataatgtcaccattattattagcataattctcttcatattacccaacttattaattattattaacctcattacttatattaatttcatatatttattttttaatactaagctggttgacttacgatatggattaatggaaattatatgtgtataggcttgaaatgatctcttcctcttgcgtcatgtgatgattttcagtaggaaggacgacgagttag

SEQ ID NO: 55746 - DNA, 1247 bp, Cannabis sativa
cactctattaatatcaatatgttttcgagtactatacatcttgtttaagcaattaagaaattaatgtcctgtgttttgattgtgttcgaagttccttaatattcactataaatacatacatacatatatataattccatgataccaacctaataattaaatgacaactaaaaatttaaatgtttaatattatataattatgtgtattaatgatgattcatgagtgtttaaagttagttataccgatctctcatatattatacatctagagagagaaaaagagattataactaacaatccctagctagctaataaatggatttatatatgtcaatatatatgattatatagaatatatttaattatattattgtgtaattgttacaaaaccctaaacaataggatgaataatctcatgaaggggctgtttctacttattcacagatcatcacattatcttatttataaattgtatttcatgtaagaataatcccaatatagaggagaatatatatatatgttatctatcaaatatttgttttcttatttctttctatagtatttgataattgataataacaactaattataattaattaataaagtaaactttattaacagatattttttacacataaatttatggaccttataatgaactttttgttgaacatcacacacatatatattagcactgcaatattgcacaaatatacataatatatatactaatttatattgatgagtactattcatggttgtcaaaaattatccaaagggaaatgaactataaaaaaacgtatatatatatatatatataatatacagaatctgtagtaagatttcaattaatgaaggcctacttttcttttacatatgctatatatgtgtgttattaatggattattagtaagaaaaagaatcctaattaacataaaaaaaaataataataaatttttaggaggagagaactaaacaataatattccatgttctaattttatttagctagattatgctttaaaaaaaaaggtaataattaagttggtgatgaacaaaacaaatctccatatatcagtcaaattaattatctttagataacttataattcccattttccattatatatggaatcccttaatactaatattaatacactaatttcatcagtatatatatacatatacacacatataatattgacagtgtagtttagtccaaaattaattaatcattttccctacttaaa

SEQ ID NO: 55747 - DNA, 943 bp, Cannabis sativa
aaacactattgtaaacacattatacaagcctcttaaggccaataatactgactcatgggctagggtttatcaacacatgaaccatgtaaaaactattttcttctttattactacattttattatttcttaagctcttatttaactgatttatgaaaatctcagttaacaattacattagtttggtttttcaaaacaaataagaataaataaggaaacttaattactttactaaataaagagaaacaaaatgagaaactaagtagttttcctcttctctcctgttagtgtgaatatattctccaaaatcagggatataatcgtgacttgaatacttcaagatatatagacaatatttctaaagatatactatatgcatgtactctggtcgatgtatgcgaactgaccaatggtcgaatgacgcagcatactctgtctagatatttccagcttcctcttcgaattggttgtttataagtaacaaattactcaggatggcttatcatcaagcgtgttgttctcctaggttatgaaatcttctacacgtgtgacttagatgaatgttacatcaccctatgcgaaatctgggatactaggtttattctgtctcaaacacacttcgagtgcaacttgaattgttgagtatgcaactctattgtataatattcaagtgattatgtttaatgcacaagctctcaaacgtcttttcctgtctattaatttaagtattattttaccgtaataatctttctctctctaaacgatcctttgaaattcaacatttttgaatatattactgtcaaaagtggtactattactgtaaaaaaatataaaagttttataatttttatgtttaaaaaaataaatatactaatttctcttacttagtacaataggttgtaagcaataaataaacaatataatcaatcaaactcacccataaaa

SEQ ID NO: 55748 - DNA, 1286 bp, Cannabis sativa
gctgaatgagagtgtgagcgagagagatgaatgggagagggatattttaattttttaacatatacattatatatatataaagaatctttcccaacggtgtttataagtgtggtatttcccatggttataaaccgttggttatatatactatttccaacagttatgaattgttggaatgtattgtttttttttaaaaaaaaattctatttagtattgcccacggttcttcactgttggcaatagctatcccaacggtttttttccatcggtgctaaactgatggaaaaaatctcctcttaccgtttccaacggttctcataatttaccctcttattaaccgttgggaaaggtcaatttaatataccctatagctataacctgcatgcgtttttttatgttacttatttttgcaggattacgtacttggcgtatgaaacacataatatactattttagaggcatgtgtaaattgtaaattgagacacataggcttgatatatatattatatataaatgacaatataatatatatactacacagttttgaatcctatatttatgaggcttgtatattacatattgtcatatatatatatatatatattattgctatttaaagtttcgatctttcacaatcaataaaacaaatgtagtaaatcaaccatattatattattattaatggagctataattaaattaatgttatttatatatgttatataagaaaaagattaaatcctattgcactataccgtgtagtaatgtatatacctacctaaggatatattccaataaatagtgtgaatttcaattcaatgtcaaacaaatctctctagtaattggtatcaacttcagttggtaaacgaagccacactcagtagatcaaggactcgtagatagtaacatgtgatgagtggatgtcatttttctcacaatatcctaaaattcgagaaaatatttcttacttcttaagatatccagaaagtttgatgtctccttcgatatacccctaggtctttctaccagctaacacatccattagagtagtttttccagcaccacttactcccatcagcactgtcaaaaacaccaggcctgaaagcaccactacttgatttctttaaagaatcaacttatcatcatctctaattccttgcttcttcatttagtttggttcaagtacatgagttgcattattgaatttgattacaaaggcagcaaaataaactcaatattttcatttaaaacttacttgtggcatgtcaacaaagtaaacaatatcttt

SEQ ID NO: 55749 - DNA, 672 bp, Cannabis sativa
  modified_base (471)..(473): a, c, t, g, unknown or other
gcaaattctgactgcttgcacactcctgggcagtgtcgcgaacgtcttaaagagagcgacctagtccgtgactcaacccaaaagtttttcattcgataatatcatttctcttttattttgctagcagtttattcaataattttaagacgttctttctgctctgactactactaatgaattttctggttctactgctgacattaacaagccttttcgttttgaagggtttgcactttaaacgttagagatagaagatgttgttatttctgaccatgacaaaagttgcatttgtgcttactattttgaaaccagttgtgtctgagactccacctcttgctgagaagaaggatgaagtcgagaagtacgaattgcaggttaaggaaagggactcctgggtagagaatgattttctgtgtaagaattttattttgaatggtctgtttgatgatttgtatgattattataattctnnnaaatctgccaaggagatatgggaagcattactgaaaaaaatatgatactgaggaggcgggaacaaagaaatatgctgtgagccgctacctgaagtttcaaatgaccgatgataaattagtcgaggcccagtctcacgagcttcataaaatagctcacgaaattctatctgaatgtatgactattgatgaacaatttcaa

SEQ ID NO: 55750 - DNA, 547 bp, Cannabis sativa
gattaagtggaaccactcagattaggtaattatcttccttccattcttcttgctttttccattttcaaatcttatctttagtaaccattaacatgaccattttctttaatcgtttgaccttgaacaaagcagtaattcgtatatttaataaagtgaaggactcataaactagttgatactaaaacttgataaatcaaagggaaaaaaaatgattcttttttttctttcgtcctgctgtttcatcacaatcacgaataaccttcaaaacaacctcagctgaaaaactgaggaatcataaaaacaaaaatggagaaaaaaaataaaaggggtaaaattattaccagctcctgaggagagaagatccacctggcacggtgagtcgaggtatagaaatcggacatggcaactccggcttctacgaaccaagtccgatacggcttaccgaacctttaacagagagagcaagaagttgaagctgagagagagttgaacacaaaacaaaagaaccaaactttatgcacacatgtttaaattaaaaaaaaaaaaa

SEQ ID NO: 55751 - DNA, 1246 bp, Cannabis sativa
  modified_base (27)..(29): a, c, t, g, unknown or other
  modified_base (348)..(350): a, c, t, g, unknown or other
  modified_base (1205)..(1214): a, c, t, g, unknown or other
actaatcagattgtaaagagttttatnnngggcataaaacccaacagttagtcagtgtgaccaagggcttccaacaacccttgtccaagaaacctcggatagggcttgtctaaagctcggtatcgaccgagtgactccccttcttccgtgtgcacacgtgatgcacctgatttgggatatttttatgcaaattaaaaaaaaatcataattaatttataaaaaatctaaattgaactctgtaaaagcctaaatttattaattttttatctaatttctagaaaaaatagttttagaatgaaactaaaaatatttattatcgtaaaattgcgatttccatacaatcatcannnatgcacataaaccaacatgaacacatccaaattaacacaatcattgttttaaatccatattttatgaaagtaaatcattatcatggctctaatactagttgttggggattatttatgaggatctagatttactacaatgtatgttgtttaacatcctaaatattaatttttaaaacaatggaatttaaacacatataaagtttaagaaaccttacacttgttgcaacaaaattaaatgactcattccactcagatctcttacccttgttcctttctgtcacagaatattatcaagatctgagcccgattctccttcaagtattagattcttcatagtcttacacactatgattgagtacttactttttatgtgtcggcatgtactcaatcactaagaggctataaatttttctaaagaacactcaagggctttcaaaatagaagaagaaaaaagaagaacgagttctcaaaactctctagttgtctgacaattagtaaacttggtaatgagtcattagttggatcatgagactatcctattctttttatactattttacttagggttagatttaaattatatgacattaaaaaattgttaaaaattgggaaaaatctccttaagtggctggccacatagtgggccccactaaattggaatttttgccattttgctcaattgttcatcctatatttcacaaatgccaaattttccaattttaatcctctaaatttcaaaactatatatttaataattaaaattaattatcaaataaaatttccattcaatatatctatttattagactttataaagtttcttaattaataaataaaccctaaaacctcttttcttnnnnnnnnnnccctagcttagtgaaaattcacaaataagaca

SEQ ID NO: 55752 - DNA, 1786 bp, Cannabis sativa
gtttgtcggcttttgggtatggcacagcttctgaacatagcacttaccttgggctaccatgcactatggggagaagtaagaatgcctttctggttttttgaaggaaaaaatgaagaagaaaatcaatggctgggaaactaggttccttcaaaaggctgggaaagaggttttattgaaatctatggcccaagctttgcctagttttgctatgagtgtctttctccttacaaaggaaatttgcactcaccttgaaggtttaatgtcgaaattctggtggaaatcacaatctaattctagtaagggagtgagttggatgagttggcaaagactgagtcgacataaggatgttggggggcttggttttcgaaacttaagggactacaatatggctttcttgggaaaacaagggtggaggttagtcactaatgagaattctctggtagtaaagatttataaagcaagatatttttcgaatgggagttttcttaatgctgagttaggtctgaatcctagttttatttggagaagcttatgggaggctaaaagcttggttaagatggcggctaggaaggctattggggatgggaaatccactttaattcgggatgaaccgtggctactagggattggaactaattttattacaacctatcatccaaatcttgctggtagaacagtggatagtttaatgaaaattgaagagaaagtttgggataaagagctgctgtttgacatgtttactgaggaggaaagcaagtgtatcttatcaatccaactcagtgattctgctactatgggtaattggttttggtctgaggaaaaatcaggcttatattcggttagcagtgcttataaattgctgcagcaacagagtggggcgtggccgtgtactggtgcggtgtcttgctggcagaaactgtggcagatgcatgttccagcaaaggtgcatcacctggtgtggcgtgctatggtgggatgtcttccaacaaaggtacaactcacaactaaacatgttcatgtggatttaacttgtccattatgtaatgttgaggttgaatccatttcacatgtattattacattgtggatttgcaagatcttgttggaatatatcaatggtgggttatgtaggggaggcggctactgatttttctagctggtttgggaatttattgattaaaaaccagcaggatgtagttgaagaggctgcaatggtagcctggaggatttggttggcccgaaatgatatcctttggaacaataaaagtactaaagctttagatgtggttaaattagctagaactaatcttgttacttggagaaatgctcaacaacaaaaatcagagcctttacttaatgtcaattatagtaaggacctggagcattggaggaaaccaattgtgcacaaatacaagatcaatgttgatggagccatctttgaagctgaaaactgttttggtgtgggaattgttgttagagatcaggccggttatctagttgaagctgtgtcaactagtaaaattggtgtggtgactccggaagttgctgaagctattggggtcaaagaggcgctaagctggatcaagaatcatcatctttctgatgttgaaattgaaactgattcgttagtagtggtgcaagctattaatggagaggttcaaatgccctcccaattcggaatgatagtacaagattgtcgtctgatgatctctactttaaacaatgtattaatttcttttgttaagcgatctgcaaacaaggctgcgcactgtgttgcgagaaagtct

SEQ ID NO: 55753 - DNA, 737 bp, Cannabis sativa
tgccggaaaagtcgcaggagtagctgctagcgtcagaattgtcgtcaaaattggcattgtcaacaaaaaaatcactaagaaaccgatttcttggtttttttaagtgatttttctggcaacaatgccaattctaacgaattttccagtgccggcagcaagtccagcaacttttccggcaccgactgctactccgacgactttttcggcaccggcagcaaactccggtgacttttccgacaacaatgacaaataaaacttcctaaacaaataaaaacattaaatatgaaatttaaaaacctaattacatatatatggcatatcaaatactataaaaagacctaaaaataaaaaaataccatataaattgatcaaacttaaaggtgccatatttatcataagaacttttaaaatctcatactaagtcatatttatcataagaatttttaaatgtgccatattagaaatggctctattttcattttgctggaaactaacttctcggcccaatcccgaactgttgtgggaattaacattttagctaatgataacatatgatagagtggtttactataaaaggtataataaatcaaataaaaacatacagtcatagtggttgtgtacaaaaggtaccaaaaaaaaaactatcatttaataaaaaaaaaatgaaaaagttaaaacaatctaacttctgctagtatctgcttttttttttttttttttttttttgtttttaactt

SEQ ID NO: 55754 - DNA, 2663 bp, Cannabis sativa
gttaacacagcacagttgaataaagtgagaacaaaagaaacagagaggtcgaccaactgcagtagtagcagccatttgaatctcattttatcgtcctattctctttgatactacatcaattactcaaccatggcagattttaccatgtaatttcattttcaacaactcaaatttatttggtagatacactacatggatcaatatcataacccaaatcacattacagcagacaatgaaatttaacataaagacctaaatgatctaatcatcaatgagtatgtatacttcatttaccattcttccttgctaaatttccatttgaatatcaagcatgtactacactcaccaacaagatcacctcacaaatatgatcatcaattctcataacctagaaagtctcatctattctatactcatccaacggctaggactaaaatgaggtatctaatctcattcgctctcctagctttcgtctctcggtctcggccaagcagagtgcttttgccattggtgtactttccgatctctaagcatttcatagctccacccgaaattacctcaaaaaataaattttgttttcaaaacggttaaagaggaaaaatcatttgtttgttttttctttttcaatcggaatattataagtttcttgtcccttaagcttagcttttactatcaaaataattttttgttctaatacagaatgaaatcatatgttgactgttaaaatttgcagcatattttcccgagtactttctagggaaccaaacaggtgattaaagtacagtagaagtaataggaatagtaccttacgagcgagaaggcgataagccttcttgatatcggaggaggtagcggaaaggtcaaggccgaggacagagtagtggttctggctatggttgaaagaggaagaggaagaagaggctgcgacgatgagtgaggtccggcacttgcggcggcgccggtgagagaaagtggcggaggtggtggtggcgctggagacagagatggtggaaatgggtcccacgaaaagatgcgactgcatcatctaccgttgattcattccaattcccaaatcaaattttggaacctaatttttggatcctttcacaacctccaatcatccaatccatacatatttgtgaacctattctattctattctaatttttatttaataaagtaatatgacgatttaagatttttgtattggaacgatgacatatgtattattgtgtttttgaacttttattttttataaatagttcatgaactattcacagtattataaattaatcattctttaaagttttgtcacatgtaaaaaaacaaaatattattataattagtcaattatcatattagcgtcacgtgtgtaatttagtcaaaaccaaccaaaccccctattggaacctagcacccgccagacctacagttattgtgccaccttaacaaaactaaagtagagcgagaacacctacggttgatcaactccacatacgaccggggattaaaaccgacccactgacaaaccaaaggaagactaggagagaagggagatagcgagaggagaatcgatttgtcaagcctacccgaaagtacttatcgaaatacccgactaaagtcacacctaagcccaaggaagagcagacgggcctagctagactgagagatttgaggagatatcctccgcggcgctaggtttccaagagaaaaagtgatgcacttgaaattgttcttaactaagaatctcacgagtgatatgtttttattagtccaattaatttttaactgatacctcatattaataaacaaaaataaaattaaaaaagtattgtcaccatatatcaaagtccaagaagttaaaaaatataaaaattaaaacataagtaagtttaactacaaattaatcatttagttatatagagttaagaaaatattttttaatttaatttaagtgtaaatattattttgaaccttgtgttttacaaaagttattgattggactctttattttattaaatgacaaattagatcatgtattttttaaaataatattaaatagtatcatgattttttttaactcgatataaatgtattatgaaaaaattggttacgtttttttacatctgttcgtgctaaaaactgtcttcaagttagttatattaaaaaatattgtcagttttaatgtctaaacttaataatatttcttttgtttttgttaaatgatctgcgaccaaggcaaccaattatttggcgactgccgcttgttcctccttaggtcgtggctatggtgggaggcttgtccctactactttttaagctattgtagtggatgatttgtctagtcatgaataagatgcatctttttttgtcaaaaaaaatatatattgtcgaaaattaagcccagagtcttatttttactattgaagaaatcatatagtccattttgttatataacaaaatagattgttcaatctataatttttacaaaaacacatatatctgaaatgatattaacccttaattttatgaggagtgctaattacaacctcctattacaatctcttagtcaactttcatgtccgaaatccatatgctaattttttttttcataacagtattcaatataattagagtatcatctaggggtgggcatcatccaat

SEQ ID NO: 55755 - DNA, 1417 bp, Cannabis sativa
  modified_base (921)..(929): a, c, t, g, unknown or other
  modified_base (961)..(969): a, c, t, g, unknown or other
aatccccgcttgaagagcagtaagttgtatactgtcgttcaagtttctaacccttgcagcaactgtactgaaacgacttaagtacgccttaagtgtctcgcccggttgctagctgctttatgttagtaagagaagacgcttcaggtcacctgtctcttgctccctgagactgtttcttgaaatctttagacagctgttcccaagaagtaattgagtgatgggtgaatttattgaaccagctgatcgctgcgccagtcaacgaggtgggaaataaaatataacgtaagttgtttgtaatattgctggctcgcattattgtgttgaagttgttgaggtgagtgaccggattcgtagtcccatcgtatgacaagacgtgagggtttttaaatccctaggggaattcactgctcataatgtctagatggaaaggctcgggttcttcgtctgagtcataaccaagccgtttccgatattccccatcatggtatctcttgaatttatcttccaactcaatgattcgcaattggatttgatcctctttcttttggttggaattgagttgtttacgtaaattgggcttcttccgatttaattgatcaagaagatttggacgtcctcgatcatcattacttgtagaccttatacctgagtaactctcagattggctactcctcgtgtaactcatactttcttgatcattactgcgtcgaggttctcatgcagatcgattatgatctcgaggtctagtacgtcccgagctagaacttgcttcgtcacgcaccgaacttctcctttgggaatgggttgatacatgccccttgctgagatttgtatgtgcccttccctatcagttcgagaaggacgttgatggtgtctcggtggtaacccgcttgtcctaggttgagtcccaggatttctctnnnnnnnnngagggatttcctgttccctagtctggggttgnnnnnnnnnttcctgttccctagtctggggttgtcttctgctcgcattcctgggagaagactctggcaaatcattgttttcattcccctgggttgtaaatccccggggtctctgaggcacttcttgacgaggtgcctgatcatttggttgttcatcttcaggaacatccccaattttcccaggttgctcctcctgagtgttttggccggggtcaacctgagccgtctcctgcctcctggttggttttgtgtgttgttttcctttgccgccctagctgcggctgcctcccgttccaactcaacttattgttggtttgcctcttccaaacgtcaccagagttgacgattttctcactcgaccaacggtacatacctagtggggtcataggcaccctcacttataggcgtagaaccaccagcatttgtgttgggttcctcattcccagtctctgggttct

SEQ ID NO: 55756 - DNA, 984 bp, Cannabis sativa
atttttcttttaaaaaaaaaatgattacaaagatatatattttttttttacaatatttaagtttaattttttattacagataaatattaaagttttatttttgacttaagtttaacttagtttaatttttttatgaaaattatacttaagttttatttttaaaacttcaataggtatctagtcattaagtgtcaagttaatgttctaattggttcaagtcattaaatttttatttttttttatttaaatattagtttaaatatactaataagaaaatgacaagtggatcttaacaaccagatacctacaaaagttttaaaaatataacttagatattattaccgtcaaaaattaaatttaagtatttatttacaaccgagatataaatttagatatttacgctgtaaattactccttgacgataatattgcttaagttatatttctgaaacttccatagatacctgattgttaagtgttaaatcattattaacgtgtcattttttattggtatatttaaattaatttttgaataaaaaataaaaattttatgacctggaccaattagagattgccacatggtaatttacttaatgaccatgtgatagtcagttgtcctgtgatcctaataccagataagttgtgtaatcccacatcgcttagaaaaggttaagtgtgataattttgatattttgtaggtctgggactacacagtttaagaaagtttaaaaggattgaatagtactacatatattaacaaggtgcatcttgttttctggtagcccatcacaaaaaaactccacagttaagcgtgcttgacctagggtaatttcaagatgggtgagcgtgcgagtgaggacaaagtacgctaggaatacttgtgttggtcggtagggtcagtcgttagtccaagaagctgctaaattgacgtactcgtgtataagagtcattagtctgtggggaagatccaatggaggcttgaagc

SEQ ID NO: 55757 - DNA, 1615 bp, Cannabis sativa
  modified_base (1387)..(1407): a, c, t, g, unknown or other
tttttttttttttctgaaaaataaccatattatcataaaacgaaatagttagacctcatgttcattacagaataagttctccggtaaggagaaaaccgaaatagagccgttcaaatggtgggtaaaagtccacttagccacattatgagcagcaaaattacaggatctactaacattaataaaattacaactaataaacgagggagaagatttagagcaaaatgagacatagttctcaagagcccaacgagactccttcccattgagcgcattgatgactgcaccaaccaaaatatactttcgtccttcaaataaaaaaaaaatatagattcataacgcaaaacatttctaaatcgcctttagcaaaaaaaaaaaacatttatgaatcgttagatgcaataaatggtgacgtttcagatttttgaatatattgctctgatgggctgactaattaactaccacggcagttggatgggcctatttataggaaccaccttctggttcatttccttcccactagacactagtcacataacaaagatttttctcatttggaggctggaccctttttttcatatgagtggccgtttgtttgtttgtcttattttattttccactgtaaggaaaaaaaaatctaatagaatccatattttataatataatatagatatggaaaataaggcaaagatgttcaactctctctctaatatgatatgtacacatgtacacggctttgaatcaattgagaatttagaatcttccatccctccaatcaggaaaagcaattagtagaaatgttgctatttagagagcatcgtacgtttattatacatatatatatgaatcatgtataaatataataatatatgttatcatctaatctgaagtgtaatctagagttgttatgaaaggtcaagttttgcacatgaaaattattaaataaccatgcatgcagtattttcaacgatggataagaaatttttttgagtttcaacttccaactaatgaattgcatttcttttgcgtcttcaaccaaaatccatctccactctctaactccatgagttgatcaaagtttaaagtctgatatgaaataattatactagtcagtagtatatctattgacatagtatatataatacatgtattaaaattatgtttttttcagtcaattttaattgaaggaactacttgatgatgacactttaaagaaattatataagtgcttcattaatcaaaggcagatcttgaaatttagttaaactaagatgtaaataagaaaaggaaaaaaaaaaaacataagactggaattgtcaattttaagagaacatgtatatgtgatatgtgacacacgtatatctatctttatatatatactagatgagannnnnnnnnnnnnnnnnnnnnatattagttttatttaagttttagtggtttttgtttaagaattcggtaactaattgtaaattattttttaaacgatatgttttataaaaataaacttgttaagaatgtgataattgtatatataaacttataatatctcacttttaacatttactcttggtttcagaaaaattaaaaggatcaatatatttgttttgaaaaatttaaa

SEQ ID NO: 55758 - DNA, 1091 bp, Cannabis sativa
ctgtagtgcttttgacaattcatttgttatgcccaacaatgctttcataaaatgtagactaaatataaaatcaaatgtcgacatcaaacccatcagattacttgcttcaaacttttgttcagattctcgagcatcgtctactactgttccaagaacatcagttatgggagagaataagttaataaagcttaccaatgtagcataatgtgaatcccaacgagtatcacttggacacgtaagattggtttcttgatttagccctcttccacttgcaatttcaccacgcttgagtgcttcagaaataacaacatcttgcttttctctaagaatatcacaacgcttggaagaagatccaacaacatttatcaccctagttaccacactaaaaagatagccgactagaatatgtttctttgccacggctactagagcaagttgaagttggtgagcaaaacaatgaacataaaaggctgatggattctctttcaaaataagagttttaagacctttgaactctccttgcatattacttgccccatcataaccttgtccccgcaatttagatatgctcaatccatatctagaaaataatttatcaatagcacctttaagtgacacagctgtggtattggccacatgttcaatccccacaaaacgttcaataacatgtccatctttatctacataccgtaatacaacagccatttgctctttaatagaaacatcacgagattcatcaactaaaatagaaaacattgaatccccaattcctttaatgatgacatctagtgtttcaaaagctgcagcccgtacaatatctttctgaatatcaggtgatgttaattttaaattctcaggagcattgctcaatgaaactgctttaatgtcatcatcatgatcggaaagaaattttagaattgcaagaaagttaccttgattactcgagtcttcagattcatcatcaccacgaaaagcaagtccttgtcgtaatagcaaacgaatgcaatcaaccactgcttccaaacgagttcgatactcactacgagcttgctccgattgctttacaaaaaatgtttgaatatgttgttttt

SEQ ID NO: 55759 - DNA, 794 bp, Cannabis sativa
ctcttttgtatttaattctgaacgtaaaagttcactatgtgattttactgccaatgcaaagttattgcaattcccaataatatacctactaactatttctaaatttgaatgtttagatgagttttgagcatattattaaagatgtgcttagcaataaactccaacaatcatcaatgaatggtgtttatataggtaatagcttatggcatcactcattttttaggtacaatttcacttttagtagttattgtaattttactttttcgagctcaatactaaaataacttttaaaataatcgcaattgttgtaattttcgttccacatcatctaggataaaaaaaaatactggctaaaaagcagttgcaagttaacctggagttgataaaagtcattgttatcataagactccttactttactagcatttgtatctgaaattcattttagctaagttgacaatgctatcaaatagcatctttatcagcttatattcatcgtacttgtaagatgcatcaactcttgttataatatcaaaatatttttttattctatcatcactataaataaattaagctatattcgtcttcccaatcccaatcatttattcaataaaaggacaccaagtttaaaactgcatacaacttaaaccaaccaccaatcaatatgattcttatcaaaatcacacattgaatatcgcattcttacaccaaaagagcaaggtaataatctgaatgctctatttttaatcctattcctaaactgaaaacatattttttaattaaattgttttctac

SEQ ID NO: 55760 - DNA, 639 bp, Cannabis sativa
ccttaagcttttcttgcattggtagagacaaaatggtcctcttaccaataggtcaaccaacatatggttgaatatggaggattctcttttaggcttatttaggaggacatcactattttgatctagtcagttgaatcgagtttcaatttcctagaagtacatggaacaaaaacttaatgtctcattaaccacataagcttcaccgatggatccttccgatcaagaactatttttgacatttcgtatgtacacagacatgactcgttcaattagatacatctacctgtactacattggttcctcaagtatcacttttttagttaaatgcatcactaggtgaaccatatatatgtcaaaaaatgacggtggaaaaatagtttcttatttgtaaagaatgttcaaaatacttttttacatgctctctccaagtttatagcattcaatgttattcagtaaatttagtatgcaagtatacgcaaatcaaatcaagtaatataataaatgaagtagagtaccgttcccttgaggattgattatgaattaccactacaagaaaagggaccttttatcccacttttttagttaacaaaaataaaaaatgggataaaagatatattgagactttttatcccactttta

SEQ ID NO: 55761 - DNA, 1458 bp, Cannabis sativa
tgtactttgctacaaatattaattatgaacacattaaaaatgaatgaactagatttaataattataatataactaagatccaatcgcaaactacagcaaatcccatattgaattgccatttgctcgtttgagaaaaagatcacacgaaaaaagatgtaatacactaatattttgccttactttataaatactattttatgcataacttagaaagattaaaaacgatttgaaatacaatagtgtgttccaatatcggtaggccaagggtagaacagaaagtggttgaagaggatcaggatcaataggcacatgcaatggcacaagtggagaagaaggctaaaggtgagcagcagcttactgaagatctgccaaaaaaatacaagacaccaccaatgaacatagaccaccacatcaaaatttcttatccacaaagactccaaaagaacaagttggataagtaattttcaaaattccttgaaataatattcaagaaactgcacattaacatttcctttgcagggacacttgagcatattccaacttactttaaatttatgaaggagattttagccaagaaaagaaagttggaggaatatcagacagtgacacttactgagtagtgcagtgcaatcttgtagaagaaactaccatccaagtttgaagatcttggtggttttaatatttctttctgaattgggggttcgttggaaataaaagccctatgtgacttaggggcgagtattaatctaatgcctctatcaatttttcaaaggctaaaactgggagcaggtcatcctataatagtttctctacaaatggcagaccactctattgctcacccttggagtatatgattgaagatatttttggtgaaggttggtaaatttatttttcttgctagtttcttaattcttaacatagagaaagattgaaaatattcccatcattttgggaagattattcttggccacagaaaaagtgttaatagatgtacaaaaaagagaattaacatttgcgagtaagaaaatgagtttaaatgtatttgctccaattgatattcctacttgttgtaaggttgaattagtgaagaattgtcaagaagaagaaagggaagtcgcaaagaacaattttgaactattcgatgtcgtataaaaaaattaatgtgtggaagttgtaaaagtgaatcgagtattgtgaatagcttcaacatagagagttctcttcatttggtacagggtcttattggatgcagattttgttcaagtccttgccttttgtttaaccttaagcaagggctttgtacttctcaatataacatatatgagttgtatataatttctttaatatatatgtatatatttttctactaatttgactttttttgtttttttggttcctctagctagcttcatcatgtttttccgtctagtaatagttttagatttttttattgtcgca

SEQ ID NO: 55762 - DNA, 2460 bp, Cannabis sativa
  modified_base (2406)..(2411): a, c, t, g, unknown or other
taataaattaatatatcataagttatagtaaaaaaattagagattgaattatcatacaatttagaaatcttaaggaattttttttttttaaatccattaaaactcattatatgattttacaatctttgtcgataccgtatctcacttgtatttttagaaaaaaaaaatactcgcacaatttgaaagtgaaaatggttcgaaataaaaaacaaaacttatttatccaaaattaaaatacaacaaattaaattaaattttaattaatttaagttctttaatgttaaatttacactattacaaaaagacttatttacagtaattttgaactaacatttacgttaattgtgtcggtttcaataattaacgtatattttattgacgcaaaaagatatatatttatttatgctattgtttgcgttaattcccacagatgcaaacaattgtaaaaacacattttgttgcacgtgcatcatgcgtcggtccaagaccgacacaaacattgaaaattaaaagaaaaaattacaatatgatcaccataaaacaaatctaaaactagcatatttgaacattgaacaaatttttcaaaaagggaaaaatagatcgagatgaaaaagaaaagagagagaaatgagtgacacaaagttaaaacttgtaaaaaatgaaagagtgagagaaaaatcgagccaaagataaaccaagaaaaaaagagaaagaagttctcactgcctattggtgcggtggtcgttaacttatgcaactaggacgaataaagatcttctgttaaaaaatggtacatcataatatattaaaccaatctaaatatgacacatcaatttattagagagtattttaaagaaaaaaaaactgtctacatggttggttaatagtatttaagaaaaataattagttgagttggtacatttggattggtttaatacattatgaaccaattttttacaagtgatcttgattccgactaggacgggatgaggctctagattaggccgaggctggacttagagagagcaggagagaaggatgagagatttagtggtttgatatgtgtggagcggctagattgtttcaaaaaactaataaatatatattagttatatttggtatggatcgacttttaattacttagttttttttttctatgtgttggtttaaaatcaatgcaaatgatttacactgacgcaaagtcgcatcggataaaaacatacataaaacttaaataaggtagcaatcgtgttgactcttgttaataagtttttttagcagtgttaatagaattcatcaagcacaaaaaaataaaaatatagatagtaaagaataaaattaagagataagtaatattatttcattttttttatataaattaaataatttaactatgtaattatataaacatatatatattatattgaattgtaccatatctcatatttttatatagtaatatgttttgctattgacttgtaagaacatctccaactatatgtttattattgacttataaaagcatcttcaattatattatgtaaacatactctttaggtgaaatagggaatgtttaaaaaaaaataaaaggagttttaatcaattaaaaaaatgtcttaataatgaatactgggcttgctaattgtaaatagattcttatatttttttttataactttttaatattttttcaataaaaaaataccattatttttttattattttattagattgatttatatttaataaatttaaattatataatattattcaaataattaaatactaattaaagtagggactataagcatgattgaagcaaaaataataaaattgatttactattttaactttttaaccattatatttaaaattgattaaaaaatagagaattctcttgagaatatatacaataaatttaatgtaatatattattatacaatacatgatctaatgttgttgatcagtcaaattctacattttatcaaataaattgagggggtaagtgacccctattaaggtcttatttggctccgctctgaaagatttttttttttctttcttgaaagggaatgaaagacttgggcaatggttagtggtctcattggtacatctcaatatcaaagaatttttgtatgaaaatataataatatatactctgtatatcgtttagaagtttcattcatatagagatttcaatatatattataccatatttttagctatatatggaaaatttcccatattaaataaactcctctaaatcatcaactttatagtagactgtttcattatatttatatatgtattaaaaagcgctaaagaacagattagatactctttctgaaagctaatggacaagtgaaatgtcacatatatatgtattgatatttatatatatatatannnnnntatatatatatatatatatgaggcccctatatatgtacgtaatctgcaa

SEQ ID NO: 55763 - DNA, 867 bp, Cannabis sativa
aaatctgattatattgtttagggcacaaaaccaaacagtttcatgagtcaatgatctatgcctttaatgaagagaggaaaagagaagacttatgggctgagttagaagaacttgcaaagaaaatagatgaaccatggatgttaatgggggactttaatgagataatgaatggtgatgaaagaatggggaggagaactcactgctgtccatctcagggacttcgagattgtatggaaaattgtaatatggtagattttaaatacttaggactttttcacttggaataataagcagaagcccgaagaaaggattttttccaaaattgatcaagcaatggtcaattcgcactggattaatacctttccttgttctgaagctgtgtttttacctgaacttagttttgaccatagccctatcttggtaaccatttatgaggataggagttatgggaggaagccgtttaggtacttcaatatgtggaagcaggcgcctaattatgatgtactagtaacaagatcttggaatgaggaatgtaggggaaccaaaatgttttgtattgtgcagaaattgaagaaactgaagacagttctgaagtgcattaatcagtcgggtttctctcaaagtcagtagacagaaaacatcacaagaggagccttagctgagctgcaatctaaactaaatcaagaccctcaaaatgcagagatcatgcaccaggagcaggaagcaggagttaagtttgctgaagtgaataaggcccttgatagcttcatgtcacaaaaagctaaggtgagttgggctaaatttggtgatgaaaactcacacatttttcatgcttctctaaaattgagaagaattcataatagaatt

SEQ ID NO: 55764 - DNA, 1137 bp, Cannabis sativa
acttggcataacaaacgattctcgaaaggtctaattagagaaaggctggatagagctattggctctcatgattggttgaatatgtatcagtatgcgagagttcataattttccaatcacagtatcggatcatgcacctatcttactagatacttgtatgtttgtcaataaaggtttcaaaccttttcgattttttgatgcttggacgacggatgcttcttgttcagaggtggtgaagactacatgggttaatacggatgcgactccctgtaagcttttaatccgtaatctggatcatactagaagagctcttcaaaaatggagaaagaatgttagtggcgacgtggacagtgtcattcaatggctggagaatagactttgtcaaattcaattgcagcaagtctcggatgctctcttagctgaagaagctggtcttcaaaagcaaattactgatgcttgacaaagaaaagagagtgaatggcgtcagaaatctagagatgtttggttgaagcttggtgaccgtaacacgaaattctttcattcatctgcaacggtcagaagaagacggaatcaaatatgggcgttgaagaatacaaatggtgaattatgcagcaataagagggacatttcaggtatcataaatgattattttaccaatctgtattcttctactaatcctgtgttgcctcctgattttggagatttattccaaacgaaattgagtaatgaagctaatttgagtatcactgcggtgccatctcctgaggaaattaagagagctattttcgacttgcatcctcttaaagccccggggcctgatgggttctcgggatgcttctttaggaaatattggaatattgtggggcaaagtttctgtgatgctatcagagaagtctttagggagggacaactaaattcaaaaatgaactatactcatatttgtcttgtccctaaagtggatcatcccacaatgatagaacaatttaggcctatcagcctgtgcaacttccattataaggtagtggctaagttgttatccaataggttgagacctttcatggaagatctaatttcccctgttcaatcggcgttcatcccgggtagatggatagcagaatcctccatactcacacaagaa

SEQ ID NO: 55765 - DNA, 861 bp, Cannabis sativa
tttgaatgagactattattgcgttgattcctaaagtggagaaaccaactgtggtggctgaatttcgcccaattagcttgtgtaatgtcattcataaagtggtttctaagtgtttggctaataggttgagggggacgctagatgaggttatatcggaatcgcaaagtgcttttgttaaagggagacttattgatgacaatgcgattattgggtatgagagtcttcattgtatgcggaagaaccgattccaaaatgggaagaaattggctttgaagttggatatggcaaaggcgtatgatagggttgagtggagttttcttaaatgtatgatgctttggttggggtaccatgtgaagtgggttgatatgatcatgagttgtgtgacttctaggtccttttcctttcttattaatggggaaattaaagggaaagtgtatccgcaaaggggtatacgacaaggtgatccactctctccgtttttatttcttttttgtgctgaagcgttctcgtgtttgatacaacaagcggaggggctgggggctatccaagggattcggtttgggagaaggggtttatcggtatctcatttattctttgcggatgatagtacggtgttgtttgatgctgatatggtggattgtcaacgatttcgtgatttgttagaaagctattcggtggcatcggggcaagtggtcaactttaataaatcggaggtgtgttttgggaagcttgtgacatcggagatgcgaactgagatggatgaattccttggtgtaaaagttgtggataatcatgggaaatatcttgggttccttcttttgttgggcagaataaaaggcagttgtttgatgttataaagaat

SEQ ID NO: 55766 - DNA, 714 bp, Cannabis sativa
  modified_base (671)..(675): a, c, t, g, unknown or other
ttgctgcaggtgttgttactactgtagccaagtttgttaggatattaaccccagtagtcgcagccggtgcgataggcagattggtgcgattatttatgccctgatcgcccatttggggatcacggggctcttcaacgtcacgaggtgcctgggaacgtgccctgaaaacagcattaaggggatcgcgtaggtcgcccctgtgaacctgatatcgtcctccctgcggtgtctctacagaacctgacctagtgtacctactgggtgcgaccatgcgaggacgaggaggcagattcaacatcattgtctcgtgactggggtctgctgcgaggattgcatcgttcagggtcttcctcagtctatgcctcctggttgggatatctcgcagattggtccctcgattttggttgattcaattcgagtccttctgggttggccctttgttccctgtgagtacggttattacgacatctagagttagttacctgagggtttttcgtgcgagtagtgggtgctcgaggaggacgtcgggccctgttctgtccatccacttcggcctgcagggcacgtagctggtcttggattgcagtatactgatcggtggtcagttggacaataccctaggacaccgccgccggagtgaagggtggaaagtgccccgttgtggctgctgnnnnngatgtttccccggcatgagggccagtagtttcagggaat

SEQ ID NO: 55767 - DNA, 1204 bp, Cannabis sativa
  modified_base (368)..(368): a, c, t, g, unknown or other
gatcggatgaacacccctaatagtcgttaacaatgatcgttatgtaattagtctcacgtcactattgatacttagagcaaaatttttgataatgatcaataattgtctcaaacctcttgataattgattcataaagtcattctaatcttactacccacactttcaacgaatcaataaccttttttttttttaaaaaaaaaaacaaataaaaaataaaataaaactcactacccacactttgaattagtgtgagtaaaaaaagtgagccttataggagaaatgctaaagggcacccgtagtgcctagcactctcctatgtgtcaatatcactattagttaaactaaatatcgggtcccatataatttantataatagtttttagggagtatcgctagctaatcgcaacgcgacatatcgagaaagtgctaggcaccactaaagcctaatagcaatgctcttatattagggatagaagctttgttgggcgattgggatggtagaaattaattaagatttgttgcaactaattattatcattattattcgtgtcataattatcattattattaatttttattttgaaaggtcactgttattattattagttttgaaactgatcctaaaataaataaagattgttgctattattaattattttttgttgctattattaattattattttttttttgtggtaattgctaaagttatatgatgatatatattccatgttattaaagtcagttactaagctagttgtattataattttttttgaccatgttatactccttttttaattaaaatatagcaattaagttttgtaatgttgaaagttacaattgtataatgcatcaaagttacgattatttattggagtgcagttacatagattatttatcaatataaattatttgttttgtaattgaataaaaataaaaatgcagcattaattgaactgtttttcactatatttttaaattaaaaaagcaaaaatgaagaacaaaagtaattaaaaatcaagaaatggagaaaaatgataatgtaaaaaaaagaaatgttagagcgccacatcatcctacttaacaacaggattatatagatactagagaacggaacctcgcttcgcgcggtttttaaacttatatatatatatgatgattcatgttattatagaaaccgctaattaaaatgatatttatatt

SEQ ID NO: 55768 - DNA, 1409 bp, Cannabis sativa
tgcgtgccgatctaggtgcaggtcttggtcatagtcccagtcctattccagggtatcggtcacgttcttgtcaagtttcagtgttgggtcccagtcctggtctagctttgggtccttgtttgagtcccagattaggacactgactatgggtcttatctaagctccggttcacaaatcccgagacaggatctggatcgcaatcacgggtcccagtcagggtctcggtctaggtctgggagcgagactagggtgtagttctaggtatcgattccaattcatggtcgtgagtgctgctccatgttcgggtctgagtttaggtctgggttcgggtcctgagtccctgtacaggtttatattcaggtttgggacccaatcccaaggttgttctgtgtcgtagtcttggtccttgtctggttacagtttttggtctgggttcaggtcctggtcatggtcctggtcgtggacttgttcctgggtcccgattcgcttctggtttttgttccagattcaagtgacgtggtacgggttcgggtcgagtttaggtctgagtttgggtttgggtcttgatttgggtctggggcgaggttcaggatcgattttcaatctcggttagggtccaaggttgggtttggttttgggtttggatcttggtccaggtctcggtctagttcgagttcaaatttcggttttggttcccgagtgtgggtctgagtctaggtatgtgtttgagtcctgatttgagtttgagtttgggtttgggttctggtctaagtgccagatccaacaccgactacaggtcaggtccaagcatcgagtcccggatcccaggtcccaaggtgggtcctaggtccagctttgggtatggggtcaggtctcggatcctgatccaagttctgagacccaagtactggtcccgattaaggggccctattcttgggcctaggtcccccatatatgttcaggtcctacgtccccgcctaggtccaagttcgtgttccggttcgggttgggtcttaggtcccggtctgcgtcaaggtcccagtttgggttcgggtctgagttttggtcccactcccagtgtggatccgagtttctggtctgggtcttggtttgggtccggccccaattttcggttctaagtctaggtctaggttcgggtcccaatttgggtctaggtctcggtcttcgtttaggtcccaagtcataggtcccggtctcggtccaagacctagtatggattctggtctaaatttgggtttaggtttgggtcctattactgtctgagatctgggttatagttcgaaacgtggtccgattctgattttgggtccgagatagggtctggatcaaggtttgggtccgggtctgggtttgggtacggattcaggtccgggtcctggattcaaaca

SEQ ID NO: 55769 - DNA, 1055 bp, Cannabis sativa
agttcctggtaaaataacttccaacagttaggacttagcctgcgaacccacgaggcatgtaggttagaaaatggttaaaatatttccaagactgcatttagggtttaaacaacaatttacacatgtatgcgatatatcttaaacagtttggaaaagtacaacttacgaaaccgttaattgagctcgacactagccttgattgtacatatcttgacggtcttcagtaaacaaccaggtggctctgatacaaaactgtaacgcccgtatttgaaaacttgctaaaacaaaattaatcttatcatattataattatataaccatatacgtcaggatcacgagtttaaaacatagttgaaaattacctttacaatgtatagttacgtaataatttttttttatttacacaaaatacagggcaactcaaaatgttataaaactgaaactcttcaggttgcactaccgcgcgatatgtacaatccttgccaagctcaaactcactgctcctccagcttagcctttccgttacctacacatggtagcaaactgatgagtcaacagactcagtaagatatgcataacatatataacaataatgatgtaccggctttatgcttaagtcgtcatgagctcaataattgagcctagcaaatggttaagaacgttcttaaaggaagttcgaccactataccatatgcactgaagcaccgactctgtactcgtgttggtagggtcgaccactgtaccatatgcactagattaaaaacttcgtactcgtgttggtatggccaatttgtactccaaagagttacctagggttgtaccacataaaaaagagtgccgattctgtactcgtgttggtaacaccataactactctaaaatccaaaactgtactaacacccttaaattacattattgctagtgttagtagtgtaaacaaataataacatatactcatacacatatatatgctttatgctatcttacctcgtttccgtgctcaggtgtgcctgtaagcctgagtggaattgcagctcgacgtttcatagggcccta

SEQ ID NO: 55770 - DNA, 1212 bp, Cannabis sativa
cacttgcagcaacgaaatcaattgagccattttcggatacatgatcgtcttccgtatctgaattatgttcagggtgaacatacactaaaacactgatatcaactgtaacactgagattacaacaaaaatcaccagtccactttcgtagtgcgtaatcaataatcttatcagtaacaacatacacatatgtatgtagatgcgtatcaccgagcatttgattaatgatttcttttgcatcagtgttgtcactattcatcaacttctcacgtggaataaatagtacataatcgtagcacacggcatcttcaacaccgtggttcaacaacagagctctgaaatcttcatctgattcattttctggaatacgggaaaatttagcgaatagatggatgataaaaaaagaatcgctcataccactaacgcttatggcatttatattatctaccctttcgatatggaataacggatcacctacaactggaggagaagtgctcattttctctattcaatctctaaataaggatagaaagtgtggatgttaacagggcactcacaaatatatacacaaacattacaaattaaaactactttttctatatatatatttaaaacgaccattaattttgattttttgagcaataaattattataatagttcatttttcaaataatttgaacatttcgggaaagaaaataaacaaatgacaagacaactatacattttcagtttagtgtaaagaagactacatattgaaatagagatattgaaaattatcaaaatttcacatgagatgtggaatttggcactcaaaaatttgaaattactttttatttaaaattttagtttcatattaacataacaagttgtgtttactggtagaattagaaatagaaatgcatttttttgttcaaagatactgaatatgaaaatagtaaaaatatataaattaataaacactacttagataaaaaaacgtcatataaaatatataaaaataagaaccttcttcaagtattcaactacaacactaaaatataacttaatctgttttctgtggacaattcctagaatcatgttctgttcccctacatatcttgtaatatcttggagcactagttaactttttcttctttttagcgcgaacatcactattactttgtgctcttctactgcttccaccaaaagaatttttgcatgcccttgagagttta

SEQ ID NO: 55771 - DNA, 607 bp, Cannabis sativa
tttcaatccaatccaatccgcacaagtgtggatatccgcactttgtggattggattggattggatcatgcagattagatttgattgactattttatgaacacccctactaggaactcaactaggaggttcaaattgaaaattaagggcctctgttcagcacataattttttatgcaggtcaaccgagacacttaaatttgaaaatgaggtaagagtagtatagaatgtatatgtatatgtgtatgtgtattatacacatgttgtttatctgattcatatgctaccaacactagtatagtagcaatactaagtgcatgtggtacatcatatgatgttcaatggtacaattcagtgttactaatactagtacaattaggtacgtagtgcgtgtggtacaacactcagtggtacttggagtatgatttaaaccctactaacactagtacagtagcggtacgtagtgcatgtggtacagaggtcgtacctttattaagaatgttcttaatcatctgttaagccttccagataggtgtatatgcgcctaaatacaagtcggtaatatattgtatgttatatgattttcttactgagtctgtcgagtcacagt

SEQ ID NO: 55772 - DNA, 1274 bp, Cannabis sativa
gacaaaaatacgatttcttatcttctaagaatttcttttttctctggttttagctcttgcagctgagaggctggtgctatggctaaaacaagattgaagaaccatggaaaatcaaaatcttctgttaaaaactcaaagaagaaagctggtaatggtgttcttgatgtggatcttgttgtttctatggggaaaatttctgaaatcgagccattggagttctcggatgaggaaggtttacaaggggagggtcgactcaacgagggagaagatcgtcatgattttcaacctctatctcccaattcttcattaaaagagattcaaaggcaggatgaggctaggagtgacgctcggaatgatttcattcacttcctcatggccagcaatcaatgtaatagtgaaatacggcaaggtaagaactcaattcctcccattttgcgttctaaatctgtgatgcataacttggagaactcttttaaggatacggagcagggtaatgagaaagaaatcactcttgatgatattgaagaggaaattttgttttggaatccttcaatcgtgtgctatgttcctggagttaatccaccattgcacgtgcttgaaggatttgcaaaaaggatttggcatgataaggttgaccaagtgaaagttttgtcacatggaatctttatcattcggtttacctctctagaattcagagaccaggtgatgaatgggggatatgtttttttcagtcgcagacctgtaatcttgaaaccttgggaccctaatatcaatttcaagaaagaggatgtcaagtgtgtcccaattaggatacagcgtgaggatctagaattgaaatattggggccaaaggtcactctttaagattgttgggcaacttggtaagcctcttatggaggatgctgtcaccaaagatagggagaggttgagctatgctagagtgttaattgaggtacaaatggaccaacagctcccgagtatgatagagtttgaaaatgaatatggtctcaatatttcagttagtgtcaaatatgaatggaagccgattagatgctcccactgctcaggaattggtcattctgcagaagaatgtaaaaaagttgttgttccttcaaagcaacagtgggtagtgaaaaatgacaatagaaagaccaatattcctgatgtacctgatgcagatggttttatcaagatttcaaaagggccgagagtggatagaagtgaaaagcagcaggtgcctcctgtagtaagaatggagaatacttttcatgctct

SEQ ID NO: 55773 - DNA, 1179 bp, Cannabis sativa
gtcaaaatgctggttttgttgggcttctcgaaacaagggtcaaggttcacaagcttggagccttgtaccttaatgtttttaatggttggtgcttttcgtcaaatatagcttggcatcgaggagggaaaattgtgattgcatgggatcctatgaagtttaatgtggatattctcaagtgcactagtcaactaatgcacttaaaattggctacagtacatgggaatttttgttgttttctcacggtggtctatggagcaaatgaaagggaaggcaggaagaccttgtgggaggatttatgcaagctggatactaatgataaatggctcctgatgggagattttaatgcaattttggccagagaagaacgagttgggcataaggtgaagtatcgcgttgagacagaatttcttcactgtgtgcaacattgtaaattggaagatataagggcaactggatgttactatacttggtctaataagcagcagggacatgatagaatttattctaaaatagaccgagtgttggctaaccaggaatggattgattgttacccgaatgctgaagcgatctttgttaatgaaggggcttttgatcattctcctagcatgctatctctgtacccgaattggagaagtggcaagaaacctttcaaatactttagaatgtggtcatcacatcctatgtattctacaaaggtcaaggaggaatggaataaagaaactaggggcaccaaaatgtaccagcttatttgtaaattgaaagctctcaaaccagtcttcaaagagattaataaagagggattctcggatattcaggcagcctattctcaagccaagactgatttggatctgcttcatgaccagttgcaacttgatcctctcaattctactctgcacactgcagagctagaggctagagacaaacttgcagctacttttaaaaattacaattctttcttgcagcaaaaggttaaggccaattggatacaaaatggtgactgcaacacatctgtctcccatgctagtctcagacaacgatatagacagaaccaagtactatctattgtcagagaagatggggtaagagtctccgaacccaaccaagttactgaagcttttattgattactataaaactttgcttggatccaagatggtgaacaggaagaaagtatccaaaa

SEQ ID NO: 55774 - DNA, 799 bp, Cannabis sativa
ggtagacatttaaagtggccattgcatatcaattatatatgtttattgtttatgatatattatgtctgtactgtactacacataacacactcaaaatgtccagactactaaggccataagattttgatttgtttgcaatacagatttcttgcaaacccaaaactatattttagttttttcttttttttttcaagtttttatggacaaggttaactgatccattcagtcactgacaagcaccgcgatgttcctgcagtgtatcttcatcagaccttgtctcaaaatggatgggggaaagtgaaaagctagtttcaaatcttttccaaatggctcgtgatagtgctccttcaataattttcatagatgaaatagattctttatgtggtcaacgaggtcaaggcaatgagagtgaagcatcccgacgagtcaagacagaacttctggttcagatgcaggtactgtgttgtacattttagaaattgtctcatatctacatggctcgtatcagttgttataggccttggaaataatgtacattcaccttataggaactaggaagactgagggaaaaattatggaattgaaaggttggaaacttcttccaacgcttacttttaaaaccctgaaagccaaccagatggagattatgcttattcttaacaatatatgattcaccaagaccatgtcctaaagtcatacattatgaattttacttataatctctgttttttttattggtcaaatcatcatgtttaagcttataatataaataaaattcaatatgtcatgcgaatagtga

SEQ ID NO: 55775 - DNA, 1910 bp, Cannabis sativa
atgatgaggagttggatccccaccaaaatttattcatcataacttccatttggtgaattagagacttggaaaggcaaaaacaactcattgcttatattggaatagattgagctacaacttttagtagaacttctttacctccaaatgaaaatagttattcctgccatgcagaaagttggttccataatttttctttgatctctccaaatagaacttttttgtctctcccaaagtatgaaggaagtcctagatagcgttcatggcaaggcttgattggcatatgtaaagtttgttggatgttgagttgtattgcagtagttgtgttaggagagaaggaaagaaccgatttatcaacattcaatctttgacctgaagcacgacaatagaaatccaaagagcgtttaatagcatcaatggatcttttattagcatggctaagaacaaggctatcgtcggcaaagaacaaatgcgatactgaaggagcaccccgagcaactcttaaaccttgaagatgaccacgattttcctcatattgaaaaagtcttgaaagaccttccacacaaatgataaagagataaggtgagaggtgatctccttgacgaataccacggcttggagtaacctaaccctgaattgagccatttatcaaaaatgaaaagaaagtactgttcaggcatcgctgtataagctcaacaaccgaaggagcgaatcctaaggcgatcatcattaagaaaatgccactccactctgtcaaaggctttactcatgtctagcttcgtggctgcataaccttcttttcctctttttagatgcttaagagagtgcaataactcaaatgcaaccaacacattgtcagtgatgagcctagattgcaggaaagcactttgagactccaatatgaccactgaaaggaaaggctttaaacagattacaatggactttgaaacagtttgtagagtacattgcacatacttatggtgcgcaattgagacacattccttggctttttaactttaggaattaatgtgattaaagtcttgttgaaagcagatgaatcaaccccattgttgagaatctcaaggacggttttggtgaccaaatcacccacaatatgccaatagttggtgtagaacataatcgacattctatcaatatcaggactactatcttcactcatagattttagtgcggtgtaaacatcctcggcagtgtatggtagggtcaagatgtcattcatatcaacagtaattttgcacggaactgaagaaataacatgttggagagcctccgaatcaataccttcagtagcataaatattactaaaataatcctcaaccagtctactaatgccttgaagagaagattgctcaacaccatgatcatcaatcagagatttgatggtattataagagaatcatgtgtattaagattacaagattttatctttttttaagtgttaagtacatatttattctaataaatatttattatgtatattatacattatacaacaaaaatatttattatattatacacataagaggaaaaataaaaaatgagacattttaatataatagtctttaaaggtctaagttatcataacttagaatcatgtacaaatgagcttgtcagcctattcaagttcatatcaatttggaattaagacaaaatatttaaaaagagatacaagaacaccaaaaaatataatcacttttctggtgtaccaaagaaaaacaaacataccaattccacatttaatttaatgtttcaccaacttgaaaggcctaaggtaagagtttaaactaaagttggaggggtgcgccaagcccatgcagtagtgcaatacataggcgacacttaagagtcccaatagcaagctaatgtgatggactcttccccttaaaaaatta

SEQ ID NO: 55776 - DNA, 771 bp, Cannabis sativa
atctgattatattgaaataggtttaatttagggcacaaaacccaacactaatgaccatgcccaatgtcaacctgggcgctgatgaccatgcccagtgtcaacctgggtgctgggtcacctatttggcctccaagttgatttgtttctttctttaaagcacttttttcctcattttggatgatgaagaagaagaaaattcaggggagacatcttcaaaaatgtggtcgaaagcacccctggttgacaacatgtcaacctaggcactgggtccatcactaggtcaacttggacaccgggtgcccaggtgcctcaaataggaagtgttcctattcttattctgatgcctctagcatgtttgtgataggtcttattcttgtctaagtgcaaggtttgggcaatctacactatgatgaacctaaaaactgaaacactagcctaggatgtcaacttgggctctgggtgaaacccttggtgttcgggttggcttctgggattctgatttcacatttttcagttctcaagctttgaacttcgagtcttcctgacttgttggtttagaacactgaaggatgatgatttggaaacaacttggcgggatctaaatacctattttggatctcttgtagtcaacctgtgcgcaggactagggagccttcccggggttgacagctttgactcggagcacttaaccccataaatttttttcttactactttaatgattgaaaccctaaaaaatattgtttcaggtttcaatggcaagtaggcttta

SEQ ID NO: 55777 - DNA, 755 bp, Cannabis sativa
aaaaaaaaaaaaaaaagtataggccgattattgttaattaattatgtatataatataccacacatccatatcgaactcgtcatcttataaaaaaaactacaaattaacattaaatttatataatgaaaccaaaacaaaatatcaaccaaaacattatttcgtactttcaagtttcaataagtaataattatattgagaaaggtaataagcttataattttaaaaaaatgctaatattattttatttgtcttataattttcagaatataatttttgtgcagtatataatacaaaataaaatcaaaaaattaaattgaaaattatagagtatattttattttttgtttttaaaaattaaaaacaaaagtaattatttataatttttatttttatttttgtaattaaaaaattaaaaaataaaaatattacactgatagttattataattcctcttagtttgtcacattatagtgtggctttggttggaggtaatgaaatggaagagaaaaaaagaaaataatctccattttattcatttgtttggctgcacattaagtgttggaatgtcattccaatagatgatttttctgctattttggtggaatgacaattctattttaaaattgaaggaaagattatgattagaaaaaaaaattaataattttttttatcaaattttttatgcttaatttttaaattttattctatttcatttctattctcattcacgttcatatttttatgttttcattcctc

SEQ ID NO: 55778 - DNA, 893 bp, Cannabis sativa
aaaaaaaaaaaaaccaaattttactattctctgccacgaactacttcaagctctccctctcagcctgtgagtgaaatggcttaaaacatttaaatgagtagagtacagcagtattattagaaagaaattaaagagtaaaattatgcataatattaacaagggtgtgaactcaaaccagaaaaagaacccagaagaaggaagacaacacaaacaaaatataaaaaaaattgtatctatactatatttctcttgaatttttctatgagctaatcttacagtacagaactcccatatatatatataggtgaattataaaaccaaataatttattgaactgaaccaacccataccataattataattacatagaaacaatacacctttttcgataccccaaacaactgtaggacttcccaatacaagaagactaaaagattacacacaccaattatatcaattcatatttccaatacaatttactaactcatttttatttaagcttcttcccaccgtcctatttatttaacttctccatcacaaaatattaactcatatataagacttttttttctttctttttttgctggctgctgaattatgtgtgatattgattaggaaatacttttaaaggttttataatggatacgattcaagtttaaacaataagtgatagtgattagtatatagtgaaggatttccacaactatttctttcttacaaacaactaaaaatcatcatcttagtgaaatgtttttagtgaagaagaacaagtttgtttgccacactcatgcattttatgatcaatgaattattaaaaaaactcctaatgttaaatttgataaattttaaaataattataaaatataattaaatactttaattgattcaataaa

SEQ ID NO: 55779 - DNA, 1307 bp, Cannabis sativa
atttggaagaagataattgctggaaaaagttgtggaaacttgatgttccccctaaagttcaacatttcttatggagggcttgtacgagttgccttccaactaaggttcgaataagtacaaagcatgtcaatgtagatttatttttgtccattttctaatgttgagtgtgaaacaatcttccatgttcttgttgattgtggttttgctcgaagctgttggaatctatctgctgcagcctccattcctagtttatttcaggattttagcagctggttctttgctcttttagaggaggatcggggtgatgttatacttgatgcagcaatgctaatttggagcttatggaagacccgaaatgaggtgttatggcagaaaaaatctgctacagctttgagagtagtgaaatcggctaggcaggtccttaatcaatggatggttgctagatcccaacagtctttatttcagactggtgtttctttccattgcaaccagtggcgtaaaccagagaactttcatattaaggtaaatgtcgatggagctatttttgaagcgtttcaaaaggttcgggtttggttgtgtggctcgtgattcaaatggaagaccacttgaagctatttcagcgagttggaatgggattgtttttcctgaaattgctgaagtggttggaatgaaagaagcgctgagttgggtcaaagataaaggttgggaagatgtgatcattgagtcagacgcgctattggtagttcaagcaataaatagtttagtctccatgccatcacagtttggtttgttggtggctgactgccgttttattttattatctttacgaaatgtttcgattttttttgtttatcgatctgcaaataaggctgcccattgtgttgctagggggtcttgtttttcgtcagattgcgttttcaatgagctgaatgctccttctgttttgcaaaatattgttatggctgaggcctgttataatgcataattttcctttgttcaaaaaaaaaataaaataaaataataccttcctattataaatatatctctctcttgaaaagaatgagattctcattaaaaagataaatagccaagcaaagagtccaaaactcacaaaaagtttagaagttccagccacaaaatcatagcatgatccaaagcaaagcaagatcataacctatagtattgtcaagacaattaaaatacttaaaacaaagaacattgaacactatctataaaaatcatgccaaactcaaccataagcttatccttagaatttaaagcatttaccacttataaacaatctgatt

SEQ ID NO: 55780 - DNA, 1261 bp, Cannabis sativa
  modified_base (285)..(293): a, c, t, g, unknown or other
cgaagtaaaataagcattgacaaaatttctaagagcaaactggacgtttttgcctggtcacatgaggatatggtcagaattgatccttctgtaatttagcacgtcctaaatattgatcccagcttcctaccagttcaacaaaagtgaaggttgttggacaaagaacgagctctaaccctgaaggacgaggtagagaagctacgaaataacaacttcataattgaagctttctacttggcttgggttgctaatctcgtaccggtacccaagccgaacaagaaatgnnnnnnnnntattgatttcatagacctcaataaggcatgccccaaagagtgttttccactcccaagaatcgatcagcttgtggacgcaacagatgggcacgaaatattaagctttatgtacgcttattcggggtacaaccagatcaaaatgcatccaccggaccaagaacatacaagtttccgaacagatatgggtctatgttgctacaaagtcatgccatttggtctcaaaaatggtggagccacaaaccaaagattggtaaacaaaatgtttaaagaccagatcggatgaaacatggaagtatatttggatgacattctcttaaattccaagaaggcgtgggggcacatagatgacctggacgaatgcttcaaagtccttaggaaatacaacatgaaactcaatcccttaaaacgctcctttggagtcagcttgggtaagtttctgggctttattaagaatgaccgaggaattgaagtcaatccatagaagatttaagccattctagatatgaaatcgccaacaagaactaaggaagtacaaaggttgacttgttagatcgccgcactcagcagatttgtttaaaaatcaacagagaagtgtgttccattcttcaacatcctgcgaggaaataagcaatttgagtggacagaggaatttgaaaaagcttttcaggagctaaaatgtaacttgtagaacttcccgtactcttgaaacctctggacggagaagaacttgggatatacttagcggtcacggagcatgttttaagtgtcctgctaattagagaggaaaacagcatacaacgcccgatctattacattagtaaaagactcattgaggtcgaaggttgatatccattgatagagaaactcacttactgcctggttctagaaacaagaaagttaaggccctattttcaagctcatctttttcgggtgtacactgaccaaccgttacgccaaatattgcaaaa

SEQ ID NO: 55781 - DNA, 1505 bp, Cannabis sativa
ttgcagcaagaaaataagaagctccctgacaggggttatggccgcggcgaatggagaagctcgtcgcggtgagagtgtgattcctttttttttttttcaaacttattttttaatcaaatatctttgaaggaatatatataggacgttcaatttttagcacctttgaattgtgtttttgagagaaaacccaaatagaaagaaagaagaagaaggagattacgacaccaataattctacatcattgttccttttcttctccttaatctcatactttttattatgatttatattataatgtctagttcagagtagtttctttttagttaagggttatattaaagcccaagacatgaattttaatttctatgatgaatgttaattttttagtttctattatatcaaattacttctattcttctattttcaattgtcatgattattactttaattttgtttagatgatcactaaattaagttttattttaatctattatcatcttagtattgatattcacctaatagtcaaaggtttaagtgtttgtgataaattataatttttaatattgtcaaatatatttttaattgtgatgaagaatagaacctaagctaaatgaattatatgcttcattaatttattgtgtagattaatctatctccattgaactcaatgctttatctaagttaaataaattgtatgtttcatagatttactatttaggtaaaaaaattaattattgagcgcttcgccttggttaattacaataaggagattgagataattgactgcttcatcgttatttgcaggattaataatttaattagaatactaaaataacattcattattaggaactaaagatgatgttgagggtagagattaacctttacttattcattgaatatcgtagtatcacattttatttgctttctaatttatgttatttaattttcataattaaaactcttttttttaattcttgtctttaatttttgaataatcaaataagtatagtcctcgtgggatcgatccttacttactattatattgaaataactagaagtattggaatcaaaataattagtaaatttgatacggcatacaacacgcatcagttatctcaaatttcgcacaagatgacgtgacacctcacaaggtaacacatggaaaatatgttaaaacctgattggagcatatctctcaaataagctgaccaaattcctcctaaagttggatttatccaagtaaagctatcctgcaattagaggtgttagtggtgcgagttgtaatatttttctcaaaccaaactgcatatgcggtttttgtaatttcttaaaccacaaccacactgcgagatcttaaaactgtaaaagctacaccacaaaaatattatatggtacagtgcgtttgagcggtttacactatcatcattatcgaacattataataaaaatttaaaaatcaatctataaaattttaacaatacaaaaaaatattattaatatttta

SEQ ID NO: 55782 - DNA, 953 bp, Cannabis sativa
gaatattaggtcaatttttcttatgctaactttgttctctttggaagatatggcataagttgtgtgattttgaactccattagggtatgtatgttagcttgtatatgttgtggtgaattttacttagaatgccctattttgatgctatgaattaatctatatgagttatatgaagtttgagtgatttggtaatgtttgtaggtgtgtaaaattgacatttttgaatttttcaagcccatttgctgtgaccaaaagtatggtcgtcgtggcgaggcttgaacccgaaacacaggaatgcccctggccaatctcgaagcgacgatcattgatctagtcgtggcgaacccacatcgataatgtaattttacttgttttttttcagacaggacttttaactatgaatcctgatttaaacgttatttatatcattgaaaagctcattttaagccctattacatggtccagtgttggagccctaattatgaattattcataaatgttattttgagattaatcctattgtgtgaaacccaagaattgtgactagaaataccagcacttggtaaagatcatatttggattaagatttctccgcatgcactaaaaattaggtaagatggaaaacctaagcacatagagtatagcacagtgtcgcaattatatatattatttgattactattgtgaaatcatgaattaggattattattctaagtatgtgctatgataaatatggaataatatgttagcgaataagtgatcagagttatgcgagtaaggcataagtaggttagactcgataaccaaaattgagataaaccccaataaggtcttaaatgtaaaagagacgtgtgagcataacacgtaaatttatgttatataaaaattagatgcagttgcatcatatatatgaaataatgtgatatctagtgcggtggcacagttgtatacaca

SEQ ID NO: 55783 - DNA, 2528 bp, Cannabis sativa
cgacgctcttccgatctcttgatgacgtgaatcaaacccgtttcgctcgaacctactagatggtcatcaattttaacattcttaggcacttgtatctattttttaagcattcccaactgaatgaggactttgaacactcttgcttagtccttgggaatttcaaaaattcattaacaaagaaaaagagaaaaaaaatcttatctttttttcacttatcttttatctctttctttgaaaatttagaattttcttattttttgttatggcattaaaattgattggattgaaatcgtaatcctagttggagatgccattcaaaattagagagaaaaaggaaaaagagaaaagacttttggccttttgcttatcatttatctttttcctttaatttctcaaattttttcttaatcccaatagctttaggaattgttgttaccttttaaatttgtattcctattcctcgttttataggaattcgaaattagctttaaaaaaggagaaggaaaaagatataattatatcttttacttttcatttacctcttccttaggaagctttaaatttaaaagactccaattagctttaggattaggaaattggactcaactataaataagtgagttgagaaccaattttttacacttctcacttcattccacacgcctatagcactttgagaacacctttgagatttcattttcatcgagtctccaagctttcttcacttcaagttagaaaaataatttttttcctttccccttgacgccatatttattatttcttcttcttctctttctttgttgatcttagtccaagaactatttaacttctaataacccttgaaataatttttccgaacgttccaaaaattcaaaacactttacttgtgccttgataaattcttccaagctactttgactttttctgaccaagtttgactttccataagttgtaagtagcttaaattattgaacttgagatgactaggatgaagagaagcaaaaaattacctgatgaatataatccctatgttgctcagctcattagagttaagctaatagtgcctaagtctaagaacttagacaaggcgtgtggtggagaggtgatggaaactaagcttctcaaagctgtcattgagagtgatgatccgagagattaagctgttaagattaggcctcttgtgtctagtacacttaccaagattcaagctcaaacaattcgggatgattactgtctcctgaaatagttgttcagaagttttcacatggtgctcccaagggttccctgaatacttgttgcagtgcctggtcgagattccacatgaatgcgggtgtttacttgcccttgcatccatgttttatatccatatctgacttcttcggtgtatatccttaccataaacccaaatggctataggattctagccaccttctttatattttaccgccttaggaactagcctatcccaactcctcatgagataaaatttccctgtgacttgaaaaggagcccaacccttagagattaaggcttttaccacttccatcaatttggcccattcatagaacacataaccaagagtaactatagcctttactatcaagagtatttttatactcctgttcttccgtcgagacacattactttccaaaatgttggccctttcaaaagacttgctcctcttattgacatgaagaagagagtcgatgccatgttgtttgagattaaggcatgggagagagattgtcgaaccctctttagcactaaaaatctttagaaggttgggttgatcatgtcatgccagagagtgtatgttgattttggcttccctaataaatcttggaccatgccactcaagcaaagtgatgaagatgcttagagtgctaatgttattctgtctcaaactgtgacagaagaagttgttggaacttattttaccaagatctaaatttactagcatgtatttttgattatattctataatctaacatcataaacatgaattttctaaaagacaatgaaataaacacatataaagttttagaaaaccttacattgatggcaggagaatattatgactcattccgttcagatctctaatccttgttcctttctgttgaatagtatgccaagatctgaacttgaatctcctttagtgatggaattcttcacaatcctccacactatgactgaatactgacttgaattgtgttggcaaggtactcttcactatagattcaaaattatgaagagaaggagagagaaattcgaattctataagagaggctctcaatttttcagttgtttaacaaagtagaaaactaggttatgataacgagagccatcttattcattatataggatttaaattaaaaagataaaaaaaaaaaaaagataaaaaaaatagcttaaaataaacttaagtgaccggcatcatatgtggaccccactagttttaattttgctattttatttaacaacttatcttttctttcacaaataccacattttaattctaatcctataaa

SEQ ID NO: 55784 - DNA, 565 bp, Cannabis sativa
gaaggtgtcttggcctctgttgcgaatcatcatacttcctttgcggtgtggcgtgctttggaacaaagattcgctagtcaatctcgtgcccgactactccagctcaaaggtcagttttcaaatgttcacaaaggcaatctctcgatttctgactatgtggataaagtccaaagtcttgctgattctttggtgatagccggttctaacattagtgatcaagatattgttcttcagatcttgaatggcttaggtgctgaatttgaccccgttgtctccggaatcacttcaagaagtgactctttatctcttgatgaggttcaagctcttctcatgtctcatgagagtagacttgaacatcacagcaccatgacagatgtttctatgaaacttcaagctaatctggcctttgggaacaatagaaacaacactggtcgatataccaccagctgctcgaggaaatgcccctgatactttttcaagaaatggtggcaaactgcctccccgtggttcttttggctttcaaaatcgtctcatgtgtcaactttgtctcaaaagtgggcacacg

SEQ ID NO: 55785 - DNA, 1849 bp, Cannabis sativa
tactgggtagaatagacgatggtcgaaaactgtcgagaaaatagtatgggccacagtttaaaaccgtcgcctatagtgttcactataggcgacggttttcaaccgtggactatagtataggctacattttaaaaccgtagcctatagtataggccacagtttaaaactgtcacctatagtgttttaggcacagtgttaaaccgtagcctatactataggccacggttttaaaccgtagcctataatattgtactcaaatacaacttttaggcaagaatgaatgcatgcatgtgatttagtgagtttaaacttaattaattaaataaataattaattagtacatgctgattctccaataggacttggccatatatacaacaagatgggcagtaacaaatctacaacaaaatatttatgacgaacactcttgaaagtttacccagtcacactcaaaaattatttaggctttgcaaagtcattagctatattggattttttatttgagtttacaattttaataaacaatacacatatgaatattggatttacagaaaagatccgtgtgaatattacaggagcttgtcaaattaatgaaattgaaaaaagtcaatgcattaatgttcatcatcaacataaaaggttcaaaataacacatatatatatatatatatattaagaagacagtaactcaaaaactaggtcaaaggcaccctgaagttataatcactaagtttaggagtgaactcagttcttgtcaatcctcttgaaagggttaatgtttagatccacaagagagtaccaaaaagattctttaagtctcttccaaaaagatggacacataccatgaattaacaagctagttctaaagctttgtccacgcctgttgacttgtaagatgcaatactagaagctttcaaaagagagctcaacaaatcattttcaatgcattcgtacctacaagtaatccacatatacacaagttacaaaaccatatgcaatcgtatatatacatgcatgttgattcttaaatatattattctttttcttttaagagagggaattattattagtattcttcaaagcaagtaaataaagaaaataaacaagaattaacttaatcaaaagaacaaccagaaataggtacactagttcactagctaagaaaatattaaaaatgtaagcaaaaacaaaactcttataaaaaaagggtcattactaagaatcctttttaaagacaactctcaaatactaaaccaaacataataatcatcataaaatcaaaaacaaataaccgaaaacaaaaacctaacttctaatcacttggaaggggtttggttttgttggattgtgcagaaacttaaagaaacattgtgagaggaagtatttgaaggtataaaatatattaagtatttgaaggttagtaactacttttatatatggcttgtttgaaataatcttacatatatgtgtgtatataactgcagagtgcctggagctagctattggaaatttgaatgcaatgatgaaaattaaaatttttaatgattttagcaaagaatacgaggtgatgaagttacaatatatattacaaataataatgagtttcctatatcaaaagatactgttgacaagacaccgcataaataaatgatagaaccacaaacacaatttcagaacatctctttctcatgttcacacaagcacaatgtttattgatctttactttatgggttaccattaaaagaaaatgatagctaggagcacaacaaatacaattgcagaaacttacaggcaaacaagaaaaaagaaacaatgggaacgaaaatcataaagtcattaaatatactat

SEQ ID NO: 55786 - DNA, 2380 bp, Cannabis sativa
aaaaaaaaaaaatctcaatactacaaatttaagtactaaactcgattagaactcataagaaacataatactaataattacaaacaaaattactataatttctttatcaaaaatgtgatattatatttagggctattattcatgaactaattactaacattaaaataacaaatcactatatattttaattattaaaagtataaaataaataaaattattaccagaaaataattaaaatatgattttctttgtagtggtgttaatggtctcttaattgataatggtggtcccttttcctcttctaagatgttgtgcaatgtgaattaaaacatacagagaaagatagagtaatatcttgtaagaaaaagtaagagagtagtaggcttgtagaagaaaaaaaaaagtaactcaaatgtctttatttttttattatttttttagtactgaaaaatctatcttattataatagattattatatttactatccaataaaaatgaaatatatatgtatgctagaatacgagagatagtataaaaaataatattataataattaaattagatgattgagatttttgagagtgagcaattaaaataattaaaagattttttttagttaagaagtaaaaggaattttttttatagcatgggcttaagcccacactggtccttcattgaatccgcttttgcttttagcatgcgccaaatttaaactacattatatactactattggtatttaattttttgaatatggactaaaaaatacatgtacaccatgtttatagcactccattaaaagtgctcttagccgtttgttttctaaaaagtaacatttttgtaacatctaatggctcccagcaatatgagccgatgttaaaaacatcaaacacattgaggtactgcatgattggcctaaaaagtatttctattaggcatcagtagtgcctagcactttctaaacgtgtgtaacaacctattagttaggcacgctacaattttttcttaattagtgtacactctccatgctaatcaaaagtgtttgttgaaaaacgtgaataattaaaattttcataattaattttaatcttaaatatataataatttacataatttagaatcccattttaaaagttacataagtttacaaaatacgtgtattacaaaagtcatcgtgtagcgactatcaaaagtgagcttaaattatcccgaagaccctaaacactacatgtctaactgtcttgatatgtataatcttcatctagttctagacttatccgggttcggttccaactcttacatgcacaaacatgtaataattgtgagtcgatagactcagtaagaaaaacataaacataaacataaacataaacatatattcaaaccataaccaggctcctatacatctaatcataatctgataactgggctaggaatgttctcaaaaaaattatgactaatcacgaatccatcctatactcaatactctagtcgtaatgatgtggtagcaattagttcatactatctggaagcttagcatatatttattaatatctcaatgcaactctatgtacactttaccaatatcctgatatgctaatttgatggctactgatttgccaaacatatatccgttggcatctcggtgcaactctatatacacttcactaatactcttatatgttattctgacggcaactaacatgcacggtaaacatgtatacatatatccaactattatactaatcttaccttgattttaaatgcaagtatgtcgataaccctgagtgaaaactgctgctcgacgatttacaggtccttaagtcacaacataagtaaaattggtaagtgatacgctaaatcactttttgaggacttaaacttaaaactaaaagtttctctatcaatagataacgtggcaataccctaaatgtgatgaaacatgaaaaaactaagccctagaatctaaaaaattcggtaaattgaaaccccataccggtctaccgttttctagggttctgctagaaaaaccggttcactgtttctagagaaacagtgaatcgtttttccctgaaaaaaactcccaacttcaaaaacctgctcaaaactcccccatatccaaccaaactttccaaaacacttaaataaggcataaaggaccaaatccaatcaaaaatagcatcattaaagctcagaattgagtttttccattgatgagctcaaacttagctaaccaacaccaagactcacaaaaagcgatcaaaccagctccaataaactcaaaattaactctaaaaataaaccccaagaaacttaaacttaaacataaccaaaaataaaattttacttcacaacttagctcaaaacctagaaaacaaagg

SEQ ID NO: 55787 - DNA, 908 bp, Cannabis sativa
gtgtaattattattttagtaactaatatgtgaccttataattacatgacttctaaacacaccattagagtttaaagatattgtagcgcttacccaaaacatatttgtgattaattagtataattaaataatatgtctttacacataatttatttatttataacagaattgctaaaagtattattggtatgtatcactctcctcggtgtattcatgtcatcaaacgatactctagatacactcaaattgctcataaatgatgtgtattaaatattaggagaattactccatatactatttttttaattttttattttaaatttgtggtttggattgccccggtagtttcttcggtggtttctatgtgggttgctatacggattttgattgcgatttaatttgctccgttagttgctatatatgagtttttgtgtagaattccgcaaaaatataaaaaaaaaaaactgttttaaagtgtaaaaatgaaaataactctaaatattaactatttatattttgaatggggaccacatcacttttaattgagtagtttagattaattacacacatgcaatttgaatgaattttaatcattattataaataaaatattattattgggtactagtaatattcaacacattttataagcggcaactcatgcttactattaaatcattttagaacaaaaagtacaaaattaatgtagaagtgagataaaataaaataatatatttttaagtaatatgaaagtttaaaactcttaaaaaaactactattggagatgctctaatataacaatgatacatagagagattgttagcatttctcgtgttcataggcttagctactttcatatttcctctcacaaagataaggtgccaagttcaaatcctcccttctcaaagtt

SEQ ID NO: 55788 - DNA, 1135 bp, Cannabis sativa
gaggaagttgatgaatgttgtggcctgcgggacctacgggccttggccttactcttttttctttttcctctcaagcctcctgccttagccaagctcgctgaaactatctctctcaacgaactcatcattctcactttagagagtacccgtaaacatagccaacacatgatcagtgaaataattcaaaactacaaagtcaagaaaaacatgtagcatacgacaaaagatccttaaaaaagtgggcatctggttacaaccattaaacaagcagttatgaggttctccacgagcaagaagggtcatgccctccaaactagtaaagttctagaaccatgcaagtgtgaaaatgtttacaaaagcacaagtagccctactcagtccatttggataagatcagcacccctagaataaaaatttttgcacacatctcagtcctaaaatatttttacagatagcatcctatcgttcaaacatgcggtatgtcctaaacccaacttgaacttagcatttctatcgtagatatgaaataacacaaagtggtagaaaaggtaaggttgtcgtgtgaataggcttaggagtgtttcacccaatcgatcactcagttgtagctagcctgaatgtcggagttcttgtttgaaagggggtggagaaagttaggatttatgggtttaacattcagaaaatgaaatgcacgagggtttagaaagcactgagagaattagggctttgattttccaaaggttgaaggtgatgaaaaaaagggaaaaaaaataggctcttgaaacctatttatatgccagcttaagtctttgcaattcaaaaaatagcttaaaccacttctgccaaaaagcatatcttgatccgacagatggggagttaaaaagattgcattcaatgttcagcccaaatgtttaacatccatcattacatgcctcgtatgatgtttgtattaaagaaggggtcatctcaattaacctgctgtcattgtatttccttccaagaagcatgcccccacgcgtgcatactaccaacaatcacatttaaggcatcgcccacgtgccgtgtcaataataactgcgattaatgacccattgattgatgatagttcctgggatacattggtgatctcagtcag

SEQ ID NO: 55789 - DNA, 878 bp, Cannabis sativa
attttaacgaacattaacatatatattgatcaacctaaaataattcatcataaataataaattatcaattacaactctttataaaaaatttagaagcatttaataaataagttttaattagtaataaaacttaaaactatagaaattggatttataaacgttggtttccttgccattgctcaaacatttctctagctaagttatccctccaagcaatccaagcatctgatgtctcaatatatgtgtaacaattattatctacatattcaccatcttcgtcactatcattgtcattatcatgatttgcgtgctctaatgggtccatatgctttcctcttctgatcaagttgtgaagaagacaacaagctagaatgatgacactgaattttaacaggatagtatgatcgacctctaagaattgcccatcttcccttcaataacccaaatgctctttcaactacattcctagcagatgaatgcctcatgttaaaaaattcttgaggactatttggcgggtgtgtccaatcacttaaatgatagcgttgtcctctataaggtgtgaagaaaccttcaccattaggatacccagcatcatataggtaatagtatcctacaattaatgaaacagaattttgagaaattttatttaagaatgaatatcattaaataacaatattaaaaaatgagaaaataatttcaccttgtggaacttataattcgttcctatgtatagcatctcgtaaaactctacagtcggcagctgaaccctccaatccaggcaaaacataaataaattgcatatcgtgtgaaaccactcctaatacattagtagcactttcgttctttctggttcaatatctaggcctatttgaagctaa

SEQ ID NO: 55790 - DNA, 1012 bp, Cannabis sativa
ggtggagagattgaaatagagagtatatgtaattttgaagtgataagtgaaatatatctctctttgtgggtttggtagttttaccaaactgagtatattttacttgcttcgtttctttattatttcgctgcgtttgaagtttatcatttatcccaacagagaccacagatcagattaaagtcctaatccctcaaatcatatctaagttggcacaccatacttccttcaccaagcaggttaggtgacaacacaagaaagctcgaaggcatcaagacccaaccatcttcataaactttgatatcattactatcaccaactctccagatagacccaacatcaaataactccttcccctataaatattcttccagatgaaagagtcttttttagatttcaacatggaaccaaaaggcttatgcctgtgatacaagcctttcagaccctagcagcaagggaatttggatcatcatagagatgcaaagcttgttttgctaacataacttgattaaaaaggtgtaagtctcaaaaacccataccaccatcttctttatgccaacaaagtctcttctaagtacaggaatacatcttctatttaatgtcatcactactccaccaaaatctagcacacataccatggatgttattcacaaaagccttgaggagtttgaaaggcgacatcgtgtaagttagagtaaactggatgacattcttaataagcaccttgcaacacatcatagaaaaagactaccttccaaccattaagttttttccaaatatataactttgaaattaacttaaattattggataatgtttcagtgtattaaaaatgacttcatatagagttatttttttaatatgtatcattgtttcattttatgtctacatttaatgttatttctttatttatttttttaataaatattatttgttaaaaatactatcatatccaccaaaagcatgatagtgagagagggagaagaactttggtttttaaatgttttttttttttt

SEQ ID NO: 55791 - DNA, 2075 bp, Cannabis sativa
aaattattttgaataattaaaaaagttaaaaaggagattaaaatttttaaactaattaagcaatttaaaaaattatttcttttttattaaaaaatctattaagatattaaaaaattcaattttataaaaacttaatttaagggaacaagtttgcgtctatttttttctccaaaaatttagatttgttaaagtaaatatagcatttttttagtttaatttctaatttttttataaaataattttatatttttattgaatttttaattatttttctttatttcttaagatatgagtttataaatataaataactttgatttttttcttcaaaaaatattagtttgtttaaattatttattgaattttcaataattttgatttgattttttaaaatacgtgtgtataaataaaataaagtttagaaatatttttttaggaataatttaaatttttaactaaactatataatttttaattaattgaatattttatcaggtgttttaataatttttatcaattttttcagtattaatagaacattataatttttaaagttaatgtttttaataaaaaaaaggaaaaaattttgtattaagcaaaattcaaggggtaaaaatactaatttttaatggtaagagaaacaaaacataacaaaagatgcataattatgtaactgttatgtttaggaagatttttaacaagctatatattttaggggatgggatcaggtagtgtcgaaatttgaaggcaaaaatactaattattctttgagctatcaccgatttactaaaacaactcaaaaaaaaaaaaaactatttttaaatcttcatgttttacttggactaaacagcattatgaaaaaaccaacaatttttagaaacatagaagaattaggcttgaaaatcatagaaattgcaatgagctctaacaaggaaaatgtacagatcttatgtttttatatattatttctcgttctaagagtgtaatcacatgtcactttagaattgggattcaggtagtttcaaaaaatttctcccattttttcccatgtattctgattatttttttgtgttattttttaaagtttacaccatgcatttatagatttatctatgctaattttaatatttcaataatttttattagcaaatttaagttgataatgacatttttaatttataattagagagtaatgtcttttacacagaagttcaaggaaaattatgaaagtgaagattcaattgattcgatcgatggtagcaattctggcttttgcaacaaaatcccttttaaaggtgggggcttgtgctttgttttgagttttttgtattctaattaggagatttacaaaaatattagattttgcgcaaaagtttacaattttactgtcacacaaaatttttaaccaaaatactatctttttataaaacaatcataaaataacaaaacagaataattaaaaataacaatataacggctaaaaaataacagtggaataacagtaaaaacttacattgtatttttgaaaaagaaatatggtacacagtaaaaaaagaaaaaaaaagtgggaaatttcagtatgtgatgtaaaactccttctaattattacgtccaattatccatttaagtttatttcacgtactgataatatactgcttgattctcttaatgtgtgggtgagactgtctaatactcatatataggaagtttgtccactactactattattcttgtcaaaattttatgaaacttattcaacaaaaatagaagtaaatggtttaaaaaatctcactcatagaacatgtgcgttctctcatcactagtacgtatatatatagatatatatatctatatatatatattagttaattagtcagcgtgacttttttatttataagtttatgaaattaacagtttgaaaattgaatttgatattataaattatttaaaatttttaaaattttacaagatattctaaatatttataacgtatacaattataaaaaacttaaattaaaaaatttttgtcgatgtcgaaagagttagggttgtacccattttagtgtagtacattgt

SEQ ID NO: 55792 - DNA, 2017 bp, Cannabis sativa
  modified_base (621)..(640): a, c, t, g, unknown or other
cttttactcatttggtcattgatattattaagtaaaattaaacaaaaaagtaattttacagatataaattactgaaaaaaaagaagactgcctgagtgagaaaatttcgatgatggtgaatgcttaatagaaagggaaaatgcagaatgggggtcgggagataatggaatcagattgtattgttactgcaattggcaaaaatcataatcattgttgatacaaattacattctttcttctagaaattcataggttggattaataaaagtctaatttaattttagtggagatcgatatacctctcctcataattaccagtattgatatgcttaatcataacttttggaaaagaagctatccatagacaatgtgattttcatttagtgcattacttgaggaaaagtttgtttttcttttgttaaaacaagcagtgttatcagtacggattcttgagtcgactcacccgagtgcccaaccctccttctccgcctcccaagcttcccttcttctctcccggcggcgtacacagtagactccatcacccactgcctcctctttccccttttcctcataatgctctctcactcacagtaagcctaatctctttctctctctctctctnnnnnnnnnnnnnnnnnnnnctctctctctctctttctctctatgtatatatgtgcatacatatactgttgaattacagcgaatacaagaatgaataggaactttcatagcattacatatggttttagagtgtttttactgttgtgattcagtgtacaagatggagttgctgaaggagttattgtgcccccaaattcttctggggatttgtcatcagaaatagaggttgctgctttcaaacgcctttttcctcttcgtttctttgaacgtcatctttctgagtctataagacctgatggtagagctcttgggaaagctagggattcaactttagctctaggtttgttgaaattaaatttgtatatgtatatgtattcattttcctatttgtattttagttgatgaaactttctaactcgaactttggtctttcattgtaggagctgttgcatctgctaatggatcagcattggcaaagattggtttaactgtgattgcttctatctcttgctcgttttgttttgttttgttttgtgtgttataggttagttggtatagttgagacaagagatttgttaagtggggttcttttctttgtgtagacaatgttggctgctataaaaatggaagttatgaccccttcaaaagagtcaccagataagggatgcataggtttgagtttgcgtctctcgtaatgtctattacattttctttcactttagttttttgggtgttaacttttggcttgcaattttcagccatcgagttccacatgcctccgatttgctctcctcttgtcaggccaggtaggccagctgaggtagcaccagttgtgtcgaagcagttgtctgatactattgtaaggcatgtaaagtatttctatattcatattttttttttgcttaatttgtttcataaagacttgtagttttcttgttctaacatttgtatgtaccttggttgttgcagttctggcatgatcgatttggaggaattatcgttggttagtggaaaagctgcttggatggcgtacttggtaatgcattacctaaactttgacaacattaactcataattttatctgccatgtatatatttgttaaacgcgttgcatttttggtttccaatgtttcttcaaccataatttttcccaaccaactttctttgccagagaatgaatcttctatgattatattgtcttgattggatgcatcattacaaaataataatactgtggttttccatggtcaggacatatattgtttggatgctgatggtgctctttttgatgctgctttgctatcagccgttgccgcgttttctcattgtaagaattctatgtaattttatcattagtaacctaagctttgcaaagatttgggatactatgataatac

SEQ ID NO: 55793 - DNA, 1044 bp, Cannabis sativa
agttattttttttcgtcccctttgcataaaggggtaaaggtcgtgacctatttaggatttttagtgcaaaatagatttactattggggtaaatatatgactttgaggcccactgtaagattttagctcgtcgggcgaaggtgtccatacaaagggggtccgcgcaatctgaataggtgtcatgcgtgggcactgctaaagtagacaagaatgtcatatcggcatcattggacaaagagggtatatcccttttggtggtacgcgcaatatcatattctgacataggagacagaatctgatttggcgggactaggcgtcagagggcagtcacgtcctacaagaggcttatggatatggtcgccctgaaatttagtgggtcatagaaaaaaaaatatatttttgggcccgtatttagagtaaaatgtggtattttttacaattagtaaaaaatgtgtaattttaaaaaggagaatttttttgggcctctaggctgggtgggccctaagcataggttagcccgcctatgcctagggctgggcctacttccggaggcacctcttggacttcctctccagatatgcctcatcatatggaaatttaggtagaaattgttggataaatctccattctaactgtttcataaggaaataccttaaacaagttacaaagaatataaaaaaagattttttacaagcctcaacagaccattataactcttggagtagtcggttttgtttcacaggctaaaatcttatagctctttacaatacaagaaaataaataacaacattcaagactccaacaaacttacaacaactcaagcaaatcaaataacagttttataactatttctcaactaactatcacaactcaacacaacaaatcacatacagtagcaataatataaaaggagagcaacctgtctattttagggtgtattttcggtccaacccttgagagttgcagcagccattttatggagaaataaacctcaacaataagagagaaaaacagagagagagttagagttataagtgttgtaata

SEQ ID NO: 55794 - DNA, 1342 bp, Cannabis sativa
cccataataaaaacacatgtgcgtgttcttctaggttcaaatttagtgcgatgtgtagtaagagtagatgcaaaaaccaagcagccaaaattccttcgatgttcatatttaggagctttgttaaacaataatttataaggagtagtattacctaagttgggagtgggtgttcgatttattaaatatgcagcagtcataatgcattcactccaaaaatcaataggtaaattagattgaaaaagcaaagcacgggcaacatttaaaagatgctgatgttttctttcagcaaccgcattttgttcaggagtttccacgcaagtaaagtcatgtaaaataccgaatttagcaaataagtccttaaagactaactccggggcattgtcagatatgaagcatttgaatatgcaattaaattgtgtctgaatataagaaataaattgagggataatatgagaaacatcagatttttgtctcatcaagtagacccaagtaaatctagtcttgtcatcaaccaaagtaagaaaatatttgtggttagagtgagatggaatatgataaggaccccaaacatcacaatgaatcaaatcaaatttattttcagcaaagttattgtttttaacaaaaggaagtttcttttgtttagctttaggacaaatatagcaagtagtgttttcatgaattatatcaacattacactgcaatttattgcagagaagagccaatcttttgtttgaaggatggcccaatcttgagtgccaagtgtcagcagagacggcaaagttgtaagcatgagtggggtctttctccagaacatagagtccaccacattctttacctttgccaatcactttcttgctgagagattcctggatataaaaatcattagtattgaatttaatcacaacattatcatcattggttatacaactgacagataagatattaaacttaaaacttggaacaaacaacacattcttaaggatgatatctttggtaatttccactgttatacactgttgcacaactaaagattcattgttaggcaaaattaatttagtaataggagctaaacatatagattgaaaaagtttaacattattacatagatgtcttgtagcacccaaatccataatccaagaatcttttgtcatgtttatagtattatatgttagaaccatactagtgttgtttgtggaagtgctagcatctggtgtgttttgaaccggttgctgattggctaggagatttagaagttgttggtactgagatgcacttagttgcagaaggagagtgtggctttcctcagtcgagctactaatttcagcacccgtttgcacctgat

SEQ ID NO: 55795 - DNA, 5490 bp, Cannabis sativa
atagtgattgatctagatctagctagcttcacttcactgtcactgtatgtaaaaaagggatcgaaagaattgctttagagagatatccaagagaaatactcagagatttcgttgtaagagctttgagagagaaaatattgtattctttgttctcaagttaatacaatctaaggggagtatactattaccgtaataaagtaatcgaacctcttcaaaatctggtgttctttattacttattgattttcctctatttttattacaattctaatcgctttataattgactcactgttgttgactaaaagggaggtcaacaatatatttactaaagtcttactttcctatttttttaagatgagtgtcattaatatataaactctatatgagaaacagagaatttgagaggagaagaaaacagagtctctatattctatgttgtctgaatgattttacaagagccaggaggtttatatacaacctgagcaaagtcggtttaaggagaaaaacaaaacctaacagcctaactaatcaataacagaatacaacaaaacccgagaattaaagctaagtaaatatctaatactctatctcgaggatctattaaaattagttaaagcagtaacttatttcggttataggagttgttacttctgttagattattaattggtttagctggattaattgttttctttaaataactcagtttctttttcttactttatatataattgctcttgtattatattacacagacaatcaataatacaagctctacaacttttactttctctctgtgatgcaaatttcacataatctaatttaaattaacttttattatatgacaaatttaaatcaacttttaatacacagtaaatattttacaaaataaattatatattagtaataaataaatcacccatttacatctgaaattaaaactgtacacataataatagaaaataatacaatttaattagtctacatcgatattcgatatatagtttgacttaaaattgactactttatatgacagtggccctccaacaactcgtttaataagtacgtacgaagtctttgcgggtttaaatttgatctgcagaatccattggtttgttggcatttatgctgtttatatattcttttaacaaataaactactaatcgaaagcagttgttactaaaaatttatttttccttctttcttaactcaacatttttcaaagtgtttcttttttaagtttattatgctattttgtaagttcgatttcattttccatgtcaaaatataataacgttttctatacaatattaaaaaatttcataactcttctatataaaaaaaaataaatcataactcagaattattacaatcaaatcataatagtttctctctatatatttaaaatagtttctttatatatgagaccatatttttaacgaaaatctaataaaatttagattataatctctacaagttttacattaaaattgaatcttgaagcattaaaaaaattgtgtaataaaacacaaaaaattaataccacgtataaattaacataaaatattgtataaaatataatttaatataatactgttattcgaaaagaaaaaataaaattattttattattctgtgagagtacattttaatgaatacaaggtagaagtaaagccttatataggcagagtgtgaaaccctgtatagtataaattaggttaattaatatttttgcctcctgaactttaatatgtattaaattatgttctctgaatttttaagatcattaaaaatgtcctctgaactattgagcttgttagatttaaggatttttgtctaatttcatttaattttaccatttcagtgattgtttatgtactaaactaaatttcttagactttgatatctaccgaattatgtccctcgaactttgacatgtactaaattatgtctcttgaacttttatccatatagacttttttactaaaattagaaaaaaaaaaatccttaaatctaacaatatcaatagttcatgaggtatttttaacaactttaaaagtttaaaaaatataatttaatacatgttaaagttcaggtacaaaaattataatataaggttttaactgatagggtaaaaaggaaggttgaaaagaaattgaaaaaacggtcaaagcatattggaaggtagcgcacgtgcggtaaactaaaagatcttttagcgccgaccaagatgaaagtgttttattttatattagtggttttgatttgaggatatgaatgaatgtgggttcactgggaaataaaaatctgtgaaaatagaagaaacaaagcacaggaaccgtggtacgtacaattacaaaggccatacatacatacatatatatattattatttatttataatgccagttttgagggacatatatacagctcaacaccttaccatttgtcaatttggaaggggaccctctcacaacatgttaactgtatataaaatataggatatgatatttctatgttatcaccaattcatagctagtagctaccatttattattatcatcattttctgttttcttgtaccaaaaataatcctctatcagattcctcaatttatttattgtgttgttgttgtggcctagctaattacttcaatcctagctatgccataaattatacattagtatttgaaaaataaaaataaaatattgaccgtatatatttttaatggaaggcatatatatttattatattaaatattatttatattttaaatatttaaaccgtacatacttaaaaatatctttttataattattcttttaaatttatctctattattatactaaatatggttatgtaataaaaaaatattattatttttttttaaatattgtaattcatatttaattaaatttattgcacatatttaaaatattttattattattatttttttaaacttatgtagctatgtaagagaaagtgcattttattaaaaaaaaaaaaaatatattacgatttaaatttaaacttattgtacatgatcaaaactattttttatattacttttcttcaaaaaaaaaacttacaataaatccgtaacaaaactcatgtaatatatttttttttcttacaataaaattttctttttattgttctattattgttctattaatatataattacatttatttttcttattgatctgtaatattatttttttagtattacattttaatattgggattatgttcatgtttaatattatcaaactttatatttattttcctcacaattttaaaaattgaaacattattttttagtaaaaatattaaatagttcataagtggattcttttaatttataattttttttatattattgctttcatacatcttgttaatattttggatctagtttttttgacttcacttttaaccaacgatagtgagtcaaaattaagcgattaagaatagttgaaataacaaaatataaataatgtaaagaaaagtaaacactagaattatagaggttcaatcccttgatgatggtaataacttagtacccttttgtattaacttgtgagtatagaatcaagaaagcctttgatctctcccgaaagctgttatcttaaatctaaatttctctgttgtgtattctctgaataaaatttgtccccttgaatagtgacatgagttcactatttataggaattatttacatcaaattggtttcccataattaatatggcattaaatgggaaatctacttactttttataattacaacatgaaactaggtaggttttccttcttattcaatactgtgaatctttcccatgaattcaaggataatgccatgtcttgcaagcgtgaggatatataagatatatctctaaaattgtctcaacttgcatcccctattcggtagatgcgagcttcctgcttgatggaagctggtcgggtgtctttacatgctctgttcggatgtcccaacttctatttatgactttaagtatcacatctccctgtacgacttattaggagtagaattgctcgtctagattataaaatctattccacgtgtcaacagagtggatgctacgtcaccttgtgtagaaatttggataccatttttctcctaagtccgtgcgggatcttcttggtcgcacgtggacttattgggccacaaagttgatcaaatggaggatgcgtgtctggtttttacttttgatccaacgtgactgatcaaatgtctcttcgatgtctaagacatctaatattgtcttgaaagttgtacctcgagtcacacaatgacagttatttgataatacgtgcttgatgtttgtactattttgatgagtatatatgttcccttttggggaagaaaacccaaaattctaaattttgaattatccaattatccctccaaatgcttataaaaggagatttaagcttcatgaaactcgtttagccattttaattctcataaaaccaaagcaagaagtttcctctcttttcattctcaaatcctcaaagaagtcttcttggagtctcaattgttgaaacctttcaagcacattcagaagtctacgaacagtgagtaaggtatcttttcttctcttttatgcaatttcctttaagtacatgaattattttttgatttttttcctacaaagttatgtgttcttgaattgttcacgactgatccaaaagtagaaaatattaaagtgtttaactctgactaacatatgcacaaatcttttaagcctcgaatttcttactattttggcttgaaattatctaaattcacccactaatgggtttctaaagaatcttcagatattctttgtgggcttgaacttctgagtttggaaatttcattttggaaaaaaaaaaattccttctttttttcatttgaatcgacttagtcggcatatcagatatgtatacgttcttttgtccccatccaactctcaccttttgtctcctccttttgtagatgaacactggtgaaatctgaggaggtgagcatcatatcgacaaggatcttcttcaactcgtctacgagaatcatccttagctcggagaaaattcatctagtgaaagcctttcaacttcaagttagacgattgggaagtcaatagtgatcattcaaaatccccagagctcatggtgcagcatcacaagtatcccgactagataagtggagaagggtacgaccgatttatttaggaacggaagaaaggttggagacaccatttcttgtgttgtttgttacacttatagaaggccaaccaactccatttgacaggcatattgttgtagctgacattgctagaactgttgtaaggcatatatctaaactaaatttgatgtccaagcatagaatgacactacaacaaataccattattaggggcggaacggtccgctggtaaagatatgagattccgctggtaaaagttattaccggcggggtccgccggtaata

SEQ ID NO: 55796 - DNA, 763 bp, Cannabis sativa
atatatatatttttttagtattaatttagtgttgttgtaattttttgtagtaaataattttatttttacggtaaattaatttttaataatacaatatatcaaatattattatgtatatttaataatttaatatatttatttatttatattaatatatatatatatatatattgcaccgtcacacttgggccttgtgttcatggtcactgttggaccaccaacttccccctcccttttttcctaaaaaaatcaactattatagatacaacataattatgtgcattttaatctttttttcacttttaattggtctaaataaattcctcatgatatgaggaagaatgtagtggccctacgttagaattttcctatatatataaatatatatatatatataattttgttataaaatattatttataaaggtctaaattactaaattaattatcaccgttaatgtttggttctattttcttttattacattgatttaatttttcattattttggtcatttttgtataaataggaattcaccctattaaaataaacaattcagaaattctcattcagtttctctttctttcttcattatattatcctttttttcttatatattttataacacgttatcaacaagagtctatgcccaagccctaatgtaaatattttgttaaagttattgaatttttcaaggtcacgatatactaaatatatatttatctgactgaaataatttcaataacattttttttttcttttttg

SEQ ID NO: 55797 - DNA, 1073 bp, Cannabis sativa
  modified_base (555)..(557): a, c, t, g, unknown or other
  modified_base (880)..(887): a, c, t, g, unknown or other
atttattaattaatttttattttcttatattattttttctaaaagaatttttagttttgccaatactatatttacatgtaccacttcattgatcaactaacagaacattaaatttggtgtaaagtttagaaatttgaagatatcaataggaactacaatgatggcatcaagtttatatgatcgagatataaaaataatgcatgatgaaaaagtttgattcataatctcacacctttttcttttagataatctcacaactactttttttgttattcaattcctaatgtttgattcataataaattccttctataaaaaaaaacactctttctatattctgtaacgtaaaaaaaaacattcacatagatatatagttatgaatacgtatacatataaataatttaaaaattatttaatttattattattaatttagttcatatttattattatgtgttttcttatataaataattaattattcatggatatttttatagaaaattcattaaaataatagtgaaatatcaatttataaatttatgctctaataaaatnnnaaaaatgagagaattaaggagaaaaaaaaatagtttcgaagagattttagatcgccacctcaccgtctcatacttctcctttatatatatagatatgaatcatattcatttaaaaatataatttatatatatatgttacctcataaagtaaccatcttcattacattgccttatcaggcaagtcaatgctttaatctgaaaatcctatattgcattgcctaattagacaagcccgtgccataacatggcaaccatatatcgcatagctgcatcacctaattaggtgagtccatgccaaaaacctacacccatatatcatatannnnnnnnacctaatcaggtgagtccgtgccacaacctgtcaccaatatattgcatcgcctaatcataggagcccgtacctacgtcaagtacataattgcatcacctaatcaggtgagcccgtgccacacctggcaccaatatattgcatcgcctaatcagacgagcccataccatagcctggtactcacatat

SEQ ID NO: 55798 - DNA, 875 bp, Cannabis sativa
ctgacagaaccacatccaaagcagtagtacttttttgattccatagtaactgatttcgagcattccatattgcccaagtcaccattagagcttcttcaatctgccccgtgttattactgaccattacttgctgaaaccattcgtgatacaccatgctagcagctgaagagaaattgacagaggaacgatgccaacaggacctggcataagaacaatcaactaatatatgttgaatggtttcatctgcaacattgcagaaggtgcataattgggagataggcacatgtttagtgttgagttggactttggtagctaaagtaccagtgagagctcgccacccaaattgaagaaccttcggctgcacattgattttccagaatgcagaccaaaattcagtaggcataccagaaactatgtagtgttcttgcatccctctatatgcactttttacagaatacaccccattcttctccctgctccaagtccaacaatcattctggacagtttcgggtaaagggatgttgagaattaaatccctgtctcttacatcaaacatgtcttctaaaatttccttgtcccattgaagtcgatccctacacattaaagaagagacctttttattcacaaggccgggatttacagaacgaacataaggatcagtaccatctgggagccacgggtaaaatgctagtttcaaggcctcttgcaatgcttttcctcacaccagcaagaaggaattgcttagtttcaaagatgcttctccacacataactggggttatttccaagagaagctgtcaagacagaaccagaagcaaagtaacgagctttaaaaactctactgaccaatgaattatcagcaacaagtaacctcca

SEQ ID NO: 55799 - DNA, 582 bp, Cannabis sativa
aatatcttgttcacttatgttagagccagcgatgattaaagaatcagcaagagactgaactttatcaacaaaattagaaatagacagatttcctttttgaatattggaaaactgacctttcaattggagcaatcttgcacgggattgactagcaaatcgctgttctaacgcgtgccacacagtcgatgatgtgtgatgattagcaacagaagcaagaaccccttctgtcatggatgaacgaagccaggacagtaacagttgatcgcgtttcttccattgctaataaaccggattgggttgaccagaaaccaagaactgaggaggagaaatgccactgaagaggatatcatccaactcatggctaataacagtaggcaccacctgagacttccaagaaaggaagttggtccgatcaagcttgatcgtgagagaagttgaaagagaactggaaaacgggttccacatcgaagaagcagagtcagatgtttgagcagacagatcgtgtgcaggagctgtgactgtcggaggagcaggatcggagattggaatcgacgactccattgaaggcgactgataccatgt

SEQ ID NO: 55800 - DNA, 1459 bp, Cannabis sativa
gttctttctctttctctctctctcatcttaaatcatttaattaaataaataatacttaaaatataatatctaaataatgtaagataaaatataaaaaataagttatatgaagtaatgtaaaaatttaagataaaataaagaaagtaaatttttaataaactattataaagacaagatatagatagaagattgtgtatgttataattatttagaactacatataatttttttcaaaaattctaaatagtttatattgtcaaaattaatatttaaatattttgagaatatttttttatatataattataatttaatgttattttttttaaataaaataatataatgttatttattaaatagggtatgagttaaaaagaattaaaattatttcaaaagataaaacaagaatgaaaaattaattttgagatattttcatttattatttcttacatagttatattataaaattgaataagaaatagttacaataaaagtgcctaaagtattatgtttgtagtatttcagtacatactaaatgtctttagtagcaaaagcatttaattatagtgcttgtgtactaaattatttgattagtagcaaaatattcaaatttttatatttataaaacttaagtaacaaaattatttttaaaaattattaaattatttcattaataactaaaataaaaaataaaaataaaaaattacaaaaatacatatttatagtatttataacatttttaatgattatttttcttaatagaagaaacaaacggttgttttatggttgttctcaaaacaacgttattttcacatcgctactacaatatattatgtttttgcaaattgaaaataatgttattttttcggaaaaaaactgtaagtataaaatctaaaaaaataacatctgtaaaaataaaaaaataaaaaccgtaaaaaatagtacgatatttaaatattttgtgtaaaaattctattattttttttaggtattccacatacgtagtgtcaaattcgttaataatttgggtactttcacaataaaaaatcacaacttacgtactaaaatgttacaaacataacttttgatcccagatttgaccaaccgacagcggaatcgtattcaatgctgatgcttgccacgtgttacacaataaaaataataaagtaaatgaacacaggattttatagacgttcgacccctttagttatcgggtaaagatctaatccccttttatttgtattgataccgagagattgtaatattcaaaattttcattatgaatagttatgatttattatatattatgagctaattaggtagtaatgagttggattatgatcctgctaactaatttagtataaattataaattttgttataagtagataaataagcgtaatttattaattacaaagatttatttggaatatgtgaatataatgtaagttatttgtgaaa

SEQ ID NO: 55801 - DNA, 530 bp, Cannabis sativa
agtaaaagaccaactttgtgagtttacattggatgattgattgggttggtggtaggttttcatttgacaaataaaaattaaaatgtacataataaatactatataaccagaattattttccattgtattggaaattttaaaataaaaaagctagttcaaaaataaatattcagaaggagtagtcaaatcaagtcaggtgaggtcatcactcaactatgtgaaatgttttttttcttttcttttctttcttaattcttctgataataatggtatggcaaaacacattctcaaacgtcaaaacaaagacccttaaatgaaatgaaaataacaccttgaattccttaagattctttggtaatagcatcccacaaatatgtaaacattgatttattttgtcagtttacaatttttcaacagctagcctcaccatcttctggctttaccaatgtaattccaccacataatttttccagtttgtcctccatttctttgacctcacatattgttacaaaagctccccaagttaaaat

SEQ ID NO: 55802 - DNA, 2082 bp, Cannabis sativa
gtatgagaaacattgggattaataggagtaggaatcataatgttggaagaggtatggaaatttataagttgagaccccgaacccacaacaggagctaaaaaggaaggaaagttgatagcctctcccaagaaatttcgagtaggttggttaaggttgataggagcataatccatgatggtcatagcaggagggtgagggtattggaaaggcatagacttatccacaattttctccttgcctcttaacagaatattatacggacaaaggggatcagattgtgtttcatcacacttttggagatagaagtgacaatatctcttagtgtggtcaagtttgccacagaagaaacagaagtccggaagcctctcatacttaaaatctatccacttaataaactctctacccatacgaatgaacctaatgttcatacctctacgaattggaaggttcacatccaacagaatcctcatcctcaaataaggccccgtgccctccttaacagtatctctatcaacctctatgaggtcccctacttcagaagcaataaaacgggctaagtcatatgacttacacataaaaggtatgccataaacttgaacccaaaagggtacataatgaaggttctcaggagtgagaggaaaagagctgtcaggtgcagcaaagacagtgacactttgggaaaaatgccatggctgtccctccaaaattctacccttgtctccctcacaaccaaaagtgactagaaataaaccatctgcatgttcagtaacattcacagggaaacgacactgtgatgaccaaattccagaaagggttttcataagagagggtcgattataaggtcggatagtatggagtttaaggagtaggctgataacgacagaggaggaagaagagggattagcatcataagtgaagatggtattttcatcagaagggaaaactaaagcattcgaaacactgttgagaaaatcatccattttgaatacagcagcaaagcaaacacacacagaaatagaaagaaagcaaaggaagggatgagagaaaaaatacctcaatcgcactatataaaggaaaaaccagagtcccctgatctgccttctcgaaaattcagaggtcacatccctagcctccaccggagtagcaacaatgatgaaaatagccctattaacctcagaaaaccaaatatccgcctccattttacaatctccaagggtgtaatgatgttggagaggttgaaaaatcagaagtaatggcacagaggataataaatggggagcatgatagacgaagaacaaagaaatggaagaggaaaatgaatagataattgtgcattcataaatgagatgggatagttggtaatgatagtaatactcagagtaataaatgctctcattaatacaaagatacgaaaaaatgcttctaagtgaagaaagatagaaagaaagggaatacaaaccaccactatacctgttagggtggacgacaaccaccatgaacgggaccagaagcaaacgagaatcactgtatcgcatacctactagagagttccagagagagaaaagtaaaatatgatatataatttaatttaatataatattatgcaaaatgtaattcaatataccaacatacgctgagtatgtaattatacttgtgtttatcaaccaattctttaggcaatggttgccatgactaaaggggaaaatttacactacttacaattgcattttccataatcagttttgacaaggtgttgagtttatagttttctaaactctaaaaattacaatgtgaagtgaggactttagtttcaaataataattagaagaaagtgcaaaaataatattttttttcagaggtcgaagagtatatagtaagatgcttgataatgagaggagtaactcatatattttatatatagtattaagatctcacacattattaatgagagattcaataacatcccacatgttggttatttttagcacactaattttggacagatcgattactggtatttttggctcactatcctcaaatcataaactcttttcgcctttctttttggaccgattattaaat

SEQ ID NO: 55803 - DNA, 897 bp, Cannabis sativa
  modified_base (809)..(809): a, c, t, g, unknown or other
ctacaatgattttctaattacataccacctttgctaaccaaagggtttttcctcaaataatgtgctagattacaactttgacaaactttaaattttattaacttatatatatatatttatttacatacaccgggatcccatacttaaaacctttccaaatattatcaaaatacatttataaactggccgctcagtgactacaaaataagatccaagatgtgcagagatcgaacactccaggtcgcgttgtcttgacatgtacaaacaccatcctagctcagaactcactcttgttcagccttcacttttcctttacctacacatagaagtagcaattgtgagtcgacagacgcagtaagaaaagcatgtaaaaaataatataatatcgacttgtatctaggcgcccatatacctatctacaaggctcaaaaaattagtaagaacgctctgaactaagattcgaccatgtaccactgtaccacatgcactcaataccaccatcgtactagtgtaggtagggtatgaaccgttccctgagtactgttaagtgttgtaccacatacaccttgtacctactcgtactagtgctggtaacaacgtaatgtactcttcaaacatcgtacactttaccaatgcactctgtaccgctaccgtacatgtgttggtagtgtatgaatcacaataagcatgcatatatatatcacacatacatacattcgcatacatatcatatgttctatactactctcaccttgtctatgaattcaattaagttggctggaatacctcgtgctggatggatgccctantcacattcacgtatacgggtaaataacacgcaaaaaccctaatctagaaaaacaaaaaccctaactaagggtgttgggttttatgccc

SEQ ID NO: 55804 - DNA, 789 bp, Cannabis sativa
taggggcgtttgagattgttttcacacaatagttttcaaaatgaaagctaaaaaaatgaaaaaaaattctaacatctttgtaaatattttttttacattaaaaccaaaagaatattccttgagaaccaataggggcgtttgagattgttttcatacaacagttttaaaaaagaaagtacaaaaatgaaaaaaaaaaaaattaacaattttgtaaaatttttttacaatttctgcatgtaacatttactagttctttttcctctcattgctttctctcaccattttttttatcaaaaatttctctctccttattctctcttatcattttttcagtcttgagtttgaggttgaactttgagtctgagtccgagacctagatatttatgtcgaggtctggagtatttttagagaatacttgttgaggtgtacagggtagttagcaaactatgaaagtgatattattaaagagaaatgaatgttattctaaaaattgtattgatgtcatacaataacaatgatgttatcttcttttttaaataaaaacttaaggttaataataaagttattcaatttataatagaaacaaataaaatatttataatattatttttgaaaggtgttatactaatagagtatttttaaagtaaaagtaataatataaaagagagatataaaagactctcaatttaataaaaattcatgcatggttaacttttaaaaataaatatctcgtcatcattatcatcatgtataaacaaaacagagacaaaaaataatcataaaattaag

SEQ ID NO: 55805 - DNA, 1249 bp, Cannabis sativa
cattattttttgaaggaatttctttctaaaagctttggtttcaagtttccgtaatgtaaggcggttgaacaacactagctctggcaatgggaggtccaactggtagagtgtgtgtgtgtggtgtgagtatcctagagagagagagagagagagagagatagagagatgagagatacgagagagaaaaagagacatgggatgtttggtgttttatttgcttaggggtaaaattggatgagaaaaatagtccaagtatattttgtatgatgcaaaatagggtagcatatttttagtgggtaatccattttaagcatataatggcaaatttccctatatttatgggtacttctacaatacaccccatcaaaataggtgtatatgcaacccctaactgttttgatatttataagaatttttagtctaaatgttttcatagtcgtgtacgttatagttatttaagacgtcctgtaaaattttgaaaaattaggaataatttacaatataaaaatcaatgtttaaaccgcctatttcacacgcgtataaaataaaaaagttatgtctgcagcaaattctttgaatattgttttcgacgtgttaaattttttcaaatttctctaaattttgtcagatatcttaaataactataatgtatacgactataaaaaaattggactaaataattttttacatatcgaaatagataagggagcatcaatacatgaatataaaaaagaatagattgtttgaacattattttctatacggtaaattattctgaatttcttaaaattttgtaggatatcttaaatagctataatgtacatgaatataaaaaaaaaaatagactaaatttttttttttggataccgaaacaagtagagggtgcatcaatacattcttttaaggggatgcattgtagaatcactctatttatatatatatatatatttatatatttctcaaaatttagtcaaaatttatatattcatcacatatttagttattgtttattatttctttatgttctccatgctgcagatgtttttggtttaattgttcaattaggtgtcaagcatcctggttgatcaccgttctcgagttctccattgaacaattttctcacaaggcagttagtgaaaaagttattgttattattattttttctttaaaatagtaaataaaaagggtgattctacaatgcactctcttaaaagggatgtcctgatacacccttgacttgtttcggcat

SEQ ID NO: 55806 - DNA, 1580 bp, Cannabis sativa
acttgttcaccaatttaaatgtattaaatctggaggtaccaacaacatgattttcccacaacctcacttggaaaatcacaaaatctagccatttctgccatgaatgatcaaactaagcttttattcaaagctttttttgttcataaaaacagaatatacaaaaaaattcaagagcacaacatcaaaaaattcctggtatagcagcagtaattttccgaaagagtgcctgaaaaattgttcaagcattgtaacgtaatccatatactctcatgagtaatagcaaatcaaaatggaaagaagaaattcccaacatgaggttcacatcactcaattatttagcaagtttagtaatattgtaaattggtcaaactgatgctaaacacaaatatgaaaaatagtatttgagaagattttaatatcatcttataaccctgggctattttccatatcccttccaaaacatttactgaaaatatttgactacttcataataaattctcccacccaatactcccccgaaagaaaaattagaaaataatagtacatgataactttcagaatgggtttacctttatattaaactcaaccttagcactggtttcaataaacatgattttctccacaacctcatttggcaaatcacaaaatctagccaaaatctatcatgaatgatcaaactaggtttttaatcaaaacttttttattcataaaaacagaatagacaaaaaattcaagagcacaatatcaaaaaacctatctcaaaagataaatgaaaataaaaatagtacaaaaattcaaaaaaaaaaaatgataataaatacacaagtgaagtgagtagctgaccttaatttatgtatgattaacctcttgctcttcttccttttcaataacttggaattacctaaaaaaattagaaacaaaaatgcatgtaatcaacaatggtgggtatgaaattaagttaaaaggtgttggtttgaaaatggaatagaatgaatcgattgatgaaaataaatttccaaaatcaagtactcactcagtacttgtcttctcttcttcaagagcaatagcataatagttgcttacatcaaatacttataatataacattttcatgtgcttgatagtgagtttatagtgaattgtagagaaggcaaaaggcggtggcggtggtccagatgggatttggtcaccggagctaccactgatcggtggtctacagagggagaagaaaggagagaggcagcggctgagcagtgtggccttcagtttcaatccgattgtggagagagagagagagagagtatcgtttagggtttgatatgggatttaaaaattaaatttacaaaaaatggtaaagggaataccataaaaaacgtcaaatttggataaataccatataagagtggtaaagttgaaaaagccatatttatcaaacttttttatagaatcccatatttagtgtaattttcactacaattaaactaccaaaaacgacaattagaagtcatgacgttgtttagctcatcgtccttaaaggtggtggtctttatatgggctcatgaatgcctataatggattttt

SEQ ID NO: 55807 - DNA, 1663 bp, Cannabis sativa
caatatcagaatttgaataatagtcttttctctctcaattttgtcgtcccatttttctctagaatctgccccgatttataggaatataggttggcagttattccttttggggttgattcaaaatataacggttcataaaacgtggataatctccatgtttcatttaatcatatgtggactaatatttaataattactcaactgcttcttactcttatcctttagatggttattgctgagttggaaggtcgtatctcgcttgattcgagttatcctccttgtccatcttaataagaaaaaaatgttaagtcttaggaagtagatcatctcgtcatattcttttattggcattaataatgtgaggcggtcttctccctatgtgtaatgcaaggcaattatgttgttgcattcattctactcgagtggatgaatatccccctttatgtgtgtgtatattctgaggcatgtatatgtctcgttaatcccatcaatagttattatccttgtctcgatgttgactataaagtgaacgaggtttgatagttttgaatatttatctatcaaacctctatgtaataataatgagttatttaatatgcaactaaggatataatattggtatatccttaaagttgattcatattccctctgttagacacatgtcagcttctggagaacggccgaatttcgggtataacaattgccccttaaaaactactttttaattaaaaagaatattttaaatgattacaagggtattttcatcttaaccaacttttgaaaaattgcatgctttgggttttggcagttcagaactttgaggaacatcattagcattaaatgctctgactgtaatcttttccaatattccaatctgttagatcagatttctctttatttatcaataattgggtataaaaactgggaattacaatctatttcaccatttttgtattttaaaccttcaaatcttttctctgaatcccggttgtttcttccttaaaattttcatgccctcattgtactttacatatttcttgcgtatcttaatcgatttcaaccatcatcccagagatcttcagaacccaatctcacaattttcagaatctcaatcatcaagcttttctctaccaagggattccaaccaaaatagtaagtaatacgctctcattttttttaattgtttcttttcctgaactcatattcttgctttcttgattgatatccttttatctgtgtgtttggttatttttaggtaattttgttttggcaatttgaataattttagggttttaaggaaaagtctaggttattcagttcatagatccttaggttatattgtatttagattttccagaaactggggcaatcatttgttcacaaatatgacccaattttcgctagaaattacaacccccagaattcttagaaactaattgtcctaaaatttttaccttttccttcgaatctaaaacttatgttcctcaaaccattcttaagatgaacgatgccaagattagagatcatctaatataaacaaatcaagacgagattttaagtctttgtagacaatttttgcaagaaataaatgagggtaaatgtcgttttctgcgagatgcagcttggcctaaaccccaaattttatcttctattcctttagcgag

SEQ ID NO: 55808 - DNA, 847 bp, Cannabis sativa
aaatttctcaattttttaagcaagatggaccttgaatttaggtggatcctaaacataggtttagtccgccttagtccagactgagcctatatcttttttaagcaaggtgcaactatctaatgcttgcattatgctaacaagttctataaaaggttacatgcactacatgtgttatgttgtgttaggtttatggccattgacaacatctctcaaaggtctaggtcatgttccttgtaagcaacatatcgacaaatcgaggaacacaaacatctaaacctttttagtagcatactattcactagtccacatgactagtaatatcccgtgtagcgcacttatattagggcgagtggtggagagatgagactaggttccacttttcaagcactcctagcttttaataatctataggaacatatatatgcaaataatcatcttcatatatcaattattcgagtattgcaaattctactactttattcaacattataaataattaattgtttttaatcattattaaaataaattattagtaaaatttgatattaaattatattaataatatcaatatcaaaatggaacaatatttaacattttatttttttaataactttataagtactttgtggccaaattacttaaatttttggatttagcactatcaatctattaacattgtactaaattttcagagtaaaactcccaaaattcaatagtgttaaagtaaactgcgtgtcacagaaatgtacacgatctacctaatattaataacttaaatattataaaaaataattaaaaatattttaaattttaaaaaattagaagaaaaaaaattctatctctttct

SEQ ID NO: 55809 - DNA, 786 bp, Cannabis sativa
cgtgtatattggacaggttcaaatcttagaaaaatgggccgaacttttgtgacattgcaatatatagctgactaattttaactattcgaatattaccatatatttaagacattaggaaaagtactgtattgttgtaagggtaaatatgtcagaaaaatactattttatgataattttctttttaaaagtattatccaaattcaatgaagtttcaaggaaactaaacttttttttttggtggaaagagtaataatcaagtttaaaatttttcaaaagaaatttaataataatagaaaaaaatagctgtaatatccaaagatgtcattttgtttctgaaataagaagtactagtggtgtctaacatcaccatgaagtgaaagctttacaaatagattgtaatattttacaaaaaattattacattaaattgtaagagatctaataattaattacaacaataatactttaagtgatgtctagtatttctcttaatatatatagttgtgattcaattgtaaagggtaatattacatagtaatatataatgtagggccactatattcttcctctgaagaacttatttagaccaattaaaagtaaaaaaattaaaatgcacataaattattttttatctataatagctgattattttgtatgtatagcagtatatatattttaacaaaaataaataaatatattaaattattaaatatatataataatatttaatatatcatatcatttaaaattaatacaccgcaataataaaattatttactacaaaaaa

SEQ ID NO: 55810 - DNA, 641 bp, Cannabis sativa
aatctgactctgtcccctaagagctaagtgtgaggggtggacggtaatatatagggatctgctgaaaccgagtatagatggtgcccatgccttcgacaatgtaatattcgttagcaaaatttccaattttgctcacggccttgtccccggtgctcgtcaaccacttgaagtctggctgagagaagtagaagtaccccaacctgccttgctttgaagtaaacttcaggtcaaaaaacttgctcacctcatgcgcacaaggcataccccatttttgggtggcgtagaggacgaacagtgctgacagatacttgatgcccttgggggtaaactgggtcagaaagagacggaagaagtctgccaccttcctaaagtacaggtgcaaaggtagcattgccccttgtttgaaatgagcacccggccaggcacacatccccttcttcgggtttgtggctcggtggtttaaagtaggtacataacattccagttcacccaaatagccagattggtccaagtaacttaggcgtaccgcaatgactttggacggagggctcacccaccggcacctaaggctcctttcctcctttgaggaactgtagcagtaagctcctcggtgacgtagtccactccttcaaccagacttc

SEQ ID NO: 55811 - DNA, 1116 bp, Cannabis sativa
ttggagaaattaatttttttacatgtatatgtatagttcataatgaattaataatctaacaaaatcaatacatttagttaaaacttttttcaacaagaagacttacattgtatatatatgtctgtttaaattttataaatggatcatgtatgtttgaatgaaattctaaccaaaaaaaatacttacataggtgccaaggaaaaagatgttggtgatgaaataataatgaattaatccaacaaaaccaattaatttagttaatgttttctaacaaaaggacttacattgtatatatataaacatatctgagtgtgtattaaaattttaggaatgaatcatgtatgtttgaatgaaattttaggaaaaaaataacttacgtggaagtgcttagaaaggatggaggtgatgaaaaaaaaaagagcttcaaatgtagaggtcactatttaaaaaaaaaaaaatgacaaaggaagcatcgtaaagactctaacagtgtcaaagaatgataattttttacagtgtatgtattattacacaagttactaataatatgattaattaggtatctatataaaaaggtggattatggtttttacaatcaaatagaaagtttttgactgttacacaatcaattagtgcattcctttatattcagggcggtctcctatttttttttttccttttaaaccattctctccttttggagctgtttatgccttttcgtttggaatatttattaatattaattaatattgagtagaaacaaataaatattcattatcttgatggtgatatattaataatatttaggtaagaaatgaaaagatatattgcaagctattcattatcatgtttattgtaagctatcaatttaaaaaaaaaaaaaaacgattttacccattttaattagtattattgttatattattattaggattaggattaggataatatataaattaaaactataaattactaaaaattagaaaaaactcaaaaaagagaagataagctgcgagctaattttgggttataccttcctttatatattgattgatatttatgattttaaaatttacattaaaagacgtctaaatataattacataaggttttttttt

SEQ ID NO: 55812 - DNA, 1337 bp, Cannabis sativa
cctcacttgcgtgagtatactacttgattgcgtgcacttgcgtagtaattaataattttcgcaacagtctcgacacttgggggtgcatatttactggcatttaatggcttagatgttggtggacttacccctttttcttccatttatcttcttttaactttttaacctatttatacatgtatcctcctttgttaatggtatcgtttttgtgaggtttctaagtttcctttttacgcgtatatttctaaattttcttccctctgccttagagatgtcaaaccctccaggttctcctctccctcagtctttgagtggagacgaattccattctaatgttggggatcgatctccccctagccttgcgactttctctcgctactaccgacctagtggcgaagctattgttgggagaataatgcgggcttatagggctaggcgtgatgatgcgtcttcgtcttctgatgagaagttgctttagaatttcttcaagaatgagggacgtaacgttttatctaccacaagggtccctgctgaattccatgcccttcgtttgcacgctgagcgtcgtcgcgactaccgtcgcatgcaagcccggaaccggcaagcctgggacacggacctggagagggagcgtttagctaatgagaggcgggtggaggaatgtttgagagagggggctcctttctacccctggtttccgtacaggctgccgtcggtgctcgaggagagtggtacggtggtccatcgtgattcctggttctttatgcatactctgttggcaccaccctaaccgcgagcacttctgatccttaaaatttaagtttttgtttgttatttgttgttgttgttggtatttttgttgttttttttttgcatggctctttttgtacgtaatactattttttgttattatatccttatcttgtaacctttgcttgggttttaacctttcaatgagtacgcatttattacttttggtgtccctttctatgtttcgtattattccatataaggtcggggaaaattgcggctccgttaagtgtatttattacttatcatttttatatggttattattgtcattatttctttttgaatggggtgctttggaaagtggaaagacatatatgctcttcaagccgcttctcgcaattcaggtgcacgtatttgcttgacacatgttatgattttaatgccaaagtggcttttcgtttctgttttcgtggctccttatcaactgcatgcaagcttctgtatataaataagtctatagtttagccattttcttctaagaatcctttcgacatttttctgagtaagcatttccttcttgttcat

SEQ ID NO: 55813 - DNA, 1022 bp, Cannabis sativa
ctttttggtgcaagacatttgggtcaattagcactgggattttgttttgggccttgctatcagttgttaaataattatttaggattactgtagtcttttcctttattttagtgttttatgttagtttcctatataagactttctaattaattgtatttctataccttttgatcttgcagttaaatgaaatcatagtcttcccttatttttttttgtatcttcttattcttcttctcaaataattatcaccctagtttggaaatccttcccctatttataggtgtttaggggtggttgttattcctgcctgatcttatctttatatctgttaattaaacgtggacaatccccatatttcatatttacagcacatggataaaagaaataaccactacaaactgcctttgtctttatccaaaaaggatgtgctaactaatagttttgttgtgatgtggtattgcatcttgctttattcctcacattataactgtaaaggagatgtctttgacgagctttctttgaccttcttctcgcgctagccgcttataatgaagcctttatataatctttataaaaacttatgataagcttttcagattgtatcttatatttgtgctccttaggttagagagcatttacaccgtctcatctatcccatattttatcttactctgtacttcctgagatgaactttttctgttagttgtttatctcgctggtcttactaaatcacgatatttataaattgtccttaaatgattaggaagagacttaaatacgtctgctatctgtattctccgaggcaagtaaatcaacatatttatttcttcaatatccaagctagtttgttttcatgccctatcacacgggtcattactatatttattgctcaaaatatgagtataacactaatgtcaatgggaatctgcactcgaaaaaaacgacccattatatgatcaccaaaagaaccagccgccacctcaatcacgggaccaataagcgcaccaacttcgtccccaacc

SEQ ID NO: 55814 - DNA, 1240 bp, Cannabis sativa
atcgaataacttgtgttgcatttttttccaaacctccttaacaggtgctgcaagcagctggttcaataaatttatccatcattccatcataacatcctgggaacgattgtctagggatttcaaaaagcagtttcaagcttcaagagatcgccgacctggcttcatctttaaccgacataaaacaacaatttggtgagtctcttcaggaatatttaagtcacttcagcacagccgctgcaaaagttaaaacctgaatgatagtattcaactaacgacactttaggcaggaatcacaattgatttaatccacaacaggaggtgaattatggaatgatctccagggtcgccctgtgaggaacattaatgaatttaatgaaagagccaagtctttgtacgtaaacaggaagcaagaaatgaaatgaagctattgaaaacagactcgggaagcaatctcagcacaagtatggaaacaacaagcacaacctcaactaaagtggacaatcctagtggttcaaacacgaaaagaaaggatgactagaaagaatcatcctagaataaaaagaaacagaaaaagcatgacaagtatgtatcaattgattcggtatatactaagttgaatgaaactcgtgagaatatatttctcactaatgaaaacaaggttgcattctgcaaacccaaaccaatgaggcacgtgaggcataagcgagattaaacaaccacaaagatatagggcataccactgaggaatgccgacaactgaaagatgagattgatagttcgatctccttgggatattttaggcagtatgtaagacattaacgaaacaatcctaaccaacctaacaaccctaataacccgaataaccagagaatgcaacctcatcctgttgagggtgaggatatcttggtcatcttgggagggccgcaccacgctgaaaatagtaatgatacccaaaagaggtatataaatgaagtgaagaatgcaaaattggtgttccctccagaaccattgaagaaagctaagacggatgaacactcgattatcgtctctaagtaggatacaaaacatgtatggtacccacatgttgatcccctcgtgataacagtccagctcgccaataaaatggtgaaaagggtattggtggacaatgggagttcggtcaacatcctctacaaaaacacattgagaaagatggggttagaggatgtgaagttaaggccatgcatggtgagattatttg

SEQ ID NO: 55815 - DNA, 1348 bp, Cannabis sativa
  modified_base (722)..(724): a, c, t, g, unknown or other
agttttatacaatgtgtacaaaaacatgactttttttttcaaaaattttattttatgaaaaaaaattaaatgaaaaataaaaaatatgaaaaaaaaacatttaagataagagtaactatttatttcagagtaaccagttactttatactatttttcttatatcttttattattattttttttaattttcctctaaaataacttttttgaataaaaaaattatattttgcaaaatactaccttaaaaactatcaaaatcaaaattctccttttttttctttaaagaaaagtaagagttaatttaatagggtttaatatgattttataaagtttagagcaattctacaaaatattccaaaaaagtaaaggattaaaagaagagtaattggcggcataaatatttaaatttaactcctaattgtaaataaatacataaatttaatttttgacggtaataatacctaaattatatatttggagctctgtaggtacttaattgttcaaatattaagttattatccacatgtcatttttttattggtatatttaaattaatttttttaaaaaatataattttaatgacttggagcaatcaggaattgccacatgacaatttacttaatacttaacagtcaaatacctaaaaaagttccaaaattataaattacagccaaaaattaaacttaagtatgtatttacaactaagagttaaacttaagtatnnntgccgcaaattactcttaaaagaaaacccattataaatcttatgattttgttaactttctttttctctatattattttctcaaataaattcaatattatttatatttttgtttgagaaagtattattaatatttatattttaatttttaatacatgtatatatgtttgttgtagcagaatgcagagtacttttgatgtcaatggcagaaaatattacaggtcctttgccaagccttgctgaagagacatggactgcaaaaatgctctatgctattatatctggtcatgaattgtaaaatatattaatacaatatatataacataacaattataaacatataatatctatcttatactaaatgtggctatctaacaaaaattattagtttacaatttttttatttttccattaacttaaaactaacatccttaaattaatcaattaagtataattttaaatatctaaatttaattaatttattaaaatataacttagataattatttaaaaatatcaacaaaattaaataattattttatatatataaatcttaatttaaatttaaattaaatactaattcaattgattaattatactttacaacaaatttatattacttattta

SEQ ID NO: 55816 - DNA, 1444 bp, Cannabis sativa
gatgttgatgttttctttcggctatggcattttgttcaggagtttcaacacatgtgaactcatgtatgataccaaatttagcaaagaggtctttaaaatataattcaggtgcattatcagatcggaagcatttaaaagtgcaatgaaattgagtttggacataagataaaaaatcaggaatgatttaaacagcatcagatttttgtttcattaaaaaaatccatgtgaatctagttttgtcatcaaccaaagtgagaaagtatttgtgattggagtgagaaggtatatgataaggaccccaagtgtcacaatgaatcatatcaaatctaaatattgcaaaaccagtatgtttaaaaaagggaagtttcctttgttttgctagaggacaaacaaagcagggattatctttatgaaaaacatcaaaattacagtcaagtttattgcaaagcaaagccaaacgtttatgagaaggatgcctcattcgagaatgccaaacatcagcagtactgtaatgttgcaggcagcagaatgaatatcatccaggacatataaaccatttttctctttacctctgccaatcagcatcttgagttccttttcctgaatgaaaaaattattagtggagaattaacttcaatagattctcggttggtaagacaactaacagagattatattgaacttaaaagttggaacatacagtacattttcaagaattaatttttctgaaatggaaacagtaccacttttatttactaatagattttcattattaggtaaaatgagtctagtgggagacacattactgatgctttggaacatttttatattattgcaaatgtgcctagtggcacctgaatcaatgatccatgaagtgtcaaaaaaatcaaaggaagtgtagttcagaattataccagaatttttagtagaagaacttggatcatttacaggtatgttaccatgttggctcgcaaggagattgaataattgttgatattgagtagcacttagttgaggcaaaagggtgtgtgaatcttcgatcttggtgctggtgtctccactggtgtggacttgattagctacaacatcctttggtttgttaggcttgttgtacccaggagggtatccatgaatcttgtaacatctttctatggtgtgtccatggatgttacaatgggtgcaaaagggcctccctttcttggatgtttgaggttttatgccttgttgatcagtcttgtttttgtcaccttggaaagcaaaggcatggctagtattgatatcggtttctgcagaagggttccctttttgattttcttcctgagtaatgagatggaaaactcgattgatctctgggagaggatccatcagaagaatgcttccacggacttgagagaatttttcggatagacccctaagaaaagacataatgtattccatatggtgat

SEQ ID NO: 55817 - DNA, 781 bp, Cannabis sativa
cgaccaggacctgcttcaacttctccacgaggatcacctcgtctttgttctagtccaccttcctctagcgaaggacattcttcaaaccgtgtacccagccatacaatgatggctcgtacaaagaaaataacgcgtctggctgacgcatctgaccctcaagtggctcgacatgccgcttttcccagcgccaaacaggatccagccgtccagatggaggaggatcatgaaggggacgctgaggtccaagagaccgagggccaggacgtagtgctggcagttcctctggggaggaggaagagtcagaggttgcacccccaaactacggggagtacaacgaggctggggagccagtcaaagctgacggagacatcctagttgaggtcgtggactacgtaagtgaggaacttgctgcgacggttcctcatagaagggagggtgccttgggcgctaggtgggtaagccctccttccaaggttactaaggcgcgccttcggtctctcgactaggatgggttcctgggcgacttggactgctacattcccgcctacaactatcgtgccacaaacctcgaaaaggggatgtgtgactggtcgggtgcccatggtcagcaaggggcattgatgcgtttgcaccaatacttcaagaatgtggtggacttcttcgtcctctgcccagtgcagttcactcctaagggcatcaagtatctgtctaccctcttcgtcctctatgcctcccagaaatggggtatgccctctctccacgaggttgcttggtactttga

SEQ ID NO: 55818 - DNA, 1030 bp, Cannabis sativa
cagtgtaagaatcggattaagagcactaaatggggcagggattcggcttctattcaggctcatcaggaagctaaggcgcaattgtcagaagtgttagctcaacgtgaaattttttggaaacaacgctctaagcagttttggctaaactctggtgacaagaacagtaaatattttcactccgttgcaagctctagaagaagaaacaacactataagtcagctccaagataataatggcacttgggtaaactgggaatcgggtttggagagcgtcattactggttacttttgtgagttgttccaatcttctaacattaacataggcacggtgcttgatggtgtccgcccgtctgtgtctcgagaccaaaacatgagctcttgttgcctatttcggaggatgaagtgagaagtgccttatttcagatgcatcctgacaaatccccgggtcctgacggtatgacgccggccttttatcaaaagcattggagtattgttggaccggacgtggttcaatttgttcgtgaattctttgattccggtaagtttccggacttgattaatgatactcacatcgtcctcattcctaagaagaagaacccaactcaaatgggtgacatgcggcctatctcgctttgtaatgttctctacaaaattgcctcaatcaaaggtcggtcatagccaaccgtacgtatgaagagcgtccttgattatgctatctctgaaactcaaagtgcttttgtttccgggcggttgatctctgataatgttatggtggcctttgaagtcatgcactatttgaaaaggaaaaccaagggtaggaaaggctatatggcactcaagttagatatgagtaaagcctacgaccgcgtggaatggagtttcttggaagcagtccttcgggttatggggttcagtgaacgatggattgggttaatgatgggttgtgtcaactcagtttgctaccatgttgtgcacgggggagtgaagctggggccaatcattcctactagaggcattcgacaaggttgtcc

SEQ ID NO: 55819 - DNA, 1082 bp, Cannabis sativa
gtgagtccacgtgtcattcttacagaagcctggtctcgagtttctaggtgaaaaattcgtactataacaataatattgatgagttattcttaatcagattctgtgatgtataagtcacttcggaggcagtggggatagatagatcacactaggccctcacctaatagatcttttatttattattttttttttggaattttacaaaaatacttatttttctttggtgatgctttttttaacatttttattttatcaagttttccaaaatattgcgttaaaatttcaaaattacaaaaatattgtgttttactaaaataagaaaaacaacttaaaaacaactaagacaacgaaaaaaaataactgttaaataacttaactaataacataaaaacaaatataaaaaaacaaaaagatagctaacaagaaccagaaaaataacaaaatattgacttaattacaatttgaaaaacattatcaactcctcaatatgtttttgtagtacggttttttttaattagttttgtcaacttgatttatctttttgtactattacattatttttttttcatagaatttattgttacaacttcatactttcaactttttatttttttctttttctttttgagttagtaatagttaaaatgataatttatttcttacaagttaaataaataaatctattaataatagaaataataaaatcatataattttaaaatttgatatataatataatgggtaatatataattaatcttctaaaaaaattatataattaatatgctattatatactactgcacattgaaaaatcatatcattgtattttaacaaaatgtgtcaaaaaaactaaatatatgtatctaaacaacgaagcaacacacatacaaccaaaaaaaaattatgaggaagaaactaaaaatatacaccataaagaaatacaacatgaataagaaacaactgttgaacaaaaaaatatttactactataaaaagggacattcgcgatggtcttcaaaatatttttttaggggactgttactaataaatttatatgacttttttacactgtcgggaaaaatt

SEQ ID NO: 55820 - DNA, 1722 bp, Cannabis sativa
ttttttatatgcaatatttttcataaaatttacacagcaaagttgtgcgctccatgcattcatcctttggtagatgctttccaggtcatctttcataaccacattgaaagagaatttttggtatcttattttctgtcctcagcaaaatgttgtggtaaaataaaatgtacataaacgtttatttttctattttatttgcctcatgtttatatgccatctgatgtgttcttcttaggtggggttttcaagttggagttgtttctacctgaagaatatccgatggcacctcccaaggtaaagatttgttttattctgtagcaacaacctgtttgtgtggcagaaatgaatgctagcttttagttgattgttacccctgtatcttaattacataaagctggtttttgtttcataacttttgttttcggtctatttatgttgtccaggtgcattttcttgtgattgctagatgtcccggagttcaattgattttttattttaactttttgggctagaagtggtagggacatatagtagaagttaggatcttaagtattttccaaatagtggttcaaaccattacatgattagttgaagtgtttaaaaggttaagaagctaggatccaagaaatgaggataacgtgtgacaaggcaaaatctgaaatgtccataagttgtcaatatttattgcaacatgccaacatctgtgtagggtatgctttggttttcatttttgcttagggttgggagaatgatcaaaattgttgatggggtggaaaacactcaatactaattactcaggagttgtgtttgcttcttaacctgttttgaatgaatctgtatgctttttaataggataaatgaactaatattgatatatttatattttttttatatgtatacaagataagagaaataatagtaaatgaaaacacatgtttttgaaaatatgcctttaaaatgtatgctataacagatttcattgtgcaattagaacagctgtagtctcacaatccatacataactatttttgatttacaggttcgctttctcacaaaaatatatcatcctaacattgacaaggcaagtaatcttcttcgtttcatttcctttagttgttcctctttaagtgttttgaaatttccgaatataaaggaaaagaaaaatcttcttttgtagcttggacggatttgccttgacatcttgaaagataagtggagtccagccctacaaattcgaactgtattgctcaggtaatgtagtgtggctatatctttgtctaatgaaatttggttccccactcttcatcgtgaacatatatgtggtaaaggctgttataaaagctaaagctaaattataaaatgtaatggatatattttactttacatctgtatcaagttatggattatgaataattttgtggtttactgaaaaacagtattcaagctctcttgagtgctccaaatccggatgatccgctttctgagaacatcgcaaagcactggaagactaatgaaaccgaagctgttgagacaggtatttttctttgagtaaacatttttagatgtataaactatcttttctggcacaattagttcttcaacccatagtttgattaaacatttaagatgaatctactataagttgttgatgttggactagtgtctagttaagattaatactatgttaagccttgagcaggcactaggctagagctgaattatg

SEQ ID NO: 55821 - DNA, 1257 bp, Cannabis sativa
atatatatatatatattaggtgttagtaaaatttgttataaagtataattaattaattaaaattaaaatttatataaaaataataattattatttaattttgttgatatttttaaattaaatataaaaatttaaaaattttaaaaataataattaattaattaatttaatgatattagttttaatggttaatttaacgaaaaaaattaaaaattaaaaaaatattaaaccaataatttataggttatattaaataatcacatttaatataaaataaatatatctataatattttaaaagcatttataaggttaggtaataaatggaccttatttgatttctaagcataaaaccgcttgacgtaaatgtgattctaatattagtttgtttcttctcttaaaagatgaaaataaacaaatctatggatctcagtctcagtcatatatacatacaagttttattagaaaaaattaaaaaaaaaaaaaaaagattggggccaagttcctatatctattatatatgtttatcttattatcttgcgtatattttaattacttcctattcttataatttaattaaaatatttggaagagtttattaaagcaaaaataaaatattaaaataatattttacttttaaaataaaattttattattaaaatgtattaaataaaatatttgctatatatatatatatataaaaaaaatttaaagcactcacaataggttctctaaaataaagaagctttaaaaataatttaaaaaatcatacttaaaataccttattacactaaatgttctaaactctttcattttaaagtctatttaaaatttactattcatgtgctacaatatttatagaatactactcattacactaaatatattttttaattgtcttaggttttaattaataattaattatttatttttttttgtatagggatagatatgtgtataatattatatatttgaaatgaataaaacatagtaaaattttaaaaatgtgaggtttgagtagtgatgtattttaaagaagttgataggtggtgtaatgtaaatgtgtattgtaaaataaagaaaataaagttttgatgatatattttaaaaaataaaaagtaatcaattaataaggattttctaaatggttttcacatacaattttattttcaagagtatatttataaatataagttaattaatagttttaagtagataaaattaaggtatcactatatatatagtcttactaaaatcaa

SEQ ID NO: 55822 - DNA, 1101 bp, Cannabis sativa
ttttttttttcttctgtcatcatctcactacctattttatttttatcgtaagaggaacactactgttaatcttctaatacagtttcttagtcaatcttcgtgtctgaaaatacaagtcagaatatttttttcacgacagtgttcgttataattacaacatcattcatgtaaatttttgaatagttttttgaatactcgtggtagacttgaatattaagaactctgttttcagtattgaaaattattcagaatttttcaaaaatttatagagatgatatcgtaactatatcgagtatcgctataaaaaaatattttagcatgtgatttcggatacagaagttaactaagaagttgtaattagcacttcttgatatgttaaccaaaatccatttctatctcttttatataatattttatgatatgaaaaagggtaactaattgagtctatatatagctttatatatttgagagaaagaaagaaaaagagtaacctattatgtaatgcaaatttgaataatgtagttgttgtaaccctcctcaagaaaagaatgatacaattgaaagatgtgctagctatgcctatgaatataaaagtgatcactttcacttgcattgtttgtttcatgatcctttgggctaatttgagattcaagtaacaatacaatgtgtgtgacaatattataaaagtatttattttcatggctttaaagtaagtactaagtactatgtgttatgagctctaatttagtatgtaaaatcatcttaatggaacactataagaatattgtattactattttttttagtacactttgataaaatgatactctagtggtaataatgtataatgtgtgtcaaaattgacatgttaaaatttatattaaatttgacacaaaatataatatagactaaatttgtaccactataaatatcacattctttatttactattttcccactaataatgcattttatagcttttttatttaataatttataaactttttttttatgtatatcttaatagaaagtaaatgtttttgttatttgtgtgagtctcatttttaagtttattttgaggataatctcaatttttaaaaat

SEQ ID NO: 55823 - DNA, 3879 bp, Cannabis sativa
aaaagaccaaaatatacataagtcatccgctcttgctcattatgctcttgctcatatctttctacttcacacacactagaaattcctatattttgttaaaagattcatcaaagttccaacaaaaaaatatatggacgaatgcagcccaaatagaatattaagtgtgagataaaaataaatctctgtttttgatattctaactattcataatttctcaaagatatactaaaagtctgttttaattacatgtaaaaaaaaattagaacttttcatttatactgtattacattagctatataatatttttatggaagataatatgtagttttaatttttatgattatataaatatattaatataaattaaaagtttaacataatattatgtacaacttaacaaacgaaaaaaaaaaaacaaaagccttgtataccatagtcgttccttaattatcatagcatattcgatcaaattgagtggcatacaataaagcattagatgtctagatttggtggtctagttttggatagcaacaagatcaaatcgtcagtaactcatgtacatatagtgaaaaattgtatgtattggttgataataaagttaaggaagcatatattcttacactcttggtatgattaagatccatgaagaatgatcgcaaagtggataaaagaagcattttccccctttaacacctgtttaagggacattctgtttgtagtctccctacctttgttttcttctttatctcaaagaatatgtatggttttatcaactaacttaattaatacatctaatcttatgacaagagtgaaagagagagaaaaagatctaccatgcatgaaataatattttataatcactttatcaatgaaataaggactgctaatcttaattaacgaattaattagcatggcaataactaatgtacgtattaatttttattaggcagtagaatcctctttaattatgtagttaatttcgtgaaattacaatactagattcatatgtactaatacctattcaattggaagaaaatagtgttggccaatttttatttttattttgtttttttagtcttggacgatatacatcattaatatcacatgtctcgttgctaaagcgtgatcaaacaccaagtttcaatatgaaaaagggaaaaacaagaagaagaaagaggaaggaattgttcaaagatggggtatggtctgtaatacaaatacagtttggttttgctttatcttctttaacccgcttactcaaccttcttttcttaacttttttaatttggtggctagcttggtcattagagttttatgaattacctcagaaaaccttgaggtggaggagtccaaaactgaatgggaccccaaattttaaacaacatatttaaaaagttacaactttaagaccaaccctcgagaatctataaagccatataatagtttctttataattaattatcaattatattttgtgctctcaaggctggagtgatgattgtattcataagagactaagtaggatccaccatattatatattaacataaaaaaggatgggacagtggttatagtagtgcttgcaaactttaaaagagagaagaatgaagagtatctataagtacattaactgactgactaacctcgtaagaaatggtacgtacccgtaccataaatctacagaagcaggaggtcccaccttctcactcaccaatttcttgttgatctggcaagaccccaatttttatatatatatatatatatatatatctatgtcatactggtattggccggcattctaagccaatcttggtttaggaacatgaaaattatcttttgagttataaacttacaatcattactctgtaaccaagcaaatcaagctaatctttaatgactaaaaaatgatttgatttcagtgaaattgagaaaaaaaaaaacataagttctatctcaaaattaattggtaatgactacaaaatgattaataaaagaataacattacctatgtacacgaatatagttcaatcataaattctattatctgaattatcagctccgtaggctggtactgttcttttctttattttctaatgaaagaggaaatagtattaaaaaattctatatttagctaacaaaatgtagctaagaagaccaacatcactgaccccatctgtttggacattgataataataaaaatcataattaataattaagtagcagatcctgatctaatttggatgtatagtgagatcctgatctcaattttatatggggcagtacaaaaacaagaagagaaatataaaaagaatatgatcaagaatcctttgagagacattcaaaagaaagtagagcacagctgatcagccagtttttgctttaattggcaatgcattgggaaacatccgactactaagacaggttacctgcaagaccaccagtttatgttgcctctgaaataaatgttcattctatttttgtttggccagaataagatttggatgatcattatgatggtgacaataataatcaagtgaaatcttatgatgcaatgtcatataactcataaaccatgtatgatgaactatactactggcagtgaattttaattgggaaggtttcaaaattccaaatgggaaaaaagaaaataagtaaataaaaatttgtctagctagaaagcaacacctcatttaactctttttactttaattggtggataaaaagcagagaatcagcacattaaataagcatataagctggggtatctcttagcttggaccatgaccagtccatcttataaaaacacactctcaccttattttgataaagtatatattgcaggaatttgtgctttagaatgttccaagttgcatgtgatattatacatttaactataatataatggttattaaattggagggaaaacaaagaaaaagatggtctacatgagcaaacgagtcacatatatataattatgaggaaatgataaaaatgaagaaataatatgaagtgggtctctctcaggaagaataaaaatgaattaaggggattagagcttagcagcgcaaagaaaagcataaagagtcactattagcacaagaaaccaagtatattgtttttgttacatagggaaaagagcttggaattctaaagtggagagaagatctcattagaatgggcttaaagcatgtatttgtttcttttgtagagactgttcttctcactccttcaatcttctattctttatatgattggtcttggcactgtaccaatctcctagtccgaagggtccatcagcttatgtctgtctagtcataattccaaattaaaaaaactttccaaaacccaaaacaaagaaacaaaaacaaaaacaaaaacaaaacctctcttttcttaagaggaaaggaaaacaatgttaccaaattacccttccatatacatagaggggtaggtttcttggttactctcctagttactacttactaccctcataaacatattctttgaataacatgttcggttcacttttaacaagttttagtaatatacaatattaggtgatgatgaaatgagtactgatatgtttgtttttcttgtatggattaccaagtcacatgttgaaatttacatcataattagtgaagtttaactgtcacgtgaaataattaatcaacaaatatcttttgaaagggatatatagtggcaaaataactaaaccatggtacatgaggaccatgaccatgtattgttcatgtacatgctatagcagtctatggtccggtgatcagggccggccctgaaatgtagtgggctatagggtaaaaattattttttgggcccttatttagaaaaaaaaatggtatttttcaaaatcagcaa

SEQ ID NO: 55824 - DNA, 1095 bp, Cannabis sativa
tctccatagttttatctttcccttgattagttttagactttttaacccaaaccttcccattatctttaacacaagtgctcacattatgacgaagaacatcacacgttccacattttataggcaaccattcatactccactagttgttccaccaattgatccaattcattaatgtagcgaatatgtttaggagatttaaccaaaatcccaacttcaactaaaacttgagcatatatgatcctcgttctatctcgagtaaccttgttaattataataggcttgcctaacgtactcacaagagcactaagactattcatgtcccaatattgcaatcccaatcaatttaatcggatccaaacatgtacataacacaccaacctgactgaatcaagatcactggtccatggtcgaataaccacatgtttcttgtcaaaataagttacccctgtttccaacactaaatcttgtgttgcctcatctcgaaagcttactaaagtaaagcttaaatgcatttttaaaatacgagccatccttaaattatcccatattattttaaggaatcattcaaacacacgagaggggggattcacacctaaatcaatacaaatgacagagttctcccacattccacagctacctcttccacatttattttggcaatgaattgatcaccatgtttcaatggttcagtaaattcaagtttagtggatggagttctctggttcgccttgaattttctccaggtattctttgcagaagactggagatcaacttcttctacctccgcaacctaagatctaaccccaaattttagatctctttccgtcagaatccccaaatcaaccctaagcacgaaatgggtatcatgaaaattatctgtttggctcgtatcctccacactgttctagttctaagggaactttgaaaccaacagagtgagtatcggaagtggcacacatagctgatgaccttaatatagggcttcagagttttctttttcttccgccccatggagagagaaacggaacctcacacacccttgataactaagtattaaaatttctttttgtatttatatatagggatattggcggct

SEQ ID NO: 55825 - DNA, 772 bp, Cannabis sativa
attttttaatttgacacgattttctaaatcgtttgattagcaaagggtactgtaattgaaaaataactgtagcgcgactgagtattaggccattacaatttcggtatcagagctgccagatttgtctaccgaagatcgccaagacatgtacaatcatcatcatcagagaaaagctcagctcacgattcagtaagcctttacttgtttagtattgtatgtgattattaatgcatgttaggaagcatagtagtttataattccttattttaatgcgttgccctaaaatttataatagcggtattaagttttgtgatcgctgtctgacgtgcttaacatatggcttcgcagactaagtcctaataaatggacgcccagcgaaatacaaggagtctgggaaatagggtcgacaccggaggcggtcagggaaatcaaattccgtagaatccccgtggacgtggtaaaggctgtggaaggtttcagggtggtcgacatgaaaacccaccttaagctcctccagattgggaacatagatttgcaaaaatgcaagatcatattcgccaacaagatgaagaattctgacattaaggcagtagggtcccttgcagtgcctccaccacaagttcaggctgctttaattcttgcggtgccagcagaacaacctattgctggcaaccgtacggagccactgtatgagaagttttgcaagcaagcacctccagtttttttgggaggttcagatgttgagaattggctcacggtgatagagagaatt

SEQ ID NO: 55826 - DNA, 975 bp, Cannabis sativa
ataactaacttatgctaactaactcttaacaggccccttcaagttggagcgtagaaatctcgaatgcccaacttggatacaatatcgttgaagtgactgggaaagagaggtttggtgagtatgtcggctaagttagctttggatggaacatggctcatgcgaagaacaccttggttgatcttttctcgaactgtatgacaatcgatctcaacgtgttttgtacgttcgtgataaactggattttctgatatatgaatagcagcattgttatcacagtgaagtgtggatggaagtgtcatgttgatggagaagtccttgagaatggaaagtaaccatgtgagttcacaagttgcatgagccattgctcgatattctgcttcggcggaggatcgagagatggtttgttgtttcttagacttccatgagatgagggattggccaaggaatatgcagtagcctgttatagaacgtcttgtgtcgaggcatgcaccccaatctgcatcggcaaaagctttgagctgaacagggtcggttggagaagcatggaagaaaagaccttggcctggtgagttctttaggtaatggagaatgcgtgtggcagcttgcatatgaggaagtcgaggggtttgaagatattgactaagtttattcacggcaaaactaagatcaggccgtgtaatagtcaggtagaggagtttccctatgagacttcgataaggggtaggattaggcagtaaatcccctgaatcattacttagtttggtgttgggttccatgggggtagaaaccggtttggaaccaagacagcctgaatcttgtaggagctgtagagtgaagggtctttgtgaaactgatattccttttgaacatcgagcaatctctaatccaaggaaaaagcgaagagggcctaagtccttgagtttaaatctggtgtcgagtgtagtaatgaatgtgttcatggcagggatgttgttg

SEQ ID NO: 55827 - DNA, 726 bp, Cannabis sativa
gtaagtaaataatccaattctaaatgttatcaaaaaaaaaataatccaattctaaaatattctgtaaaatgagattaatgggacatgtcaacaaccttggacataggaacaaagtaaataactttacaaacttacaaaagtaattcaaattatgtcataaaaaaaaaaaaaatacatgcaaacaaaaagtaaaagtaaagtaaaggaaaagggtaacaatgattttagcattgaaatattaagagactagtagacactttaaatagtctagtagattctaatttattttagtgttataatttttttttaataatcgaataccttgtaaatatttaagattacttataaattttttaaaatttttaaaataatttacagtatcaaaaattaaatttaaataattaattacttaccataataaattttaaaaaataaccatgtgtagtaaaatatgtaaaataatcataaaaaaaactcatttacgggtgtatttacccattactattttaaaagccaatacactactggttttttttttttcaaaaagcagtcgttctattgtgattaaattagagatattattgatcaaataaaaatgttgttaataaaaaaataataattacagataatataatataattttgaattttatttcttagtaatttatttttagtccatatagaaagatgatttacttcgaatttaattgttaatttatatatttat

SEQ ID NO: 55828 - DNA, 752 bp, Cannabis sativa
ttgataaacactaaaacaaataaggccacatttaaggtgtacaaaagacacatttactcggcaataaaacaaacaagttaattaataatctatcattatagaaatgctaattaattaagggacactctaaggtacgaagcaccactgctaactactcacaacatggtacatcaatatagtattgggtagcttaaaatgtttaataaaaattctgttcatataataagcctgtataattttgtgtttttaagtagtttattggctccctccttgaccaactcccaggcggtaatgacatgacactgatcttccgtaaacggggttcccacagaaaatctcaacacatatatccaacccactatagtatgcgacacataaatctttccagacgagtttacccaatgtagaagccttcggttcaacaactcgatataaccagctgaattatcatctggattagggtttagtctaaaacacaccagtccgaacaactgtcttggcaccacgacctcaaatcttgaacgggatcgaacgagctgactcactgagtatgaactcccacaagatgtataaatattaatttctaaaaaaacgtcttgctaaatatttaaattaaaaattagttgttttaagaaaatagttaattaattgtaattagtttaattctaaaaaataatctttacctattgacaacctactattacaggtaaaaaaaaatataaccattataataaaaatgtaaccattgagta

SEQ ID NO: 55829 - DNA, 973 bp, Cannabis sativa
cttacaaatttaaaataagcaggtaatcagataattaacatgtaatctaacatttaacacttactaaaccatgagtgaaacgagtcttcacaaccagtgcacatatcaaactggtctttaagatctttaaaccttggtcgctatgataccatgttgtaacgccttgactcacaaggacgccacgtgtgtgcttttacaaatttatttataattaatatattagtttacgaaaagtgttgtttaattaaaaactttctaattaaattaaaatatacctttcataaaaaaattccacaaaaaaatggggatcccgtgcttataaatttttttacaactagtttgaaaaccgttattacaaaagtagagtctattttcagaacatagtcaaagggttgatcctatcccctggaaacctagccaccgcggttgatatgtacatcggtgcgagacctatgactcatggccaattgatagtttctttcctccttacctgcaccacgaaacatgcgtgagtcacaaagacttatcattatagtaattggatatttatcccaatacataatcacgtatttcacatacaattaattatcttataagacaatccgactttaaagcttcatcaagcatccttatcactcgttgtccacgagctacttatgtcactatcgttccccgttaaagcacccgataagtatgaaagctatctacggtttcaagggagtatttactcatttcattaaggctaatgaccgtatctttatccattattaataacagtaatgactgtatctttccctcaatttcgagtcacaaacgataataatcattacctcgatcataatcaagtcaaaaaagataacctcagtccaatagtcaagtgtgcggcccaacctgagtggaactacactcgaaaatcccaagtcctatgtcacgaaaaaaaactcgataaataacttatccaaattctagaaac

SEQ ID NO: 55830 - DNA, 696 bp, Cannabis sativa
taaaatacaattcagtataatactctacaatacataatacggcgtactaaacgaactcataatatattaaaatatagtgtaattactctattatataattattaccctaataattacacaattacttctaaacacaccctaatatacacaaagcagaaattaccatctttacattttttataacttactataataagttgatcaagtgtagtcacacaaaaaatgccacactattattttgtaacactagtgaaaatatattacagaagcagccaaatattccttcgaccgttgcccaacgatctcgacctcaaccaggagcttcaacgacgacgaagattgaatcgcagagagagaaacaaaatcacacagaacactcagagagagtttcgacaatggcgtctagggtttcgatttcatttctcattttctcaatttgtattcttttgtttccataatttatacacatatatagaaattataaatagctagaaaatgagaagatggtagaataagcggaggcgttatttgtgttgtttcggctttattactttttatgataattttatttattatattattacatttattatttttatggtaaaatatatttatgttatgacatctaacatgttagagagtctcacattgctaatacgtaaaaagataatagaatatataagaggaatggactac

SEQ ID NO: 55831 - DNA, 2472 bp, Cannabis sativa
caatacttctggaaaaagaggccagggaggccatctcttccaggggcctttagagggttcaaagagaaaaccactttagtgatctcctcttcagtgaaagcctctagaaggtccctatttgtgttcacggagactttacttttgactttgtccaccacctcactcatcatctgctcactcggattagaagaggtgaaaatgcctttgaaatattcagtagcgaccttgctaatatccgagtggtctcgcatcaacccaccttgctgatccattatctcacttatcttgttcttcttttttctcgccgttgccttatgatggaagtatttggaatttttatccccacatttcatccatagagctctacttcgctgcctccagtatctctcatgtttctcaagaattgcattaaggttattttcagcacctttaagaattccccaattatcaacattcattctttttgacaactcattcaccctccttgtaccctcctggactctgtgtttcagttcttttatcttttttctattccaattgtttaatctactcccacacctttgagttttacttttgaaatcccaatccgatgagcaaaaacccccatgttccacccatccctaacaatctcacaacactcttcctcttctacccaagcctcttcaaagtgaaaccgggatcgaagagccttccccttttcaatggaatcccgtcccccctcggtatcaagcaccaaagccttgtggtctgaacaccaccattcaagatagaaggctctactttgaggaaaaagattaacccaatccgaagtggctaaacatctatctaatttttccatcataaaattctccttttgaccattacaccaagtaaaagtatcaatatccttagtaaggtcttcaaaatcacactcttccactactttcctaaacccatccatagcattcagttcttctccctaccccctgcttttctttcgcgtgaaggacctcattaaaatcacccccaataatccacgggccatgagtttcatctttaattctatgaagcatcgcccaaaaatggtgtctttggcttctaatcgggtcaccatacaccccagtaaaattccacaccaatgaattcaaatcacagacagaggtatgaatatgaaatcttgaatgagacagaatttttaccttaaaatcggcttcccatagcagcattaaaccaccgctgagacccaccctttccaccagaaaaaactcgctgtagcccaatctcctcgccacactctcagcttgacaattgagtaacttcgattcagaaataaaaatcacattcgacttcaactccatcgttctcaaatggagagcattgaacgtctcagggttgccgagaccctggacattccaccatagaattaacattgagatcggcgaccttgcatctcaaggtgcgccgctttatcatttttgtttaagaccgataaatcctcctctccagaaataatcgatcttacttgctccccaacctcaccatctttgtcaacatgtccatctactctccctttagtacccaaccgagaagcttttccacgagccaaaactttggccgatttaagctttcgaccattcgcactgcacaccatttttcccttttcatccatccagcccgttgtaaagcccgtcgccatgtctggaatgttaaattccttgctttccatttgcttctccatctctctttcacaatttgccctttttccccctggttcatcgtcaatttccatatcgcttgctgtctctttttccatcgtcgatcgtttcttggaaatatttgttgctgtttcctcatttttctctttgcttcagagactttctctcagtatcgtccctctcccttctctcttttcccccttcttcttcgatttactactggacggactactattttcctgggaaccattcgtattaccatcagagagaaatgtttctttctcacttttgttttcaacggcatgtcgttcagccaagtcctctacaccctttgtatgctgactcatctgcattttgtccacctgtccctccttataatgactaggatccacctcattaaaattctttttgtctcctttctctgcaaaactttccaaagtggttaaggttgactgctctttggatagaatctctttcacagatcctctaccaacgtaaccatctcgagacccaccaactccctcagctttagccacttttctccttgtattgtccccatgaacctgacactctgttcctttatacaaaacatgctgggtaataggtggtacgacaatagcctccatagcacaaggcctttgaacaccattgctgccctctgcttcccaccggcggtgactgatattaggattcaccagagttgcaaaacaatttgttatgctactctcatcttttagccaactgtcgtagtaaggtaccaactcgcccgagctatgtt

SEQ ID NO: 55832 - DNA, 882 bp, Cannabis sativa
tttcgaaaataatgactgaaaatagttaatcgctacagcagcaagatcatcgtccgaagtgcaccactgcccttgttcattaaacagtcccgttatggtattttttttccttctagctgaagctttgaagtggaaaaatctacataacaactcacatagcaactaatagagcaatctaaatcgcaaacaaaatctacatagtaactcacatagaaattatcgaagcaatctaaatcaaaaaattgtatatgaagtaattctcctaaaataaaaaaattacttttttttcggcatattaaaggtgcgtttagtaatattttttaatcaattttctatttttgttaattagaaaagtgaaaatattttctaaaaacatgttctatataaatatttttactttccaatttttcaattgacaatcaaaattgtaaattttttttttttaaaaaaaaatcattttcaatatttttttaaacaggtcttttttcttaataaatattttggacttcgacccttgacctttagaccagactccgccctcgatcccagtcccagacacggaccacgaccctgaccctagatcaaaatctagacctgatttaaataaaattaaaaaataaaaattatagaacatacttttattttatatttttaaaattaaaaaataaaagtgattatagaatacattctcattttttaaaaatataaaattaaattttatttctatgattaaaaattttaaaagtaaaaatgttatcaaaaacttcctaaattttttaaatttctaaaacattctatatcttaaataattgtgaaaaaattaaaattaaaatttttccaaatacaaaacagacataatagtatgtattggcacactctttt

SEQ ID NO: 55833 - DNA, 1618 bp, Cannabis sativa
  modified_base (1213)..(1218): a, c, t, g, unknown or other
gtaatagaataagaatggtattgtgcaaaacgaaacaatcaatgacttacgatacaatgtacggtgccaacaaacatgcaacacaatcaagaaacatatactaagagatcacaagaattcaagatgatgaattttgcagcaaaaatggaggagaacaacaccaggtttaatgagttcaagccatgtacaatgctctacatctcggttggagcagtagcaaccatatctgtattgatatttgtgtttccaaggctacaagaatctttacaaacttctcagagattacgataagaagtttctctctctagtttagactctaccttacacaatcacgaatttcactcaagcaaatctagtctgattcacacacaatttacaaatatttacagctatatatagatttgcattgttgccatatgtatctcttaaatcattgtggcacatttacaccgccataaatgatccagctcatcaccaacaataataatccacgtcatcttgaaatacgcgctttcagtatagacaatctggaagcattgtaatacacaagccctctgaatacgtacatgacttcattcccagatgaaccttcaaccctgaaaaatctatctaagagtacaccttcgaattagtgacaagctatccagaagagacattccatacacaacacaagcttatctggaagtaccttcaaattctacaagaccttttacacagggcttttcagatctacactaagctttcggtatctgctcactggattcacagcttccaatcctagacgacaaaatttgtaaccataatcaataaatctccactttagtttcaagttgaagttgcttgataaatcattgtctaggtgctgtcccctcagcccctccgggctcagttgacttcaattagcttcaggcaatgcttaaacttactacttggcactaccatagttatcatatcagaaggattgtcttgagatggaactttggcaatcttcacaacttctttctccaccacctctcgtacaaaatgaagcttgatatcaatatgcttagtgttgggattttatgccctaaataaactcacttaaatataatcagatttactaagtaataaaagatcagaaatcatttttattttgcatggttcacctaatttctttcatgattatacgtttaatgtacaaattctattaactccataacatatagttattcannnnnntagtgttgtcaacacagtagaatataattatgattatatgtttcaaagtttttgtgccgtgatttgttagtacactgaatttacattgacatgataatcagcgataaagcttacgtacaccttggataagtattatgtcctttctatggcattggtaaagtatgctagtatcagatgtatggagtatatatcgaactggaccgatattgaaattggtaaagatatcataaacttatcgttgtatctttctaagttaatatcacttagttaatcttagatcaatagatattaatcctgatatggttaggttcgatctcaactatgtcatttatatgttcttggagttgttatgtaaagaccgcttagctttaattttgaaattagtagataattaaggctt

SEQ ID NO: 55834 - DNA, 1019 bp, Cannabis sativa
  modified_base (27)..(27): a, c, t, g, unknown or other
atacttgtaagtagatctaagatcctngtaaaataatttccaacaccctctccctctaccccttgataccccacaagatcttcctccgattggattaaagctagaagaatagaatgatcattcactttccaccatatacccatccctggtcatacccttctactaccattggttctttgaaaatagattcttcacaagttctccgtctcctctcttgttagttttcagatgagttttcatttttattgttaggttttactttgttttaagatttaacttatataaaatgaataaatataagaggaattattttatatactattttttaattattttttaaaaatttacagttggagtttcttgggtggtttctatgtgagttgctatgtagatttttattgtgatttaggttgctctgttggttgttatgtgggttgctatgtgttttctgtaaaatacaaaaaaaaaattctttgaagtgtaaaaatgaaaaactccctaaatatgatttatgatattcatttataaaagaaaaggaaacaaaataaaatagtgaccttttccttacacttgtttatctaagttgacagaaattttaaaacaaaatgaaacggaattactgttttgtaaacattgggtagtttacctgctacatataaacaatgagtacatgtcgcttacaaacccaaaacataggtagttatgccacaatttactgtaattataaaggtgtatcaatataaatgtgttaagtgtacacgagtatacacataagttatataagcaatcatgttagcaattaactgtagcaaattaataacattttaaatttgctaacagtttaataatttaacaaattttactactaaaatttaaattgcgaattaagtgcaagtgaaataataatttagagatttaccaccaaaaacactaaaggtgcgtttggaaagccacaatgtaattggatcacaatttggcatgtttgtctgatcatgtaattacactgtaactgtgtcatt

SEQ ID NO: 55835 - DNA, 1733 bp, Cannabis sativa
aatttttctataatgtcatacatgtgcataaatttttgggccctaagtttagggctttagcatagatttaatcggtcttaatttaagattagtccgtatgtacagatcaatttgagagagatcacatctaatgtttttagatttattcaaattcgagccaattatacattgcacgttaaattttaccaaccgattctatttacttagtttgtctaccatctaaacaatccatttataccatctaaactaatccaatccactgtaatgttacattggattagtttcatcaagtagatatatttcatgtatatatacatatttattgaactaatttaaatttatttaatattttaaattatgtatttatttttttttaatcaaatctactccattcaatgttttaaatctaatacttttattggattggatccaatcataaataaattttaatcttaatttttatatatacatatatattttaaatataacacaatacataaaattcaattaaaatattaattagtttagttaattattggattggatttttgaacacgtcatctaaaatctcatatgatctaattgaataaaaaataatatctaattcaatcataattagatattcaatatttggtagtaagtttataattagatcatttgattataattaattaattaaatcagtttatgcatgctcctaattcaaacctagctcgtttgtcctttttttctttattgatgttgtagtactatttgttgtcgtataggttttactctaattaatttttgttttctttttcgaaagaaaattcatcaatattataaggcacatagttaaaaaaaaccactaaaacaaaaataacgtgcctcacgctaattaattttcttttcttttttacttagcaaattctttctttctaattaatttctatttctttctttctttattttttctttctttcaatcaaaaaccaaatacatagggtaagatatttatcaattatgataagagatattaatggttgatagaagtgtgtgtggtattcattacaatataagaaattataattattttaattaatattaaaaaatacatataataaatttgtgcatagagaccaagtcaaattcctttctcacaacgtatataaaatagtgaaggtgatcgatcgataatgatagaataaataaaatgaaattaacactaattacaatatccacttctaaatattattcagttttttttttaattattcttttctatgtaattatagttattaataattgtgaagcaatagatcatgagacttttcaatgattgaattggcatacatataagataagacaataagaataacatactacaaacaatcttatttttattagtcacataaaaattataactaaaagtaaaaaaattgtaattaattataaattacaatttctatattgtgactaaaagacttgtgatcgaaaatatattaattacaaaaatcataattttattgtaactaaatgtattttcagtcacaatatatactttgttgtatttaaaactaaattagtgacgacttgtatttaagtattatattttagtcagttacaagtaactttttatggtgactatataataaaaaaaattaagttataactaaagaatttctcagtaaaaatagatttttttagtgactagagagtagattaactatgtttattatcactaacaatgatac

SEQ ID NO: 55836 - DNA, 598 bp, Cannabis sativa
cagaaaaaattgaataaattaaaaatccaacgtgacggagaaatgggctctgaacagagacattaccaaggggatttttatgtcagacggacgaagaaacctttagcggagatgggtgttcgagatggagagagcttccccaccacgaatgggtgctgtggacagagagagcttcggtccggtgtcgtaaatgatgcattggacagagaaagcttcggcgtcagaaatgttagctttggagtggagctcggggagttaagaacatctacaaagctgaccaaatttggtgtcacactatcactaaattagtgtaaaaaattattttcactccaaccataacaccaaaaattacactaaaaaaatatttattattattatattaattttttaataaaataaaaataattatagtattcacatttaaatttacacacaataaattaaaatgtgcttttacaatgtacccctctaaataaaagagacgagtgcaatagatagtttaaatttattttcggcgtgttaaatttttttgaaattttacaggatattttaaataactataatgtatatgaccataaaaaaataaactaaaattcta

SEQ ID NO: 55837 - DNA, 667 bp, Cannabis sativa
tgaacattagaatactgtgatacacccaccatttgaaagacttaaccaatgttcccacaacaaaatttacagagtacaaaatcctaaagttctaagtagcagttagaagtttttaagtctctgtgaaccctaagaagaacagacatgcgagtattcgaggtgttcatccgaatacccgcgtgtattcaaaatataaagtggcgtctgttcaagcattttttctaaagttcacggttatgccaattttaagtcatttttcctgaaattacccagtttcttacctaaaaaacatagccccttacgtatttcttacaaacatgtattcgtaaacccctcaaaggtgttgaaaccaagaaaaatagcattttttctccaaacagtaaacaaaaatgcagtgaacttcaaaaactaacctttagttctgagaaattgttcctgtgattgctctcgacagcacttgagattgagaaaattccacaaagaaaggtgaaaatctaggcaagctatgaaaatctccgttgagtctctgagagagagggaatcaggaagttaaggaaataagggaaaatgggggattatgattcgaatcaaagggtttaaatacccatatccctcattaattgggatcacgacacgtggcaaccggaatgcctaaagtcgcccaatc

SEQ ID NO: 55838 - DNA, 1735 bp, Cannabis sativa
aattatgattggatatccgattctattagatcggttgggattggatcggataactttctgcacacccctacaagagagactaggtcgaccttagagattattaactcaatgactcaattctttgtaaataaaaaattacacaagtattttgatagtttatataaatatatattttactggctaaagcttatgataagttaagctggtattttattgatcatgtgcttcacagttttaaggcttcagacaagttttgtgggtgtaaccgtcagtgcatatctacaacatccttcaatatttgctttaatggaggaaatattagtagacttaactcgaagtgcagtattaggcaagatgatccccttttcctgtatctttttatctaggcagcaacaatcctctcgtgtatccttgagaacacccaagattctagtatcattaggggaatcaagttgagccaaaatggccctcgactttcccatctttttttttgtagacaatctattcctggtgggcagggccacgatggaggaagctaaggacatttggcaatgtttggagaaattatgcaattggtggggtcatcatagtaataaactgaaaacctccattttcttcagcaataatattagtgatgagatgaaacgagatatggagcaggttcttgtgctcagcacggtagtgggtaacattaactacctagggctcccgtaataaagttgcagatttcaacttcattctggataaccttgtcttgaagttgcatgggtggaagttgaaatccttgtctaaagctggtcgtgctactttgataaaatcggtggggctttctttatcagcctatgctatgcaaactataaagttgtccaagaaacttgcagctaaaattgatggtatggttagggatttttggtggagttgcgagcaaggcaatcgtggtatctatttaatggcctaggatcatttgtgcctccctaagccttgaggtggacttggattctagaggactttagaaataaatcatgcctttcttgctaaatgggcttgggctctccttaccgaggatcaatcattttgttgcaaggttttgagtgctatgtatctcaaagatagacctttcttgaagtgttcgtccaagaatttggattcgtagttctggaagaatgttctaaagtctaaaaaaattcttatgaaaagagcctgtaaactcatatcggatgggcatgatacagacatttgggaagatccataggttattcatggtcgagacttctatcctcatcctataaacgggcgacctaaaggattggagaaggtagctgatttactgacatacgatgacaattgggatgttcccaaactccaaaaccttttttaacttggagacaactaatagtatcatcaaaggtggtagactcgggggccaaggtagtgataagtggatttggactaaagaaccaaatggtcttttctctattaaatctgtctatctagctgaggccttgggtcgtgctcctcctagcaacgttgctcccgctctatggaataaactttgaaactctagaatctcagagcatcacaaggtcctttgatggagtattctctcaaatgccttccctatcagggctgctcttgctagaagaatgcatattgaggaagtgtcatgtcctatttgtagtgagggagaggaaacaatggaacatcttttcctctattgcaaccttgtatttcacct

SEQ ID NO: 55839 - DNA, 1359 bp, Cannabis sativa
tgaaggtttttgtttgtgtgggcaagggcattttggtcttttagcccatattgtattttttccttttgtgtattttattaagtaatataataaggatttatttaattattttggctaagattgacttcaataaaaccatttattttactcactttttttttaaatatcaaaattagacaaaaaacactcatctctctctttcaagctctctctcatttgaacccctatacaagttaaggtttgatgttttctctgtaattcaagctagttcagcaagtgtttagtgatttccaacccaaggtaagcctcttgtagctttctcttaagtttcttgaattttaggaaaatggattttgcatgaattgagatttttgttgttgttcttgctgtggttgtttgttattgttttcagaggttaaattatgtttagatatgttgaattaagcatgttatccaaatttttacactctgacgtggcatcacacgatggtgacatgtggaatcaactctatgtatctgttgcaagaaatatgccgaacacgacaccacatacatccgctcggacgaagtcctcttagccgggcaataagcagtccacgcagcatgccaacacttagcaaatttagctttcgcattgtgagtcaccaaagaaatccctataactttgggatctaatcacagagatatggcaagctgtctgaatcccacgattagtgtattctatatttactacgcaatctttctacttatatcaattataaccagaagggaaatacttccctctcaagcttatagccctataaatagtgattcatattcactgggcaaagggtcgaaatattttgtctaagaattcatatttagagatattattgtgagagctctgaggagaggaaccattccctttgttcttaagtcaataaaaactacgaggattaggctattaccgaactgctcggagctgaacctctataaaattctcgtgtctttattcgctttttatattacagccgtattaaactacttgttgcttacaaattagactcattgtcgttgtctaaaagtgaggtcaacattttggtgttttcattgagagcagaatcaggattgctctttctttcaaatctaatcactagtacgatggtggcacagactcatagtggcgtggttgatccggcgaatccataggcggtggatcttgcaatttagaaccagggaacacaaggattctgccaaccgtaaatcacagacaaccctcaatcgcgggtcacggtgtgacgattcgtgtcagtgaaatcgtgcatggtgtgcaagagacttggaatactagttcagtagccaaccagggcattcataaca

SEQ ID NO: 55840 - DNA, 1307 bp, Cannabis sativa
caatcggtccagaccccagcagtattttgcaattggcgaatttgattgtttcttttcctagcacttgcagaagcatggaaatacttggtattcttgtcaccattatgaagccaaaactgtttcgatctctgtttccaataaatctcctactgagccaacaattcaaaataattattttgttcgctttcaaactcagtatacagaaacgaacttgactggcttttcattcttgtcatacgcttcttactttgggcaatacggttcttgaaattccctgagttttcctttccccattcctccaatcgtatcgaacattgtttaattctaccagacagaggtaagccttgcgaattaaaccaccaatcttcaaccaactgagagcaaattggttcacgggaccatacattttcataccgaaagcagtgaaaagaggcaacatgggacatagtttcaggttgtaaaaatataggtgtatgatcagagcaagtgtagtcaatgttggtaagtgtagagtgattaaaaataactaaccattcatgagtaacagcagctttctctagtcgaatttcaatgcaatggtcagtaccttttccacgttcccaagtaaagggatagccacgaagctccaagtcaataaggtgacaatcatcaagggccgattgaaaaccagagattagtacagaaggatatgggcggcctcctttcttctcatcattgctgactatattattaaaatcaccaattacacaccatggaagcgttgattcatgagagaggtttcgaagaagctgccaagtttgatgtcgtaattgtctattaggttctccatacaaaccagttaacctccaaactcccatgccttgaacattaacctccaagtcgatatggtgttgagagaagcccagtagcttagcttcatcattcgatttccagaacagagcaagtcctccctttcttccatctacatcgactgaaaatactccatcaaagccaagtctaacccgtacacggttcaccaactctttggtgcaaagagtttcacataagaaaaggaatttgggcttattttggaaacaaatatcctccaggaactgaatggcccgtgggtttccaagcccacggcagttccaactcagagtactcataatgcttggtgggccaccagaacccaccttgactccgttttttgaaattacttctaattcctcctcattgtcatttttgtcatgttccatatcatctactgtaggcccagttgggtcgttagtattgacaagcccaacacgtctccttttaagctcagatat

SEQ ID NO: 55841 - DNA, 593 bp, Cannabis sativa
gtaagagatctttgtttgcattgcttcttgggatttacttatcaagcatgtgtttatttgagttaaaaggaaaatgctaaattgctaacatatagtatagacaggcatcagatctaagcgaaaaagttgattcataatgtgagtttgaaaggattaaacgttatggaaatgacttttgtagtttctactgataaatgtaggaggacatttttgtaatctattagatgggcctttatcattacctgaatgcagtaatcaccaaataacttcattaatatgttaatgtttgggatttctgggattcatatttcaaggttcttaatgtctgcaaagagtagttgtatgagatatactaggtggtaggttgatcaatgaatctatttgaaacatatgtgtaattacagccttctatttatcaaaacagactttacaatacaattgagccgagtccgtaacatagaggttttgttttaacgctgaggcttagatttctgcagctacttgaatcaccgaattcggactttattagtgaaagttatgactcatttacataagaaacagtgagacatttgattaggtgatagtcattgggt

SEQ ID NO: 55842 - DNA, 1834 bp, Cannabis sativa
ttttttattaaaaagatttgcaacaaaaaaaaaatgaaaaaaaaaaacattttttttttcgaaaaaagagaaaataaaaaaccacaaaaaatagggaccactaagccctacacgatcaactctaattaactttccattttcttttaaacaaaatcaaaattaaaaaggaaacaaagacaactacattatgacaagtatcatacataacatataaggataagttgatataaataaagacttgatgatcaagaatactttagaacaaataattaaaatgtcaattttcaccatatgttacaattaattcagcccactttaaaaatcatgattttattttattttttatttcaaaataaatgagaatgacaaagtccccaaaaacaataatagctatgatcaatgtgcattatcttgaaaaaaaaaaataagacaagccaaaagaaaatagatgttagtgtatgatggagataaaaacacttgtgatttttgaacaatagaaagaattttcgagagaaacaagcacaattcaattacaagcacatattcttcaagaaagtcaatctacatgtaagagtctgacacacattttttcttaaataaacagtgtaatatttttcttgaaaagtttaaagcatatgtatgtgatagtgtatgcaagggaatattgctcatttgataagagagtctttttctaaatttaaaaattgtaacctatgaagatgctgtcacactacaccagtggtagccattttctatggtagtgtatccgcttcataattgcgaattacaaagtaccaacttactcaaaagaaacctttcacacactgatgtaggtagctctattcttacataggagcttgaaacaatgctgcataaaggatgctcaaacattaaccattgattgattgactcgaatatgaaaggaggaattgattatttttgtcttcaagaaaaaacttctaaaatcacaaaaaacacaagtcaatttatatttcaaaacacaaaatacaattttcaaaaatattgccagatttcttaaatagaaacaaatacatttgatcaggcaacaaaaataaagtttgataatcaaagagaaccaacccctaaagattttcggagaaaattaaagcgaaccaaatcaagagccttagtgaaaatgtcagcaatttgtttatgtgtttcaatgtattccaagacaagaatttaattttcaactagttctcttataaaatgatgacgaatgtcaatatgtttagttcgtgaatgttacacaatgtttttttaaaatattgatggcactagtattgtcacaaaaaatagttaaagtgtcaagatgaaactcataatccatcatcatttgcttcatccacaaaagctaagcataacaactttcagcagcaatgtattcagccttagcaatagaaagagagattgaattttgtgttttgctgtgccatgaaactaaattgtttcccaagtagaaacaacccccacttgttcttttcatgtcattagtattacctgcccaatcaacatcactaaaacacacaagattagcattagtgtcctttgaataccaaagaccataatcaacagtcccatgaacataatgatgagtccatatttatcttataaatatgatcgatttaagtattaatattcttaaattgattctttaaattattgattaatgtgattttaatttgttaggctattttaaagactattcatgcatttagagtctttaggaagaatttaagcatatttttgtggaaaatagtagaagtcagcgagctcgattgtaagaggcagaacttaattgagaattcagaca

SEQ ID NO: 55843 - DNA, 1774 bp, Cannabis sativa
tagcaaaatgttcgacgttttaaagtctcggaatattaactgcaccaaccaaaagatccaaatattatttacttctgagaagtaacttagtttccacagtatacaagcctatgggcatgaattaagttaaggaattttgggtcatcctctcccaaaaactatattgaaagacataaaaaagggaagcattaaaaccttttctttttttcttaatgcaagggaagaatttcaaatcaaatcaattaaaaaaaggagagacaagatacctgaaaatccatttcttcatgaaggtatgccaatccccgggcagcatcacgggcaattttcaatcttgcaatccatgggagagttgacggcattcgagccaacagatggtcttctaagctttttttaggcatgagctcgtagaccaaaagtctctgaatccctctttcatcatcttccgcacaatatccaactagcttcacaagatttggatgcttcacaacacctaaaaagttcacttcatttatccattctttatgcccctggacactagaatgcaaatacgtggtaaatttcattagataacttcaagcacctgacaatggcattccaaaagcaacattgatcttctaaaacaaaacccatttcaacaaatcaaagatttcaataactaatttctaccggttgaacatgtacagaatgcgttccttctaaattgaacacttgaacaacttgatcagttataggattgcaaacaagtgaacgtttttttttcaataaaacttcctcttatgactataaaacacccgaactcaacgcgatattcagatttgtgaacaagctactgcaaatccaagattcttaaaacagaccaaactataaaaacaatacaaacataaatggattcgtacatatatcgtgccaaaaagaaaagagaaaaggaatgaagaaagacatgcctggaagccgctacgattcaactgtttgatcgcaacatcaatcttacagggaagggcgtcttcgtcgtcctcgtcttcaatctcaacatccgaccccgaaaccctaacaactcctctgtaaacgcagccaaaacctccctccccaatcaacaaggccctactgaaccctctggtggccgatttgagctcggagaacgtgaacaccctcagatcattggctctacgcagactgaggaagtcgtaacacccgatggagtcagaaaggtccctggagtcggaatcgaactcggagcggcgagtactgtcgaggctgctggaggcaacactgagcgagcgagcccaagacaccttggaggcgacctttgaaacgacgttggagccggcgccagtgacgctagcgtcatcgtcgtcgcgcctatctccgctggtgaaatggaaacacttcatgaatcagccaatgctgcgacgaatggagagagagtcagagagagagcggcagagtcaaagtgatggtgcttggcggtgttgataacacctttcagatcaactaacttctattggcgaggggaaatttgatttatatataaatacgttttcaaatatatgatgtgaccccttccaaggcatacccaaggcggctttttcttttctattttttgtttcttcaaaaaaaaacatatacccattcaaaatgctcttattaggctctctttggctaggagaccttacggaactaaataggtatattttaataggaaatttacatagtatactaacttttgttatttttttacaaaaatattgtcaagcggaattttttacttttttac

SEQ ID NO: 55844 - DNA, 851 bp, Cannabis sativa
atcatatccctatatatataagttgtatgtaccattaatatggtcaaaatattaaaaaattaaatttacaaataaaaaattattattataatattattagaaaataaattttatttttaatataaaaaggaaagtatactttttttcaattagattctatatttttagaaacaataataattgcacgttatttggtgacactagaaagtatttagaccaaaattgattttagagtgttaacttaagatttggccaactgacaagtcgaatgtaatatcgatgtttgccacgtgttacacaattagattaataaagtgaatgaatactggatttatagaggttcgaccctcttagttagcgggcaataatctactctcgttttagttgtatttgttatttatttcagcccttaataaaaccaaataactaaaaggaatgatgatatggcaagtgagaacttgacacatcaacatgtgttagtttagttagtttttcagttactctttgtaaaggcctaaccgaatgtggtgtttcctatctaaactcttgtcttttctatttagattagaacagttaagatagataggcagagagaatcacgtatagtgaggaagaatacttgttttagagagggaaacttatgaagcaatgaagaactaaagggttagaaaccaagggaagcaagatcgggcttcaagatgtttcaaggagttcaagcttcaggattaaagctaaaacaaggggagtaattcatcatctttgtgttctatgatttgtacaactaaacagtttgtaatcttgccatttgattcataataaagactaatcctaagggagttcaaagaggacta

SEQ ID NO: 55845 - DNA, 1349 bp, Cannabis sativa
aggagaaaagagaaaagagaagcaaagtttgactactctattatttctctgttatatgctttttattaattgaaaagtaaatgtattacaagagtttatataaataagaggcaaactgacattatcccaaggaaaaatgattagtcagttgtaacagaaattaactgtcctaacaaacaattaaccaacaccctaacttactaatcttgacactagaagaagagatggaggctgtaatcctttaggatgtgtatgtaattaggatgaaggatcatcctcaaatgcatttcctaatgtataagttcgatatagatttttttaattttccaagtaactcggatggagaggacaatactgagtaagttatttcatcaaaatgaattatttagtttatattgtcatttttagcttagataaacactaagttagatagttgagttagttagctttgtaagtatactgttatgagttagtttaactaattttttttttatctcatttcttttaaaatttgtggcttataaataaatgaaatacgatctcagagttaagccttttggtactctgttttttctccatttttctgtcttcgtgctttgcttaaattctacaatcattactggtaattgattgggtttttttttttttatttttaatctccgtacaagactactattaatgcattttttcacaatgcaatatcttcttaaacgtaaaggtgaggtgcaccacaactgagaacaaaacttcggagttaggaagatagaatttgttcattttgatggaggctgcaaagttcaaaaccagttaagagagtgggcccaataactttgttataataagtttaaaggatcaatacgataagttaagagaaaaacaaacatataacaaatggatatgatctgtctctaagtctctaatcatgtgctatcatagctttgtcctagctagcgaggttcccaacaattctaagcaatttaaccccacatacccttaattcattcaaatatggttggagttactttattataaataatatccaagtatactatagcataaagggtattatgtattatggccagccgccaatcgtgatattttcatcattattatgttaatatcttccattaattattttgattggaatattataacggcatgtagtcctattatatgtatatataatatctatttgcaattcctcgacgacatatatagacaatggctgcctcaagattttagttgaggggtacctttattttttttaataggaaagacgtattttattttgggacttttttatttttacactttaaaatattttttattttttgcatttttacgaaatt

SEQ ID NO: 55846 - DNA, 2345 bp, Cannabis sativa
cctcaaacaaagaccctcggcgttgaatggcggctgtaataccttctcatatcgctatcagctccgccaccaactgagagcttgcatatcgctaccatttttctctcaattttaatgcttagaaaaattataattcaatttttcttataaaattgtgtacattgttattacaacagcttctctcacctgttttttaaaaaattaaaataatttgtaatattaaaaataaggttcaaacatttagtaatactacatacttttttttccttaaaaagaaatgtacctacaataaattcagaatgattttccttttgccttactttgttttggttaattataatatacacaattttaaattcatattattattaattatcaatttttaataattctattatacttactacaaattaaatttacaatctctcattaagatatggtgagaatctatatacaacaagagcatattaaaactaattaatatccctcttggtatataatattactagtggatatcaagtaatatattatagtcttttgtatgcatttattgacattttattgtgtgttcttgtacttatctttctatataaacacatatatatctcacgtgggctatatatatatattgagatatttaagataccattattcatagataaccctcaataagattataacaaatacacttgtcatttagaaacgtgcataaatcaatccaatttaataataattgaccaatttaattataaccgattgctaaatattaaatattcaattataatattttgaacattatttttaaatatctaatcggattaaatcagataaatctaatacattcaatatttaatcaaattaattaatattttttatttagtttaaatgaataattagattttaaattgttatacgtagaaaataaatatatgtatatatgaaaatttatattaaaattttacttttttcttttgaattagatagattcaatttaatccaatagatattggatctataataataatattaaatggatccgatttgatccaataaatactaggtctaaaatattaaataaattcaaattaaataaatttacatgaaatacatctaatagatataaccgattaaatctaatatctattagatgttagatcgctatattggatgctaaaattaattaaatcgaacgaatagttaaatttattatttaatatataactaaattggatcaagataggtcggtctaatccattaaacacccctagtttcactagctatgttattattatgttcttatcttatatttatttttaaggtgtgaaaattgtggtgatgcatagtcaataatggacaaacacaaatagatcataccatatgtaataaaaatatataattaagggccagcaagccaacccaaaatctatctataaatagggcatccctttctaacccattctcaaaatcaatctataactatacctaatacaataaatcatattcatatatattacaaaaatcagagactacttcagctagaaaaaatatgagttgtgaaggtatatatttttatctattaatcttatagaattactcctctctctcttcaatctaattctctcatttttatttgctatgtactatatatatagatcgaacatgagtttatgtagcattatctataaaaaataggttattttatacttttactattaattattagtgggtgtcaaataatattatgaaatagtgtcttgttatattaaattaaaatatgcaaaattaaatacttatgggcttaggacattagataaaattttataaaaactttcgatgggtcttaggacatggaatctatccatcttaaagttttttattttttttttatttttgataaaaataactcttaacaaatataacaattttatatatttgcaggaaagacatcatggcccgaattggtaggagtggaaggtgaggttgctgaggagactattgaaagagaaaatcctacggttaatgccgttgttgtgaaggagaatgctaaaggcgacacccaatttcgttgtaatcgtgttcgtgttcgtgttaatgaaaatggaattgtaactatgactcctcaaattggttaatatataagccaacaatctcctcaaatttatacaatttctacttattgttcttacaataataaaataatggaaatgtgtatatgttctatgttttatatgttatatcaatgaaaaagttatgaattcgagtataagatggtgaaatgaatacattataatcaactatatatttaaatgtggaatgaatatgtcttttaatataataataataat

SEQ ID NO: 55847 - DNA, 1415 bp, Cannabis sativa
gaacatatatgtaaaatgaaaaacttaaagcacttaccacatccgaaaaactagtgaattttttcacggactcttcagctatcgaaggactagggcttttcgacgcaacaaatttaacgccagaacatgttgtacgacgaaccggcagattgggaagatcagaatcagcaactgcggcctgaaaaaaaaacagaaaacaaaaaagataaatatacatcaaaaaaacaacattcacaaacactaacaaagaacaaaattataaacatataaacacctttttttttccggccacgtgtttccttgacagagggctgagcctcttgttcaactggaactttagaactagttccagattcaacattttgaacaaaatcgtcatcagaaggatcaacattaaccttgaaacacaaaacataaatcggttaaaaaaacatacaaaaacaacatttttaaaaaactcataaagaaatttaaaaatcggttataataattaaacaacaaatgaaacacaaaatatgttaaaaaacaaacaaaagaaaccagttaaaaaagagtataaaaactcaattacataatataaacatttgaaaacccatttcttaaagaaaaaaaccagttgtaaataatataagaactaaataacatcaattaaacatttataaacacatttttaatagaaaaaaaaccagttataaaaagtataaaagctaaattacatacaataaacaattaaaaacatatttctatactaaaaaaaaaccagttaaaatacaccaacaataacataatcagttaagaagctcaccttcttcttcttagcgcgagatttcttaacctcatgtttcttaggtgcatcaaccggaacttctgaaccagttccagattgagcgccaacaaacgccacattattagactcaacttgttaacaaaataaaaaatacaatattaaaactggttataaaccagttataaaagcaacaagggtaaaaacaaaaagaatcaaaaacagaataaacaaaagaaaccagttatatacttggtccttcacatttttggaaatagtttcagattgatcaggatccttatgttgaactctaggatcaacatagggaataatgtcctaaaaacattgagtagcagataataaacaacacaaaaacattaaaagacagtaaaaatgcagacaagaacaaacaaaataaacacatgaaaatttaaaaacataccttacttacttgagccctttttcttttcttaatatagactctagtattagggcacttatccattttatataccctaaaaccaaacaaagaatacagagaaaataaaacaagttaagaagtgcacattacaaaaccaacaccaaatatatatcacaaataaattgtaactgccaacccacataaaacaca

SEQ ID NO: 55848 - DNA, 1295 bp, Cannabis sativa
agtcattggatcatcgaaaaccactaacatcccgaaattgaaatcacctagacgagttttgttagctaccgttgcagatgtggcattggctgcatctgtgccgttgaagagggtgtcatggtagtagagcacaaatctcttgcagggtgatttttcattgagtggtagtttcttggatgccaaggtagattgagatgataatgcaataatgatcaaaatggggaagagaatgaaagaaagggctaacttttttgaagtttctcctctcatctctttggatcgatgatattattgtatgacttctagagtatttataggaaaaattttgaattggggtttcactttatttatgtttaatcatatgagtgaagaatataacttgttgatagagttagtatgcaaacccatttatgagaaatgtgaagggcaccatcactacgaaatgtaaatatattataattaattagtataaaaaagaaactactaactattcataagatttgaactcgtggtggtgtcaggaagaattttttagtctaatttcttttataatcgtctatattgtagttatttaaaatatccagtaaaattttgagatattcagacaaacactacaaaaaattttacttttaaaagttacagcaaaatttgtgactaaaagtgaaaaaattgtgattaattattattagtcacaaaaattacaatttgttgtgactataaatgtatttttagtcacaatacttgctgtgactaaaactaaattaatgacaacttgtaactaaatactatgttttagttacatgtaatattttattgggactaaaagtcacatttagtcaaaaaaaaactatgttatgactaaaaaattgtcactaaaagtaacagttttttgtagtgaaatttaaataagattcaaacagtttatttcatacgtgtataaaataaaatattctcctctacaatatttaaatattgtttttaaaattttacaaaatgttttaaaaaactaaaacataaaatctcccatgcatcgataaacccttctgggtgcattatagtgctttcttgcagttacatatatatagtgttgctgcaaaaaataaagtcatgtacttactactactatttgcatgttaaaagtaagcacgcttaacattgtttgaactttgaatcacatacaaatatgtacgaacaaattcatgcagatcatcactactataggtataggccacaatcatttcaccaatatttttttacttataattagatttgtaagagagaaatatgtttaattt

SEQ ID NO: 55849 - DNA, 820 bp, Cannabis sativa
tttatcttttctggtttagggggagagcgacaagtataaccaacttgttgcagtcatgcaccacagaggacatcttgctcctgatgaggttgcactgttcgaggtaagctctctatctaaagctattttttgtcaagttcttttgcttctttgtcaaagaagttaattcatttctttcatgggatttattgtgtaattactatatagacatcctgtatgaagcctgttaaaacattctgtgaaatttgacttgttattttgatcaactaaatttttttttgttaatgcttgataaacgagtttgaaggcactttctattacagtttcacatatcgataatgttcttcatcactctcttcttgcttctgtaagttgataaaagcactttggtttgatgttatgttttgctattttcaatttactcaattactgatttggtaattctttccagatattcttaatgaacacgtggtcctgcaggactgatgtgatggatgctctaattaattaaactaatcatttcattggtatgtggattcttcttatggtgataactattgtttttcagaactactagatttatttataaaaatgttgtatgtacaatgtctatcttgtaggctgcttcaagtgggaaatatgttaattcgtgtttagggttgttggaaatttcacacccctttcttcaatgatagagtttttgaaaaaaccgcgaggtatttcaagaaagagccatgttctatctcgggtgcattcatctttggaagtcattgctgatttggtgctgatttctcccatgagattgcagccaattgtaata

SEQ ID NO: 55850 - DNA, 1087 bp, Cannabis sativa
tcaagtgtgccggtcagcctgagtggaaaatgcagctcaacgctttacagggccttaaactataatattgagaactcgatgagagacacgctaaaacacttatcggggatgctaaaacaaaactaacattaaccctatcgataaataggatgccaataccctatattacacaaaaacgagaaaaactaaggctcgggaaaaagccccaaccggcaggccggttcccaactggaagtccggttcctgggaccaaccggtcgaccggttgccacaggctcccaggaaccggaattccggttctcgactgggaaccaaaaatttgacctccacacctcaatttaaacccaaactttctaaaaactcccagaatacctgtatatactatattaaaccaatcccaagcattagaattcaacaatcctcacaaatttccaattcaccattaaagagctaggtttgagttctcaaactctaacttagctcaaatctcaaatcaacaaataaattcagttcaaataaacttaaacaatatcaaataatctccagattatcaaatcaaacctcccttagttcctacagcaacttaaatatcaaaactcaagctatattgaacctaacttttaactaaagctcaattagaaaaacctagggattcttaccttgattgaagttcaaatccttgctggaactcagagaatcacagcaatgaaatccctcttcctttgctatgcttgaaggttaaaaaggaaagggaagaaagacttaggaaaaacctaggtttctctcaatttttctattcaagaaaatggtttccttttttttttttccttttcttttaaaattactaagttatatattcagcatatatttttataaaagacaaaatagagattaactcgaaaagactactatacccctctagctatttaacaagtagctaataacccacaagggtaattaagtcatttgcggacccctggaaaaccaacaacactaatatctaacaacgataccccgataacattctaaatcttataagatacaactctctaaaggcccaacgtcactttccacagcttccgaacac

SEQ ID NO: 55851 - DNA, 695 bp, Cannabis sativa
ttacaaccatatattctgcgtctgtagtagataaagctatagttgattgcaatgttgatcgctaacaaaccggtcctcctgccattgcgaacacataacttgtagttgatcggcacttatccaaatctccagcatagttaaaatcaacatatccgactacatttttaccatcaatattttctctctcaaactttaaaccaatatccatagtaccataaatataccgtagaatccactttactgcttgccagtgacctttaccgagattgtgcatgtagcaactcattatactaacaacatgtaaaatatcaggtctggtgcataccattgcatacatcaaggaaccaacgacatttgtaaatggaatacactccattagcttcttctcatcggtggttctaggtgacaactttgcacttaacttaaaatgaggtgcaagtggtgtactgacatgtttagtcttcttgtccatgttaaacctttgcagcactttctttagatactgagtttgtgtcaaaaagactgtgcttgcaactttatttcttgtgatctccatcctaagaatcttcttagcttctctatatctttcatttcaaattctaaacttagctgagtctttagcctggaaagctccaccttgcttttagatgcaattaacatatcatgaacttataagagtaaataaatggaagtac

SEQ ID NO: 55852 - DNA, 1056 bp, Cannabis sativa
tctaatgtctacattttttaaaatttgatttatattgtttacaaaggtgtctacgatggccaagatgttcctgtaattttgatttttcctttgatttattctttaacttgtataaatataatccaacacatttaataatgtatttgcactacattattaattttaataagaactggactctgcctaatgttatcttgtacagttctatatattctttcataaaacagagactagatcccataaaatctttacaaagttttaacttttaataatgagtttgtgaaccaaattatcataagtattccatgattttaattttaacattatttaatgatatgttagtttgcttgagatatttttaccctatttttttcttactctttttatgatatcgtagattacagatttgaaccgttcttatcacatctttcacgatttcttcaaggaagtatttttctttcattaagaaaaaaaaaacaaaatctgttctatataattctattatgttcatcataatagaattaatatatattaaacctctcacattttgtttgtcttatttacaatctcattatgaattctattaatttaaatataaattaatatatatatataaataaattaagtatagaaatctaaatttttcatttatgatttgtcattgcatcaaatttaatagtttaatatttttaaaattaatatttataattgaatttgtatagtaaacatactaatactcattgagaagtattccatatataaataaatcggtacatatgcatatttattttgttttataaataatcttttgctttgttttggaatatgaattgggaggactcaatacttcaattctgcttatttaaaaaaatttgcttaaagtctttgaaaattaagtgtataattagatatatacgtacattgtacgtaactttatactagtatatatatatgtatatagggatatgattttgtcctgtgattgcactttcccggaatgcattccgtgatgtacggcagccgtcagatgagggacttatttgatctgacggctga

SEQ ID NO: 55853 - DNA, 1940 bp, Cannabis sativa
tcatcataccatgcatacacgtgttctctccccatgcatcatcaatcaaatcatactctcttccctctcttttttcattttgttttcatttcattttctattcttcattcactactacaaaagtgtcttttcccatcggtttataactgtcatttatactatttcccaacagtttctaaaaccgttggctatgtgggtgtcataaaaatgcagaactttaaaagacagtttataactgttgggaaaagtcactttaaatgacggtttacaaatgttggaaaaaattactttaatgactatttataactgttggcaaaaatattgtgtagattaaattgaattacttttttatacatattttttaatattaaatatatataataatattaattttcatcaaaaaaataaataatattaattaaaataaatgaaattaacatatattttcatatttcacaatatacatgcattgagatacaattcagaaaaatatactacaaattcaaaataaattgtatttgaaaaataaataataaatatctatattacaaccaaaagtgaaattgtttaaaaaaaacctaagtgaaatttattttcagcttccaggccaaaaatgatctccctctttctcgtgccttctaatcttgaactcctaaggctccatataatgagtcaatgatctaacatcagcaacaggaggatgccctgtgatcagtaaatgaaacaaattaaccacaagtaattgaaaacagtccacatatatacacaatgtctttatgtttgaattgacgtgggactaccagtagcttcaacccatagactctttttctatctaattctaatgtaaggcatataattcagtttacgataatatttttttaataaaatctattccagcatcttcttccacctatagatttattttccaatcaataatcatatcttttttaaaacaagaacaacagatagaaagaaagaaaccattaaaattgtatattatgaacaaaaggctaaagaaaaacgtactccaataatcaatcaatgaatggtaatttattattattagcctggctacaatgttgcctatgaacacatgtgttagaagaatgacctgttgaaatggagcaaatttcagctaccaactgggttttgaaatcctttgcagctccatccttcacaatacagtcttgagaaatgagaagagagggagggaacaggttgtttgcttcgacacaagtccgagctccccctgcattcagaagtcatcaagttcaatcaaaatttcattgatttcattcttaaatctagagtgaatcatccaaactcttcgaagaatgcatttaaaggtcacccaataaagctcccctttttttgtgaaagccatacataacaaataacacaccaaaatctaattgccaagaagaccatttcccatttctattatatcaagaatgtctagttacccattcaaaataacactttacacaatacagtaattaaccttaaaacatgaaacccttacctttagacgtttgattttgagctctttgtcgtcctccgatgactggagagtcggagccaaagagagagatgtagtagcagcagcaatagtactagtacatttggagtcggtggcattggatgagctgatccattcttcgaatccatcttcgctcattgcaagctgttcaagggaggcggcaggttgtttgttaggagagggaaagagatttttagggttttttattttatataataataataagaataataaaataaaatatatgagtaggagagtgaaataataataataacaatgataataagtctttattttttacattctaacaaaatctttctcaacatttaataactgttgggaatactaactattcccaagagttataaactgtggaaaatatttagtattcccaacagtt

SEQ ID NO: 55854 - DNA, 1239 bp, Cannabis sativa
aagagtaatgattgttgagttcaattctttgagcaacttgcctgtatgtaagaatgaagtgactgcttcaaaaatgtcagttttgatcaattcccagttctcttgataaaaggaactattataaccatctggccccagagcttttgatgtaggaatactgaacacagcttttttgacatcttccatggagtagggagccaacaaaatctgggagtgcatattagtcacacacggtccctgtgtaattatcctcgtattcacagatcttctagctactactttgcttcccagcagttagaaggctttggtgatctcttcagtcctccagtcttcggcctgtaccatcacaaattgacagaatgttattacaattccttatttccctgatgcttgaatgaaaaagagctgaattttcatccccttcctttagccaacttattcgagatttctgctgtagaaaagagcagtaatctttttggattttcacataacgctcccttatttatttttcttgttcctgcacatcaacatcaagcacattttggtgaagaagcccttggatgtcctctagatcctgcttagccttcctctcagctacttgtatatccgagtagtgctctctattgagatccctgaaaaagttcttcaagattttcaactttgagaccacttggaacatttttgaaccacttatcttcccttcccatattttcttgacttccgtatgatagctggcatgagaggaccacatacgaaagtatttaaatggcttctttccacccggggcagccgggtatacattcaaaacaattatagtatggtcaaaagttccctcattaagaaagagagcttcaaccctagtgaaaaaatctaaccaagcttgattagctagcactcgatcaatcttggagtagattctatcacttgcttgttgcctattactccaagtgaaaaaacagccgctgctcttaatgtctgagatttgacagtcattaacacactctaagaaggtcgtagaggtgctaattcttgccttgtctccaattctttcgtctttagagagtatgtcattaaaatccccaagtataagccatggctcctgactagagacacttcgtagatcattccatagatctttccttccattttcatcattaaaaccataaacaaaggtaataaagaacttatacctattgtttaaagtctcaatgtgagaatgtatcatttgactagtacatt

SEQ ID NO: 55855 - DNA, 2547 bp, Cannabis sativa
caataacataaagccataaacaaatagcacagtaaactacaatgatgactgttaaataaaaatgaattgaaaagaaaaagaataaaacggtcatttctgggcaaacgaatagagagaaggctagaatgttcacgagtgcacagtagaagtaagacagaatcaatcaacacactcatcacgagggaagaaaagctcgaaacttttgcttgttttctgctttttattaggtgttttttcagtcatcctctttctgttatttgttctaataacatgaacaaatatagaaaaaactacatacatatcatatatatttatataaaaaagactcccaaatgtttgttaaaaaggaaaaatgagagcaaacctgggcaagttacaatctttgggctgccaacgccacttggtgtagaaagaatctaatcttccattttcagtacaggcgaaacctgggtctacaaacgagcaatttcgggactcatagagtggataactctcatcccatacccaacttccatcaaacacgtcacacttgtcaccatcctcatcaagaaatcccagccgttcattttcacaagaggaagatgataaagaagatgaagaagacaacgatgagtcatgccatctcagaccagttccaccagagcgaagctctctagccacagttccgtaatccaagtagaagaagctggtgatgaagataacagtgaccaaaacgaacccaagaagcccaagagatggctcaagaggattgaaccgcttaaacttcttgaatagctccaactgagttgttactgcctcatccgactcctctgatgaaggagagcccttccccattaaccttttcagtaaagatttttattttctttttgggtggttttgggaattgggttgtgattttaaaaatgtgggttttgaagagtgagcagaaataagagaagggtttctcttttctcttattattctgataagaacaaagattagagatggcattaatggctgaaaagctagtttctgaataatggtattttatatttttgcccgctaactaaatacagatgaaattaaagcaagaaaatgaaatcacttcaatgttcattcattcatagccttcggtttgtttattcacattaattggttttcgtgagagaaaaatagggccgggagagagagagagaaaaaaaaaagacagaaagattgatggagaaaaaatatgaaagcaaagcaatcaagcatattcatttcaactttattttgaaaattaattaaataattaagtaatgaaaaagtagtcaaaaaaaatctgctttccttcgtggtcctgtgtccattataatataaataaataatcggtgggtctattatttggttaaaattgcatttttttttcaaaagaaaagaaggctaaaatttagtggcttaactcaaagtagaaagagattagaagagatgagtgaggaagaggattggggtttgttggcatactaaaaaccaaaactgttcttaacacagaaaccatgaataccctgaaaagacagattcgagttggagagagagagagagagtgaatgagtaaaagatagaaaagggttttggtttgtacttttatggcctctttggtcgtgtgaacgtgggcttactggagaagtggctcaactcaactcaagtctgaataataatattaaaaaaacaaaaatataatttttttaatttcatttaaaatatataaatatataaaatcacaccataacgtttaataattaacaaaatcttattattgggctaagatttagttgctaaattatattgtatgtctactttattttacttattttaattttatttttatttttatatttttttaaatataaccacttttatagataatatccttattagattcgttatattaatgtaaattatatgctagatttaactaaggagtaaaagtatattagagaactcactcaaaagaagtggatatatttttaataaaatattatatgagagtattttctaatttatctctacaagtaatatgagacaaatacacatataaaattttatttcaataaaattacatcaaccataacatttatctgattattaaaatctcaacctgaaattaaaattggggaattagcttatatactattttttaaaaaaagaaaaattacggtttgggttttaaagtggttgcagcgctagttacaataagagtttttatacgatttcttgttgcaatttagatagcagcgctaattgcaataggggtttctatgtagaattttataaaaatacaaaaaaaaaaaaaacaaaaactattttgaagtgtaaaaataaaaaatttcaattaattttagtaaatactaagcctaatttaaacattactaaagtctaatataaacatcacatattattcattattcgcaccacatattactctccccaaaaataacattgggagattctacaatgcacccccttgaaagggatgtactgatgcacctttaacttgtttcggcatctagaagaattttttagtctaat

SEQ ID NO: 55856 - DNA, 918 bp, Cannabis sativa
actcttatttcatgtatgtatgccaccaaaattgtatcaacttcacctcattaatgattgtaaaagtaatttgcttgcttattgaaaaatgtttctattgtcttttattacagagttagtagctcgagcttccagaattttcgtcaaaaaaaatataataagagccataaatacattatagaaattcatagagatgaaataattaatgctttcatttcttaacccagaaaaaatagccaaaaatttgcacgtcttcctacttctacctattaaaatacccagaaaaagttatattcaatcacaaataattccatattatattctttgaaatgagtatatatacagctaaaattaaggtcataaaaaaaaaaaaaaaaaaaccttacaccattgccacacgcttggagacaaacatataaagactcagaacacaacacaactttatttgaccatcccatcaacagctggaacacaaacaaagaacaatatagtttaatcaaagaaaatcaagaatcttattcaaaaaaaaaattctaaaatcacacgaggacaaatctatatataagtaaatgaacagaaaatcacacaagaccattgacttcaaactaataaaatgtattgagagttgactggaatttgattctgttagatatagaagcagatatattagtaagaagaagaaaaattgtatcaacttcacctcatcaattacctgcaatacgtctccggcttgggtaccaaacaagtaggctttctcgataatgaaaagttgttctttctccgtggtccagagcagccgccaagtagcggagagcgaactcccggtggtaacggtgtcagctccgagagaagctaaggcgtcgattgctttgacgattgcggttcgctttgttgagttggtctgggtcttgacgcctc

SEQ ID NO: 55857 - DNA, 976 bp, Cannabis sativa
accactttacaatactaaatagattgggtactatttttaacgagttaaaaaattcaggaaactcaataatataaaaatgctaaatatccactttcataaatacccaaaacaacaaaaagttaatatttttatgagtttttttttacttttttaagaactgttgttttttaattgttctaaaaaagacagtttaatgttactttcatattgcggaaacacaaaattatattgtgacaacataaaaacaacgttatttttattttaaaaaacacagcactattaaaaaaaaagttacgattttgtggttatttcttaatttttttttttacaaaaagttaaaaaaaaaccccgaaaactgaccagtcaaaaaataggccgataaacccataaaagtatagtataattgtataaaaaactattttttgcaaaaaatttacatttttacattcaaatatttttttttttatatttttacagtgttctataaaacaacacgaaaactatgtaaaagtagcaagaaaatagcatacaaataacaataaatcaacaacaaattaataagagtacaacataaaaatacatcaaaaaattatatttttttgtaaataaaaatataaaaaatcgtaaaaatatttaaaattccttacaatcgtatttttataatttttttgttatgtatttgtgaaataatcctaaaattattgtgccaaaaacttaagggtttagaaaaataccaacccctttaaataaataaataggaagaaattacactctatattctttttatattgtcttcttttagttttgccctcttttttaaagtctatcatttttatcttttttttttaaacattataccacttttccctctgtcactttaatataatctccatgtgactctcttatatcagggtattttgagtacaatatatataaaaagaggtatgcgaaatataaaattagaggcaaatttgat

SEQ ID NO: 55858 - DNA, 980 bp, Cannabis sativa
actattctccacattatattataattatatttatgatatgattataaataaaaagatatttaattttttaaattaattttatgtgattaaataattatttaattatctatatatttattatttgctaattacataaatctttattattattttttaaaaaataaacaaaattattttcttatttacattattcaatgttaaactttattcattaaaattttaaaataattacttatttaaaaaataatcaattttaattttaattataactttagaataattttattataaagttagtagttaattttaaattatcaaattagcataattgtttttatctcaaaattttattaaaatttccaacagataacatttatttttttaaatacctaaaaatataaaaatctcctctaaatatttcaaaaatttccaaatacatcacacttactattttttacataaacaaaaattacatcacactttataaacatttacaaaaaaaaaaaattacaaaaatttcttaatgcataatcagatttttaagtttaaaaattataataaatctgttttttaaaaaaattatatgcaaaattatttttatttgtaaaacaatttaacatgacaaatatttgcaagtgaacatgataagtataagcaaaaaaaaaaaaacacttacagtgcgattccgatatagagatataactttagttgtttgtagatattaacacaacaatatctacaaaaacttcaaccaaaaaataaaaacaaaatattaaaacaaaacatattcaaaaaataatatataaatataactaaaaatatacatattacacataaaattttaaaaaaataaaaagacattacctggcggcggggaggtggtccggcggaggtgaagtgctccggcaacgttgaagcgacggtcaaaggaccccacaaggtggtggtccgatggttcgggtggtcaaaatgtgttattc

SEQ ID NO: 55859 - DNA, 966 bp, Cannabis sativa
tggtatattcatatttttcttaggtatatcgtttgtatgtgatatgatataccgtgaaggaaagaaagaaaaaaaaaattgaatattagtttaaatttgacgtataatacatatattatgcattacattatctcattaaaaaaataaataaaagacaaacaaaaaagaaacttataaaaaatttaagctcgtggtatattaattttatacgatgggatatccatttaatcttcaaatatatcatttttatgtgctgatgtatatcaaacaagaaaaataaagaaaaaacttaaaaaaaaaatagggatttttttgaataaatacatatcttaatatgacgaatgaaacaaagaaaggacaaaaaaaactaaagattagcattctttgattaaaattatatgtatgctatacaacaaaattaatatacaatccaagttttttattttattttctgaatggtataccatagtatagaaaatatatataccataatacaaaatgtatataccaccgacagaaaaatttgactgagactttggtcgttgtttgggggtaatcattgtaatttggagatatgagaaaattaaaagaagaaaaaaatgagcaaagcttcgttgctttcaattgtgaggctttgtcatttagattttggagcaaagttttcatttctatttggagaattaatgtaatgttaataatacccttatataactaagagtattttaggtactaaaaaataataaaggccatttgctatattatttttaaaaaagaacattaagtttcaataaagagccatttactactatttcccccctttaatataatgttaataatacctttatataactaagggtattttaagtactaaaaaataataaaagtcatttgctattatttttaaaaaggaaccttaagtatcactaaaaaaggatatgaggccgtttactactatttcagaagtag

SEQ ID NO: 55860 - DNA, 843 bp, Cannabis sativa
ttttgatgaatcaacagaaccctgcaaagtagagatagaatgtccagaaacaaaatatttcaatctaaaaaatttggtatttgatttagattgagccttagcaaaacccaaactagcatgacttgtttaaccagaattttgaatcttttcaaaaatattggaacttggatttagcattttgacattttttttaggattttcaagctccttagttaaagaaataatttcagaaatttttgaaattaattcaaattcacaacattaatttttctcttcaagatctctgatgttttgagacaaattcttattgactttaaccaaagaaagattttcaggatagatttccaaccacttaccgaacattaccttataagattccacgaaagagttctcatcaagttctgactcctctgaatctgatccaacttctttctcattgtcatcagtcaaggtattgttcaaacatatgatttttcctttttcctgcaaatcacttgacaaaatacttgctaatgcaaaattttcattataatcctcaatactttcaaaatcatcactccaagtaacattgagccctttttatttttcttcaagatgttggcgcatttagattgaatatgaccatatccttcgcatatcctgcattgaatactttttttattgtttagaacaaaaggtttagagggattattacatgaattgttacctcttggagtttttgagaaattctttttatttccaataatattcatgtacttctgaatttttttttatcaacaaggtcatttcatcatcatttttagaaattttaaaggcaatatacctttgcttttctcactcaag

SEQ ID NO: 55861 - DNA, 5764 bp, Cannabis sativa
taatttcctcattgttatgcgtggttaaaatctattaagaaaaaaaagattatttgtatattatcccacattattgagtgatttgtgagatttatattataatttatactcataattattaagtattttgtgattgaagtttataaaaaaaataataaataaaattatataagatccaaataaaattagaataaataaatatgagaaagaagataaataaagttaggatttgtttggtacaccgtattataccgtattgtattatataattgaattgtatttcatgcaatatttttatataaaactatatgtgatattagtttttatggacatctaaatatataatgctttagtataaattaaagtttaacatagtatcatataaaaatatgatatataatctaattcaatataatacaataaaatatattacgacttaatatgacgttccaaatgaactcttaaagaacataattatatagcaagcattacgtatcttcgttatttatttttaataaaagtattaagtttcttttattaaaaaaaaatatctgattgatagctcataaaactaagtatttttttattattagctgttgccatagttagttctgagattattacaagctgatatacaactacctttcttgttcactctctataaataaaatgcctaactcaagaattgattagcttttgtagttctttgagattcaattcataaaattggtccagatacgtattgtatagataaactaaattcacatggtattaggaagcccttaactatcgtcgacaatggatcttagaaactcagtttgcactacagctacctctgcaacaacaattcctctgactcctttgattgctcagatgcaacaatggaatccctctcaaaactcattaaattcctcaacagttcgtcttgatcgcacgaactaccttggaaatcacaagtgattcccaccgtcatcgatcatggactggacgtcatacttcttattggtattgctctgactcagaagttcatcaccggtgatttcaatccatacttcaccatctgtaagcaagaagatcaactgctgcttagctggttccgttcatccatgacagagacagttctggatctttagcccatcacaactcttcgttcaatgtttggtgagcacttgaacaatgattctcgagtcaatccaaggtccgattgctccagattaaatcacagctttccacaattcaataaggtaacctttacatctcagacactttgataaaatcaaaattcttgctaactctctttctactgttggtcatcccatggaagaaaatgacttaatcacgcctttattgaatggattagatcatgaatatgatcctattgtctttcatgtaaaccagtcttgttgataatctctcattagagtcgatacagtctttattgttaactcacaaaagcaggatcgaaagaaatcactccatcactgatcttgcatccaagatgtctacaagtctcagtattcacaattcaagttcatgctactgctactgaaaacgctgttgtccatgcacctagagtcttatttgatcaagtgactgatatagatgccacacaagaagctccaattgtcactaattatgttgcaacatcaactagtgctccaagcattgctgatcatgtctcatccaccaggtctgaccctcctgcaatccctgcttcatttcccactacatcaatacccttacattcgccaaatcaaacacaaccttcctctcaccagatacaacccttgcatatttcacttcccctacatacaactgcacctaccactaatactcactctatgcaaactcggtcaaagtctggtatctccaagccaaaagcatatcaagctacctcttatccttttctagaatctctcctacccaaagaacccatttctcttaaacttgctcttgctgatccaaaatggtttgcttctatgagtgatgaaaacaaagacttaataaaaataagacctagacacttgtaccatatgatccttctatgaccttggtaggcaataaatgggtacatataataaaattaaaggcagatggctctcttgataaatataaatcacgattaattgcaaaggggtactctcaaactcctggaattgattacaaagaaaccttcagccagtagttcgaccagcaacagttaggaccattcttaccattgttgtctcttttaactggcatgtgactcaagtagatgtgtccaatgcctttctaaatgactttctcgaggagacagtatatatgccacaaccactaggatttattgatccagcataccctactcatgtttgcaggctccacaaggctctttatggcctcaaacaagctccacgtgcgtggaatgacagactaaaagccacattatacaacaaaggattcaagttgtgtaaatcagataactcattattcatcaagggaactggtgcaacacaaattattttattagtatattcaacacaaattattgctgagttgaatcatgagtttgatgtcagagaccttggccctctacattatttcttaagagttggagtgaagcgcacagagataggaatgtatttctctcagtcaaagtatattgccaatcttctcactaaacttcatttggatggagtgaaacctaatcctagtccaacaagctcatcccacactctctcactcacaaatggagagtcattcagtgaccaaactttgtacagaagcactttgggtgcacttcagtacctcacactaactcgaccagatgttgcctttattgccaacaagctttccccatttattcatgctcctaccaacatttataattaactgttacaatagttagttgtgagattattaccacttgtcctctgttttggcaggtttattatcttctgttgtaattccgttacaagctagtatacaactacttctcttgttcactcttctataaataaaaggcctaagaactgattagctttgcagttcttcgagattgaattcataaaattggtccagatagggattgtatagataagctcaatttacaaattctatatatatatatattataaaaaataagaacaatttcgttgatgaagatgttaaatctatgccatagcataaaagcttctcgaattcaacttttgtcacatgaatgagccactaaatcagtggtatgagtcaattgtgccaaagagagtaacagcatactattaaagatagatgatagacactccacacaaagaaatgcactaactgaatccataacaataggactcttattgaaaacattaaaacataaaaaagcaaccaaataataataataataaaacatagcacatacgtgacaaaaattccaaatgttggccacccattcaaatttgaaatactaccgtattcatgaaccacttatttgtgaaacctcacaacacagctccaaccctaaaagacccaatataagagcccactttggacagaattacaccatcgtcgaccttgcaggaatccacactttcacccatatttgacaacgccaatcctgatttgaagcacataaccatagaaagaccgttgatttttcaatagggtcacacaactcgttgaagagagcacacaaatacttgaaacaaaaaaaaatgagaaaaaagtcatagcaattcgagaaaagaacaatatatgaaacttttcattgagttaaaaaaaaaacttaatttgattggctatttgtttgttgcaaacttaattcaaattaagattaaaaaaaaacctcaatttgattggctatttgtttgttgcaaacttaattcaaacgagttttctcccattaccaactaattagaaatttttgagcgcttcttgttattttcacggttttgtttgttagataactacatgctatatttattttcaaataaatgcaattccaaagaaagtggtggtataacaaatcacatattcaactcaaaaagttgctagaaaagcacaataattcatgtgagatgtaacccagttggagttggactatacgatagagtatttattccaatgtgcatcaaccgtgttcgtcctagttttttcgaccttaagatatattggtcaagtacaagcaaataaggctacctaaatgaagttagagaatttaattaaactaataaatacttataattaaaagaaccgtctaatttggtaagagttaactttttaaaaagaaaaaaaaggtaacagtgtcaaaaatttgaagtgatcattagagacagactctcttttggttaattaataacagacaagcgaattaggccactaaacatgatttctaatcacttcatcttctttccatgattataaacttataattaaatgaagctcttttttttttttgcttaaattaaatgaaacttaaaagttacaaatatacttatttgataatattttaaaattagtacattaaccattaaacttccaataacgaattttcaaaagtgcattaggtactgattttttgggggattgtggagtagttgctactcttacgtatgtatataaataaaaatatataaacatacatatatatgatatgcacattcattttcatttcatattttgtttatttacaacagaaaaaaaaaacatgggtagtccattcttccatgaattgaaaaagcaagcatctttaatgttaaaggagaaggtaataaaacccgctcgattggcgctgactgatgtaactcctgttcaactgtgagtttttttttttctttattattggtcacaaaattatgaatgaatcgattttgagttttcttaattttcttgtgtgaaacagtattttattttatatttttcgtttgggggtattttgttaggatgacagaagatgtcacaaatggaaattcgttgttgccacttgatacacgaacactcaaactgatttcaagggctgcctttgaaattgatgattattggagaatcacagagattttgcatagaaggttaacattaacatgattttctttcttgattctttaactgttcattgaaatctctctacttaatcaatattttctttggccatgaatttaggctattaaactttaatagagagaactggcgtggaccttacaagggtatgatcttattggaataccttctaactcatggacctcttagaatatttgaggagtttcaagatgataaagatatcataaagcagatgggaagctttcagtgtgttgatgagaaagggtatcaaatatcaatttggctaacatacacatacttctgtattattatgtagcttattcaagctcaatttagcatatgtgacacaagtacccttggtgttttcatttgcaggttcaactggggattaagagttaacaagttatctgagaaggtgttaaagcttctcctgaactcgtcatatttcaaagaagagagagctagagctcgaaagctgagtataggaatcaaagggttagggagcttcaacccacgttcatcttccattgatggaagtttgaaagaattctctaccaagtcatatgaaaggtgtaattctgattatatttatcgtgacagtgaggaaagtatgttcttggttgaagatggagtcagggaaacacaattcagaaccgaagaaaatcctttgtgggaacactccttttttggcaatcaacactttcaaaccaagaaacccctgctttcttccttggcagaactaaga

SEQ ID NO: 55862 - DNA, 1244 bp, Cannabis sativa
tttttttttctaatgaattggcaaatgatgtggcaataactcatttatttatttatttattgtttttgaaaattcaataatttattttgtagccacacatatataggtatatatttatgtgtattttcattttttattttatatgtctcagacaaagaagtaagaattcaaaaaccctaattctctatttccagtaattgatggagagatagtgctttccacctttagagattctgacccatcggtgctcctccatttatctaagcattctcttctccaagctaggactctgcttgaggtatttttgtatcattctattttgattttgataatttatttgtaatttcttttacaagtatataatagtgttttctttggcttaccgaagccctaaaccaaatttttggggttaattattatgtgaaattcttattgattttgattgtaaattattaattaaagtttatttgattaggttttgggtttagtatattttattttatactgtttttataaatgtataatatggagtatcacaaattagaactgggtgtgatatcaaaccaaaaaaaaattaaatgattttagccatgacctgaaattagcagaaaggggcaattaagatttgagaaaagattctcaagagtgcatatattaactatatattagcaaaattttaccattttctttatacttttcctttaggtatgcaattccaactctgcaattcaaagttttccccctcatgaattttctttttttttttttttgttgtctaaaacaattcagatcatagaatcaataattttttatttgttttaattttttatttactaataaggattcatattttatatgataggcaaccaaataacgttagaaaataagaaattgtaatcacataatgatggaaatgtccaaatactgattgatttattattcaaatgaatattgcaaagtcaattataggattctaattgaagtgttccaatattaataccttagaatgctaagttgaatgcctagttcaatttaataggtgtttctcttgtttgaaaaaaatgtccttttatttcagtttagattaagaaatacttttaatcaattactcatcatcagtaagtagtttagttatttcataatattgatatatgaaggcctttttagtgctaattctctctgctgtagagctagctaggtagctagatagaaggccaccacttttttttttttttgaaatgaaa

SEQ ID NO: 55863 - DNA, 649 bp, Cannabis sativa
attataaaaataaaaaaatattttatcctattattcattaatgtaaaagaaataaaagtatttaatttgaatttatttatcaactatcatttaccattttacttattttataataaaattgagtaaaatgtgataaaaagactacgttacaacttaatagtgtaaaaagtttaaagaacaaaaatatttattatttcaaattatttaatactgagatgtttatattacataacttaatttgaaaaccatacttggacattaggtgtaatcttattgcatataagatttggatctacttctaaaatgacattcataacgagtgtagtttttggtagagctgaacatagaaatcgccaactgcaacacccgctcacattaagtccactcgtttgaaacccgttaaattaatttggattgggttaaatctgctaaatagggcaagcagttacgagttaattaggatagtaaggggcaagtctaacccgtactcgctaatacactttgaattattacgttttttctttgaggttaaatttatacaatatatttaaaaatagattttttttttatatgtatatttatgatttttttttttttttaaggttttcactttttctagagaaaatttctagagaaaaatattgctttc

SEQ ID NO: 55864 - DNA, 818 bp, Cannabis sativa
tcatcaatgacaaatggactgattcaatgacttcgcctgtgcttaaacatctggatttctatgcttcagatcatcgtgtcttgctggcagacatttctcaatccaacatacagcaagtcagaccttttaaatctcgctttagattcgagaaaatttggctgaaagaggatgattgcctagaaattattagcaaatactggaataatcccacagtaagtgatccgactgctctaacattggataacatctcttcatgcgcctctcacttacaatcttggcatcgacacaaatttggagatttacctaagaagatcaagctttctcacgaaaaagtcgaagcacttcagaactctaaccatactgatcatgatcatttttcacaacttcttgaaagcgagaaaattttagatgatctcttggctcaagaagaggactactggcaccaacgttcgcgttcctcatggttaaaatcgggagattctaacacaaagtatttccatcaaaaagcaagctcacggaaaactgccaacaagattaccaaactgacggattctaatggcattgtgcactctactcaacatggtatttctaataccatacaagaatatttctgcaacattttctccactgaaggagttcatgcggctgctatacaaactgttcttgcaacagttccttgcctagtcactattgaaatgcaggaagcactttcggcaccttacactgctgaagaagtttaccaagctctgaaatccatgactgaggatggcagtccgggtttggatggcatgtctgtcatgttttatactaattattgg

SEQ ID NO: 55865 - DNA, 2916 bp, Cannabis sativa
  modified_base (2859)..(2865): a, c, t, g, unknown or other
ttgtcgtgtgaggttaataattttctgatgtcatatgtgtatgttgaaaataaagaaagaaagaaagaaatgtacaaatattattttttattttaattttttctaactactcgtcatatttaataattttcttgaattttgtaagcctattttttctagaaaatgaaaggaaaagaaaataaaattatatatctatatattgatattcaaaggcctatgatgacaccgtttaagaaaaaaaaaaaaataaggcctaatgatgacaaagaggaagctattattgtaatttcctttttatttatttatttttgtgtttggttgaaattatccgattattttttcccttatcttattattgagaacactattattggtcttccttattgggttattttcaaaagaaaatatactataaaaaattattaaaaaaaaatgtgtattttgaattttttttgttcacaaattgtattttcagtttctatatctttctattaacttattcaattggtgtgccaaactgcaatgctaataatgttgactttgtagtttgtactacctatttctaggagagtgtagttgtattaatcactttgattgacttttctttcttctttgatattattgtacgtatttcgtatcagaatattctaagcagtatatcattccacaactctcaaaagaacccaaaacatcttatgaactgcactgcttacggacccacaagagcttgcccatcaaattactcatatactcccttcaatcccaaattagatcgggaccattcattatctcccacgtgtcctgaatactttcgttggatctacgaagacttgaagccatgggcatacacaggaatctctagagaaatggttgaacgggctgaaacaatgggcctggcaaactttagacttgttatactgaacggtaaggcatacgtggagacctatagacattcattccaatctagagatatttttactctgtggggaatcctacagttgttacggagatacccaggtagagtccctgatttggacttgatgttcaattgtggtgatccacctgttgttctgtcaaaaaaatttagtgggcccaacgccacgtcaccccctccagtgtttaattattgtaaagatgagactacacttgatattgtgtttccagattggtcgttttggggttggtatgatatccattatccacacttacttatttattacatattttataatgttatgtatgtttcattttcaaaattaaagctcactgttaagtatgttctcataggcctgagatcaacataaaaccatgggtgggtttattaaaggacctaaaagaaggtaacaagagaaaaagatggattaaaagagaaccttatgcttattggaaagggaacccatcggtttctcctaatagacaagaccttttcaaatgtagggcttcaaaaacacaagattggaatgctcgtctttatgctcaggtaataatcattcatattatatataaatatatgatctctctttttctatataattctttacattcaattaatttttgtgctatatagtgattggactttcattttctattattaactacttaaaaaaaaattaaatgtattattattgtcattatataggactgggatcatgaggtaaagaatgggtataagcaatcaaatttggcccatcaatgcactaataggtaaatatttatattatttcaaatcaaccatgtagctcatttttcatcaatgtggtgtaattatctggcaaattaatagatattttattagtggcccaataatcacttttaaatgtagattcttgtatacattattattgttttttaataacaaattattgtatcttaaatcagcaggtttaaaatttatatcgaaggagctgcttggtctgttagtcataagtatattctttcatgtgattcaatgactttgctagtaaagccacgatactatgatttctttgctcgaggtttgataccaaggcatcattattggcccataagaaatgatgataagtgtcgatccataaaatctgctgttgattgggggaactctcacgagaaagaggtataaaaccttcttttacaatctcaaattcattgttttatccttactctagtttgtttattggtgtttgatgtgtgtaggcacaagaaattggaaaaagagggagtaaattcattcaagaggagttgaaaatggagtatgtgtatgatttcatgcttcacattctaaatgagtatgccaagctcttacaatataagcccactatacctccaaaagctactgaactatgtttagaggctatgagttgcccagcaaatgggttagcaaagaaatttatgttgcaatcaatggtggtgagtcctgcaaccactagcccatgtaccatatctcctccttatagtccttcgtctttatattcactctttcaaagaaaggctaacataactaatgaagtagagttactagagaagatgtactggcagagtcaagataaacaaaagccataatatgttaataatattattgtaactagattgggctatttagggtattaatatttagttgatgttataaattttatttatttggaatcgagatgttggatgaaagggagttcacatgctccaaatcggaaaatgcaaaagaaatatttatcttaattactattcctgtttttccatttcatttgaaatacatggaaaatctaaatagaggttcttgtagtagtaagcgaaaacaatacaattaaaagatgctagctcacttgaataacgaaaactgcttatataagataataaattagagtaaaactaaggtggcgtttggtnnnnnnnttttaattagttttctgtttttaaaagtagaaaagtgaaaatatttttcaa

SEQ ID NO: 55866 - DNA, 2023 bp, Cannabis sativa
atttctcataaaccaagaatttctgttatataggcacactttatataaaatagatatgtgttgagctatttttgtactcgtgtctaattttctgaatcataatctaagttataaaaaattgtatcatatttgtgttgatttgtttgctatcatcaaagatgaagttgtaaagaaaaatgatagatttaagttacattacaaaacttataaatatatatatagttggttatatgtaataaaaaataaaaaaaattaaaatatttttaatttcacggtaaaaaaaattaaatttaaaattttttaacttaacaatgaatcactaaatatatattttaaaacgattagataaaataaataatagaaagcaaaaacaataagtaaaaagaacaccagaatttctagaggttcgaccctgtgataatggtaagagcttactcgtctttttgttgtactgacttgagaacaagaatgaagtgttctttctttctaaagcgcttacaattgatctctaagtaattatcttttagatcgcttttttctctcttgagtgttcttttgaactaaatttcctcttcctcaatagtaaatttatgccactatttataggagcttattacatgaaaaatggtctcccttaatctataataaagaaaataggaaactatattaattctataattacaatgcaaagaatgggaaaccaatgcgtattgcctttattctctaacctaatcccacgaatgtaaggattgtcttcgtgtcttggaagcaacgatgcttgtctctaaatttgccaactcacatatcctgcccggtgcatgcgagttgaccacgcgattgtactttggtcggatgtcccttgattactgtgctcagatatcatgctatacgctgatgacacagatatttataccaaccttcgagggctgctaggtgtacttccttccgcccaggtaggaaaatgtaagacatgtgtcatccggctcactaacaaatcatagttccaaaaataggataatatttgcccccaagtttgcgcgtgaccttcctagtcgcacatgacttcacggtcaagagtcttgtctggatggatgatgtgtgtcttcgatggttgaggctgattcgacgtgacttcgactaggggtctcttcggtgtctgagcatttaatacctcttggaagatgtacctcgaatcacggattgatggctaggtgatagtgcatgcatgacgattgtactcttgtaatgagtactaacattcacttttaggggaaaacccaaatttcaaattccaaaaggattttttcccttttctggttgcttataaaaaagagatcaaagcttttggtaatccttttagccattttcactctcaaagaaccaaagcaaaaaaaattatctaagttttccctcagattcttcgaagaagtcattggaaaacctttgacgataccatccgagtagatcaagaaagcttcaaatcagtgagtaagtcatttatcccttgcttttatatgattgcaattgaatgtatgcgttatttctagattctttgctataaactttgtatgttcttgaactgttcttggctaattgtagaataactagttctagggtttgaaattttaaccaacgtttaattataacatctaattatttgactgtgcctcaattttgaccttaaatcattcattcccactcgttcataaggttctgaaaaatatcaggttcaaactgaagttttaaacttctaggattggaaatttcaattgtgggtgaaaccttttcttttcattcttaatttggcctagtcggcatataaaatctgtttttcatttgttacccgaccaactcttattctcttgtctcccaccttttgtagatgagccctgctgatttctgaggaggcaatcatcatattaaccaggacttgctctaaattttatacaaagattacatcagggccggccagagggtggggcagctggggcctcggccccaggccccacaattttggaggccc

SEQ ID NO: 55867 - DNA, 858 bp, Cannabis sativa
atgaatatacacaataaaacatttctcatatatattaatgtcattacacttattgtctatttgacagacctacgtgttacgctcacacgattatttatgtttatgtgtcatagacccacgtattacgctcacaagtctaattacaataaggccttagaagtgtttatctcggttctaattaccgagtctaaccaaattatgccttgaacgcataattctatgcttcgacatatctagaatggaatagcatttaaaatcattaaataactagggtaataaccctaggcgatataaccgctcacattagggtaataaccctaatcctggttctcaattaatcacaactataatattaaacaagagcgccactgtgcttaactctatgtgctaactattgtcttacctgatgtcccaagtatgtggagattccaaatccccgggtgctcctgaataagtatcagtaatcctagtcacaattcccaagattcatagatagggttaatccctaaatccatttccacataatcatacagttggcattcaaatacaaataaacatatagagctcggaacgagctttccaatgttaaatggaacaccccaaacggagtccagattgaaaagttatgaaaaatcaaaattaacattcaaaactacccagaaatcccaagtcgggcctcgacactccccaagcatgccgcaatactcgtagagggggccgtagagcctaggttccaagcccagaaaaacaccaattcagcaacacgaattccaactcaaacatgcaccaaactcaactaaagacatattcaaacccaaattcatcatccacaaattatagccattccaacagggaatt

SEQ ID NO: 55868 - DNA, 1479 bp, Cannabis sativa
taattggattggatcggatgatgattttctaaatccaattactaattggattggatcggatgaagaaaaaaaggttggattagatcggatgcccacccctgtccccacactctacactatactatatatactctcttccctagaacaagatatatatgtaattaattaattagaacacagaaatgaattttgtttttgtttaaacatatataattaaagtacttaattaataataatttgatgatgatgatgatgagtgttatatatattcaaaggtatcaggtagagttatatatataatgatatcgaataatacttccgtattcaacaagtactctattctatatatgcctatatacctatctatctaattggaatttttaacaagtatactttgactcctagctaatatatatttaagctaattgtggtgtgtttagtatttttattaagtgactatattataatttttagagagtatcgttagccaattataaggcgatacgtttagaaggtattaggtaccactgatgtctaataacaatactctatatttacatatagagagtgacgacaaaatgggtttcgacacaacatacgaatatgacataaattttacattatatatgatataggctaattattaggaccttaatttttcaggtcgttaaatttttttccttagctattgagattgttaaatacaagaatttttggatgattttactaacgtgataattgtccttttacaaaatcatacttcttaaattttgagatgtaaatcgtactacaagaactttaacatgtaccaaatagtgtcccatgaactttcaatcacgtcaaacttcaattagtaaagttggacggaagtccttgaatccaataatctcaatagtattgagggtgaataaattttaatgggtaaataatattttagatgcaaaaattatcgattgaatcatctgctttgttaaataacaaattagaccatatattttctaaaacggtacaaaatagtatctgaactaattttttgtcaaaataaaattaattataatccgatctagagttgttacaacaacaccaagtacattttctatatttgttcgtattaagaaaattatcttcacgttggttatatttaaaaaatgattaaaaatttgagttcagtggtatttataccattttaaaaaatataagatccaaattatttaaaatagtttctaaaaattcataaaatctcttctgtaaataaatatgtatatatatatatataaaaaaaaaattactagaatattttcatattcaaaaaagacccaaagtaaatgtagaaataaataatcactacacatatagtatatagtggtataccctgtatttatatatatggtattcttttaaaataattaataactaacgatatatgaattatttatataaacatgcatgttttctgtcttaattaataattcaatatat

SEQ ID NO: 55869 - DNA, 2124 bp, Cannabis sativa
gagatattttattttcatatgtttagaagcactactaatattgttattctttgaaaagaaaacaacaacgttattatcacaatagattagcatagaagaggaaatggaattagctagtcatatctctaaaatcaaattctttaaccataaagtttgcaaaaataccacataacatgcgacaaactcaacatatatagtagatgatgtgattaaagtatatttaacactctttccaagaaatagcagcaccagccaaggtgaaaatatagccagaagttggctttaaatcatctacacaaccaccaaaatctgaatctaaataaccaacaactcgaagattatccacatgcttgtacacaagcataaaactcttcgttctttagaaatatctcaaaactttcttggttgcaacccaatgatcatgttagcattgtcaatgttagcatcacaaaaagtaataacacaccaatctataaatgtcatgctaggcgagagagttgtgttaatacctgccttctcccggcattgagccgccaaagaataagaaaccagaacatgagatctgatatgttatactctctaaaaattattaaattaaattatatgggacctaatatgttattgcaccaatagcgatatattacctaagaaagtactagtcaccaataatactttttagcatttctctttttttatataagcacatgttaaatatgttgaattcctttactatattgttatatgggtttgaaacttaataaataaattaataaagtaataaaagactagctaatatatccccatgctatgtacttgtaatttccaaagtaactcatctatttatgtattttaattaagtttctttcctattttggatctctatagtctatactatgctctcacaaaataaataacaatgtatcataataaaggaaaaaagtaattggtaaacaagagaaaaaggaagtaattactatatatatatatataaaggtacattgtggtttttaattattaattatgaacacataattattactatttactatagtcatgttaagtacttgtacacgtgttctttgaattgaatggttcaaatctaaccaaaacactgaaattgagttggattattggagataaataaaatttaatataaattggtaacttataattattaatggaaaatttgactttttatgcatttatgatattaaaactatttttctaaacttaagttaagtcatataggtaaaataggttaacattttataaaatccaattctactccttccatttcaaatacctaaccttctctcttcctcccttatcactctcgctttctgagtttccaaggactcagaacaacccaccaccctcaaccttggtcacttctccccaatccacgaccacagacccaaggacccacagacctaatgaccaccacgaacccaacgacccatcaaccacggcttcaccatcaacatgttgccaaaggaataaattgtatgtttaatgtttgttatctatgaatagatattagatttaaggtcaaaaagggccagatctgagttttgggtaaaaaattagtttttttcaggcccgatggtggtctgatgcattcatgttgttaaaatgtgtacagattgaagacggagatccgatggtagtctgatgatatggtccgatagcggcccgaggccttcttaacgagcataataaatggagcttaacatctataaatgtagaatatggtctgatggtggtcagatgctacttttttatgtacaataacacataaaaaaatggatagtatcgggtcaccatcggactcccatcaaaccacgatcagtatagatgggaataaggagtatggatggtaaagtcagaagagaagagcaaaaagaaaggtaaaatgggtatgaatataaattggcctatttttttaattttagtaagcttgtgttcaaaaatttaatatacaccaaatatatccatataaattcaaattttcatacatctacaactatgatgatgtatactgaaatatcaaattatataacttgaagtaattttatgttttgttaaatgataaaatggatcttgtattttttaaaattgtataaa

SEQ ID NO: 55870 - DNA, 1101 bp, Cannabis sativa
agtccgattgaataacttttatcttgtgtcctagctataattcaacttgtgttttagaaatggtaaaggtaggtagggcctcatctttggttctcaataaataaatccatgtatgcctagagaaggcatctacaaagctaatatagtacctatacccagtaggagaatcgatgggagcaagtccccataagtcagtatgtaagagagatatagacagtagtaaaattaggaaaaggcaacttatgatgtttccccaaacaacaagcaacacacaaatcaggtaaaagaaaatttgttttattgcttttgagtggaatattacaagaggaaagagcaacttttacaattttggttgctagatggcctaacctattgtgccataatgaaaaatcacaagaagaaggagacaaaacatgaatgttacagtgtgtagtggccaaactggtttctgtggactgactggggcaggtagtagaagtggaagtggtgtcttgaacaagattgagttgatttggatcgaacttgtaaagccctttgtcaagcttcccaaccagcaaggtcgtcaaagtatcctaatccttgacataacaagaaaatgggtgaaactcaaagaaaacattattatcttgagcaaattgagatacactaagaagattttttgtaatatcatgaacatggagtaatttgagcaaaacaagatgtttatgtgagtgaggggaagtaaaataggaatgaccaatactatgaataaataatcgtgtgacattgcccatatgaatttgttgctctcctatgtggtctacactgaaggtgaggttggatgcatctagagtgagatggttagtagcccttgagtcagggtaccggttgggatcaagaactgtgtcaggagaagcatacaaggcctgcatctcagcaattttggcctgcattgaaatggttgaagtatttaaataggaggatcactaagactatagctcttggtaaatttaccaaagacaaaaatgatttatttaatattatggatgacaagttacggagggtctgccaatctgttcagtgctagaatccgccctgctattaatgtgggcatttcgattt

SEQ ID NO: 55871 - DNA, 1328 bp, Cannabis sativa
tgtggctacttttaatgagaaaatgatctttgtttctgtattgtcattttctatctgagtaacattcttgtctagaccaacattttctatttagattttgttcatattagtttttctcaagtcataattgatcaaataaagtttaacaaaagttattaatgctctatgaataggaaaatcggttaggtttatttataatgtaattgatataatgctttcatttttttttctatcttttatattcttcagtcaaattttgcttcaggccaggtgtattgtcattattacacctattgtactaaattaaaatttataaaactaaattaaaggtttttagcataacctttcctgagattttagttgttttagtctttttttttttttttattaacaaaactctattttttttaaaaaaaaatataactgtaaacatttttctataaatattgtacgtttataagattatgtgacgtttggttgaaggtaatgaaatagaaaataaataatttttatttcattattttgttttgttatattataaagtattagaatgtcattctaatggaacttttttattatttggtagaatgactattacattttaaaataaaaggaaagattattctaatacaagatgagaaaaaattaataattttttattattattttttatacattttaaatttaattctattccattcatattccaattcttatgttttcattccttctaaccaaatgtcgtcgtaattccttcatgctataatggataaatactattttggactgtgtattttacaaaaattattaattagatgaactattttgttaaaacttaaatgataatttagaccctatcgttataggatgaatttttcacccagaaatacgagtacgatctcgtatatgactggcatgtggatctagttctcgatcgaaaaaagatgacgtgtcaataacaattgtaatatagctatcatgataaaaacttgcaaaaatgtatgaccgagatagagtctagtcgcacactatgaggacataataaagtaaaagcaagatatagagagaagttagcatagtcgcgtatatatcgattatatgcgatgaccaagtgtctcccccgtgtctcacgtaaagattgcatctttgcaagcgtctggtccgagtaatggtcctgcctggccagctgtatgaactgaaggatcactttctttctatataaaagagtgatctcatccgaataaaactaatcacaaatctctttcagaaatggactaagcagaacaaactatggcggaaccactataattctctctctctctctctct

SEQ ID NO: 55872 - DNA, 687 bp, Cannabis sativa
ttgagtctttagataaaacattcaattcttgtttcacctcacaaatttctaagaaataaaggttgctagttgaatacagtgaaccactgaacttgagagttagctcataaaatgttttcaaaaacttgagaaatacaattgcattatcccaatctaactcacttggtgggccatctatctttttaccatttaagggttcatcaaagtaactagtaaaatacaagtctccctctaatctattgaaagcttttttgaatttcaatgcagcctcaagcatcaagtacgttgagttccacctagttggaacatctaaggacaacaatgctttagattgaatgttctcctccttcacgcagtccttgaactttccaagtcgtgccggtgaagatttgacgtatcttaccgcattacgaatactacaaatagacgagttcaagtcctttaaaccatctataactaccagattaattatgtgacaacaacacctcatgtgtaacaagtcgccaccaataactatacctcctttcttctcacaaaatttcttttttaacttttgaagagctgcgtcgtttgaagaagcattgtcaacagtcacagtaaacaccttccatattccccaatccttcaaacatcccatcatttcatttacaattgtatcccctatgtggttggagacttgaaaaaaac

SEQ ID NO: 55873 - DNA, 1313 bp, Cannabis sativa
  modified_base (122)..(150): a, c, t, g, unknown or other
tgagttgtactaccacgtggtactaatattgtctacgtaagcatgccacatcatgtgggtaaaaattgagataacacaacacatggagggctaatccctagaattgattatatcaatagacnnnnnnnnnnnnnnnnnnnnnnnnnnnnntataattactaagagttcaattcctagttttagtggggtgatcatggaattaataaacaaaggttatttggttgatgagactcaataaataatctagtttattagagcttagaattataggttcatcatccccgaatccaccttgaaacattgtcaagggaagagataaagagtagtataatgtttttcggaaaaatctatttggaattgcaaaataataattatttattattgtaatagataaataatttttcaaattaattaaataggagatacacaaaaattattaagacaatttgttaagacaatatttattgagacaaaagttatcaggacaaaagaaaccatccttgtcctaaacaagacaatggtaggtgcctaaccctacgcaagcttatctttcagggttaattaatttaattagataaatatttgaatttaaaaagtggttaaagatatttcaaagctgtttagatattctctcaagtagttgagaaattctctcataaatatcagtaaacgaattcgattatagatattgatttatttatttaattaaatataatttaataaaagggttcttaactactaaaatgaaaatagatttgagaaatgagcctcactcttttacactaatatttttgaaatatagagaggagaaaagaaacttattttctctctctattgttcttgctcatgtgttgagaactcaataagaacaatattatgcactttatcctaatagcccacactatttcttgtgtgtggtggatcaatctgaaagatactggtgtgagtccaatttcattatcctcatcatctggactaagggatacaacatacgagaagttttgagaatacactgatagtcttcaagatgtcactacaagaaatttacttttcctagcacagttcgatactgctctggtaaaagtaacttttactagtgcatttcacaaactacgctaggaaaaaggtcaaagttttaccagcgacatttgcagtggctaaaatctaacttttaccagggcatttacgtgttgggaaaagtaatttttcctggcaaaagttctaatacaaacgttgatttgccaaccccttttgccaacacattagaagtaaattctattttaccagcgcaataccaaacttttgctagcaca

SEQ ID NO: 55874 - DNA, 1489 bp, Cannabis sativa
ttcatcgatctcccgccattgcttcaaattaatactctattattgtttattctggaagttttatatagaatacctcctttgattgtttcttttttttttttcttcctcttggttactctctaattctgtttatattttttagacttcagaatcttgctagaatacaattaaaaattttgatttatgtacttagaagattcacataattattaatgaaatagaaaattttaattttataagaattttgatggaatgagatttaaagcagagcatcgtttgatttttaattaacttttgttagaatttagatgatcgagtggtcatgaccacatggtgacaaactagcaattatatttgacttataatattaatttattaattgtctttttttttttttggttctttgttgaataataagaatactcagtaatcttaaagcataactaattatttcacctttgatatatgatgatgcttttctattgaactttagtccttttgcttctaaaacttctaatggctattacattaataaactaggataacgaaaattagaaaacaaaacgcatagcgtgcatatatgaaaatagttttgatactcaaatcataattagaaggtgtaataataaatggtggagaagaagtaccgtgaagaagaagaagataagagggtggagagagaggtttaagtgtaaagttcctgaagaaatttgtgcgtggagagaatatataatatttaattattttttaaatccctatttacttgtttaatattatttaaatagattttagaaattatctaatgcagtgcaaatgtctagtattattatacacctagccaatatacaacctgttgatcaataattaacggatacgaaaacgtctctacagtagtgacaaaatgatagttcctactatagtcttatctatatttatatacataagtgactaaagaattgaattatcaaatcaatattggtatatagtacccgttgtaataattccatcatgccggttgttgtacttaaatctttatgagtgaactcactctcatgatacatttaaagatcatgtatattaatataaaccctataaaatgttctgcatgtatgctttgaaaaaaaaatattgaacttgtatgcttacttggttaacatgaaataaggattggttatagtaaaatgacactgagagatgtgattgtgaatttggcaaagcttgagtaaacactacaagaaatgtcatttttaccagcgcagttcgctactgcgctggtaagagtaacttttaccagcacatttcgcaaactacacctgacaaaaaagtcaaagttttaccagcgcacatttgcagtggctaaaatttaacttttactagtgcatttacgcgctaggaaagttatttttgccagcgcttttcattttttcctggcaaaagttctaataccaacgttgatttgccaaccttgccaacacatcaaaagtaaatt

SEQ ID NO: 55875 - DNA, 3207 bp, Cannabis sativa
aggttgaatactcgcatttatcatctctcaaacaattctatcttttaccagctaaattacacttcttggtgttgtgaaattccagtaacaacaatttggcttcaaaaatttcacttattattagtaaataaacaattaagaattaatattgatatcatataattaatcaatctctataaacatgtcattagcataattaagtaataaattttttatataggaaactgattcataagatgttaccttataataatgttaaatactattaatatttaagaaaaatattattttattaattttgttatttaagtagttttttttattattattattattagagttttgggtttgttgttattgatgtggttagtgatcatatccacaaattaagagttcaccaaaagaatagttataacaacatgtgagtacctttcattatttgtttactaataaaaccttttttttttttggtaataatcatatttattattttattatttagtgcaacactaattacggctttatagacatgggcatggcttaattagctaggttactcatataaatttttacttttttttttttttttcttataaaatgattaaacatgattatagaaaagttgttggcatcttgctttaataagatcaatttttttttagtacatagaaaattttataatgcaccccaaaaaaaaagtttaagtataccttctatttgttttgtcatacaaaaaatatttgtcaaatttttttctttataattatctatgttttgaaaataaatagagtgttttaaaatcaataaggggtagaatgaaatgaaagaatatataataagattgtatatataggattatatatagatgaaaataaaataatatatattcttttaattaatgtaattaataagataataaattggattaaaatttaaattttaaacacaattttaatcttatttattttcaagatatattactaaaataaatttattttaattacataaaaatttgattgacataagaccatattttgtagggttatttgcagtaaaatctctgttttgatattttacacttaacccttttatttttttttttttgtggtaaaatccttttatatttatttttttttttgtaaatttaaagtattagctagatatcaccgttaaataccaattgaattattactgtattgcctttgaagttttaattttatatatacaagtgtacacatcggtcatccagttggtatttaacggtgatatttaactgatgtcttaaatttacaaaaaagaaaaccttaaatataaaaaggtttctccgtcaattactattttatataacattatatattagagtaatttgcgacataaatatctaattttaactctcagttgtaagaaaatacctaagtttaatttttggcggtaataatatggaagttatatttttaaaactccataggtacgtggtcgttaaatgtcaagtcattatccacatgttatttttttattggtctatttaaattatttttttcttaaaaaataaaaatttaaggacttggatcaatcaggattatcacgtgacaatttacttaatacttaacaaccagatagttatagaagttctaaaattataacttagttattattaccataaaaaattaaacttaagtatttatactataaattactttatatattataactaattgatattatattgtagagctataataactataatgtagtacttttattgtaataatatttaacacatacattcataaaaaagaggaatatacgtacaaaaattcatttatgacaacttagaacataaggaaaaaaaattgaagtaggagacaatatagtaccccatacataattacaattttcaatttcgaaatgaaatcacatacatatttgtacttttacattgttatagcaaaatctaccataattattataagaaaatttatttgggattgcttagtatttttagaaagtatttttttttttggggttaaaatattaagctttatttaagtaattatattgtcggtttgttatataaaaatatataaatatacattattttataatatgatgtagtattgaggaaggaaacaataacataatttttaatttattttttgataatggaaaaaaataacataattacactacaccacgaaccttccctttttcatcattgtgtatatatatagcattacatatttttccactttttctattcacactttgaaattttatcaaaataatagtcttttaaattaggaacacgtattcttaatttttgtacttttaagatcattaaaaattctttttgaattattgagattgttggatttaaaaatttttgttcaattttaatacatgtcaaagtttgatgatgcataatttgataggtaaacgtttggaaagcatgatttagtatatgaataatcaattagtaaaattgaatgaaattggacaaaaatacttaaatctaacaatttcaatattcgaggagaatataacataagttcatatattcatgtttacattaattttttttgcagatttagagcaattacgagttcatactaccgtggagcactaggtgcactactagtgtacgacataacacgacacaaaacatttgaaaatgtaaagaaatggttgaaagaactaagggagtttggaaacgcggatatggttgttgttctggttggtaacaaatctgatttaggtcaatcgtcgagagaagttaacgaagaagaaggaaagagtttggccgaggcggaaggtttgtgtttcatggaaacttcagctttggaaaatgttaatgttgaggaagcttttctgaatatgattaccaaaatacatgaaattacaataattcaaaagaatttacaagctaaaccattagtggttaatggtcaataccaaacaacaacaacaagtagtctcaactcagccaaacaaattattcatattgatagtgatcatgaagtatctgctaccaaacactctggttattgttgctccaattgattttattttatttttaatattttgtgttttattgtatagaatgaaattgaagattattgtattgtatgattgagttcctaactatattgaattttgatttttctctattggtatgcttatgtttatagttttcaaggtataaatatg

SEQ ID NO: 55876 - DNA, 897 bp, Cannabis sativa
tttgagaaatgtggttctaagtaaatgtgtattaagttttgtgcatgctcatactttgttataatgggtattgtaacagaatcaaattacgagttacaatatataatttgttcttaaaggtgatgtgaataagatcacaatgtaatcacattatataatggaatccacctaacattcaaaaagtttagttaacaagaatcacatcacaaaagattataaaaagtaaaactaaaatgattttaaaaccctttctttatataaaaataaaattaaaatgataataattttgttaatttatcatccattccaatattcatcattccattctattactattcgtattataattacattccaccaaaccaaacccggattaggaatattcttgccacatgtgccagaaagcgccacacatccgcctacataaggagcccgaaaaagtcggccatggcaccgacctgcaaatccaaactgcatcttaagctaaaatatgagattttgttcaagtacaacataacaaattacaaactaattacaaaaacaataaaataacaacatgtcttggatggacttcctctgccctgatagattgcaagatcaaattgtcaacagtcacttccttaaattaagagaaatcagcaagccttgctcaatcgcctccgctttgctcggctacatctaaatcagaattagcaatgatacgaatgaaggccaagagattttaacatgaaactattgctattaggcactaatggtattgttcctttaagaaatcgaaagactgtcttagtcgaaaaagcctctttactactcgaaactttctcactactttgaaacctgtcacaactctaatcccaaataattaacataagtttttgttcaggaaagacaacagaa

SEQ ID NO: 55877 - DNA, 1702 bp, Cannabis sativa
aacataaaaaactgttctgtaaataaaattataaaaaaatcataaaatatttaaaattctgtcaaaccgtatttttgtaattttttttgttatttttacgtagggtaaatatcattttagatattgtgtttcgcaaaagttaccaattggaccatgtattttgttaaatgacaaaatagatcatatattttctaaaatagtaaaaataagaccataagctcttttttaacaatattatttttttaatataactaactttaagataatttctaacacgaactaatacagaatacgtaaacagttttgtcataacatctctagatcaaattattattatgttttattttgataaaaaatgaatttaaagtcatatttatacaattttaaaaaatacatgatctaattagtaagggtcgaaaatggtattaagcttttatgcatttgtgaaataatcccaataagttttctacggtgaaaactatagggttcatagttgcttactcagtagcacatatagcatagaaacccaattctctcagactctcacacccaaaaccctataaacccttgattgaattttggtcatcaaaacactctctcacccattcacaattatctcctctcctttcgtcgccggcggctgtcactctctcttgccgttttcctaactcgaggtatagttcttatgtctcgtaccctttttttcatgattcaattaagaatacatatgatgatttagtttagatgagaagtattcattgtcaccattgcttttgaatggttgtgttgaacacatatatgggtgtatgaaaatctttttctttatctaaaagccgctcttttaagtttgctattggatcttgagtatgattttgtggaaagtaactattttcttttttttttagcagagtagggttttgggaggttttttaatttgggtatttggggaggaatcatcattaccatgagtgcaaacatcgaactatagttactaatttttattatgagctttcttatattaaaatgcatatgtaattgtttacttcatgcacataatattttaaagtgaaatagcagatgcatgtgctaccccactagtgtatatatatgtacttgtgttaatgtaatgctagactcaaagaagggcatttgccttttgggattttgttagtataaggaggaagaggatagagaaatgttttgtttgcattttgtttgtctctttctaccaggatactaaatgattctaatgtattataccataaagatgatatgatataagatatacttatgcttgtaattctcttttaacttaatgggacaattattctactatatttatacagaaagaaaactcttcactgtatattctgaacattgttttggaaattaaaacagttttttaatgcaactgttcagaatgtattttgttagtaattaactgtttctgtttaagttatgatttttttaaggcatttatttaatagttaagctctatatttttcatttatgcacatcagatatttagttggagggttatgccaataactgcttataatttttcgttctgatatatttaagtagccttgtgctgttgctaaatgttgtgggtacaatcatattattgttgcaggtcattgcctcccacattttgtaaatggttgtacaacataaaggattggcctttctaaaggcggatgat

SEQ ID NO: 55878 - DNA, 1005 bp, Cannabis sativa
gtagcgacttaagtaattaattatgttatagttaattattagtataaaaatattagcaaaatttataagtaaaatatttttttaaaaaaaataaatacctatataagaataattaaattaaaatttttaaaaaataataatagttcaaataaaaaattaataaaattttaattattaattattattttattttttaaaataaatatataattaaatatcattataatatgtataaagttttgattgtatacatgtagtcttatcgtaagagtatacaccttacatgttaataaccacatgatctaaaatcaatagtcaaaaaaactttcctaccggtagggaacttatactaagtcctaccataatcttgccctataatacttttacatataaatttcttacaaagagctcacaaaaaattattttttgaaagttataaattatttaaggtagttaaatcaatattaaaacaagatgtacacgcgtaattttatttttaatattgctttaagcagtggcggacgtattttatggtattaagtgggcctgggccccttgaaattttcaaaaattcaatcaataatatataagtgtagctaacttcaattaactagtgttatacataagtattaatttagatataatatataacaaattaatgtaatgtaccgtcattatatgtatatatatttagcaacttattattatctttttatgtgataaagaaatatattcatgaaaatataattaagatgaatattcttatttgtctattaagatatataattaaatatttaatttaacttaaactagatcacaaataatgtaatttttattttgtaatttctagtacaactgcaaaatatctttttcatttttttaatcatgtactttatacttatctaagaccatccgtgaatgttttgaataagttagggtgccaaaaataaagtttacacaattatttatcacacatataagaaaaaataattatgagtgcaacaa

SEQ ID NO: 55879 - DNA, 867 bp, Cannabis sativa
aggcttaccaactctctcatgatgcacggtcgcaacaatggaaagaagattatggctgttagaatcatcagacacgccatggaaatcatccatctgctaaccgacttgaacccaattcaagtcatagttgatgctgtggttaacaggtatccgaatttaacactttcatgtctttttgttagtattgctattgatatttgtgtataatgattttatttgctgcaaaccagtggacctagggaagatgccactcgtattggatcagctggtgttgtcaggcgtcaagctgttgatatttcccctctccgtcgtgtcaaccaggctatctatctcctcaccaccggtgctcgtgaatctgccttcagaaatgtcaagacaatcgctgaatgtttggccgacgagctcattaacgctgcaaaaggttcctccaacaggtgagatcaacttcttttacaatgacatgattatcattctatatgttattgtttctaaatcactgttttcggtttctatacagttatgcgatcaaaaagaaagatgagatcgaacgtgttgccaaggctaaccgttgatttgggaaaacagttagaagaaaggttttgtttattgttcttttcattaattagaaagagtttttgaggaatgtttgtacttgaagttttttatgaccttttgtattagagacagagtaaacctttctaaattctatcttctaaatttttcttttgaatattcgaaattcaagaaaaaaaaatattcatatttgtgactaagattgatcatcctctttttacacatgagttttgattgttaatgttatggtgattaaatctcatgtatttgtgaaatttgatagtttttctctct

SEQ ID NO: 55880 - DNA, 1319 bp, Cannabis sativa
acttttacacttccaatatttacaacaacaacagagcgatcgttttcagtaatgaatttagtgaaaactacactccacatcaagatgtaatatgaatttttaagtgattgtttactagtgcatattgaaagagaaattattgaaaaatttagtatagattcaattgtagataactttggtgacatacaagagagacgttttttattttaatgttattatgaatttaacaatatattttatttttttaaaatagaaatcttaagttttattatgtttggctcctactcagttgaattcctcgctccgcccactatattatgactgtcaaataaaagcaataaaattataaatacaatgattactgagatgacaacatcataggttcatcttggacttgaccgtgataaataaggcatgtatagaatttgaagggatgatccactagaaagggtagataacgagttctttaaggcttaaagctcattgacccacatactcattaatatgttagaaaaactaaaggatatgagcaaaagacaatctatctcgaaatgtacataaatgatgtgagaggaatgatcctaaggagcacaagagattcaatcctaagtattgtcttaaaaattgtcttaagcaacaaaagcgagaaagacacctcaataagcgtcttgcaaaatacgcctagtcattcccaatattattgaagaatgtgaggcatattctgggtatgcaacctcagcaaatgaactttttttagataaggacaaaaagcagttaattcatttataccacatgttgtaaatatgaaacgtggggattgttcatgtttcataaataattatctagataagaccaaaagggaataattttcatgcccaataatcctatagatagggatagaaccaacgaggtaaatgataggcagattataggaggaaaaaccttgagaaattaagtgtagaaaaactcagagattattactttgtaccgaatatattgtaatctaaaacagatcaagaactaaaaaataatatggactcgtggattatgtagattaactacaaaaccacataaaaattcttgtgtttattaatctccattattaacagttacttttaattttattcaaaaggtctcattattgctaacgaaattatgtgttaataatttggtgctttcattgagcggctttgattgggattaaaactcaaaaaagccatctccccaagaaaaccaaaacttcctcataatggaaaactctcaacgagaagagaaaataagggaagaggagatggtgctgttgagttttgtgccctaaa

SEQ ID NO: 55881 - DNA, 926 bp, Cannabis sativa
aatctccataatatgttaagaatttatactggaatattatgcgaacatcagtagaacagcttccacattgggatgtatggattagggaaaatgtgagacaatgaatctacttcttaaaacagtgaaaattcagataaataaaaaaacccactatatttcgacatcaacgcagatgaatataagcgattctggtgtaacactcaaagagatggttagtgatatggaataaagaagtgaaaatcaacaaatcttgcattgtgatcactaattatgatttggcagcaatagctcccaatagagaataacaaaacatcaagctccatccagtcactttgaattcatggattattaatgctgtcataatagctcaaccgatttctcagcttcaaaaattttgcagaacaaggcaaaaagaaaaaagttgcatgtagtgttcccttaatttccatgaatcaaataaaaataaaggcttacgcatgcaacctctaaacacattttatccaaggagggtatcctcaaacgtagtcaccggtgaaagtgaatccccttcccacgatttcgccagcacaaaaccaggcaaagcactcaagcccaaacagagcagctataccagcatcttcaaccttcaattcctgcctgttcttccacatttgcttgacgtactcgagttccttcttgaatgactcacaacgattgggaattttgcttacttccagatatcaatattatttttctatttatctaaacagaaaaacttttcctgtttaaaaaatgtataatcattttttattagctagaataaaataatattttacaaaagaaaaatgtttagagataaatcttttttggacaaaaggatttaaatggtgtttatatttagatattttgataaaaatacacaaagatcaataactataaaaataaat

SEQ ID NO: 55882 - DNA, 925 bp, Cannabis sativa
cttacaaagatctacatctatatatagatttgcattgttcccaaatatgtctcctgaattatcgtggcacatttataccgctataaatgatccagctcatcaccagcaataataattcgtgtcatcttaaaatacacgctttcagtacggacaatctggaagcattataacatacaagccttccaaagacgtagatgacttcattcccgaatgaaccttcaagactgacaacgctgtctgggagtgcacctccaaactagagacaagctatccgggagagacattccatacattgtacaagctattatggaagaaccttctggattctacaagaccttctgcacagggctttttggatccacactaagcttccggtatttgctctccgaattcacaacttctaatcccggacgacaaaacttgtaatcataaccaacaaatctccaccttggtttcaagttgaagtcacttaatacatcattgtctaaatattgttgtcccctcagccccttcgggctcagctaactccaatcagcttcaggcaatgctcaaacttactacttggcactaccttagttatcatatctgaaggattgtctttagtgagaactttggcgatcttcacagattttttctccacaacctctcgtatgaaatgaagcttgatatcaatgtatttagtacgctcatgtgcacacaattcttggttacttgaattgcactttgattatcacaatgaacaataataaccttttgattgagcttcagctcctccattaacccagttaaccataatgcttccttaatctcttccgtcaaggccatatattttgtttcagatgttgacattaccacaaccttttgaaggttttctttccaactagtagttttcccaaacattgtaaacacatatctggtcagagac

SEQ ID NO: 55883 - DNA, 1769 bp, Cannabis sativa
acgatttcacggaattttaaatatttttataacttttttggattttatttacagagaatacggtatttttatattgtaatcttgttaattttttgccaattttttgttatctgtatgtaattttttttttgttattttgatattatttttatgttacttttatgtagtttttttgttgattttatgttatttttgtatttttttttttttggaaaaccgtaaaaatgtaattattttacaaaaaatgataccttatgtaattattcttaaataatatgacattttaatttaggctatttatttacaagggtaaaaatgaaaaaaaaaattgtagatatgttaaatatagtatttttttaaccaaatctttatatctttatatattaaaagtgcttatctaacggtaattcttggtttaacgatgttgttttgtttcctccgttaactttaacaaaatattcttaattaatttatattatttttttaacagaaaattatattattttaaactattcgtttaaattgatggattgacttcttctaattaaaataatattaataatagaagatatttaagattttaacaatataagtcccgaactctctgtttgaaaaaataaaactatataatataaaatcgaaatttcaattgattattctcttcttctatttttatttttcctagtgaagtgcgattttgggcttcagatctcataccttatttctcctctctagatctttcgccaccgtcgatggcggttcagccctctccaaccagcttctcctccaatagctatggtcgccagcagtagcagtgtagcaccagcaaaacatgttcaaagaatatatatttagcattagcacccttaaaaatggctccatcaacgtttatctttagcatatgtgtagtaggttttgtccaacgctcgccactgtcataagttcctgagggaaccagcagtggctcaaattttcttgagtgagcgtgtttccattgagctaaagttaacctcactgtgaacattacatcggccgtagaacaacttttttggttccaaataactccatttttggcctgccatattgaccaacaaagcataacagcctcctccataagttttggtgtattcttgtcaaccaaatctttaaaccttaagaagaaattgctactgtgtgcagaaacactagccaaaccaaaccgattccagcaagatttgctgaattgacagtgcagcaacacatgaacaatcgtctcttcttctatatggtaaaaagggcaagataacttgacatgtatatgcttggaataaagctgggtacgagtaggtagacaattggttaatgccttccacataaggtgtaggactttcggtggggctttaatcttccacagagttttccacaccatatcctccatgtccacactccacgcccctttcaactcttggaggtactggtaggcacttttcacagtgtaaaaaccagtagtatctcttctctaataccatgtatcttcttcaatcgagttgcttaaaggtatgcttaaaataatatcttaatccctattgtcgaacatatcccgaataatctcttcatcccactctttttgagtcactttcatcaaattttgaactgtgtaagtactcaacccagggagagatgatattacatacagatagagtcatttggtagccatggagctcccaaaatactagtgttttgtccattaccaatacgaacacggctccctctttgatcaaagtttgcat

SEQ ID NO: 55884 - DNA, 884 bp, Cannabis sativa
  modified_base (483)..(483): a, c, t, g, unknown or other
  modified_base (557)..(559): a, c, t, g, unknown or other
agtatgaagctttaatcgctggcccaaaatgagcccgggagatgagagtcaaacacattgaattctctagttattcataactgggggtaaaccatgtatctgaggaatacgaggctcggggagaaaagatgatagtgtatctgagcaaaatacatgacttgctcacacaactacagatgcgttagcttgattggcaagcggtgatgtaagtgataagaagaacttggttcctatccagttccttgaagagcctagcatcaccagcatggaagagattaaaatgattgacacttccccaaaatggatgacactgatagccgcctacgtgcacactggggaactcccaaataatctgaatgaagctcagaagatgagaaggaaggctggacggtatatcatagtagagggaattatgtacagaagaggattctctatgccgttgctcagatgtgttactgaagaagaagctgcacggctcctatntgaggtgcacgatggattctgtggaaatcatgccgccgggcagagtttatctaagaaaattctacggcaaggtnnnttctggccgacaatgattaaagattcaaagtcctattttaagaaatctgacaaatgctaaagtttcgaagatacatcgagctccgcgtaacgagttaacccagatgcaaagtccgtggccctttgccatttggggaatcgacttcatcgagcagttacccaaaggcaagggaggagtgcagtatgcagtggtagcggttgattacttcactaagtggacagaggctgaaatactcgcaaccattacattatagaaagttcaagactttattttgaagaacataatcagccggtttggatttccgtacaaaatagtttcagataat

SEQ ID NO: 55885 - DNA, 876 bp, Cannabis sativa
cgctcttccgatctttttagaattcatattaggttgttaatcaaatatacttgttagtaaatctagatcctggtgaaataatttccaacaatttctatctctagagctgctctggaggtcagtcatttaatgttcgctgatgatacaatattgtttactcgggctaattcgaagatggcaacgactatacttgaatgcatcaaaaagtatgaaacctggtctggacaaaagtgtagtctcctgaagtcaagtgttctcttttcgagaaatatgcccagcaatcttaagagcgatattcttagaatcctgagtgtaaaggagtgtaacagtcatgagaaacacctaggtaacccgtttgtgttcaaaagaaggaagagggaagaatatcaattcttaaaagagaaggttcttaagcggatcgaaggttggaagacaaaactcctgtcctttgcaggacgtacgactttggtaaaatcagtggcgttatctatgccgttgtatgctttgtcaaccaacaagataccatcttccacttgccgtgagctagatagtattattcgcaagttttggtggaccggaggctcagacaaggatcggttcttggctttgatagggtgggatcggctgtgttctcctatgttgtcagggggactgggttttaggaagatagaagagatgaacaaggcactcttggcaaagctcgcttggcagatggctggtaagttagatagaccttgggttaaatgtctctcgaaaaaatattgcaaaaaccagtccttttggagcattaatgcaaaaggtagcgactcggccttttggaaaggtgttttaaaatcaagagatactttgtgtcaaaatgggatgtcgattgtgggt

SEQ ID NO: 55886 - DNA, 647 bp, Cannabis sativa
ctatcaagcatggctcaaagatagtccaattcaaacatatcataagctttactcatgtcaagcttaagagccataaacccatcacgactccttctttttcgcttcaaataatgcataatctcataagagatcattatattgtcagaaattagacgtccttgtaagaatgcactttgcgtatcagatatgacgggaggcataacaatcttaagcctattagtaatgactttggaaacaatcttgtataatacattacaaagggcaatgggtcttaaatcacccatattcataggctacttctttttaggaattaaaactagattagtgttattcatactagtagggatatgtcataaattgaagaaattgtgtaccatttgggtgacatctcgactaacaactagctaacacttttgaaagaagccaagggtcataccatcgagacctggggacttatccgggtgcatttgaaacagcactttttgaacctcttcatccaaaaatggttgtagcagctctgtgttttactcaagtccctatcgagtcatcaaatacgctttgtcatctggacaagttcattatgtaaagaaacaatctttactaaatcgcaagaaaaggctacctagtcattgcatatttattggtat

SEQ ID NO: 55887 - DNA, 575 bp, Cannabis sativa
caagtgaggccattgatttatttgaccgcttgtatatgagtcttgcagagtgtgatgttataggtatcaaggcttgtagagaaattgatggcatatttgttgacttccttgaaaaagattttaggaagcctattttgcttacaggaccacttataccagacccaccaagtgaacctctagaaaagaaatgggttgactttctaggtcaattcaatcccaactctgtcatatactgtggttttggaagtgaggtgatcttgaccaaatctcaatttcaagagttgttgttgggcttggagctttctgggttcgcttttttggcttcattacgaacaccttcaggggctaattctattgaggaagctttaccagatggatttcaggagcgaattggaggaaggggagtggtttatggaggttggattcagcaaccacaaatcttgaaccacccttctattggttgcaatgtcacacattgtggttggggatctttatttgaggcattgggggccaaatccaaatgtgagcttgtgttaatacccaatagaggtgatcagatttttaatgcaaggata

SEQ ID NO: 55888 - DNA, 2135 bp, Cannabis sativa
aataataatattattattattgttgttggaatattggacaccatctatatccatattaatatgatatttttttgctttgagactaagctttaaggatctattgtccatctatatatactcataattttttccatttttaataactattgaactttgttgcacactcatatatatatataataatataaagagaaattatggatggattacttactagacatgtcaagaatgagaagtttataaatagtccttttggtattttcttctatgtcctccgatatccagttcataatccttcatgtgtatatataacaaaaatttgtatgtattactagaaaatataatctaaatatattgtgtcatacgggttttaaataaataaaattatcaatatatatatatataaataaacctttctctaatgaagttagcattggcaaaacaaagcaaagcgggcttgattcgaataataattgttccaggaatttgaatggccatcggatattgctgaatatcgcaaaacacatcagttcccggaagctttcctagggcttccgtccccggtcttatcgatataagaattatctttacaaacgatattgtcacctgcaaaatcatcacaaacatattatatttaatttaattaactctgtcttcaatattattatactgtatatctatcacatgtacgattacgtcttaactacgtacctagttggcttgtatatgggtttgtatgtgggtgtgatgagttaaatccgtgaaatataattgtaaaataatttaattcattatagaaaaatatttagtaatttaactgtgacactttcatcaatactatgtatgactattttcaattactgaattgtttttattggtggccataattaatttattaagattttactatcttaatcatttttttttttcaaatggtctaaatttaataacaaaattggtggcacttaattccttttttatactcgaaggataatacattatgatttattataattattcttaaacataaataattttaaatagaaagcatattatttatattttttactaagagctctgaacatcaaagggtataaacccctgttcgaatgggttaggattttaatattaaaaattaggtaaactaatcaaaaacattatatgtgcatatttttttagaacaagttgcatcagttagttaggatatttttggttgttagagtcttgattcaagtagccaatttctgttacagttggttaatttcccaactgttttctccttgttgtaaccgagctatataaagctcattccttctctttgtaacatttaatcgagcaataataaaaagttttctctgcttttgctctgctcctttctttctcatatatttaggtacacataaacaatcctcaatggtatttaaaaacaatttactaatgtaaaggtaaatagcataagatttaagtagttttacggctaatatttttaatttttaatgtaaccaataatatactcataaatgtgtgtgtatatatatatatatataaaaaggagtatgacatgaaaaattgtaaagtactgtattgtcgtaagcagagaatatataaaaggcgggatatagtttgaagtccaaaaaaagataaaagaataataagaaaagaggtcgctatatatataggtgtgtatatctatatcgcaggagagtaactttatcattcagctatatcgttacctttacttagaatcatataaaaaaaaaaaaaaaaaagctttttattggtaaatgttttgtgttttttgtacaccctagaaattgcaaagttgaatcaatggtgcagaaaagtccaacaattagataaacgcgcacatgatttgcccatcatacctaggaagaaatttggcaatgggtccctacagccactacactaggtgtatacttctataaaatcttaagatatagggacacaattttgtactgtaacgtatttttacggaatgtattatgtagtacattaaatgagtttcaaagtacgttattgttttttaactctaattacccataaattaacccaacccttagttcaaataattctctatgtaacggctgtcgtacaaaatcgtgtcccaatatata

SEQ ID NO: 55889 - DNA, 607 bp, Cannabis sativa
atctactacttactacttcaataattttacgataaaattgaataaaatgtgataaaatgactattttactgtaaaaattgtattttgatatgtattattaaaatctgtacaaagagtataatttagtagtgtaaaaagttaaaaagcaaaaaaaaaaatactaattattcaaaataaaaaatctaaaaaataatatcataaagaccctaaaatatctttaattttttttttcagcttgatacacttaataaatacactttggtttctgtttttgtgaaaatacataggaagatatagaacacaatttattatataattgtagttatttgctctccatagctaaaataaattgaaagctatatactaataatggaaagaacaatcataggtttgggttagtattgtttgtttttcagcatagacaagtcattttcctaataatgaatcataaaaatcacgttttgttagtaagatttaaaatcattctgacactcaacacagaaccccaatcaatgaagcattcaatgtattcaagtaattaatctgtcaccattaaaaaaaatctgccatgaaaaataaataaactaaaaagacaagaaaaaaaata

SEQ ID NO: 55890 - DNA, 1168 bp, Cannabis sativa
ggaactcatttcttcatcaaatgcagcaagccatttattattatttcttgagtttatagcttcttgatatgtagttggtactgtggtatcaatctcctctgcagatgcaagagcaaaggttgtacagtcagcaaaaccaaatctttcaggtggctttacttgtcttctttctctgtctctaaaaagttggtagccttgtgaatcaaatggtaaactttcatgttcagttgcttgttcatctatttttgagtataagtacccttgagtatccacgtgatctgtaccatcttcttcttccctgttgctttgtatttccaaaccagtcatctccttgtcattttgtgtgtcattagttgcatctgtcttcatagtcaactcatgttctttgaatacaacatctctactaattatgcattttctgtgaccattttctaagcaccacagtttgtatccttttaccccttcaaggtaaccaaggaataaacacttgagagccttggctctagtttgtcttgtctgatgtgtgcaaaagctgtgcaaccaaataccttgaaaagatcaactgttgggacatgccctgtccaaagttcttgtggtgttttgaatttgagagctgttcaaggacacctatttattaaagagcatgcagtcttcaatgcttcaccccagaacttcttgtcaagaccagcacccttaagcatgcatctcactctttccaatagagtcctattcatcctttctgcaagtccattctgttgtggattcttcataactgtcttgtgtctatcaattccttcaagctgacagaacctagtgaactcatctgaaccaaattccaatccattgtctgtcctaagtttctttattttcttccctgtctggttttcaatgagtcttttccaagtaacaaaagtgttaaaagcctcattcttagttttgagcaagaaaacccaaaccttcctagtatagtcatcaactatactcatgaagtaacttgcacctcctagagttttagttcttgaagccccccaaagatgagaatgaatgtagtctaattttccctttgttgtatgtttccttggtgagaatttcagcttgcaacatttaccatatacacaatcatcacagaattctagcttctctcctaatttgcccttgagaatgccct

SEQ ID NO: 55891 - DNA, 606 bp, Cannabis sativa
aagaaagagagctactcagtgccctccagcctcatccaaaccttaagcaacttgagattcggaattacaaaggcaacaattttccaaattggatgggagatcatcgctgcttgtctaatttagtaagtttggagatgataaattgttctaattgcagcttcttgccattgttgggacaactgccttctctcaaagatctttggattgattgttgtgatgtggtgagaatagattcagagttttattattctacaagtctcgattcttctgttgcaatacaaacaaagccattctttagatctttggagaccttgaagtttagtagattggaaaagttggaagagtggtcatttattgaaggtggagtttttcctcgtcttaagaatctttgttttgaggtttgtaataaactcaaggtgacattgttaggagactattttccgtcattgacagagcttgtagtaattaattgtgaagaactaataccattaatactcccaagagctcaactcatgcaggcccctttgatcactttaaagaagattgcatttaggtattgtttcaacttgacacacttagacaaggcggcctttcagcacctcacct

SEQ ID NO: 55892 - DNA, 1717 bp, Cannabis sativa
gaggagggtagatttcttcccactttaatggtcctcgtggggtcttcctcactaatactcacttcttctacctcttccattggttccaaatttttttcaatcccaattcttgggtctaactcatctagaaactcctcccaaacagttttagtatccatcaagtcttctgttccagaagcaacaagtgtttcttctcagaccatgaacacgatcctcgtcgaaacattgtaacagtttcttgtgcttctctcatcaccttttatcatgccaatgcatccattgtcacatgagaatttcatgcacaaatgtcgaacagaggtcaccggcccaaaatggtattatatgcgattggacagtctgccacaacaaagtttgagtgcttaaaagcactcgcctcgtttttccctttgagagtgactgcaattggatcttacccattgacattaaggtgtcaccgttgaaaccctaaagctgaatgggacaaggggttaaatttgctttagtgagcccaattgcctggaacacaagtttaaacaaaacgttaacagacctgccattgtccatcagaaccctagagactcatttgttagcaatttgtgcatcaattacaagtggatcgttgtgggggaaacgcacattcttagcatcttcctcggtaaaaatgatgggctgatttaacatcctggggcattgagcaggagactgcgccagggcacaaactttcccatcttatatttcccttaaacatattttttgtgaattgcaggtattttcggggagatgaggtccaccaaagattgttgcaacatgttcgtttaccggtggtggagccagtctgggaggatacggggttcccgatcttggggcaagtaatgccaccccagcttgagctgacagagccagaagggtgggcaacgatgttcccagagcttgagagcgtgctacccctgcggaggatttacaacgctttgttatcctagaactatcacatgttcgtgtaccaccccctgtttgggataaataattaagatacagacccactgtcccaaatgtcccgctcagaataatatttcaatctcatcctttaaataatcacactaatttgtggtgtgacctttctctccatggtactcacactctttactatagtcacatctgcttcttcctccatgcgacatacgtggaggtttcttgtagtatactatgttataggtaactttatagacatttttcgtgagtctattaagcttgtgtattcaggtcatattctttcctccatttcttcgaagaatcattgcggttatgactctttccccctcgcttattctgggagtggcttgcattagacttcaggacctgagtcttcgcctgtcttagggctacgttacatccggtctatgccgccatgtacctgaaaaaatgggtctgcataggggcaagacaaaaaatggtaggtccgtaaatagttggagtaaactgagctctaggtattggtaaagatggagtcagaacctgaggtgtctaattcggaacagttatggaaggagttggagcaggaggaactctgaaggcttgtatgtattcatcttccaagttgatgataccttgggccttggccatgaattcactcagagttttagctctttttctttgcatttctcctcatagcagggagcctacggccaatcccgactggagggccatcaacttcatatca

SEQ ID NO: 55893 - DNA, 2089 bp, Cannabis sativa
ctgccaatgctgagttaggaaaatttaccattgttgtttctgctgctgagttaggaaaactcgagtaacaacctacatgtagcacagaatagagaaagaacaaaataagaatagttgaaactaatttaaattgattgatagcaaaagcaaaactaatcaaagcaaaagacatgtatatataataaaagagtaaagtgttcagtaggctttgagttttgagtacatacatgatatctggatataaagaaatgctatggaggatggggttgtaacttgtaatctatatatctatataattttaaaattaagagagatgatgtggcattctaagatttcatctttctatatcatttttcttttcttaattttgtatatattttcaaattttaggatgatacgctccatagtatatatttaaaaaaaaaaaaaaaaactcacattgattagttagtatgttatatgttatgttgtacattataaataacacattcaattattcacttttacttgtattaaaattattattactttttttctcttttatataggtgattaattaacttagtattacccaattatcttagtttaaattttttaatatattttataaaatatcaattataacagtattatgtgattatattttatatattattataaaatatttatcactttttaaaattaaagtttcttttaattaaaaataggtaaaatttatatgtatgtaaaaataatttataagtgaaaaaaatataaaaaaaattctatagtaaggactactttttcccttattggacatcgtctttatgtttgacatttaaataaattataattttatatctaactatatattttaatttgtaccatatattcttatactattataaaactttagagcttcgaaattattataaaatattttataataatatatattaaaaaaaataattatataatactataaaatatttcataaaacatataaaatattttacttgaattttacattatataaaataatatataatattatagtaaaaaaaaagtatattatacattatatttacaaaacatggaaatgacatcgttgtgttctgtatcatatgatcactgaaactacttcctacatcgaattctctctcgatcgttgtcgtcggagatttttaaaaaacaatcgagtcacaactagtaataatatattcattctctccttccctttctccatcaatgctgagttagggaaattcactattgatgtttttgcatcttagttagggaaactcgagtgacaatctacacgtagcacagaatagaaaaagagcaaattaagaattgttgaaactaatttgtaaggatgatcatacataactatgaggatttatcattgcgttatgaggtttatgtgtatagcctaaacaccaacattctcatgagggttggtgattttttttacttgggtggccattgtgggaaagacattcttgtaggcagttctatccattaattggtagaaactgaacttgacaacactgaatcttctattattgtcgtatttgatctaaatactaaaacatacagccaaattccacttgccaacataaatgctaagggaaatgtccatcacttaatagcggaattgggtgggtggctttgtgatgttgcaaagtccagaagatgttataggtgacttgttgaagcaaagtatgttaagttttgaattatgatggaatacatcgttaaagagtcgttgactaagctctttaccgtggaaccatcaaatgttactgggcttttcaaatatttaaagcctctcaagtatttcaagagggtcaataagttcttttcgattttcggtttcatcagtttcggttctaacaatgttcggtaggtcggtttgaacggttttttcgattctctggattttatgctcacccctacatgatatcgatggatataaagaaatgctatggagaatgtgttagactgtatatatagtgtatgtaatatagcatatacaaatgatatgaaatgcggaaaataaactgtaatcatatcaataatatatgcaatgaaaggatcgatgtacctc

SEQ ID NO: 55894 - DNA, 1091 bp, Cannabis sativa
aaaatcacgtaatacgcctaaggtagttagggtgttacaaggaagctctttccttaagtgtacactcagaaatgtatggttctagacacatctactccacaaatattttaaatgtactggaattttcatgatggtgacaggatcatgttcaattgggatgattcggttcttgattatgcgagggggatggagcataggcacttgccttgatgggaaaaccacgaatacatctacttcgcgttgaaccttccttttgagcaccatgattgttgaggtagacattgagaattgggagattgttgtatatgactatgatatcgatgccacaatgagaccaatatgaagtcatatttgaagtcttggaccgagctatttgcatccttattgcgggctactggttattttcagacaaacaattatgtacttttggctaaattatgtgatcttagccagctcccaccaatgcattatagacaagctacttcggaagttgtaccgcaaacagagagcaagttaatgtctgattttgtagtcccttataaattacttaagttaattgttactaatagcttccaatctttttattggtagtgccgattgtagaatgtatgtcgttgagtatgtggagcaccgaatattggatcgttcatttgagaaggttacagatgataacatggtcatctttaaacaggtggtgtgtggacatattttaccagaatttgatctagtagtcaattttttgtgattagtttagaatattttacgacactagtgtttttgcacatatttttaaagaacattacaaatcacattttaattgctcatatatcgtccataaatcgaataaaaagtaataaggatgttgcatagatttctctttaaatttcccaaaaataatttatcatccaaaatcgcaaattataaatttaaaacattgttatcttggcatctaaaaaatgatgaaatgtcacatatagttaatcgctcaaatccaataaactttttattgaagatttgatcaggtattaattgaaaaaaaaatgaattggaagttttgtgtttctatagaaggaaacttgcatctactgctc

SEQ ID NO: 55895 - DNA, 653 bp, Cannabis sativa
  modified_base (607)..(624): a, c, t, g, unknown or other
gcgctcttgacagagtaaaaaccagcagtctctttacaccagtaccaaacatcgtcgacagcttggttgctaagaggaattccaagaattagctgagcttcacttggaatgaagaggtctgtgatgatgccatgatcccactccctttgatcaactttcatgagctgattaaccttgcaattaacaaggctcggatgggaggaggtgatacacggctgagaatcagatggaagccaaggagtgtgcaaaacatttgttgaagtacctgagcctattctgattcttgcacccattttaacaatgtcttgagactcaaaaatactcttccaaatgaagcttgggttgctcccaagagtagcggtgagaaagttactatgagggtaataccgtgctttataaactctactcacaagggattggttgttaacaagaaggcgccatccttgttttccaagtaaggacaaattatggtcatgaagactacgaaaacccataccgccaacatccttctgctttgttaaacgtttccagctcatccaacttataccacgggtgttttgattggaagagttccaccaatacttagactgttgggttttatgccctnnnnnnnnnnnnnnnnnntataatcaaatttacttattaatatagat

SEQ ID NO: 55896 - DNA, 1765 bp, Cannabis sativa
ccctaaaactaccaaaaccaaatgagattgcaatgatacaaacaaagtaagcagcaattaaacacaatgtaacaagcatgtaaatgagaataacaacttactgtttgaagttagggcttagggcaatgactagttattccgtctacaaatcttcgaatgtagtaaggatcgctttgagaagacgaagtcgaaggaaacttttagaaaaaatgtcaaagacagggatggcatgcaaatcctcaaacgaactcgatggtgattcttagtaaaaaagctaaagaattgtttagacattctaaaatgtcagagataatgcaaaggtggttccttttttcttactttatactcatgatatcgactttgtcggatcaagaaaatgtttaatcctacggatagaattcaaagtggaagtggaaaagatggtcatttattgctgatgtacctcgaaactgtacaaccgccaaaattagaggacatgcgtcttttcaaaagggatcatgacgaaattactctttgtaatcattaaaaagtactttttactagaaaagaactttttaagcggcaattggtatacctgaaattcggcgagcacattcagagaaagacacgtgctgggcttgggaagaataatcataattacacttgtaatggaataactcgttggaagcataattagtagggtatgtttacaactagtctaactgaacagtcttatgtgagataaatgccttataaaatgtgtataacttcaggtgtacaaggcgaggcactaacctcatcacgtggaagagatatagcgacaatggaaatacttagtgtatagtgcacattatgcaaactaagtataacagatgggtggaccaaagtgagagatagcaaggcatccacctttccgtgggagggcatgcacgcgaaaaagatcatattgtcaccaaaaactgtagttgtcagaattaaagtaaaagcattatcaacctttgaaagacatatgacgagcttaagctcgccatcaaggtttactcgactccattaccagcaagacattccgagacaataaggcttaccatatatctttaatacacgttcgttttggcccagtaaaagcgggatattcacagctgtgtgaaatttaaataaaaaccgtatttacttaacgtgatatgtaatccgatcccataatttcaggggataatcgttgtaaaaagattacattcaactttgtaaataattgcctactatgtaattataaatagtggcaagtaagaccaaaagggggacgaaaaaaatcataccagagaggccctaaaaaagttatcaaaaatctgaataagattgactcgtggactatgtaaaattttaattgcaaatcctcgtaaaaaatcctatgttttcatactttgcattttacagcttttttttttatgtgtgagattgtcactgttaggctcaaatttgtttaacaaaaatctgcgttaacaattatatacataaaatattgttaatataattaaaaatgttaattgactgttaataatttaaagaatttttaaaaacactaattaataaaatataaaaggtaagattgacttaaaaataaatttaagatttttgaaaaggtgaatgaaattaatataattacaaaatcttaattgatgtacaaatcaacctgtcaattactaaaaaaatctaattaaaaaataaataggttaatttaatgtaaattactttgaaataaatacaaatgttaataaatagaaatatagaa

SEQ ID NO: 55897 - DNA, 2254 bp, Cannabis sativa
caatagtatgtttggtattaacttatattaatagattgtgtaaagttttaatatattttcaatacattcgaccccaacaccaactacgggtctaggtcttaggtttggatttgggtcccatgtcccgggtctgggttcgagtcccagtcccggtcccagtctaggtctcaggtccaggtttgtgtttgggtctcagtctagctcccagatctgggtccaaatctagggttcgagtccggagttcgagttcgggtccgggtaccgagtttgggatcaggttcgggttcaagtccaggtcggagattagagttgactcctaattttttataaatattataatacaaactaatacggaccattagttatgtattaaataatataatatacattgtattaaaaattttggccgtaataattaatacaatataaccattatacttatacgacataccaaacgagcctaataatagattcataaacgaacaacgaataaatatgtctattttgccaattgatatatttacttttgtccatcttttaagaataattcaatgtaataataatattttcacataaatacacaaaagagctgcaatagcataattagtaatgttcataattgaataaatacatatcatgaatacaataataaaagtttatctttgtatatcaaagatttattataagttgtaaatcataacgtattaactcaaactatattattttgcgtatgtcttttattttaatggcctgagccaaaatttggttttttgtttgagtcttgatttgaggatatttgcttacaataatcttcacaagctttctcacatgctggaagtcctgcacctgtctctcgtaggcacacaggcatgcacaacttagcgcactcggttagcgcctcacttgtttgaaaaattgcccctacgagaaggatagacattacgaaaaaggttagagtatcggcgtttttgttagccattttgttgatctttctttcttaattaattttcttttagttttgttatatttgcttgaggattgagtttcataaaggtatatattttttaaggtttttatagggagataaagagattagaaggatttttatccattttgtttatttgtatttttagattaattggtttaaacaaattagtatgtagcataaacttattgtggtcaatatttagaaaataggttcacaattttgggctttttttttttttttatgtagttacaacaaaaactaagttgaaatagatattattatagaaagatgttctgttctcctctatataaaaaagaagtttggattgtgacattgaggaccatagaagtgtacaatgttagtttagagtcaacgtaattaaataactaagttgttgtagaggtggttcttaatttcaagttgtttttctttttctttttatttgaatgttcaatgttggtttttgaaggatatatagatgcatataaccttcattttagaactaactttatttaattattgtaccgcattaatgtctttggtatgcatatagaaatttacatataaaaaaacatataaatgtatagaaaatgtatattataaagttggttttatttaattttttaattattgtaccacacatcaattcacataaatatgtcatatgtcatgtcatatggacatagttaagtatttgttgaaattaaaaaccattacatactgttatccagatttttgattacttaatgtggcatgcttacgtcgacaatattagtaccatgcggcaatacagttcaccaacaaggaagttaagtcagcaccttagccaacggggatcccgacactcaaacgggatgacaagtgacagaccagtcaccttaagccgaccagcctctggacagtgcaaggctggccagcttgcttcctgcaggtgcctggctagtcaggattggacctggcaggattttggtgcgcaaacttacatgtggactacaagttagattgcgaattaggccttaaaaatccaataaaatagataaaaaaaaaactacatatgtttaaggagcattttagtcttttatatttaattaatttaatatataaatatctacttattttctttgtaaattagggtttaagctctcctatttaaagagttttaactcaaccctaaagactctaagtctaaacctaagtcattaatctctctaagtctcatttaagccgtcaaagttctaagtctaactcactctctctctctctctc

SEQ ID NO: 55898 - DNA, 1810 bp, Cannabis sativa
aaccattcatcaaacgcatcttgacgcacacacaaaggcacatccttcaaaccagaagaaaattcaaactgccctttgatttcacgtatctccttactaacaactgcagaagggctaccaaaagatttaataggctcaacaaccaaaaccttatctttttctttacttttgtcctgaaaaattagagaaagcaatacagcaaaatggtaaaaaaaaaaaatcgttcaactatgaaacttataacaacaaatatgtgaataaacattaaaaaataacatcgaataaactaaccttctgattacttttctcctgcaaaaatgaaaaaaaaaatgcaacaaaaaaaaggaaagaaaatcaaaaatcaattgaccaatgaaaaacacaaacaataaattagttctctaaaaaaaaaaacttaaaaccatgcacacatcttttctatatcatccattttctcgtttataatatccatcacaaacggtgtaatgctatcatcagtagcctgcctacccatagcctttttatctgcaacaccggcatcatctccacccttgtcaccaacttgcccaccatcatcaaactccatgggagcattatcattaaacaactaaggctcattaataaacttcattaagttgaaacttggacagtaatcatttgaattctacgaaaaatgtatttataaaaaaaataacattaaaaaattacaaaaaaaaaaatatatcagaatataaaaaaaaaatatagatataccatttgaactaaatcgtcttcagcaataacttgaacaacatcctaaaaaattagaaaaaatcaaacaaaacaaaacaactaattggttattattcttgtaaaatatttatacaaacaaacaaaacaataaataaataattaaacagatctacttcccctctagtgataagtttatagctttttttgttgattaaataaaaaaatgcaaccaaacagctaaaaaaaagttttaaaaacactaaaatgaccaaactactaataaataaatagatattcaaaaactttacaacaataataacaaaaaattacagcacctgagctatattgctgtcagcagcaactccaacaatttcctgaaaaatttatacaacaaaattcaaaaaaactatccaaaacaaaacatgcacaactattaaaaattgcatatgtatcttttcaatcaaactactctcaccaccataagctccatcaccctgctgatttataaaaaaatgtatacaaccaaacaaatcaagacattataaaaacaacaaataaataactaaatagttctacttccccactggtgataaggttacaactttttttgatgatcaaataaaaaaatacaactaaacagctaaaaaacaaaaatattcctgaaaaacactaaaatgacccaatacactaataaataaaatcgatatacaattactttagaactataataacaaaaaattacaacacctaaactatatttctatcaacatctccaacaattccctaagaatttgaaaaaacgaaaataataaaaaaaaaactatcaaatacaaaaacaccaaaacaaacaacaaacatacacatctattaaatatttttgatttaccttttcaattatactactctcaacaccacaaactccatcacccaactaattctcaacatgtgaatccaaattttcactctaaaatatagaaaaaataaataaaacatgttaataatataaacagacttgtaaaaaaaatagaaaaaaataaaaaatctcacaattgtaatatatatatatataccttctcaa

SEQ ID NO: 55899 - DNA, 589 bp, Cannabis sativa
  modified_base (390)..(390): a, c, t, g, unknown or other
  modified_base (549)..(550): a, c, t, g, unknown or other
aaacaagcatgagataagacttctatttggcttgattatattttagcacaataaatagttaaattactcatatgcacaattttttgtcctaatcaaatgagcattttcattacaccataccaattgtaaatagtcaataatttttcataaaaatatgaggaaatgctataaagcacccataatgccaaatttagtgttaaatcaacactaacatgatactatttcaataccatttttttttcaattccaaccataacactaaaaattacactaaaaaatatcttctttattattatattattttattaaattatctcacactataatatgtatataaatataaaatttaggctaattatgattttttctcctagaactttgacatgtacnaaatcatgccccctgaacttttttagccattaaaaattttccctgaactattgagattgttagagttaaggacttttgtctaatttcatttaattttactatttcagtgattgtttatgagctaaattatgctctccggactttgatatctaccaaatnntgcccctcgaactttgatatgtactaaatcatgccccct

SEQ ID NO: 55900 - DNA, 951 bp, Cannabis sativa
agcaaaacaatgcttcaaatgtgatgggagatgattataacttaatttgagggtgggcaagatatcattttcattttgatctatttttgcaaactcactattcaaaaactttgacaactccttttgtgagtctccagactgccataacctttgctgcaataaccttcctattgttcttatggccagaggaactcccttacattttttgacaacctccatccctagctccatttcttttgagccctccaccggttcttcacctttcttaaatgccattcttttgaataaggaccaggacatgtctttgcttaagtcctttactttaattggtccaactgtactttgagttatcctagcgaccatttcactacgagtggttactaagactctactaccctttcccccacacttcaacaacatctctaacttatgccattcttcaccattctcattccaaacatcatccaacaccagcaggtatttctttccacttagcttacttctaagttcattttgtaaattttctaaactattagaagcattagaatttacaattttccccaaaagtaatttcacatcaaaaacatcagaaacacacacccacattttttgttcaaaatgtttttcgactctatcatcattaaaaacacattgagctagtgtggttttccctaaccctccaatccctacaattggaatgaatgacacatcctccccaaactccatttccaccaacattcgaataatctccctcttttcatcctctctcccgataacttcctcttccctcacatatgagtaggtctccctcatactacttcccctaacaactatcgtttctattggacgaatagttaactgaaagttgttgctaatggctcttatatcatatagtttttcttttatatctttaatcttatgacccaccttaaaacgaaaaactagctgatt

SEQ ID NO: 55901 - DNA, 1229 bp, Cannabis sativa
atcagatgactcaattcaattagattggatcggatggatccaaatccattggatgtgatccaatgaacacccctactatctagttgtcaaaaacacaaaaggagtgcatcaatacacctattcttaggtagtgtaacatagaatttcctaaatgaggttatttttggttaattagaattttttccccctgtgacatgcaccaaattatgccaccaaacatttcaagacgttaaaaattcctaccgaactgatgagattgttggatttaagaacttctgtgtaattttgttcaattttactaacacaacgattatccatgtactaaattgtaccctttaaattttaatatttatctaattatatctctaaattttaacatgtaccaaattctaattaactatttgtttagatggggaggaagtattgacttgtggtcctccatagtagggctactaattaaattacattgcacaaaatgtgacaccttgtataaatgaaataaattacttgaactaaatgtttaccctagtaaaaactcatacacttattaattatgtcccacacctaagattactttacttcttcaatgattttatcactttctaaaccaaacatataaactatgtatagagcatatatattttatatatttactcattttttcatattggtgtactggtttttgttagagaaattaaatatttaacatttttttatggaattaaatatgttacatacttacatagccaaacatgcatacagaagaaaagcattgcccctttttttcttatcttcacacaataaatacagaaataaataaataaataaatccccaactacgctacacgtggcaggctctcattgggtgacattgtttagcccccaccggtaaccctttaattgggccataattcctcaaccgtatcattaatatcacctccttcttacgtaaaaacccatctctttcttcacgtaattaccattttcccgattattttgtatagctaaaaacatttttatattattatgtgtcataaaaataaaaataaaatataaaaatcaatataacgaggaattacttcatgtagatatgtgatttttatataaagtgatatatagattttaattgcaatttaagatgttttattggttgctatgtgaattttttgtaaaagtaaaaaaaaaaaagaaattattataaaatattagtattatgtaatattataatt

SEQ ID NO: 55902 - DNA, 1500 bp, Cannabis sativa
  modified_base (231)..(234): a, c, t, g, unknown or other
tactggtaaactttgctaataccctgaaaagaacataacaattatccaaggtgtaagtataccttatcgtcgattatcatgtcagtttaaatccactaaactgacaaattatagaattaaacttttgaacatataattatgattatatttcactgtggtgacgacactataatcatgaataaatgttctgaacttaatagaatttatacattaagtataatcatgaaatannnnatgtgaatcatgcaacataaaacgatttttgattttttattaattagtaaatctgattatattgaaatgagtcttatttagggcagaaagtccaacaaaatgtacattctattcttatttataagaaaatataggaatgatcataaaatagtcaatccaatccaatctcatccaatctaatccgcacgatccaatctaatccaatccacaaagtgtagatatccgcacttgtgtagattggattggattggagaaatctaaaatccacagttgtgtggattgaatgttgattgacatgtaaaagtaatcaatccaatccaatacacacatatttatgtacatttttaaaagaatatatatacaattagtattttaatgtaaaaaatagtaatttaaaattttaatacatataatacaaatatatttcaaaacttattatattaaatgtataattcatttttacatataatttttttttctatatacaatttaaaacaaaattaaatatttctttctacatataatatttttttctgcttttgaatttgttatttgttattttatttattttaatttgttgttggagacataaaataataataatttattttatattgttgtttgttatgtgaaaaaaatgtgttttaataaatattaaaaataatcaaaaataatcgattcaatccgtacttttgtagattagatttaaattgggcagattagattggatctaaaatacaaactccgcacttagtgcagattggatgcactatgagtaaaataatacgaattaaattggatgaacactcctaaaaaaatataatctaaaataaaattaaatatttctttatatatataattttttttcttcttctttgaatttattgttttttattttatttatatttgttgttggatacacaaaacaataataatttttttttatttttttattttgttgtaagttatgtgaaaaaaaatatttttaatagatattaaataattcaatattaaaaagtaataaatataaaataaccgatttaatttctacttttacggattgaatttgagttgctacgtgaatttgattggatctaaaatataaaattcgcacttagtatagattgaatgcactcagaacaaaataggacgaacctctaattttattggccaattttgtgtcaccggaccccagttatatatatttgaataaggagagggaaatttgattttctatacttaaaaaatcttaatattttattctta

SEQ ID NO: 55903 - DNA, 520 bp, Cannabis sativa
tactacctctagctgactatatacacttatatatattatataatataatgcatgaaaatattagttaataatatttgagttagagagaatcgttatccccactaattgtttttgcaaatgttatcttcaagattaattcttattaattaattattttggtgacatgtaataatgccaatcacatggatataagaatttgttgattttgtgtgtgtatatatatataagacattagtagtggacaaatccacacacatacacatcataaagtcaaatgtacatgtatatataagatatttggcagtagtgatgtttagttagtggctccgctttaagtttttattgggtccttacactaatggaacgatagctcttatacacgagtacgctactctggctgcttcctggactgacgagtggccctataaatcaacacaagtgtttctagcatgctttgtcctcactcgcacagtttctgcaaaaactcctagaaggccacctatcctgaaattatcacaga

SEQ ID NO: 55904 - DNA, 893 bp, Cannabis sativa
ccccaaaccgttttcaataaccgcatcaatgtgagaaatagtgtatgatttcacactaacctcccaaggatctttccataaaagagctaatcctccactttttcctttcgcagctacaacgaaacaaccatcataaccaagcacaattctaatcctttccatcgcctcttctttgagtttagtttccgataagaatatcatcccgggatgatgatccttaacatgggaactgagcgtctttaatgtccaggggttcccaagcccctgaacattccaaactagtatattcatggcgctcggggacccagctcctctaggttcgccgctttcaaattcactcctgaggtcaaatccgaaatgaaagaaatgtcccctggtaaaagcttctccctcctctcatctttttcttgtttctcatctgccttattgatcgtttgtcgaggtgtgttcttactggtactcatacagttcttctttgtcacccttttctgtttccttccccctttaggccctgacgatccttcccccatatcattgacaaaattaatgggaatatcaatccattccccttcttccatatttattccttgtttcggccccatcattaaattagagtcatccatatgaagcctctttcctggatgcatactcaaatcatctttctgaattaaggaatcccaattacccgatctttttttattcaccactcctccatcacccggtgtttgtgtttccattagtttatctttgcctttaatgttcagatccctactcccagtatacaacaaagagttaggagtagggacctgattaatggtggaattctgattgttaattctaggcaatctttctggcatctttcctcgactattatcagaattcaagatcatata

SEQ ID NO: 55905 - DNA, 708 bp, Cannabis sativa
ggtttcagaacacctcataaacaagtgaaaattcccgttgaagaagacgaagttgtcgcaaccatttagcgctgaaatcctttttcgtgatgagccaatttttgatttgctccattttctagtttccgaacagaaattggccactttgtattgaagagtttgatcaggtctatgctcatcataaataatcaaaaccctgtacttgaataatttattaccgcaactagtactgtatactacctcctcacacgacaatccatacttcatgggataataacatcgttgagggagtttaggattaggaagaaggaaccattgtcgagtaaatgggttgcagatatagagttttttttttatagtttcccacaagtaacaaatcgttaaaacagccttgtatagtcattaatcccttcctccgaaataaatttcgaataactagtaaatgaggagagttatttttggtaaacaactctatccgtaggacggggccaaaacaaatcacttaaaatttttcgtatatgcatcatgggttggcccatttgaatcagaagcgttgtgggggcgtacttgtttatctttgaagtcgctaagaaattggagactcaatatcagaacaccccagcatttgcagaagaggctacattggattgcgaaccattgatcggagagtcgtatcagtattttcaagagtaaatcatcactcaatcc

SEQ ID NO: 55906 - DNA, 1727 bp, Cannabis sativa
  modified_base (483)..(486): a, c, t, g, unknown or other
  modified_base (551)..(559): a, c, t, g, unknown or other
  modified_base (685)..(690): a, c, t, g, unknown or other
cttctagtttgtcacacgtttcaacgggaagcaagatgactgacatagtataagaaggcaaaacttgagcaactattttattcaacaatgtttataatgtatgggtttgtagttacttatattttgttaataaaatataaatataataaatttttaacatgaatgagaaatttttaaaagaaattaaaaaagcacattatatataaatacatatatatttattaaaattatatgttatatatatataaattaacaacaaattaattagaatattaattatacttaatattttataaaattgaaataaaagattagttagggatattattgtcttttaatatagattttataaagaaaaaatttatttacacccaaacaatttctaaagacacccattttaataatttttattttatacaaaatttatatttttaattgtactaggtttttttttaatcttttcttccaattcatattcttaannnntatacctatcaaataaaaataaactatattttaaaaattgtgacaaaaaaaattaaaataaaaannnnnnnnnaattttcttagaaaaaaaataaaagaatatagacatgagttaaaaaaattatgaaaatgaaatcaaatattgaacttaacataaaataaagtgaaaaaaaattaaaaatattaaaagtaatttttnnnnnntatttaagtttatttttttttttaataatatagtgtatttatcattttatgggggcaaatagaacttcccttttataaataattatgtttagtaatttttttttttttacatatattaataaatgggtccacgattacttagagcattataagtagttagttagggatactattatgtttaatagttagggataattttgaaaaaaaaaaaaaaaatagttagggatatttttatagtaattattatgcattgagtgattttagtttaattactacacttggaaagggtcttcttcaccttctttcgttcttgctccaatcataagtagttttagagaaattgttctatgcccattaaatctagagtaaaaataattaactatatatattaattaacaataaaaaaatagttattcttatatgataaaaaattaaaaaacactaaacatcaataacattaatattgaaatagatctaagatcatatctatttattgacgaaaattatacttcacaattttaatattgtgaacttactatatattttcaacaaaatttgaaatgaatttgtcgatcaagaaaaacaaaagagaataataatataaataattatttaaaatcataggataaagataaatcaataggacaaaagaaaaatatttccttaagtgtagcttaatatccatctctacgtacactcatgtgaattttttcatgaattcatacattatatatattaatgatctatactattaataatataacccaactctaaataccattaaaaactgaaacaaaacccatttttatatgaaaaaaaatgaggtttaagatgatattcataatgtgtaatgagtttgagagtttaagaagaatgtgatatacattcttaattggccatattttggagtatggtatagtgtgagagaaagaataagaaagagagagaacgtgcataaagttttagtttagtggtgagaaagagaatatatatataattttgaaggtggggattttttctaaatttaaaaaaaaaaa

SEQ ID NO: 55907 - DNA, 604 bp, Cannabis sativa
ataccaaataaactttcagcagaatatgctgctggaatgaatgaattcattagtgttgcaagacattctatggactctaatgggatggtgttgtgcccttgttgtcgatgcgtgaataaaaaatcacaatacatgcatgtgataaaattgcatttgatcattcatggatttcttagtagttacacaaggtggtatcaccatggtgagcaaatagaggaagtggaagatgaaggattatttgataccgaggataatgttgaagattcaaatcatgatgatttggatgcaggtcttcatgatgatattggtagtaagtattttgacattggtcctactagtgacttcaatgatgaatctccatttaatgtggatgacaagtatgatgcattgtttgagtcacttcgtaagcctatgtgtaataattgtaaaaaaaattatcttaagtgtgatggtgaagttgatgaatctcaaagtgcttaacaaatggacagataaatcattcgacgatcttttggagtttttgagagagatattgcccgagggtaaaaatttttcaatgaattattaccaaacaaggaagcttctttgtgaggtgggcttgggc

SEQ ID NO: 55908 - DNA, 4936 bp, Cannabis sativa
  modified_base (4708)..(4711): a, c, t, g, unknown or other
taagacatatggtagtttcaatacaccttctccaatgcgacattaaatgcgaggtgactgttcagataagatctgacacctcccagagatgctttgttgttgctttgctatctgggagtatgtgagactcacgtgccttctccgggaggcatgtctaaggctgatccctctggttaaagagacttagctgaattatctaaacgttaaaccctttcagtctacgtgtcatcatccggttggtccacgtattttggacaaaatcagaggcaacaaataaaaattctaaaaaatcacaatcccaacatatttcaattaaaacataaaataaaggtggaaatgagattgtacctcctccatcatcctttcaatttcagggtacctccccagtagtcgacttcaagcaactaaatttggtcacgattcaacaaggtgataaatagttgaatcaatttttggggttggatctttgtgacttatttctggatcaaaactcgaaggatttgggtttcgattaggctagagattagggattaaggcttcggggtgttggagttcttggatttcaaattttcaccttttttgtcgttttaattttttagttttaggttttatttttttatttgtaatttagttaaaaaatttattttttttaaattgttaatttggaaaatattaagaaataagtaaaacataataaaaagagattaaatcataggcgtacacgtgtaccgttagtcatactaacggatagggtatgaacggacaaacacgaaagtccagcttaggtactattaccgctacttttggaggttggtgactaatctgcatcaacgtgaacttttaggagacttttgctgcaaatttccctattaagttgtactaatacttttagagggtaggcccgacacggtatatagacttcctacttttatgttgtatttaacttcatatcgtactttactcaaatcagtctattttttttaaaacaagccaacatgttttcttatacggagttgaattcgtgctctacttttctattttttttacaattaataaaataattactaaattacgaattcatgtggtacactatattacatcgtattgtgttgtatagtatcatattaaaatgtatgttatgtaatatttttatgcaaaactatgtgatgttaacttttatgagcatataaatatataatattagtataaattaacatttgacataatattatataaaaatatgatatataatctaatttaatacaatacaatacaacctaatacgacgtaccaaacaagtcatatatgtattttttttatatatataatttgtcaagaatactcgaggacaatcatataaaaatcattggaatttaatatatagtatatactaataaataatcaaaattttaagtcgcactctacaaataaattaatatatagcttttatcatcaatttagtttatttataatagataaaaagatacttattattataggatttctttttaaaatttgtggtgctttcaggttagtctattcgtgctaacatgtcgtgatttccaggcttatagtgtcatgtcgtgcttaagcaaacattttttgtactatatcgtgccaatctgtagcactgttccatgtcgtgccaaaatctataattttcgtagtttgttatgctcgtgcctctcagacttgtgttatgttaaacaacttaacccgtctctacaatactagatatgtacgtacacacaaagatgagagtgggcagccaccaaaaaaataatattaaatgaatatatatttattgaattaactaattatagctaataactattaataatgactttttttaatggaaatatcaactttattaatcatttacttctgctaccaaataaggtattaaaacagttggaatagattccaaactgaagtgacgatcaaaatacaaaatagaggctctaacaaagttatgagctaccatatcaactgaccgtttaataaataaaacaaaaacacttctcaaatttgcaaacaaaggtttacaactttcaataacatgaccaaacaaggatatcgtagaaatagaacttcttacaactttcacaatacacaaacaatttgtcttaagaatcacattgtgccattattgatcctttattcaactgagagtctcctgaacacctattgcttcggctagatccaattccacaatacacaaactatctctctttagttaatttatagagaaatgcaaataggcattagtggtgtttaacaccatcaagaggtgtcatattattattggtataatcaagtatcaggcatcacataatttaatttagtaactattatgaaatatcgctaactatttataaagttattaactcagaaattcgttaacataagtgagacttgacaattaattctgaatattgatataagtaataaatgttatgtaagtcaatgaggaaaaataaaaaaaaataaaaataaggattttacatggtttatagttaaaatcaacgtagtccacgaaatcgtgttaattctgaatttttgtggatgtgttttacaatttggcagaatttttctcaattagaaaggatggctctccccttttataatgttcttactactatttataggaatagaataatagttatttgatctaatctatactacggttataaaatatggacattctccatgtttcatatacttatctagtaggtgagaatatgaataacctcttgtatatttaaaacataaaacaatcgctgctttgacatggtcacaatcatgctgtagttgagcaggttgacataagacatttctcctcaaaaattttgttgagtgagccatagattgagttatgtttactaaaaagttaacttggtccagatcacgaaccttttaaggtgatcatcacaagcaaagtcaaccaccttttgactgaagcgagccacaacatatctttttaatgaagtttatagccaaattagcattgaccattttaaacccagacaaggaacaagattccttcttatcgtcattaaagtgtgttgagccaggtgaccttcccttgtttatcaacctgatatctgtcatttagagtgagagaatgttcttctttacttgaggtgttcttgaataatacattaatttcttgttggttgcttttcactgttatgacactaatatttagttagtatattatgaggcatacatttaatttcatatcctcttgtgagcgagtagaatttatgtttgttcattaatttctcctatacacatgtcgtgtgactagactcattcattattgctcgaaatatgagtataacaaacacgcacctctaaatagtgctagacaccattagtgtcttgtagaactactctaatttatattacttctcattcatatatagtatctcaagtgcaagtgttcaaatccctacattgacctaataatacttttctctccttcccttaaagccatgaaataaagaaaatccatattaagaatgcggccttaaaaaagaaaagagtgttgatattagtattcagaaccttacactatgtttggtaagaagaaaagaaattaagagagatggaaaaatttgtaaggaaataaaatattgacacagtttttcgtcaactgatctaagaaaattgtaaaaaataagaggactgtaatgaattaatttggctaaataaaaacgcaataaataaaatagacactagggatttataatagttcactcacatgtcgtgatggtaatgggactacgtctacttttgtttttattaattgagtctggcacaccagagttatgttctcaagagtgtgtggacaataatacaaaatagatttctaggtaaaatctgtatcgagacttatgaacacaaggctcatgatatatcaagtattcacaaatctgataaggatggtagttgtaaggttcttgagaacaataaaccaaaaagagcaagaaaagagggtggtctcttgttcttggtaactgtgcaagttaatggtgatttagtaatggaggcttggtgttgacaaagtatgaaggacttaagaaaaagatgaaggaaggaaatctcaaggggctaggtgttctaagaagccgccaaggattttttatctcaagtatttttcgtccccctcaccctaacctattaccatctttatataggcttagggtttgttagtgatcccccacatgtcggggtgtttcactttcaaatctcgtatcttattctcaataatgaattaaaaaagtataaataaatgaatatctacaaatctctcttattcctaggccaatatcctacaaacattgggagaatggttattctcggctagaaatataccaaattggagaggagtgacaagggatgtcacctctcgacttggaattcatgaaattggcaagaagtgttggaaataggtgttttagggtgccacttctcacatatgatgccacatgggttgtggcgtagctctccaatagtccacacttaattacactactcaattcccgaataaagtgtaccagtctgtcttgtgagccaattttgagctttatacttcaaaattgagctatgactatgatacacacttagatccgtcttgaaaagatcttttcaatgaaagttgaaacaagtaattagcataaaaattgagagagagagagagagnnnnagagagagagagagagagttatgcacgttttattgaaggttagcatgtgttgttttgctcaggatgcactgccacatccaaatggcagttctcgtccgtacatgttcttggacccctcgtggtgtgttttgacttattttttatggtgaatcatattttgggggtcctgggaccccaaaaccttatttcaatttttaaaaacctaacaggagaccactaccacca

SEQ ID NO: 55909 - DNA, 572 bp, Cannabis sativa
agtctatactagttgctatgaatacatatgatagatactattcgtgtatataggatttggaatttttttcctgttcggggacaaattctgttatgtattttggtcttggtttatgaatttaagtttagatttgatgtactttgtacttaattttaattttatgtacttgagcttagattgtttgacactaagcccgaaacacattaaatctaaacttaagtgcaaaaataaactaaattgaaagtacataacgggatttgttcccaaactcgaaaaaatccagttaaggacatattttgtttacttgtggtcagcttaagaaggcttacatccaagattatgctctatgatcacactagcaaatgaatcattacacacgaacgaatagtactatatttgtgtgaatgttaactagcataacgtccatcaaagctgttgtcttacaagaaaactataaggcgactcaaatatctagagagaatcttgaatatgagatagaataaattaagtaacagtgaataatgaaaatctagaatgaaggaatatgaactgtcatgacctttttttttttt

SEQ ID NO: 55910 - DNA, 1027 bp, Cannabis sativa
acttagtttttctaggttagagttaaggcctttatataggaagcctaaaagcctaatttataatgaaacccttagatatttacatattaaattgattaaatacaaacgactaaattgccccatgaaagtagatattttccatcggtttgttgggatgttaagggcccaattcgcaggtatcttactgtccacgttttaagctatacatagagtcctgccaagttaatcctagccgcctatagacctacaggggaggtctaaccaaccatgtcctgccaagtcaatcctggtcggccatggtcctgccaggtcaatcctagctggccatgctcttgccaagtcaatcctggccgaccatgctcctaccaagggctgacaggtcatgttccttagccttacaaataggaggccaaccttaggatgtggaggccggccttttgcaagtggaggatagctttgtatactgttttcttgtagatgccaggttcccttggtcgaacagaagctcccttggtccgaaactcactttttggtcggccagcttgtgtacagatcctaaccgccctataagctcaccctagccggcctataggcttctcttggctggacagggatgttagtacaagtccttgagagcttgcttcactactttcagttgctgcttgacgattttactatatcttacatggagatcctattatgctactggcagggctatactccatctatattttgtctttggcttacttgaacatgccacgtcaggtgaataaaatttgggataacaatattaattacatataaaaatcaagatacaaatttctaccaatatatataactaaaaaaattcataaaataaattaaaattaaaaaaaacaaataaatattatgctaaaatttgtacatttgttgtataacatcccgcgaagtgcgaattaatttagtgcgtatatatatactaggtgattgttacgtgtcaagccacgtagtgttcgttttatttaatattttagttttttattttaat

SEQ ID NO: 55911 - DNA, 791 bp, Cannabis sativa
tatatataatagtatgttattgggtcaagaaaagagaaggaaaatggcaaaaggagtttggtttggttgttattaacaaaatattagtcaaagtcgtctttgttggtgttttgttgaccattaattattaaagctttatgtttttcttttcaattcaactttgaggtcacgtgcatgtactaagaaagttactttatctcactctttaacattttctcttctttcattttattatttaacaatatatatagtttttattgattattcaataatattttgtttcactcatcacatgtaaaacaagtttcaaaacaattaaatttattttcagcactagttaaattattcataatttattaaaatatatttataagagattctaaataattaaattatacatgataaaaaaaataaataaatataaaagaattgtaacctgttgttcagctatttctctggcaattgacttaggtttaaagtttattattattgagagtgagtcgagactagtgatcaatgtcctcaatgggaaggagtcccattgagctcttgagaactatatctccttttgtttgagatcaactccttcttttattagttgtaactttatgaatattagtagacattgtaactttgctgctcataatgtggctaagtggacgttttcccaccagatgtatggatgtattccggtctccgcgatctgccggagaacctactatgtaatgaccgtgaggtctaacttttagttttatttaatgaagtaccacgctaattttcaaaaaaaaaaa

SEQ ID NO: 55912 - DNA, 2158 bp, Cannabis sativa
  modified_base (1665)..(1669): a, c, t, g, unknown or other
gtagagttttagtgtctcacaactatagacacttcttaagcttaagtgagttttcttaagtttaagctccattaaataatctttcgattttaaccctcaattttcaccacatgaattcatccatagatgggacaaatgagtaccacattcactctactgacttgttattacctattgaacttaagactagatttttactagtattaagatatgttaccatcaatgaacaaaacactaagggagtttaggtcccatcccttgataattcatgctttaatcttgtactgagattaatctatttgttataatctctcactattgtttccatgtgaatcatgcatgccaaaatatagtattcaatttgtgacacttttctccttaagtaattgagctttgaaaattcaatcattaaagattaattttcacacaaattaagcactaatttagacaccaaacatgatcacctccacacgttcactttttactatcaagataatatcttgattttaaaatataaaaggccactttctctctataatttttcttaaaatcttaaaattatttccacaaaaatttgacatcaaatatgtcaatattttcatatgtgcacatagtcaaacttgattaagaatttaaattcaaaatcaaataaattaatcaataatgtcccatcacattttgattaaatttgtggtccacctccacatttctaccataaagtgtatattagatatcatttttgtgtattttcctcttcaaatgactcttaaggtcactttgaaaataccatttgacatttttagttttctcaacaaaactaatatatcaaactcacatcaccacttacaaaataatgtgattatttttacccattattttgaaattatctcctcaatgagattaactcaaatattacaccaaagttaacaaaattctgatcaattttgttcaccactttgattatttaagattcaaaattgcttctctaattttgttatcttttcataatttttgaatccacattaattcactttatttaaatctaaaattgctcttctaatttatgactcattttacaagtttggatttactacgatcttaattgttcttgcttatgaaaatgtaagtccaataaaagtgtaatctcatagtccacttttcctcatctcaaatatgagatgattatctcttttaattcaataaaagatgtaactttttaaaatccatctttcattatctcataaagtgagatgttcaccaccaaattaaaaaaaaaaaatcaaaattattctttattcacaaaatagatgataataattttcacatagtaataaataataatattattatattattatcaatattattattatactatataactcatatactaatataatatgtatgttactaattaacagctcatatgtaacatacatataatatcaatattaaattcataaatacatatgctacatatctaatatatatatataacatatacacataatatatacattaattttatacaattatatatgttacatacctcacacatatataacatatatatactttaatacacatgcatgatatataatatatacacataatatatattatatatacatgtctcgtataaatacataaaaataattatttctnnnnntttaatctcactaatatatattatatcatgtactctacatatatatattatatatattactcatatatacatgttatatattacatatctaacatacatacatatataaacatgttataaaatttaaatattatattatatactactatatatattaatatgatatatacatatgggtatacttttaatgggttttcttgaccattgaatcacatataatagttgatatttataatcattaattaaatattaaaaaattaatatttcctattttgccacttctttctttgattttgttattctctatattcctaaagtagataaaacaattaatagaaataaaaaatttatatatggaaatgttatttaagaagtaaaacactgtaatatcctgataagcctaatgataaataattagagtttatatttatactatgggttaatcaggtaattagtgggattatgatcttactgttggaaattatttta

SEQ ID NO: 55913 - DNA, 1067 bp, Cannabis sativa
  modified_base (1027)..(1040): a, c, t, g, unknown or other
attaatttgcttaaattataaattttcaatttcatatagtacttataaattatataaatggaataagtattaagtacgtacaatcatagttatctgataattaataattaataatcatcatatgagattttcaagttacgtacgtacgtaaataatatttaaaaatcagtgaaattatacttcatgcataaatatatatagatcattaatttttatttatttatttattttttaaaaaaagcaacgtaaaaaaaaattatttggacctcaaaaatttataaatacatctcatttcaataatttttatctatattattacataaaatatatatctttattaattattatattattttttaattttttttattccgattcatattcttaaaaaaatctaactatagaaaaaattatattttaaatattataacaaagaaattaaaataaaaaaatattataaacattatacatgattaatttaaaaaaatataaaaataaaataagtattacaattagcacaaaacaatgtaagaaattttttttaaaaatattaagagtgatttttaaaaattatttaagcctaacattttattttattttttttttttgaaaattaagcttaacattaaaatggatggtctccaattctgaacacagcaccaaacatggccctaccaaataataaatcactctccaaagatccattgacatcagatttggaaagtacatctttaggattattattgtctaaccactgttggaatatgaaaataataattaatcaatgtatatatatgaacttattataatctttataaaaataaataaataaataaatagggttacaaaaatccttcaattttgggtttcaacaatcagtacgtacccaccatgtcttggattggatgatcacaaaaaaattctatatttttgaggaaaaaaacatgcatgtgatgttggcaaggattatgggggcaaaggggcaaaccctatagttttggtaatatatttttatataaatatatannnnnnnnnnnnnntatatatatatatataaatgagttttg

SEQ ID NO: 55914 - DNA, 790 bp, Cannabis sativa
atgggttaaatggatcaactcaatctatttgaagggtagagacatatggagcttcccaaagactcaagataccagctggtattttaagaagttgctgaagcttcgggatactacagatgaggccaagttgaggcaggccgtgacgggatccaagcttaaagcaaaggtattttacaaccttcttgtagagaagccgaaagtccaatactcaagaggcatttgggacaaccttctgctgccaaaacatagatttgtttattggcaaatcatcaacacccaactgcttactcgtgattttcttagcaagtttctgccgctgcaaagtaccttatgcccggtgtgcgatagtgaagaggaatctcacgagcacattttctatagatgcatcttaactaagcaggtgcaacaagaagtgaactcttggaatggaaactatagttggctgagctcgaacaatgatcttagctacaggtgtgatttcaagaaacatgacctccgaaaatgcctactgaacatggtaacagctgccgtttattatcagatttgggcaaatagaaattgttgtttttttgacttgacttgtgcttctcccaaaagtattagtttggaagttagaaacattgttcaacttagagttttgagtaaagggccctttaaaatgagccatgggaatgcatatttacttaatgtaattcagaattagtagtcctttgcttgtcttggtggctgctggtttagtggctgccgtttgcctagttttttgaataaagtatcctctttttcaaaaaaa

SEQ ID NO: 55915 - DNA, 2113 bp, Cannabis sativa
ccaccatacacaaccgcaagaatacaatcttaacaatatggaaaaaaacccctaaaaaatttataaaatagaaaaaaagcaatttatattaataaaattattagagattagatttatactttaatggacattgagatttaataatttctccaccaaaagtagtggccagagctataactaccacctctaagctcggtttaccctaaaaaaactaaataaaaaacaatcaaactccggggatatgtttttgggtataaaaaatgctagattttaaaagaaagggtaaaaatagatgaaaaatgaagacatgggggaaagaaaggggtggttgggcgagggtttcattggtttgaggagaagaaggtttgttggttattttaggatttgaggaagacaatagctggagagggttatataaagacatatggcgtcagttattacaaaataaccgataccatatgtgttttttcattaaaattaaaaaattacctacggagtcggttattacaaaataactaactccgtagggttttttcattagaataaaaaaaaatatcacctatggagtcagttattacaaaataaccgactctgtagttatttttattaaaattttattaatttgctgaaaaaaaaaaaactgcatctaaaggcttggtttgtagtagtgtactgttatattagcatcgggttttctctctaagtcgtctcctccttttttaggatgtctacaatctctttatttctaggccaaaaataatagttggtaatgctccgaccgaggagtgttgtttgcttgctttagccataagatgcaatgggtctctttttattgtcttcgatgggcatcttctttggttttgggtgttctgcaaagggatggtggtggtgtgtgcttcgtgtaagagtttgctcgaggatggagtcagcacctcactactagaaatatagtgtgtatcttcagttttttatgatacaaaacataaaaggcaaagataagagtatggataaaaagaaagaaaaattttgcggatttatatctttgattattttgaaataacaaaagacataggtcatggaggcatttatcttcggttgttttgacaaccaaagaagtatgagtatctatatcttggattatcaaatacacgtggagggctatgtcttcaattatattgaaataactgataacatagatctataaaattctaatttcagatcttaaagtctcatttcttctttcttttccatcttttctctcaacaaaaaagtgtcactcccatctctcttatacctccattttctccatacaccatcatttccccctcatttttgttttaatcttctagttctctcacccaacatatatacactataaaaattaatttattataggatatgagggtagatatgtgagtttaagccgatagtttttaggtttcaagatgttgtcttttaacttgcattgaggtatacatcactttattatataccttagcttacattggatttttttagtgagtataatatagggttggatattgcggtggtggtaggaaaatccacagtaattgttggaaaatcaatggcgatgctccaaaatatagtggtgttaaatggtgttgattaaaaaataatgttgtttaagaatttttattttcgggttttttaagtttggggctcaacggcggcagtgttaacgatggcttcgagttaggtcccccattcatcttctatgttttcgggacctatgtcttcgcctcaattatcttcgatagggaaaacttttttaaccgaagataaacaaacttaaaatgcaaagagaaagcctatttgtctagcattgcctcttggctttggcatgtagttggtgaagcaacaagattttgttaggccttgagggtttggaggtttttctcaatccttggggtattgggatggggttggtggaggtgtatgtttgactctattagatcatggatttgggttgcaagactaggttccatagtaatttttatgtctgccctccctcccttgaggtagtgggatgtgttggaatatattttactaggatttagatttactaacaagtatgtttttaacatcctaaaca

SEQ ID NO: 55916 - DNA, 1086 bp, Cannabis sativa
tgggacatctggggtattttgtagtcgatgtgcgatctgattaatgtattttggaaaatttattaaaaaaagtttagaacggaataccgacctttgtaaataattatgtaatgtttataaagtttcatagttaatactaaagttttaatttgacacaatttttgagaaaaatctttgattagcaaagatatatagcatcgcaattgaaaaatcattgtagcgtgccttaacattagggcgttacacaatagtagaatgtattttagtatcaccatatcctaattcaattactattttaagcaattcattatattactctattttatttgttcccttgggtcactgggactctaatatatgcgtgcagtactatggtgttagaatttttcagattttgggttagtggtgatggttgagatttttagatcaggcattatggtagtgtgttggttttagatctgggtgtagttggtcattttgccgtggtgtggtgaaggtggttctcgtggtcgtcagaggttgtggtggtgtggtagttgtggtttatcttatggtggtatcaacttttcgatttgtggcagttattttaattattttttattttattttttgaatttttacaatttttgttgtatagctttagcaaggcaattataaatattaattattattatttttttatttatttttatgatcaattgtttttatattattactatggtataatcccgtttcttttatttgatggaataataattgaaaattagtatgatttgcattatttgatttatttatgaaatattttatgattatttactttttcgcatgggtgagcaacagtcaatttggtcggttttttacacaaaaaaaaaatccgaaattcggttttcggttttcatggttataattcgaaaatcgaccgaccattatacaaatgtaaaaaaaaaaaaccgaccgttttaatccacggtttggtcggtttaaactgaccaaatcgaactttattttttaaaaaaaaaataatttttttatttttttataattatttgaaaactaaaaaaattagagtattgtatcaaatatcat

SEQ ID NO: 55917 - DNA, 1038 bp, Cannabis sativa
ttaagttttctttgtcttattttcaattaagttcaagttttagttttgtgattgattttagttttgaattgtgttttttttttgacattatcactaacttgttttgacctcaccacaaacttattagctaattttttgtttaaagaaaaagttaatggagggaaatggtatttatgttttaaattaattatatgattttttttgctggaaaacataacttcattaaaccgaaactaaaagtttagtgagcacatggggactcacttcccaaaaccgaagcaaaccattacaaacatgagacaaaccccatctcgcatgccatattattaatctgagaagtccaacaaacccccacattcccatgctcagccaaagataggaccctattgtaagtatagtgcagcatccaatgcggagatctcctctcaaataacgccttcaccagagtagagagttccaacatcaactcccagctgagccgccatattgaaagcaaaccccagagcttcaagttccccatgcagaggagacttaaccaccactttagcagctgctatagcaaaaatagagcctgaaacatcataaataacagctgcaacaacacccccatcccatcagtagccgaagcaaaatcaacaaaacatttcatccttgcgggtctcggcagcccccagcgagtagcacagatccctcttggctgcggatcatcattcccttcctgcaatcttatgtgcttatgctccctgaaccccttctttatagattttgttacctcagctaacaccaaagtccctttgttatggaaaatactattcctaacttgccacaatttatggtacaagaaagcaccataaagtaagaaatcttcaaacccgctactatcaaggttgagagaagaaggatccaaaagccaagttaacatatccctgccattctgcactcgaactcaaaaatgatcagcttctcaatgtttcttcgtattattattattactaatttgtatatgattcttttgctttatttatattattattattt

SEQ ID NO: 55918 - DNA, 837 bp, Cannabis sativa
ttgattttctaagtatagaaaatcaaatttcccttgagagaaatagctaactgatttattttttttttaccttcttcccaaatttcaaatctaattattttaggactggaactagattttaaaaatggaattttgaggcaaatactttctaaatatctgattaggtaaggaaaatttaaatttatatgctttatatataaaaatatcatggtcccaacttaaatattatgctttatatgctttaagcgaccatgacattgttgtagggtttttttttattttacatttaaaagtagttttttttttaatacggaaacatacggagcaatttaaatcgcaaccctaattcatatctcaatccacgcagtaacaactattagagtaactcaaattttataattaaaaataaaaaaagttaaaaaaaaataatatatacccatatatagaacacttgttaatgagtaatacccattaatgggtactaaaaaaattaataatgtaacaattcaataaccttttatagcaagttctcaataatattttttttaaaaaaattatatttattttttttataaaattggaaataataattacaaccaatagtatagaaaaattataaattatttttagaaactaaataaaattactattttattattttataaaattgtgaggacattaatcatttattattgtaaaacttatatgtatattaatgtgttaattttattaggagaataagagtttgattgtggaatccaattgtcttaatattattcatactcttaaaaatgaaatactacaatacttgtgagttcttacttaggtatcattgtt

SEQ ID NO: 55919 - DNA, 2048 bp, Cannabis sativa
  modified_base (1670)..(1672): a, c, t, g, unknown or other
  modified_base (1890)..(1896): a, c, t, g, unknown or other
  modified_base (1975)..(1975): a, c, t, g, unknown or other
ttgtttgattgaaaccttcgtctgatgcaaccagcgcgcaactacgcagcaaccaccctacaaccatcgtcttattgtgtaagggatagtgtaaatgtcattttggtaattaaaatcacataaaatgtataaatattgtccatacctaatggatgtatttcaaaaaattatttataaaagtaaaattattttaaatattcaaaaaaaaaaataaaaaataaaactaaattaaataaaaaaaatcaaaacaaacctaaatctaactacttcgtctatctcggcaccgacggacaacaccaagacccttcattgccctgaattttcgacttctctcgagccttttttgaagaaccaccacgagcatcaaggaacctcaaaaattttggttctccctcgagttctctccattctccctctctttctcaacttctctctctctctctctctctgttttctctactcagagccagatagagcaactctggcagtctatggccatcgagttctctccattccctctctcttctctttctcaacctctctatgctcagagccaaacgaaacgaatccaaatttcaccaccttgaaaacccctagatctagatctttgctgctctttctctctttcctgagacccttttctttgtttctctctgtgtgaactttgacatagatctagctgaggtattggcagagatctcagcatcgacgggagtcacgggatctatggtaaaaaaatttaaagaataagaaaataaagatttctaagtaactgaagaaatatgaataattttgggggatacttaaagctttattttttaatttcgagatatgagtgcagtcggttaggttttattttatattagatgtatatttttaccaaattttatttctcaccattaagattctttttatgaattttggtatataaatttgaattttattggtgtattttgttttattttgctgagtgatgaaattttggattctgtttgatgctagtgcatgttcaagggagaacaagtaaggaactttagggaagaacattgttggaaggggttagggaagaggattcactactacaaaaagggatttttgcgtcagtcaatgcttcggtcaaactggttgaccaatgcaaaagtcaaccctcacttttttgctttagttgttaattaacgccaataataactaatttgtgtcagttaatactctgacactaaaacattaattgatgctgatttttttttaaaaaaaatatgtgggcttgaatttgtgtcggttttgctcagacgcatcatttagcgtcagttgaagggttttgcatcggttataaactgacgcaaaatttgcgtcagttcataaccgacgctaaattacttagaaaacccagaattaggctttggcccatcttaaaaaaaccctacttatatatatcccaacttatataaaaaaaccctaattttttttcatacacacacactctctctctctctctctctctctatgatggattgccaatgatggagcccaaacgacgaaggtcgccgcttgcaccactagcttggacagacctcgtgcagccaccccatcacggtaatatctctctctctctttctcccttattatctatctctatttatttttcttttatgatctctctctctctctcnnnctctctctctctctctctttcgatctctcttcttctcatttgatgttagttattccttagggttgcggtggtgtggttgccatgggtggtggtgtggtggtggcgtgcgatgttggtggtgcagtggtggttgtgtagtggtgtgttggaatattttataaggatctagatttactaacaagtatgttgattaatatcctaaatatgaattctctaannnnnnnaaataaacacataagggtttaagtaaatcttacattgattgcagcaaaataatatgactccttccattcaagatctctngcccttgattcctttctgtagaatagcattatgaaaatctgaacctggatctctttctctccttcgggtttgg

SEQ ID NO: 55920 - DNA, 1838 bp, Cannabis sativa
ttcagctgtggtgtgtccgtgatcgccatgaaattcagaccattcggtcatatctttttgagcttccggcttttgaaccttcccaggccacttgactttatttcccatgcctttcattatagcaaccacttcaacagggtctattgttagagtatactctgggattggtgctttatcttgatagcctctaaacttttgggatgattgtcccctttcttggtaatcacgtgatcgttggggcggagctcttccactgccttgaaatgatctagatctgttggtgggtatggttcaacatgataggatagcttacgctctactcgtcttggcccccgattctcacgagaacttaagtagttggagatcggttgcctgttcgattcatcttcctcccattttatttgagcccatgctttggcaagaacatcctccatagtcctgcaagggtatttagttaattctttatataggtcagattctaccagaaggcctttttggaaggctatgacggctgtgtccacattgtaggctatgattgacaccttctcgacattgaaccttgctacatagtctcttagcgattcgtcccttctttgtctaattctatagaggtcatctgatagcttctccagcttcctgatactagcaaatagctctacaaaaatatcagttaattgagcaaaagaagcaatagaattattagacaagtttgggtaccactgaagggctgggccgactagacgagacccaaaccctttacacatacacgcctcgcgtaactcgcaaagtattatggcagtgaacatcctctgcttgtagctaactatgtggtcgttgggatcagtctttccatcatacattttcatcaatgggaacacaaacttctttggcatttcgaccaaggcaatggcatctacaaagggtgaatctgcaaagctgctaggtaggctctttttgattggagttggcacccctgagattctttggatcatggcctccacgccttccagttttcgtacaattatttgttcaatcaactcctcttgggtagatgcaacattcactcatgcattcacaatagaaggtgttaaatcaagtattgcattatttgctctagtaaaggattgttggtttagagagccttcaggagcagtcaggttggtcaagttgactgctggaaggatggttggcgaattgactgctggaggaatggctgacgaattgactgctggaggaatggctgatgaattgactgctagaggaatgactgatgaattgactgctgaacccatattctgattgattgtgggtgtttgttgtccgaccgtgacgttagttacccctgttgttgatggttgtccggtcacttggcttgatcctcctattggggtatcgtcaagtgattgcattggatcaattggaactttgactctttttcgactattgtctggtgttgccatcgaagcagtcaatgactcaagctggacctttagtgcgacattctccttcttgaacgctgcattttctctttccactgcttgagtgtgctccaagttttctttcatttgagctgtgagagtcgcgagttgttcacggaagctagtcagttcctcattgatctctccttcctccatgtgctctgccattgttcttgtgtgggttgactgaatgataaaggtcgaaacactttgctcgattgcagcttgttagggccccacggtggacgctaaattgtagatggtaaaatccacaatcaattgaagatgatcgtatgcgggcaccgacaacctgtagaacaaagaagagagtaaccgggaaaccttgggacaccgggattg

SEQ ID NO: 55921 - DNA, 1366 bp, Cannabis sativa
cctggtaaaagatattccaacaagtttgacccctcttccgtcaaaaaggtttggtcaaggaccttttaaaatacttcaaaaaatttttatttttgaagtaataggttggcattgcatcatgtatttctagattaattctggttgatcatacatatatgcccctcaagtaattttaaagggtttacgctttataattacttgttgaaaaaaaaatgattattttattcacaactgaagtttaaaatattacattagcgatgcgatttacaattattaatctcatgagaacctcctcaattaaattgtttattttatcaatcttccaggagcatctggttttgatagaacgcgttttgatgttcagggtcaatccctaacatattcccacaattgtttcaatatccagggtcgagccttgtcatatcccggggttccaggtgaattaatcctggttttagttgtttgtctttaactgcttatggttgacgacccacttttcctgtagcagcttgatacggcaatcatagcgaggcggtatttacttacttcgcaatacttttatgtatttgctttaccagattaactgccccttgtcttcttgtgacgcgttccctctcaagataactgaggtatcccttcctcctgcagaggaatgttatgatccttggtcgcttgagttactgggtagatcgggctgatcatgggcattgtcctgcccctttacatattgttaaaagtgccatcgcgctatgagaccttctatctcatccttcaactggtgacactcttccgtggcatgtccaatatctccatggtattcacaccgttttgttgggtcccttttacgtctcgcatttctcataggttttggctcgctaaaatcgacttcctgtacatgtgcgaggtagatattttctcaagtttcattaagctcggtgtagtcaacataaaggggtatacatttgtcgtgtttcttctgtttcttatccattggatagccttttggaatcgtctttcctctttgatcttgaagcttctgactcgaattcttcaacagaatcatacaccgattgctttcctggtcccctaacttgatgtctcctgaacttattctccagctcgtctattcgcaaatggaacaaatccctttgctttggaccaagttgttgacgaagatcaggttttttcaagttcaattgttctcgtatgtcccaccaattgtgacagctgtcagatcttgctcttcctatatactgaattatgactttttgatcatcattgcgagtgttctcttctcctcgcattgatcgattatgaggtactatatgcctcacggtagccctcgcctcttctcgttctgctcttc

SEQ ID NO: 55922 - DNA, 1001 bp, Cannabis sativa
  modified_base (412)..(422): a, c, t, g, unknown or other
ttttttttgtttgtaaaaaaaaaaaatctttttaatacttggcccctccttaaagtggtgccaagttccgtcactggcgctaggaaaaccttattatgtggcagctacaagcgccttttaattttctaacgccaaaatgcgctggcaaaaatccatctttagcaaaagtatcttttgatagatagatttttgaattttgtcatgcgcagtaatgcgcctattttcactacaaaaaagtttacttttagttataacgaaatttgtgactaaaagtaaaaaaattgtgacaaattataaaatataattcctatgttgtgactaaaaagtttgtggtcaaaggtaataatcgtgaaaattacaattttttgtgactaaatgtgtttttagtctcaatatttgttgtgactaaaannnnnnnnnnnacaacttgtatctaaatactatgctttagtcataagtaactttttgttgtgactaaaagtcacaagtcacaaaaaatttatgttgtgactaaaagattgttactaaaggtggttttttttttgtggtgaaaactttgtaatattgttgatgcggtttttcatcggttgatctaaaaatatcgtataaaataagagggatgtgatgaactcatttggctaaataaaactgcaataaatagaaaaagacaccagggatttatagtagtcacaccccatgtcgcgatggtaatggtactatgtctactttatttgtattaattggatctgatacaccagagttatgttctcaaaagtgtgtggataactgtacaaaagagatctttaggtgaaatctgtattgagacttatgaacacaagactcacatgagacccaacattcataaacctgataaggatggtggttgtaatgttctttagaataataaaccaatagacacaagaaatagaggatggtctctccttcctggtaaatgtgtatatcaatggtgattgtatgaaggcttggtgtcgtactagtaa

SEQ ID NO: 55923 - DNA, 879 bp, Cannabis sativa
tgtgttgttgattggagagatattaaaatgtaaaatatatcttatatataaaagctgtcttaaatttaatttagaacagttggatagggttatggagttagagtcagctcaactcatcttaaatggtatcagctcaagcagtcatgacataacataacccattactacaaaaatttgggttgggttgggttgggttggcatggttgtatgttttcaattttgtgcgccctaattcgtgcaagagcttttctgcccccgtcaacggcgacccactgcccctcctaacttcctgggtgactccacttccagatctccctctcctctgccatcaaccatttacggtatcacttttggccttttgggtttgaagtttgattctgttgtagatttgtttattttttctcatgtaaaatctactttttgatttgtgtatgtcgttgttgggggtggcaatggaagctctcttttattttaaagattttaagacgattacaattcattcatctcttaaacactttgtttttaccgtgtgcgaaaagatattaatcatctttatctgttattaattgtttcatgatcatataggaaagccataccaatagcatggtatttgggcctatcttcgtttgaaataatatttggccaaagactttcttctgttcttttgtgcactgcctataggaatgtcataccacagccaactgtttagctaagttggcatttactttacaagacactagtctagtggccagggatccctctgtatctgggcttgatgctattccaatttgtgtattctttaatcttatgagttaataaaatcttttcttcaaataaaatattaataaattaaaaagaactttactgcaatgtttgcat

SEQ ID NO: 55924 - DNA, 663 bp, Cannabis sativa
taatataggttgtagacttattacatttttttatcttttcttaaaaaatatattactcaatgacaatataatggtagacattagagcacaaaatgttacttcatcgatctctaagtccatatatatacaatatccatacgacagaactcaccatgaaggacagaaccatcaaacaaataaatttcatccaacacttctaatttataaagtgacgttaaattcataacacaaatatttacaccatttgtgattctgtgaactgacccaaatgataggattgtgtctggcatcagttaattgcataacaaacaaggaatgcttttctattttcattttaatttttaataattataagggtatctttaaattattttttaatgtgtatatactttacagattataaatataaataatagaatttcgcacctcatggcattttgttatgagggaaatctcataaaatataaatataccaactaaattaaagtttaaaatgtaatcgtattttaaaaaatacataacttaattattttataaaaaggcaatgtatgattttatattttacaaatatacagtgttatttttttttcttttctttcttggaatggaaattgggaatagtgtaagtcttctacacattaaaatatagagaaatgctaaagg

SEQ ID NO: 55925 - DNA, 621 bp, Cannabis sativa
  modified_base (486)..(494): a, c, t, g, unknown or other
  modified_base (584)..(596): a, c, t, g, unknown or other
tattgaaatctctacatataataacagaaaattaccttatggaaaaattttaagagtttacttttttatggaaaaataaataaagctaaatggttatgggttttttttattttttttacatttatatggtttttttatgccatatttttgtaaaaaaaaagtagaaatctcatatttgtaaaacaacaataagttttgctggaaaatccgccagaaaagtcaccggtaccgaaaaaatcatggtagccgaaaaagtcaatggaaaagtcaacatggccggaaagtcaacggaaaagtcaacgtcgccaaaaaagtcaacagaaaagtcatcgttgctggaaaagtcactaaagtaaatgtctcatatataactaaaaatataacaggttatatgaataaaaactaataactcaaacccgttataattgaaatataatcggttctgtaaaataatacataaatataaataacataaaataactcaannnnnnnnnaattaaaatataaccgattctataaaagtgttataacgaataaaaacaaataacacgaaagaactcaaactggttataactaaaatagannnnnnnnnnnnncataatgaatacaaacaagtaacac

SEQ ID NO: 55926 - DNA, 718 bp, Cannabis sativa
agatttttttataaaatatgattatttaaagaaagtactatagtatgaagtagtttgacagtgagtagtaaaaaaatgtaaaagagaaaataaaataaaataagtgtttgtaactttttttttaaaaaaaattaaaataaaattttgtgaaagagtgaaaaaataaaaaataagataaacatagtataaatataaaaaaatcttttatcacagtataaatataaaaatttggaaaaaatttatatagtattttgtgtaaataattcttttttttttttttgaaaataaggcattaaatagatagaaaattagaccttgcggtcattacaaaggattgacacaggtatgcaggatgactccataacacctgtaaagttctgggcgaaggcccatctagccacattattagcaacaaaattacaaacacgggacataaaagaaaagttacaagaaagaaattacataaaaatacataattatcaatattctaaatatagtgcaaccccttcagcgctttgataaccacgtttgaatcactctctactaagacataatcgtgtttcctgagtctctacaaattgaagatgtattaaaaaggaattatcataaatacacaaaaacaacaataaaattataaaaatacagttgtacaaaattttacatattttttataatatgaactattttatttacaaaaaatacatttttagtaaaaata

SEQ ID NO: 55927 - DNA, 1744 bp, Cannabis sativa
  modified_base (27)..(27): a, c, t, g, unknown or other
actaatcagattgtaaagagttttatntagggcataaaacctaacacatgtatcaaactttcctaaaggagaaggaaagtgtgtgacaaggcaagttctaactcgggacttacaagatctcgagatcacagtcgatctacgtgagggggtaataggactcaccacagtaatgatcaagagagtatgagaacaactaggagccttcaatttgagagttactcagatacaaggtcaacgagcaactatgatcgaagatgaccagatcttcgtgaacaattgaatcgaaggaagcctgatttacgcaaacaactcaattccaatcaaaagcaagtggatccgatccaattgcgaatcagtgagttagaaaacaaaatcaagaaatagcaagatgggaaactgcctgattacgactcagatgaggagctcgaacctttccatccaatcattatgagcactaaatttccctaaggatttaaaaccctcacgactcctcatacgatgagactatggattcggtcgctcacctcaacaatttcaatactatttttctctagaactgtcaaagaatgctaagattgaggaacctccaattgtgttttcgatggaagacacaaagcacgtgaggtaccctacacgtcgacccactcgtgattacaatccagctcgccaataagagaaaaaaagggtgttggtggataatggaagttcagtaaatatcctttacaaggatacactgaagaaaatgggattgcaaaatgggaagttaaaaccttgcatggtggatttgtgaggattcactgaggctagtgtcgccagtcaaggaatcattgaactcacgttaactctgggcgagccacctatatccacaacattgatggaagattctctagttgttgacttgccctcggcctacagcattttgttgggtcatcctgcactaattgggctagggtagttagctcaattaaacactagcaggagtaggtgtagtgcgaggtgaccaactactggctcgggaatgctatcgcatagagctacaaaataaaaaaaaatgaccatcagttaatggcagttataactaaggaaggcgagaaacatgacgagggtctagatcctcgagttcaagatgaaaagaacctgttgaaacctatcaaggaattggaagaagttattttagatccagaaaatcccacaaagtgtgtattcattgggaaaaatttggatgaaaaactaaaatagcaactaataagttttttgaaggcaaatcaggatcaattggcctagagccattcagatatgatagggattgaacctaaagttatttgtcaccacctgaatatcgacccaaattacccagctaagagacagaaaagacggcccttggattctgaaagacaaggggcagtcaaagaggaagtggataagttgttgactaacaactttatacgcgaggcattctatccctcgtggatatctaatcgtgtccttgtccgaaaaccaaatggaacttggagaacttgtatcaacttttcagttctaaacaaagcatgtccaaaggattgctttccactactaaggatcgaccagttagtggatgcaactgctggacatgagttactgacgttcatagacgcatattcgggatatagctagattaaaatgcatgtccttgatcaagagcatacaagtttcataaccaacatgggacattattgttataaagtcatgccttttggtttgaaga

SEQ ID NO: 55928 - DNA, 704 bp, Cannabis sativa
  modified_base (654)..(675): a, c, t, g, unknown or other
caaactcacccatcatagaccccctcacccaaaccagccctcgcaccctatgattacaagggccaaggccggtatctgtaagcctcgggtgttcactgctttctcaccatctcctttggctctcattatcgagcttgaacccgattgtgtaaggactgccatagccaatccttgctggaagtctgccatggataatgagtattttgccttaaagaaaaacaacacacggattctcgtaccgcgccaaccaggtatgagtgttgttgacaaccgttggctctttcgtgtcaaactcaatcgagatggcacggttcaaaggtttaaggcgcgccttgttgctaaaggtttccaacaacaacctggtgttgatttcttcgaaaccttcagcccggtgttcaaaagttccacaattcgtgtcatccttactctggctgcgacaaataattgggatatacaagtggacattgataatgccttccttaatggtgtcctcattgaagatgtctacatggaacaacctttcggctatgtaagcaagacacaccctaatcatgtatgcacacttcaaaaggccttgtatggccttcggcaggcacttcgggcatggtttgactgtctcaaacaagtgttgttttgtaacaccctaactatctnnnnnnnnnnnnnnnnnnnnnnaacgtactgtgcagctcgttgataatcaa

SEQ ID NO: 55929 - DNA, 876 bp, Cannabis sativa
agaagaaggcgagaagagagaagaggacctagatcctagaatccaagacgagaatagccagttaaaaccaatcaatcgaagagctggaagaaattattttagatccaaacaatcccactaaatttgtgtttattgggaagaatttggatgaaaaactaaaatagcagttaattaacttttcgaaggcaaaccaggatcaattcgcctggagccattcagacatgatagggattgaccctaaagtgatctttcatcatttgaatatcgaccccagttatctagcaaaaagaaaaacggtgacccctaaacttcgaaagacaaggggcactaaaagaagaggttgataaattattgatcaatgactttatacacgaggccttttacccatcgtggatttcaaatccagttcttgtcccgaaaccaaacggcacatgaagaacttgtatcgatttttcagatttgaataaggcatgtccaaaagattatttcccaccaccaaggattgagcaagtggatgcaactgcaggacacgagctaatgacatttatggacgcatattttggacataaccagatcaaaatgaatgtccctgatcaagaacatgcaagttttgtaattaatatgggacttcattgttataaagtcatgtcatttggtttaaaaaaatactagagtgacgtatcaatgactagtggatgggatgttcaaaaaacatattgggcaaaatatggagctctatgtcgacgatatgctggtgagtcaataaaaagtgaaggtcgcgcaaaggacctcgcagaatgctttgggatacttcgaaaatataatatgaagcttaacccgaagaagtgctcttttggagtttcctcaagaaagttt

SEQ ID NO: 55930 - DNA, 764 bp, Cannabis sativa
caatattacatttattgaagaaaaatgagtagtgttatatcaacaccatctggggtataaattactatatatatatttatatcactgcaatttatgaagtatatatatatatatggatttttcactactaggccaaagaaggaataataaatattgacattattttatatattttacgatgaataaagtttagggacttattactaatttgttgggggtatgtagttataaatatgtaatgtcattacacatggattaatttgaatggaatgataaaaaaatttgagttttttattattgaagattaattctgtctgaaagagtttataaattacttgccctattagtggagagcattagtgtactcttaaagataagataaatctttaattgaaaaattcttaaatttcgtttcattttattcataattttttcttgtgaaataattttgcatatatgtaaacatattactaatgaatttctaggccacatgtatttggtctagtagtgatacccaatacttaataatttaagagtgaaggatttgatttaaatttaagacaatataagttagaatgtatttgtatatatattaatgacaatataagttgaatgtatttgtatatatattaatgtagtaattttgcaggttttgattgaaacccactatccgaaccaggtggctgtatgagattattagggtgtttagcatttgatcggctaattttgtggagtcacgtgactcggattgtgagtttctatca

SEQ ID NO: 55931 - DNA, 1874 bp, Cannabis sativa
gaacaagacttgggtagttgtgccaaagccagagaacaagaagattgtggagtgcaaatggattcttaaggtgaaagagagaatcaatgagaatgaacctatgaggttcaaagttaggctagtggctaaaggctttacttaggtggaaggtatagactacactgaaatcttttcacctgtggcaaagtacaagacaatatggttgatgttgtccttgacagctcaaatggagttcaagttgaacagcttaatgttaagactgcttttgtaaatggattcttagaagaagagatctatatgaagcaaccacctgagtttcaggtggaaggtaaaggagatgagctagtatgcaagcttaatagatctttatatggcttgaaacagtccccaatacaatggaataagagatttgatacgtatatgcatcaaattgggttcaaacgatccgcgtacaatcacttcttatatttcaagaatctagagcaatctacagtcgtgttcttattgctctatgtggatgatatgctcatcatgagcaaagataaatacgtgatcaaaagtatcaaagccaagctcaaaagacaatttgagatgaaagagcttggatatattcaaaatatactcggtatcaaagtctcacggaaccagaaggaagggactattaggttaaagcagtctgcctacatcaagaaaattatttggaagctcaatatggaagatggaaagaggacattcattccgttagggggtcagtttgttttgtcaaatgaacaatatcctaatagtatgaaagaaaaaaaaaagatgaaggatgtaccttatgttgtggttctaggatggttaatgtacgtgatggtgagcacgagaccagacatagctcacactttaagcatcctaagtcgattaatgtccaattcaagcattgaacattggaaggcccttaaatggttatagagatatttatagggcacttgggattatggtctggcctatgagaaagcaaaaagagaattggagttaaaagggttcgtgaacacaaactacgcctcgaatagagataccaaaaaatcaaccacttcctatattttcttgacaaaccagaatggtataagctggaaggctcagttacagtccgtggttgctctttccaccacggaagcataattcatggcaactacgaaagcttttaaggaagcattatggcttcgctgaatactttatgagttgaaacaaaccaaagggggagtgaccgtgtattcagatagccaatcatcaatttatctttgtaagaactcagtttatcataaaaataacaaacatacagatatacggctttacaagatcagagagaagatagaagaagggttgattgatttagagaaggccaggatagaagataatcctgataatgttggaactaaggtcttaaacttaaacaagttcaagaattggttgaacttgatcaatctcagaagttagtatactgagattcctagaacaccaaccaatgatggctgcattctttcttcatcatcgtcattcttttaatttgaagtaactaggtagaatttgtggtatagttccttcaaatgaaaaggtctccaaaagtcattcctagaaagttaggcgtctccaggatgttgttcccagacaactaacttgtccatcccggaaggagtcttgtggaatgatagttgagtctgaaagagagtccacggatgactatcatatccactatgggttcagtctttgggatagctagccctcctccgaaaaggagttctgggcagctagttattctccctagaaggcaattccagatagtcaagtccagctggttcaatccttcgggaagcttcgtcagcgagtgcctt

SEQ ID NO: 55932 - DNA, 880 bp, Cannabis sativa
tgcatgctcctgttgagcttgtgtttccccttcaaaagtttaagggattcatgatctgcgtgaatcacaaattctttgggccacaaatagtgttcccatgtttctaaagctcgcaccaaggcatacaactctttatcataggtggggtaattaagtgcagccccacctagcttttcactaaagtatggaaggggtctcccttcctgcataagaacagtgcaatacctataccagaagcatcaccttcaatttcaaatgtgttagaaaaattaggtaaaacgatactggggcgtaaataagcttgtgtttaagcagttaaaatgcctcctcttgtgctacaccccattcaaaagtaacattctttttgataacttctggaagcggtgctgcgatggtgctgaaatctttcacaaacctcttgtaaaaactagcaaggccatgaaaacttcgaacatgacctatagttgagggggctgaccgctcttcgatggccttcatcttttcttcatcaacctcaaaacctgtagcactcacaacaaatcctaggaaaataatcctattggtacaaaaagtgcatttactatagtttctgttttcgaagtacatccaaaactgattgcaaatgtgaagcatgatcatgcaaactcttactataaattagaatgtcatcaaaatacacaacaacatattttccaatgaaagcacgcaaaacatgattcatgaatcgcgtgaaagtgctaggtgcattagttagtccagaaggcatgactaaccattcatagaatccatgtttagttataaaagaacttttccactcttctccttctttcatacgtatttgattttacccactcttaagatcaatcttagaaaacacaca

SEQ ID NO: 55933 - DNA, 2705 bp, Cannabis sativa
attgaaactcaatcacaaaatagtgaacaaaacaatgtcctttcttctactttattttcctattttgctatagaagcagctataacaacaatacttcaaatcatatagaaaaaggaaaatatacagcaccttacatgtacaatataaatttacctgttttacaactctcccattcatttattaaagtatctaggatgtgatcgaaccagcacccatcaagttcttcctctaggtgttggcgagactgctcaaatgaagtctgtcaaaagaaacatataaacaatgatacttctgctctgcaaatgagactaaccacatatgtttaagagacatcatttctttcttcttgttctttatttcattgtctttttactagagctgaatgaaattagttgaatcatacattgaatagctgaaaattgtgatcacaaaaccattcctctcgatcaatcagtagcttccgcaagaaccaccctgtatgccattttactactgcagataatggtgtctggctagctaaaaccttcaataatgcgtttaaaatctgcaacatgagaattcacttcatcatgactcctaaattcattcgaaaccagagaaaaaaaaatgcaatattattaaatagttatgaaagcatataagtcagagaagtccaaagggaaaaattgaaatgaatcccccatttgaataaagaaaattatcgatactagagagagaagacacaattacccatcacacagtatcgatacctgatccaaaaatcttgtaatgaaatttttatcagcttcatgcattccatttaatccaatttttggaaagatcgaacaatcaagatctaacaaatgcattaaaaacaattataatgcgtgataaaaattactcaaaaaatagcttacaaatattatcattttgagaattgatacctttaatttcagacacaataagcaataaaaacaatgatgctaactgcagagtctgattctcggaaaagaaaaatgcacttaatccacccctgcaccaaggaaagttggttcttagtgaaataaataaaaatatcagtctacacttcatgaaataaatgaaaacaccaacgacctaaaaggtacttgtccataaaatgatagaaacataagagctcagatcaagtcacacgatctcaaaaactccatgaagactaccaggataggtgaaattttctcaaaactgagttaatcatagatacttgttggtaccgtcacaactaacatataaatatcacatcaaaaaaattaacaaccttttatcacagaaactatcatgacagggagggtagttgatgcttttttcttcattctcagaaacagaatatgacttttcttccattttatcctgatgcttagaaaatgattcagtaaaatgattggaagttgcaatgtctttgatagcatcttgatcacttgaatcgaagtaaagatataaaataacaccagcaacaggatccatcatgccttttccatcaataacttgaagaagacgtgaaacaagatatagtgaagttactccagataaatttgaaacctgaggtgtaaatggaatttagtaataagtaaaggtgaagagatgagataaagtacaaacaaacaaatagaagagacaatgtctcacattccttttccttgactgcagcaatggttgcaatataggaaggactagtaagctgagaagattttcagcaactaatctactcaaacgagattctccaatattaagaatatccttaagataataaagattgtctgcaattttatcggcctgcaaaaacagttgttttcgtttatgctcaatgcaggtatccctggacaaagataagagtttcagcttacaaattgtgtaacactatcacaatcatagactgaaataataaaaagaaagaaaaatattgcatactctgaagctcggacaaggaaatccaggtgagagcattgttcacttaatcttataaccaagtccgagaagtattttgagactggaggagttgttatgtactgatataccatatcatcacaaactgcataaccaaaaggatactgttgcaaaaatgttaaaaatttaatgcatctaatgatatggaaagaagaaaaaaaaaaagaaaaacgagtatacaataccataccatagtatagactgagggctaatgaacaaacagctgtttgaatcatcttctcctcgtggaaagcaaatttaagagcctcattgtacagggggaatgaaactacagaattctgcaaaatgatgtagatatatgactggatagctaaaactcctaattataaaattgctatgtagaaacatgttcttttttcccatagaagtcaaattttctcaaaggaagcagcctaatccaatgttgggaagtaaaaaacatgtctgagaacacatttctcattaatcgtgttttggaaacatacagcataagaaataaagtagaagcattaaaagttcatgaaatggttctatgtcatattatggcaaaccatatgcagagctttttcactattacaaattttcacacaatacggctataccaaagttccattcaaagtctgtacacattgaaagcccatggtaattacatatctatcaagattaaacttacccccttaaccttaacaagtaggcaaagtgtgtctttgttgactttaccgcttatggctctgagagagaga

SEQ ID NO: 55934 - DNA, 1006 bp, Cannabis sativa
taacgatccaagcttctcttgtagtcaattcttgaagatcaagccataatctcttccttccttcttcatcattaaaagtgtaaacaaatatgacataaaatcgagccttgttatccaccgttgaaacttcaaagtgaataaattgactagaacactttataatgtttatagtaaaacttgttggcatccaacttacaattattcgccctcttgaatgccaagcattattggaggtgaaacaccatccttgaaatacattagagtataaggcaccgagtttggaaaccttaactctagtttcgagaatccccaccaaaccaacactttgaacggctaaaaattgtttcaccaattgttgtttgtgctggttgttgactccttgaacattccaacatgatattttatccattgggaagaggaggtactcccctccccctgtgttcccaatgttcacagtgttacttatttcactcccctgctgttgtatctgcgcgtgctcagctacagctggttcttatgtattcgagtggcctaattcaacatcagcaggttcctgcaataaagaataggagtttgcaacaggtttatcaatagccattgattgagccttgttcttctccttccatattttctttgctggtataaaaccatcttccccttccacttgcactgattctcgggcattgacagcaggttttttaacaacccattcagacttcttcccctccttgttcctgcaatccttggtctcatgacctattcctttgcaatgtgcacaagtcgtaggtttccactcagaagacacatagaatgcaatgtcctctccactcttatcttcaaaccagatttgctctggaaattcttgctgcattgatacttcaatgagaatttgaggatacgtcaatttctccctggccttagtaaaagcatccaccataaccggttctcccacttgactaataattttaaagagaacttgttatccctaatatttcagttctaagtt

SEQ ID NO: 55935 - DNA, 1119 bp, Cannabis sativa
  modified_base (84)..(108): a, c, t, g, unknown or other
caataatttaaggttaaattttaatgaaaaaaataacgaaaatatagaaataaaaatgtgtaaaatgtaataataataataatnnnnnnnnnnnnnnnnnnnnnnnnnataataataataataaccataacatctatatgcatacctccatccctttcctataattatttaaaaagaaaaatatggtgtaaaacaaaagatttatacaaaaatttaataacacatgaaacattataagtgctttctataatttttttcaattaattttttattttttaattagaaacatacaaatatttttaaaaaacatattttgtaaaattatattcattttttaattatttttgactctgaacctcgacctagactttgcctattggctcgcaatttggatctcgaaccttagtctagatccaggcctagggcggtcctgaaccccttatatgtgcattaatttaataaatgttaaaaaaaaattatattgaggcatatatgctaagaaattatgatttgttttagtttcaagggaacggattttttgttaattaaattttattaggtttaattttaataaataagattttatttaaatttgaattataaaattaatacattttttttttcgaaaaaacaacttgtccacatggtattaaattaacgaaagttagtggatactaacaaaactttagaagaatggtaatatgtgtatttgtgccacaattttttaaaattaggtacttattaacaacaaaatgagtatttataagacaaatttccctatatattatacattccaaaaataattatgcttgttagaactagaatttccgagctccaaaccctatggtaataaaagagaaactgaatgtacgttagaaactggcggcaacagaattttaacagtgtttagttacatttacttctgaattattattatcttaaatatgagtaaattagttaataacatactacattactaaatccccgacattgtctccatgcctcccattctttaattcatatcttaataatatgattattggtttttctcatttcccttattacgtgtcctaataagctcttaaactaaccaacctttgttgtgatattcgtcattat

SEQ ID NO: 55936 - DNA, 1358 bp, Cannabis sativa
ctatcaatcatttattggggcaattgttgaagaatcaacagtttagtcaatttaataagaaattttttaaaattttatattaatgtgtcaaatataatatgttaatgctttacgtttctgctaatatttatgatatgacgtacaattttaaattaactgttatgaaattacttaaaaattagggtgtctacacatttagtaccttgtgttttatttaaatacaagttaggtatcttgtgttttcaataattcttatttggtgtctgtattttaaaatcatgcatatttagtaccttatattcaatttttttttttataaaattttattaatacaatcaagtcacataataaatcgattaagtaatgtaattaaaagaaagcaaaaacaataaaataaaatgaataccaaattttaaagaggttcgaccccataatatggtaatagtctactccccttgtattgtattgacttaagaaaaggaacagagtattcttcccttcgaaagctcttacaattgatctctgagtaatttctctcttagatcactattttctctctagagtgtattgtagcagcaattctctcgatccctttcctagtgaggctaggtcactatttatagggatttattacatgagaaatagtttccattttgcttacaatgcacaaaataggtaattgcaatgattctataattacaataaacgaaataggaaataggataggttgccatttctctctgactcaatcccacaattatacggattgtcttcgcatttggacaatcgagatttatctctgaagccttgtgcatcgctcgacataaacatgcttctacctgattggatatcttctccgcaaccctgctcggataactgactattacagatgttgattagtcatgtgcaggctgctagggttattttcctctgccccagtatcagaaatatgagacacatgtcatttgatcttattgccacgtcaaggtgcaaaaaactggataaaacacgtgtttcacttctatcagttgtttgtcattatgatgtgttaacgcaaattttggttaactagattaatagcctttttgcaataaatacactacagaaataaatatataataaataacatcagatattttacgtggttttgtagttaaaatctacataccccacgagtccttattattagggatattttctaggatatttagtagtacaataccaatatttgaataataagattttctttctcaattttgtcgtcccattttccatggattctgtccctatttatagaaatataggttgacaattattttttttaggattgattcatttataactgttaatgaaatgtg

SEQ ID NO: 55937 - DNA, 657 bp, Cannabis sativa
  modified_base (609)..(616): a, c, t, g, unknown or other
gccgcattcttcttcgtgacccagacgtctaaccccaacaacccattccaaccattttccttccaaaatcagaaaaatcagatttaaaaaaatgtagatcatttggaaaacaagttaaatcccgaaaatccaaatacaaaaacggaaagaaaaaaaatcattcaacctccattgctgtacaaaaaaaaaaactcaaaaacaacaatcagtgaaaaaggaaatcgcatttagaggtgaataatcgaatagaaggagatctgtaaatcattgaaactcacacatggttgaatcagaaagagaattgaaggtaatacaatttttttgcaagaacatcgtgaaatcttttattgtcaaataattgaaatttgttattgattgatgaaaaccagatttaattgaaataataatgaaatgttggtgaatatcaacaaaaaaaaaaaactttaacgcatataaataggtgctacagtgttttattttgtaaacagttgtttacaagttgtgttcaagtaaaataatagtagtttgggatctgcaaacgagaaaagatgaatctattcttattaattactgattgcttaaaaaatagttgtttgatagttgatttannnnnnnnaaatagtcgtccagatcaaaatgttacttgtagaagttgtt

SEQ ID NO: 55938 - DNA, 1078 bp, Cannabis sativa
aaaaaaaaaagtgttaaagtacaccacaaaatttaaaacattacaatgtaattaaggagaaaactatattttaggtatgtatattgaaagacgaaaaaaagttgaaaactcttgtcatcaccgtatttaacttagccgctacattcaaagtctttgttaattatcaatgtatctcacttgtaggatcacttgaacatttaaagttattgtcattactatatcttactcgtagtcgtcactatttttaaattcgctagtatcaccgtatcaaaatttgaccaaatgtgatcaaaaaaaaataataacataatataaattaatagattattgatatattgacaatatttttcacatattatcttttatttaatttttattattattgtgagtaaaaaatttaaacaaccgctcgcgaagcgccgcttgtttcctagttttaatataataaaaaggaatagaaagttttattaatacaaattaacttaaaaataataattttaatgtataaaatttttgaaattagattattttttttagtacaaaattagaattatctaattgtatattattattgattattgattatcagattattattgtatatatgattaaataacatttaacatttaaatttgaattttagaacatatgaattattaatatagatatttcagatatttttacctaaatttaatttggaaacctaattaaatcttcaaactaaaaagaaagaaccactacttttaaatgtagtttattaaaaatgtattaaattagattcgttcttttttaaaaaaaaaaaaaagtgctaaagtacactacaaaatttaaaacattacagtgtaattaaggagaaaactatattttaggtatgtatattgaaagacgaaaaaaagttgaaaaccgttgtcatcactgtatttaacttagccgctacattcaaagtctttgttaattatcactgtatctcacttgtaggattacctgaacatttaaagtcattgacattactatatcttactcgtagtcgtcactatttttgaattcgttattatcaccgtatcaaaatttgaccaaa

SEQ ID NO: 55939 - DNA, 1032 bp, Cannabis sativa
taagtctatatttaactatatagtgctctactagtgaggaaaaaagtgattgaggtacttgtcttcttacttttaatctctaatatgaattttcattcattacgttttattattgaataaaacttttctccgttttggcaaataatgtaattagaaaaagagtatacaaaaaaatacgtacactctcagattaatttacacattttatatatattatgatgtgtatttaatctcttataataaagaatgtatatgacacacttgatttaatctcaaatgtaattattttaaggaaatttatatttaccaatttttcttaggaaatttatgacagtaacataaaattgttaattgagagaaacaacttaattaaatccaaagtaagaatattataatcacatctcatattgctttgcattaatttaattaaacaaaaattattcaaatatacggtttggttagattttataaacacatatttctcccttcttttctatttgtgttcttgcatgctttatcaagtttctgctaagaaaaagtatcatagtaacaagaaccaactttacactaatttaccattccaattatctttaacttaataatgttaatttcaaacaggaaattaatcagtagtggaaagtagtttggttttaaagatttgcatgaaatggagggaggctatcacaaagcagataagacagaattttcagaatgctggaaaatctcctggagaactccctatattatgcgtctttcactaactgctggaattggaggacttctttttggatatgacactggtaagtgaactggatccctcttaattaataataatgcatgtcttgctcaacaattttgcatagaataattatttacataatttagtaacaatgtatacatatgagtacagttcttaacctttgcattgtgaaaatgaagactcttcttattcaagtaaatgtattctaaaatgagattttaattgattctttgtattgtgggaatgttgcaggagtgatttctggggctctc

SEQ ID NO: 55940 - DNA, 957 bp, Cannabis sativa
gactacaattgaaagaaatagagtgttttatttagggcacaaagcccaacagtaggtgtacgtggaaaacatgctagtcaagtccaaaaaggttaggggcatgtagaggacctgaatgaatgcttcaagatcctctaagagtacagcatgaaactcaacaccctcaagtgctcattcagagtaggctcgagcaaattccttggcttcatagtcaatgccaggggaacagaagcaaactcgaacaagatccaagccttcttggacataaagtcgaccataacaatcaaagaagtacaaagcctaatgggaagtattgctgcaccaagcagatttgtgtccaaatcgacggacaaaagcgtgcccttattcaacatacaatgaggaaaccaaaaatttgagtggacaggggagtgtgagaaagcattccaagagctaaagaaatagttaggtcaacctcctgtcctatcaaaacctttagacaatgaagagttgggtgtgtaccttgctatcacagagcatgctgtgagtgcaatcttaacaagagaagaagacaatatacaacatccagtacactacatcaacaaaagactaatcgacgatgaaagtcgatacccactcatggagaagctgacatacatcttactctcttagcaacaagaaagctaaggttgtgcttccaagctcacccaataagggtgtacatcgaccaaccattgcggtaagttttgcaaaaacttgaagcatttggctgactactgaagtgggccattgagcttgggcagtttaagaacacatatcaaccgagaatgggcataaaaggccaagcccttacaaacctcatggataaaatgtacaagcctatctcctaaaatatcttgagattcggaagaagagcaagagcgagaaaggaaggaagaccaagagcatcaccaagaacctaaagcatcaacatggaaa

SEQ ID NO: 55941 - DNA, 842 bp, Cannabis sativa
tctctaaaaccttcaccttccacatacattttttttttgtttctttgaatttgttattttttatcttatatattttaatttgttatagaaaaacataacactacaataatttgttttcttttgttgtaagttatgtgtaaaaaagatatattttaatattaaaaaaataatcaatccaaaataaccaatctaatccacactttagaggattggattggctttgagttattatgcggattggatttgatccaaaatatgaaatccacacttaatgcatatcaaaggcactatgagtaaaatagtgcatattggattggatgaacacccttatattaaatattatctacataattaatcaaaaaaaaaaattaatcaaaaaaaaaatatattatctacataaattttaggaaagtttacgcgatacacttaaaattggaagtttattttttttatatattttaactaataattttttttcatttatttacatttttacgaattctattttttcttacaggttttcactttttttttctaagaaaaacgttgcttccccgtagcagtaatgtgaaaacaatattctgaaacaacgaaaaaacaacactttttattattgtaaaaaaaattacgttattttcccgattagcaataaaaataacataaaaataacaatctatattttttataaaaaaataaaaataaaatccgtaaaaatatatataaaaaaaagaattttttgtagctaaaccctcttaactattatttcacttgcacttaaccctccaagctcaaattttattggtaaagccctccaaactactgaattgttaacaaatttaagg

SEQ ID NO: 55942 - DNA, 968 bp, Cannabis sativa
ttagtattaattgtagttgaaatttggtagtttaagtaggatgcagtacaaaaaatcttacttttacttacagtaaaatttatgactaaaagtgaaaaagttatgactaattataaattaccatttctatgttgtgactaaaaaattcgtgactaaatgtattagtaacaaaaatcataatttattgtgactaaaattaaattagttacaatttgtatctaatactacattttagtcacaagtaactttttattgtgactaaaaatcacatttagctataaattttttatgttataattaaaagggtattacaaaaaatattttttttttttttttagtgatagtttacatggtactaattaagtttccaaagtagcaaaatttatatcatatactaacctctcaactgcattagtgaagagctccaattcatctagtgtaccataaacatcatatatgtcatctattactgtaattaaagcatttacttttgtaatcattcttctaaaatttttgtaatgtggctcaaatgcaactcctactgtccataagaaattcaccattgttctatctcttgcaaattccaacttctttcccataccagtgctttcccaccagctgcatatatgtacatgttaaaataaattaaaatatcgttacgcgatattttaaggtgtccaatatcactataccataagtagtatcaagcacaattagtaagcatattttcaaattggagtttctttcgtcgatgaaaacaaatagggcattttcctaacgaaaattttgggccaaatgtagggatattttagagaattgttaaaaagtattaccggtgcctagtaccttccttgttgtcatattgctattggtgtaattaagtatactatcgagtcccatataattttaaaaaataatttttaatgaatatcgctaaataatcatagagcgtcacctataaaaagtgt

SEQ ID NO: 55943 - DNA, 592 bp, Cannabis sativa
gttcctgttatgccaaataagccaccaacacaaaaaaaagcattctacatcttccttgggtaaggtaacataagtggtgtaagcaatatcatggaaagtaatagtacaaggagaagaaaaaatataatcgttaaaaattgtacatttccagactcttcgaacactcttgcagaagaagaaagcatgagaaacagattcaacatggtttccacagccacaggctggggattggataattttcctaaaagccagattcctatgggttggaagggtagagttggaggctcggaaagaatactttacatgctatatatatcaaaacttttatttatttttctacatttttgtaaatatccctaaataaaattatgcattggtttggaagtggtaatttattaggtagagaaaattgggataagttaaaaattactcttttttacattaaccaaatataactctgggactttcaaccaaatgagagatgtgtcttctactattctctctcagagtccaactttctttcttttctcacttttcctgatccctgttgtccatttccaatccccattcgtgttgacttgtgtgttccttt

SEQ ID NO: 55944 - DNA, 848 bp, Cannabis sativa
  modified_base (161)..(162): a, c, t, g, unknown or other
attcaattttactatttcagttattgtttatgtactaaaccatgttccccagactttaatgtctaccaaatcatgccattggaactttgacatatactaaattatgtctcctgaactttcttttttactaaaattagaaaaaaaaaatccttaaatccaannatctcaatagttcagggggcatgatctggtacatatcaaagtttaggggacaaaaatcctaattagccaaaataatattgagtaaaatagtaacatatcaagaattgtagattttaatatattttgtaatcattataattttaatcgagtaatatatattcaaattgtacatttttttaatacaaaataatataattgagaatcacatctcttttattgtttggttaagattaaatttagatggttctataaaatatatgggtaactatattcaatagttacatttttaatataactatgatggttatattttttttttacatgtcataacaatagttactaataggtagatatttttaaaaaaaaaattaattaattataataaactatatacttaaaaaattaattaattaaaatgactaataaatttttttagtaattaatctttatgaataatttatttttatatttattccctattataataattttttaataatcaaactattttgattataatatttacaataaaatttcaattttttttaaagaaaaatagacttctaccccttttaaaataaatatgttgaatgaaatagtacatatgaaaaagtgtacattttaataatttttttaatcattatagttttaattgagtgatatatattcaaattgtatattttttt

SEQ ID NO: 55945 - DNA, 3696 bp, Cannabis sativa
  modified_base (309)..(312): a, c, t, g, unknown or other
  modified_base (2554)..(2578): a, c, t, g, unknown or other
ttacagttttataaacattggatacttatgccgctaaaaataaacattgggattatgccacttacaaacttgaaactttgggaacttatgccactatttatcctaatataaattatatatacatgttaaccatctttattacatcacattgcctaatcaagcaagttgatgctttagtctgataatcttgtattgcattgcctaatcaggcaagcatgtgccatagcatggcaccatatatcgcacaattgcatcacctaatcaggtgagccatgccaaaaacttgcacccacatatcatataattgcnnnncctaatcaggtgagcccatgccataacgtggcaccaatatattgcattgcctaatcagacttgcctatacctacgcccggtacttatcatatgtcactgatgctcgtatctacacgtcgatagggcgataccctttaatggttttgttctatgccataagctagcaatttccatatcactggcgttgtatctacacgttgccaggaggaaaccctacaatgctttcattctatgccataacctggaaattttcatatcactgacgctgtatctacacatcgtcaggaggaaaccctaccacaatttcattctatgacataacatagaaattttcatatcactgacgcctatgtctacacgtcgcgaggagtatcacatcatctaatcaagtaagcctgtacttacgctcggtactcatatgtcactgacactcgtacctacgcccagtacgccgctaggagtatcacatcacctaatcaggtgagcctgtacctacgctcggtactcatatgtcactgacgcccatacctatgcctggtacgtcgccaagagtatcgcatcacctaattaggtgagcttgtatatcacattcatattatcattacattaccattgcttaaccaatcaatcattttactatataacaatgttaactatatctcaatctcaatattaatcaattcataacactattacttgtattacaacataatgtattatgcagtgcaatatacttttcttacctcaagtttcgattcaggtatgttggccgaccaacttggagtacaatcgatgatcccgggccctatgtcataacaataataaactaataagtatttatctcaaaacattgcttaaaagttgcaaaagacaacctaaggtttcctaccaaatctcgtagtttaaatacactaaaataaaatttatattttggctctaaaatatataccatatgatagggcttgtcgcaagcttcaaaatggtatatagaacatccaaaacagacacccgagtaaaaagttatgataaaaatacgattctagatctcactagaatttccagaaatggcaggttatttttgggtacgaaaatctcaaatttcgcactcaccgaaacaacctcgaaacctatccaaatcattccaaacttcatagtacacatatataccatatatacaacaatccttacataacaaaaattaaaatcgagcccttaaacgaaaaactccattaaagctcgaacctaagctttaaaaagttccaaactcgatttctaactcaaaatcatctcaaactcaacaagtaaacaacgaaactagtcccatgactacccgagaacaattctataaggtcagaaccttcataaatattcaaattcaaaaaactcctttacaaatctaattatttttagcttaaagcgtaattaagccataccttaagctttctcgctttaagaatttactatcctgctactaccggagcttagatcgctaggttttggactaaaaatcaaagaaaatagatataggagggagaggctttagtcgaaaagagaagatgaggattcgttcatttgtttactgatataacttgttatacccgaaattcggctggaggacacgtgtcaagataaagagaatgtgaatcggtgccatatctttttatggaataactcattaattgagtaagtactaaagtatatttgcaacccgctgactgtaaagtcttaggcgaggaatctatgtacgaagtggtacgtagagtattaacgagaaaccatatgtggctaaaggagaatagcgaggcacctgagaagagtaacgcataccctagcttgaaacaagaaaactaagtgtaaaagtcgaatcgactcgaagagcaagaatgcaagatagtcatctcgctacgcggaagctccctatagtccgcccatctaacaggagcaaggctcataaccctggaaagtcaatagatttccttatatctgcaatcaacataaaacatatcttcttgatctcagatataagaatggttccagctcaccgatggggtcgctacaatcacgtttacattttgtaatcatatcccacgatttaagggataatgattgtaattacattttgctcagctttataattaactgccactatgcaattataaatagtggtagataagatcaaaaaaggactcttatgcgagaggccctggattaagatactcaaaaatctgaataagattgactnnnnnnnnnnnnnnnnnnnnnnnnncaaaaccacgtaaaaattcggtgttcatatttttatagtttttctgtgttgaatcatattcgtgaggctcaaatttggttaacgaaaatttgtgtaaatagtttggtgctttcattgagagcctaaaaaaaaactcagaaaaacccttcccctctttcaaaaaaaaaaaccttctcctttatggctgaaaatccagagaatattaacacccgacatgaggtaactaaccgtcgtttcggaaaatagcctgtgggctttagaagatcaactagtccgccgtccagaaggactacccgttccaggatggcgcaacctgaggatggtcccagtgctcggaccacgcatccccagagaactcaacctgacaatggtcctagtacgaggacaacacgctcgaggagaattcagcgtgggaatggtcagaatctcgaggcgggggatgaagagctcaaccgtgggggtgcccaatctgtgggagaaagaacttatgaaacagaaagtcgccgcctgagacgccgtctggaagaggtgcaacgtcaaaacagtgagttagaatgagaggcagcctcgaccagggcagtgcaggggaggaattcccaaatcaacctgaacctggagtgagaagaccgcgaggcaaaccttgaggctcccgaaccaggagacaggaaaaggcccgagaagaacaacctggggaagatgagacaccccctaaaaatcaggatgaacagccagaaaggagacaaccgaaaactaataaacgagaaacccctcatgaaaatgaggaagatcttggaactcagccggaggaacggagatcacctgctaggaatcaccagcgttcttcccaaatccatagagggaggactcgtacgtaccctgatgggggaaatacgacaaaccgctcttaggaggaaagaacagagcatgaagaggcaagtgtgacttcgaggcgatctagaactcatagctgatcaactcgaagagtagaaagtactcaaagaaccaatgatcgggagagtatgggaacaagtaaatccgcaagccacttaaaaacaaagtctataagtaggacgcggtcaatgagtaagacgagatctgttagcaattactcccaacca

SEQ ID NO: 55946 - DNA, 1605 bp, Cannabis sativa
  modified_base (1492)..(1504): a, c, t, g, unknown or other
aattttatttaaacctatctgacgggaaaggaaaattgaaagttataactcgcttaaaaaactgaatactaacggttctcgcgagataggaaagtactaaacgaggcatcacgatgccttgataaaagtacttgaacctagaaaatgaatagataatataactattcatatgaacaaattaaaaatatacaaagtgcttaaatcattaaagtatttttaagtttgctgaaggcagattgtactgctatagcgaggcagaattgataattgctcgaaaattgaaaagaatggcagattactaactacttaaagaagaagattatgagcaatggaaaaacccaaaagtactttacatttgatcaaaatatgattgtttacattgtgaataaaaacgcaagcaaacgcaattgtattaagttcgaatgaaaatagtacaaggcatttaagataagaaaaaacctaagttgggttacaaacttgtctttacaaaagtaccactatgggcaaaccattaaatcatcttcctaaacaaaggatgagaggagaagttgataaactcgagaaagactgtctacaagtagtttggacaaagactgactacacatagctcgagaaagactggctacatgtagagagccttgatctctgcacagacctcattctccttatcatcagaaaatcccattttctacagctaagactctattcccagcctcaggaaattcctcgataccagaaagaggttggcgcaaaggtctactggcacaggctcggatcttgggttggttggattctctgatagaaaccacgccaacttccctcccaagttaatctaaaaccatgccaaccttcttccgggattcctcgccaactagaggaggacctctaagatctctcacaagatctatgtctattcctgtggagaccaaaaaaaaaggttaatggagcaacaaaaaacatacaaaactaatggaatttataaactgactcaaaccaccattcacaagagatgatactcaccttcaaacaacccttgtgaggatctcccatagcaagctacggggttcccctagtttagattggtcaaaaactcctcggccttggaatccatcctttccggttccaattgaggcttagagttcttaggaacgaatggaaaatggttggtgcattctggtattatgagtttgggagagtgaacttctaaactcagaagggacattccagcaagaaagagatgatccattctgaaaatggatttctccaagaaagacagaagtttgtaaaaaatgacaagcttgagccgcccttttatacacaaagtctagtgacaagaaagctagggaaatctaacggttggagggcagaatatgaagggaaaactcataatgatcctctaaaccgtacaaccaccagaatcaaaggacgcatttcttctaagaagggattttgacgcaaatgccctctgtaattattaaaatgctctttttannnnnnnnnnnnnttttaaggggcaattgttataccaaaaattcggtttccaccttagtggaggacacctgtcaagataaagggaatatggatcggtgcaatcgctttttatgg

SEQ ID NO: 55947 - DNA, 1798 bp, Cannabis sativa
  modified_base (189)..(196): a, c, t, g, unknown or other
  modified_base (847)..(850): a, c, t, g, unknown or other
ttatttatctccctttttatatttatatatatatttagggaatggccctttggccgagacaatggttttgcctcttgtggcacttttttgtaaaaaatttgcaaggttggacggccaactttgctttttaatgactcgtacttttaagtgtaaactttattatgcagatgtttgcttgcgttttattcnnnnnnnnaactatcacatgcataaagtttattaggggtttctattgattatcctttcttccgacgttaagtagttaatttcctactttacgtgcgagcagcttatctgccagctcctcaatctgcgagccattatcaattccatctcgcgatcattggaaatgatctcattttaagcacattcaaatatatttctaatgaacttgtcattttatttatattttcctggcttacatgagtagttaaaatttctacccacgtgttgggtttaagtattttttcaagatatttggatgtctcgtttaatacttccccttagcgtgagccgtaagtattcagatttatgtgctagtcataacttttgattttcctctctcgtcagatgggttataaatcaaaaattacagttgtttgatccctttctcgtcaaaaaggtttgatcaaggcgttataacgattcgaccccttttccgtcgaaaaggtttggtcagggagttataacagttcgatccctcttccatcaaaaaggtttggtcgaggccctttaacaagttttcaaaaaaaatttaattaattttttttgaaactatgtatgggtttgcattgtactatgtatttccagatcaattcgggttaatcatacatatatgcccctcaannnnttttaaaggatttatgctttgtaattacttgtttgaaagaaatgattattttattcacaactggaattcaaaatatttcatcagtaatgtgatttacaatcattaatctcgaaagaacttccccagttcaattgcttattttatcaatcttccatgagcatctggttttgataaaacggattttgatgtcgagggtcaatatccaacattctcccacaattgtttcaatactcggggtcgatccttgacatataccggggttccaggtagagtaatcctaattttagttctttgtcttcaagtgctactggttgacgtctagctttccacgtgatagcttgatatggcaaccacagtgggctgatatctactcatgttattgctttaccgtagtaactgccttttgtactcttgcgactcgctccctctcgagataaccgaagtgtcccttcttctcgtagaggagggttataatcttcagtcgctcgagttattgggcagatcgaactgatcataggcatcttcctgccccgttatatattgttgaaggtgtccttgcgatatgagactttctatctcatctttcaactggcgacactcttctgtggtatgaccaatatcatcatggtattcacactgcttatttggatccctcttgcgcctcacatgtttaataggtcttggctcaaaaaaaatggcttcttgtatatgtgcaaggtagattcttttcccaaatttcattgagctcagtgtattcggtataaagagggatatacttgttgggtttcttattattaggtagccttttggaatcgtcttttttctttgatctcgaggcctccgaatcaagttttccaatagtatcatgcctcggtcgtctcctaggctttgtgatttgatgcactctgaacttattctccaactcgctcattcgcaaatggaatgaat

SEQ ID NO: 55948 - DNA, 691 bp, Cannabis sativa
aaatattaggtctaaaatattaaataaattcaaattaaatcaataaatttatatatgaaatatatccaacgaacaacatcttaattatagatgttggattgatcgattggataactgaaattaattaaatcggatcgtatccaatatataataggatcggatctgaataggcttaaaaacattggatatagtctaataaatacccctaattacactacatatatagttagcatagtttgattacattgatatgtatgtataaatatctcaactaatatcatccgttttaacttttaacttactgcaaaatatttatgctaattgtgtgttaaaagtatcaatatactagttatatatatagctagggttgagaatatatatatatttatataaataactagggtttataagaatatatataattttaattaaactgaaaaatcaaaagggttaagaaaactaaaataaacaaaatatacttattttaagaattttaagaagcatagaacaaaatatttgccttctgagaaagcaaatatatggatgcattaaagaaggttaaaaaaaaaacattaattccttttaatctcctgcacactaaagccaaaaccctaaaattgattagaactcagctaccaagcacaggatcatgtgggttccagctaagccaatcaccagtagggtttatttt

SEQ ID NO: 55949 - DNA, 1486 bp, Cannabis sativa
  modified_base (663)..(663): a, c, t, g, unknown or other
ctcaacactcaagaatagagtaggctattagatcttattggatgaacaaatttaggtattacagtgtgtactcaacttatgagacactgtaatgagaatagaataatctcacacacaccttgaatgaatgtggggtgtgtgtgtgtgtgggtgagagagagagagagagatagtaacacgtgagagagacagagagaatagggttgaaaaatccaattttattttctctactttcagtttgttatctgtctctattttttaatgttattgtttatcctacttgtatatatttatatatacagtgttataaataaagcctttaatcttttatttaaaataaaagataaatatctaatttgatttaaattcataattcaaatttaaatataaatatctagtaaccgaatatcaaaatatcagtagatcttttatttttaataattatcattttaattgaacaattgtccaataatgtatttaattaataattaaataataatgaacttaatttaatttaaattattttaactcaattaaatagttaaactaaattaagcatagacatttatatgtcaccctacacgtgtaaaataggcttacacgtgtggccatattttaaggtccaaaatcgatttctcaattttgctacaaataaaatttatnatttattctaccaataaataataattgattaattctcattaatatcttaattctcaaggattaaaataaaatattattttctctaaaataatatatttctctctgtaatattagttagcgatattattatatttaactacttaatatagttttatccgataaaactaaatagttaaatactattaattatacaattcacaattaccataattaattaaaacaataatttaacaaattactgtttttctcttaagaatttatttcccataaaaattaattctcacttgaaatttattcatcaaataaaatcttcccttgtacaatgttgtatagaggtgactcggggaccatgaacctatattttgaagctccaataaacccaagactattatcaatctcatcaataaaataagggacattggcggctaaaccacttgaactttatagtttgtaacacttaaccacaaaaaccaaaattttggcggcataactacctaaaccctggttccgttttgctctgtacccctccgtccaaaaatcacagttaagtgccacagtggactgtccacgtgtacacacttgtacacgtggcaaattttttagtggtccacgtaatattagttttaaaaaataattataaatatttttaaaaaattaaaaaatcagaaaaagaaaaaaaattattactttttttcttttttctccttttttcttttccatttttttcttctttttttttttcttttgatttactcttttcttcctcctctcacagaacccacacccacacccacccactcctttgtaatgaccgctttagtaa

SEQ ID NO: 55950 - DNA, 1049 bp, Cannabis sativa
ttatattgggttttttaacaaaaatactggattttgagcaaaagttttttataaaattattgtctttttaaaataacagtggaataattaaaaattaactgtgaacttgtgaaaatttaacatagtatacaaatacaatataaaatttatcaaaaaatatagtatttttttaaaaaaatttggctaagtaaaaaaaataacaaagatgtaaattatagtatgtgttttaaaaatttctattatgtttgaaatgatgtgttgggctcttaaatcaaaggttttaatgaatttattcaaggaaaaatgtggaaattatattgtttattcattttattttatttgttttaattcttatatttatttttacattctttaaaatataaataaataaaaaaattatgttaggcgcaatccagagctaaacataaataagaaacaaattgagagaaatattccaaacctgctacctgagagccgccactggctgtaggatttaaaatccattggacaacctccctagaaggatcaaactgcaacatgtcactccaaataccccaactacatttgaaccagcattgcctagcaaaggggcaatagaactctagagatgatccaaagaatcttgagcaccatgacaatagactttccaaaaatagctttaagccatgtaccacaggggagaatgcctttcctaatcttccatgataaaggtttcactctctctcctcaaggagaggtgccttcaaaaggcacttaaaaatgttatcggtatctctaatttattgtttggttaggagatctatcatctatgagcagatttaagagagaagttaccatattgatattatattttactatttgcgaaagaaggttaactatgtaagagtgagcccaaaattaaagtgcaaaactgattgcattttcaatgttagcattacaaatctatatgataagtttgtggataagaaaagtcttttcatacaagaacattgttaggagggacactgtatcttcacattggtataatattgtctgctttgggtctaagc

SEQ ID NO: 55951 - DNA, 2892 bp, Cannabis sativa
agagagcaagcttcatggtggtggtggtggtgggttccatcatgagtttgaaaagagggagagagagagagagaagagaggcacgagatctgaaatgcctgaacaaaatgattttcttttggatttttataagtttaacatactatccctaacgatttaaaatcgtccggtatactattattgccgacggtttaaaactgttggctatagtacaccaaacagttttaaaccgtcagggatagagataactcatttttgaatttaaagactgtgactgttttggacagccagggatcgtaaaatgactatttaaaactgccgggaatagtagagtattcttgatgattttaaatagtcacttaactttattagcgacagtcctcagaaaaaattgatttaaaaactaacgggaataaaccctttcgtagtagtgtctccgtaggattcttgatttttggaataagagcaagattgttgtcattaatgccaattggaaagtcacccgaaaagaaaacctattgaaccaacttcaccacatttgcccccacaatatgccataattttttataaaatcccaaactcatcccatcaagacctagagccttcccaagatgcatttgaaacaaggacctatgaacttcatcttccaaaacaggtcgcaccagatcgtcattttgagaagctgaaatcaaagcttgaatatcatcaagcaggttaccccactcagtatctgagccagtaaaaagatcattgaaataatcttttactagctgaggaagcccatcatcccaagtataccaagcgccattatcatcttgctgcttagaaatatgatttgtccttacaagaactcactgccgcatgaaaataaatgactatttttatcaccctcctttaactaaaattgctttgcccgttgcttccaaaaaacttctttttgagttagaatctcataaaacttacatttctcttcctcatacaacttttgtgaatcagaatcaattttttaacgaagcttgtctcaaccgtctcttacactgcaacaatccctccttaaaataaccggtaacactcttaccccaatcacttggaactgccccacctagaaaatttctcaaagagatctgcctccatactaccctcccaaacatccctcactagctgctcacacatgggctcccgtgaccatgatcgttttcaaatttaaattgcttaacacacagagaaataacctgaatacatgattctaaaaaaattagacaatgatttgaggtagacaacacgaccatgcatccaagattacgaaacaagagccttatcaaggcgagcctcaatccatgcatccgtaccacacgaccatgttcccatgtaaaagtatatttacttaactcaaaatcaaacaacccacaattatctagcatacctcaaaatccatccaatagctagttaggatacgccctcccgaccttctctcttctcatcattactccccatattattcaagattactaataatataccatggaggagtagaatgattcttcagagtacaaatcgaatcccaagtatttcgtccaaaccttctattcagctcacaatacaagcctgtaagccttcaagccttcaagcctccatacccccaaccgtaacaaccacatttatgtggtttttcgaataaccaaatacaatagtctcttcaatatccttccagaatataacaatatcaccactatgctcttgagcatcaacaggaaaacatccttcataattaatgtgaaccctgaatctttcagcaacctccttactacaaatcatctcacataaaaaaaaataattaaaattggatttcttttggataataagatccataaagaattgggtcgtgtgcatgttcccaagcccatgatgattccaacttagcgtactcattgcgtcaggcgggcctgctccacattccgcccctcgaatactttttgacccctcaatagtatcatggtccatcacctcactaacaactacaatcggcacaccatccccctcaactcttaacttttgtttctttatctctaccaaatcaagaacactctcatgcgacaatatttcatctacaatcagctcattgacatgcaaaaccctcacgactagctatcacccaacaccttttcgcccaccataaccttacccttatttcgtacaccattgacaaagtatctcctgcttgtatcatcatccccaaccggaaccactgccccatccctctcacgaccctctccggccccataaacacccaaaccattctctcccaccaccaccggagtcaaacgcaacaacatagctccattctccgtttctgtttttagtatttaaaaaattacaactaaatttttttacataatatatttcactagttttttttttaaaaaaaattctaaacaattattattaggttaataaaatttaaaataattaattattttaatataaaatactttgacttatttgattttgttttaaaaaatctataaaatacatattgtttgcttttaaataaaatattttttttaaaaaaatattataatttaagggtgtatttggtaacacttttttaattaattttttgtttttaaaattagaaaagtaaaaatattttccaaaattatcttctataaaatagtttttactttttaattttttttaattaagaatcaaaattttgagaaaatctttttaaacagtttttttttttttttaaattaatattttgactccgatcccaacttagaccttgaaaattgaatccaaacccgggcctagacttggacctatccccaatcttgttcttggacccggctttagactcgacttaaataaaatcaacaaataaaaatgaaa

SEQ ID NO: 55952 - DNA, 731 bp, Cannabis sativa
ttcttggagcaaagagtgattctgggttgggtcataagtgtctcctctgtgagagggaactttggtctctactaggatgatcgcttcacacccataggtcatcgaatacggtgtgtgccttattaaagttctctatatgttaatctgtatgcccaaaggacttggagaagctcctccggccaatgggctttacacgcttgaagtttcttcttcaatgttatcatcatgaacttgttcacaactttaaattatccatttgcttatagtctagccacagtcgagaagctcttcacgattctattttgattacaaaagtcagtgaagtgatcactatcaaattacttcccattttctgagacaatcttgtgtggaagtttgaagcggcatactatattcttgatgacaaattctaaggccttcttagaggtgattgtgttcatgagttctgcttcaacccatttggtgaagtaatcaacaacgattatggcgtacatggctcctccttttctactgggaagggatcctactaaatcaatcccctaaacagttaagggtcatggactgctcatgagagtgatttccattggtggtgctcgcaaaaccttggcatatctctgacattgttcacacttctagacgtactctatacaatccttcttcattgtggtcctgaagtaaccctaatggataggggtgttcgcggtgcgggtggtgcggtttttaaccatttt

SEQ ID NO: 55953 - DNA, 750 bp, Cannabis sativa
tttgttatgtgtttgttgttgttttttaaatttttggtgtaaggtgatttcattttattggcattgtttgtttaaatggagaactatgtataatttgtgacttttgtaattgagaaattaaactttataattagaggaattttcatttttatggtttataaagtataagttggcaaaaaaataaatttttttctcaaaaaaattattctaagaaaattttagaaattagttaaaaaaaatatagaaaaagcatcataaagtatatggttgcctttatagttaccataagtgtacttagttacccttattcgatttttctatattttttaattttttcttcaattttcacatcaaataacctttttggaaaaaaaagtaatttcttttttgcaaagtaggaaaacctataaaatttgctcttataaatagactagggaactaagccacgttttgcacggtgttgttaaatttttgtaatctttttatatatattgtacttatacgtagtgatataatctaaaatataacattttaattgtgtgttattacaaattaagtattagtattgaaattaaaaacataatttactttcttttaaaatatatagaaaagtagtaaatttgtgacaaatattaaagattatgaaattaacaaagaaattataattacatgtgttttataataaaataaataaaaagttaataaatactaaatttaataaactggccttctaactaatgatgtgatgat

SEQ ID NO: 55954 - DNA, 940 bp, Cannabis sativa
  modified_base (765)..(772): a, c, t, g, unknown or other
ttcttttagccaggaggccacggaacggcagagcgtcagataaaatgccccaccagaggaccttatgtctctccataacttttttcagggtgctcacatactgagaggctactacaaaaaaagatattaccttcggtcaaaacgtcgattttttttcttcgagaattgatgctaatgaaatcgattagcaattaaaaaaaaatattattgggcaatcaatagcatcgatttgtaatagatgctagacaatagcgttaattatgaaagaacagataacttaaatcaaaacatgttttgtttttgtatagacggcgttagtgggtccttctcagtaatagaattactgtcgatttaaaatgactgcttacgataacgaccattatgaatcgatgcactaatttaaaaaaaaaaataccgtaacttttacaaaccctaaacctaaacacacacatacacaactctcactaatctccattgtctctcattttcaatctatctctccctcactctcaatcttggtctcatctctcattctcaatctatctttgtttttgtttttaagatatgcacattgaaaaatgataatgacagctaagatgggactcgataatgatggaaacctcattcttgtaggttcaacgtcactcttgtaagcctattactgtatttttatttgttgtgactaaaattaaattagtgaccacttgtaactaaatactatatattttagtcacaaatactattttattgtgactaaaagtcacnnnnnnnnacaaaaaaaattatgttatgactaaaaagttgtgactaaaaataacagttttttttttttgtagtgaactaaacttaaaattagatatttatttacaactaaaaaattaaacttaattagtatttatgctgcaagttttttttgacttgaattaattactcttaatta

SEQ ID NO: 55955 - DNA, 2552 bp, Cannabis sativa
gagccctcctcctcaagattggctgaagttaaattgggatgttaaagtaggaggggagcacatgtgtattgcacttgttgctagagactatctaagtaaagtgctttggctgcatacagcaaagttggatatttcagatgctttctgtggtgaggcagtcactgttcgtctaactcttaatgtggctaaggacaaaggcctcaagtttatcctagtagaaagcgattctaaggttgtaatcaactccctcaacaacttagatactagatgggaagttgagaactattccttattttgtaaaagaatattttcctcattcgttggttgtttattttatattactactagaacttgtaattttatggctcatattgtggccaagtgggcttttgcccataatcagtttgggcgtttttgccatctcgtctattcctatgaacttattttgtatcgagaggtctgaaatctatttaaattgaacgtttctttgaaaaaaaaaactcaaaggggtaatttagtcaatttaatcattctcattatatttcctcataaagtaaataagataaatcactatcattccattttcaagcagttttagtaaacaacatattataaatattgattctgattattctttattaattttgttatatttctctattactttagattgattttgaataccgtgtatgtagatataatatatgaatttgttgaagttagaaattctctttgtgaaaaacaaatttcgtgtctcttatataaaactctcggtataggttcatcagttctcgaactgggcctaacacaccgcaataaaacacatttaataattaaaatggtagagttaaccacaattatttcttaagaaataaaacaaaacaaacactttcattcacaacaaataaaaagatgaataattaactcaaaatgataatttagcaaatttgagcattttgattatgtttcctaacaaagtaaataagataattcattatcattctattttcaagcagttttaataaacaacatattataaatatcgattccgattattctttatttattttattatatttctccattactttattccgattctgaatattgtatatgtagatataatatatgcattcgttgaagttagaaattctctttgtgaaaaacaaatttcgtgtctcttatagaaaactctcgacataggttcatcaattctcgaactgggcctgccacaccgcaataaaacacacctacaataattaaaatgctagagttagccaccattatttcctaagaaataaaacaaaaacaaacaccttcattcacaacaaacaaacagatgaataattaaccataaaaaacattcattcttattatatgtaaataaaaaatctaaaaagtagttttagtttgatatttttaatgtgtattaaaaataagtattaatatttaatattcactgtttttaaaccatatattaattgctataattgcaattgttgttcttacttaagtaacttgtgtgagtataaatgttgttatttgtttaactgttttgtatagttgtgattagctgggggacaaattgagtgtgttagagagaattagtgaaaaagcttcttgctttagtagcatgtgtaagtatcatcttcaaatacttttctcataaaataattttttaacgttttcactctcttccttcctcttttatctgtttttctttctattacaatatgtctacaagatctaatagaactatatgctattttgaattaaaatatgtaatgaaatttaattttgaaatttacaaataaaaatataataacaatatgttacacaaagttttgataaacaccattgatgttccctaagaatattcattgaaaaattattatgagttagtagtatattaatattaggggtgttcatcaaaccgcccaaaccgctgaaactgtccgtaccgcaccacactgcaaaaaaaatacggtttgaaatttttcgcggtgtggttgaggtttgaatttttcctaaactgcacagtgcgatacgatttgcggttttgaattattaatatgcagttcaaaccgcactgcactgcacattataaaaataccaatttttatattcatttaggtccaatatgtgaatattcaactcaatatcttatgatattttgacaagttttgctcaagatttgttgtatttgtaatagtttaattatttaaagatagtccaaaccacaaaaaccgcaccgcaccgcactattttttgtagtgcggtttttgcaggtttttagttttgcagtgcaggtgcaatttggaaaatttgaaaaactgcatgtgtggaattgatttaaaaaaatgatcaaaaactgcaccactcacaccgcgaacacccctaattaatatgagagcatgaaaaagaagagtaagacattgcatcctaatatttgtagtgaatatttttaaatactatataaatattttttatatgaatttggtacatgagttacaattctatttttttatgatgtaaaatattcaaaacttctt

SEQ ID NO: 55956 - DNA, 1734 bp, Cannabis sativa
ccttcggggaaccctggtgctagagccagccatacaacagttttgtgaaattctttttcaagttgtaggtacctccactcgttcgccacccgttctttttcaaaacgtttatagtcgtttagaactttttgcatttgaggagtaatttctccacaaccaggctccttcttgatctcttcgggagttagaattgggtatttgcccttgttctttctagtagatatattgaacttaagagaattataagagaaattttcctttaattttgaagtataagaaaagtataagataagaacacttatgaattagaaagggatttgcttttatagagcagaatacttattgggaatgtaggaaaaattaattaatattaaatgtgtaattgtacaagtgcaacgcatgcaatgtgtatttatcgatagaatatcgatacaatgtcgataaaacttgaacaaaagaaaatcagtctacaaattatcaatatgatgtcgatgttatgtcgatagcttatcgatagagtggtagtttgaaagtgggaaaaattaattagcattaaatgtctaattgtacacgtgtctgacatgcaatttgcttgttgggaatacttgttgagaatgttgaaaaaattaattaacattaaatgagtaattgtacaagtgaaacgcatgcaatgtgtatttgtcgattgaatatcgatacaatgtcgatagttggaaaggcgggaaagattaattaccattaaatgtctaattatacacgtgtctgacatgcaatatgcattgtggagtctatatcgatagtatgttgatagtaagtcgatagttgcgaaggcaggaaaaattaattagtattaaatgtctaattgtacacgtgtctgacatgcgatgtgcattgtcgagtctatatcgatagtgtgtcaatagtttgtcgatagagactgctacccgaattgtagatgtttttatcgacagaatatcgatggtatatcgatatgatgtcgatatttttatttttagtattttttggtatttttccctaacttacctttttttgtttgaaattgcatgatcgactgtgtttcttgttgtaccgtacgatggtgtttggtgtgttgagggttttaattgggtttataaagtcgaaggctgtttgacgttgacagctagaactgacacgaccatacagaaaatgcgccaaattttatataaagagttggaggttgatcctttggcatatgatttaaaattagagatttgttccttgtacatgaagggacaaatggttccgccagaggttatcaaactgagaacgttcttagagatgagggcaacaatgtcaaacacagatttatgccattattcatgactatggtgagaaaagttgggaattcggaccctacgccgcctactaagtggaatgaagaaagatgtggtagaatttgtatcctagtgcttaatttgtcaacagatcaaggctgaacattagagaccaacatgtttattgcaaccactgacacttcttgagtggaagtaggaggacatcaccatggactttgtggttggattatcttgaaccacgggaatgtacgattcgatttgggttgtggtagatcgattcacaaagtctgcacattttcaattggtaaaaacaaccttttacagtggatcagtaggcagatttgtacgtgaaagagatagtgatgttacatgacattccaaagtccattatatcgga

SEQ ID NO: 55957 - DNA, 2528 bp, Cannabis sativa
aattagtgggctttgggttggacattcacatattagacttaaataaatataaaaattggtatttttataatgtgtgatgcggtgtggtttgaaccggatattaataatttaaaaccgcaaaccgtaccacgcgatttaggaaaaattcaaactgcgaccgcaccgcaaagaatttcaaactgcatttttttttagtgcggtacgggtggtttgggcggtttgatgaacacccctagcttccaacatcacaaatttctctagcattaaacgagaaaattcttcttgcgctgcttacttctgttcagctgcttctagttttttggacatttcaacgacctcaagatttggctaatttttctcatttccctaattgatgtcgtcgtcttctggatctgtgggatcaagatcctcaatttcctcttcttcttctccttcatcaatgggatcatcgtgaagaccatgcttatcgtgttgatcttttcctttccgacgacttgttgcctcagtgggattctcattgagtcctattttggcattaagatcaacatcgtccatcaaagtgtcgtgataatgaagaccaaatttagttcgggagagagtaccataattatagtgtgtaattattgatggtatcactgcctcctttagctcttaatgaaaatactaaaatatttatcgaatttttcaaaaactaataatttaaatgtaagagccaaagaaatataattcaaagaaaataaaatacgaacattcaaggattttacgtggttaaggcgttaatgagccttagtccatgagtcaatattattgacagaggcttgaaaaacctaagggattacaataaggtatgagcattctattttttgcataagtgagccacgaatttttaaccctttgcatgtagagtttgttgagtatttatagtgtatagaggtcatacaagttactattttcctctataatgagaaatttacaaatataatatttactttgggctcatctggtgaagcccgtcgaccctgggagcactgacgtggagaccacatcacgatgctacatgttaaaatcatgtcctatcatcgtggagaattaatgacacattaattgcttgattgacaattatcttgtttccttatttattgagatattatcttccattagagattataagaagataattcttgatcttgtacgatatggtaataaatggtaactatgctggattttttgatacacgttgaatgcttcatcctgttacactatgttatgtattttcgggtactgaccatgatggatgggatcttgcctagatgagttgtttcttgttcattcgaaaagattgatgatatatggatctaaccaataatattgtttgggtctattgttgggccttagatatataacctgtatttattatttgaatttcacgtgtcccctaccaaaaacacgaataacactaaacatcgtatgagtaaattctatatcactaatatttttatacaaattctttattttcaatttttaaaaacaaataatatataaatattatttaagcgcaacttagttctttaattattatatattaaaaaataattataaatattattctaaaataacatttatttatttttgtattgctaaataaattatattttagctttgcattcaattgtagattttcatcgtattataaattttgtctttaattctctaactataactagctcaacaatataacttttatttaaaggcaaaaccaaccaaaaataaatgctgtcataatgagttaggattttttattttttttatagatgagctgggaccttatacaaggaaatacttttcttattctaataaatgtttttttttttaaaaaaaaaaaaagaaaaatcataaatgatgagaaaagcttactagaataaagagtagaatattaggcacacttattttagattttttttttctttttttatgaaaagtttttctttcttttctaaatgcacttaatttagtttgtgctaggcattattaattcatatctaactttctattttaattttctgttgaacctacaagaagctttaataatgacacgtgtatggtcaagaaaatgacatgtccagaaatagtcatgcatggagagccactcaaacattatgttatagtgttttttagtaaattgatcttttgattttcattgttaattattaacgatagaggactacaacaaaatcaaaattattgaaccaatctattaaaaaataacaaaaataaagggccaattgtcaatcaaattattttggaatgataattatattttttttcccttttttattgtagaagtttctttttctttttcttctaaatgagtagaatgtcatattttattatcaatttacaaaatattaaattagaattagtcactaattaatatattgtctatagtgaattttatttacagaaaaatacaaaaaaaagaaaaaaaaattacaaaaatactatgggccggcccattaaacatttataca

SEQ ID NO: 55958 - DNA, 1435 bp, Cannabis sativa
aatggttaaccaaatgtttaaaacgcaacttcaagcaaggaagataaatcaacattaattggataaaatccagtaaattacataagcttaataaggaaaaatcagagatatataagatcaacaaataaagtatcaaccaagaaaaactaaaaaagctcttacccagaactaccaggtcgtcctgaggaataagacccataagcaccataagcgccgccaccgctaccaccaccaccaccaccaatctgcatacaaataaagtaaaacaaacaagttcaaaaacgggaaggaaaatttattgtgcaagagacatatacaaaaaatatacaaacaaatggatggtgaagatattaaaatgcattctgcaaaaagtacgaaacaagaagaggataatcaaccaaaacaaccagaaacagaaagtaattttccttaaggatgcaaataaaggttagattttgaacgtatctagagatgtactgtcggcattcataaaaatacctgggaaccaccataacttccatagccgtcagaagatgccaaatcacttgagccaccataaccaccagaataagaatgaccacgtccatgtcttttactgtctctactttcataatttaaaccatctgaaccatctgccgacataggaatatacggtagaactggaaggaaagtagatactgcaccctctctatcaaaaagattagctctcaatcgggtaattacatgtataagagcttccttagctacgtcaagatcaccagcaatctgatcattaaaaattcacagattcaataattgtcagtgatcacatgccaccctgttaatcactaaaggctggataatgatcaaatccaaaaaggcttcagtaaagctagtattacctgcaccatctcatcctcatcggatgcaatttttggaagattatcctttgccaatatacgaatattagctttagtagccctcctcatttcagttacgatggctccccctttaccaataaggcagccaattcttgatgttggaacaagtagacgggtcgtgaatgagacaattcctgaatctctctcaaccttctcactacatctgggctgcaggcgtactgctgcttctatagttggagagtatgaatcctcaaagaactacaacgatacagaattaataaaattttagtcatacgatttttccacttataatgttagaagaataactaagatgacattttacctcctttgctgaaactgttattaaacaatcgtcgccttcagtagcggaactatcaactttgactcctgctccagattcctgtctgatctgattaattatagtgccaccctttccaatcacacctccaatatttccagttgggcataccaagcggatggaaaactcttttgaagatgcttcatccctcggagctgagtacaaggaacgtgac

SEQ ID NO: 55959 - DNA, 1446 bp, Cannabis sativa
  modified_base (344)..(344): a, c, t, g, unknown or other
  modified_base (921)..(928): a, c, t, g, unknown or other
ccgttaaggtaacctatacagtggatcagtatgttgacttgtatgtgaaacagattgttcgtcttcatgggataccgaaatctatcgtttcagatagtgacccttaatttacctcgaagttttggatcagtttgtggtaggccatgggaactaatctgaaatgcagcacgacctttcatcctcaaactgatgggcaatctgagcgaaccattcagatattcgaaggcctattacgagcttgtgtcatggattttggagggtcatggagcaaatattctcctctgattaagttctcctacaataatagctatcaaagtaccataggaatggctcctcatgagctnctctatggcagaaaatgttgttccccaacccattgggacgaaacaggagaacaaaaatagttaggccctgagttggtccagaaaactaatgaggcaatagataagattaaagctcgaatgcttgcttcgcaaagcaggcagaaaaactatgtagaccctaaacatcaagatgaaacctggagaccatgttttctacgagtgtccccaatgaaaggaatcagatgctttgggaagaaaggcaagttaagtcctagatttattggaccttttgaaatacttgaaaaggttgggcaggtttcttatctccatcgttgtcagctgagcataatgtatttctcgtttccatgctgaggaaatacatatttgatcacatatcttgagttatgaggcattggaattaaaaccggacctattttgtgacaagtaactagtccaaattctggataagaaagaaaaggtccttttgaagtaaaaccatcacattggttaaagtgctctagagaaatagtaaagtggaggaagccacttgggaattggagtctgatataaggattcaatatccagagttattcaggtnnnnnnnngaggacaaaatccttttaacggggggataattgtaaagaccgcttatgattaacattttggatcaatcaataattagggtttattcataagatttgaatattatttataatatgcatatggtggaaatttatttaatctaatatatgtttattacgctatttatgtaaatttcttaaattctgtgattgtgcacggaagctgcggaaagcgacgttgggcctttagagagtcgcattttatttgttttaaaatattataagcgggggtatcgttgttaggttttaaaataccgggttttgacggggtttgggatttgactaaattgcctttgttggaaagattgcatttgttagtaaagggggcatgttagtcttttcttaggctttttgtctcttgtgggaatgttgggctgatgttagattaaaaaaaaaaagaaaaagaaacaaataaagaggtttatttacttaagttggaagaaagataaaaacggaatatttagaaatctctctctctctct

SEQ ID NO: 55960 - DNA, 951 bp, Cannabis sativa
tttataaattacggtgatttatatagcatgtgttaatgtaatatgagctatatgtggaataaaaatatttcacgtttggcgaccttagagactcgatcgcagaccagaaatatcataacgggtttaattgatagaattaatggtaatattgtgatatgttgataatataggtattggggtaattaggagtttgtgggatttgacttagcaccctagaaatataaatttcttagtggctaagaaatgataagataattatgaatgataaaaattttattaatattaattatattattattaatattgttatacctgaaatttagctatcatctcagtggagaacacgtgtcaagataaagggaatatggatcgatgaaattactttttatggaaaaactcattaatagcgtaagtagtagagtatatatgcaatttgctggctgtaaggtcttatgcgaggaaaagatatacaaattgttgcttagcatattaacgagaaactatatgtcattgaattcatattgtgaggcatcaagtacgttacatctgggaagatgaaagaaacgcatataactgcgaaaacacttagtatataacgtacaaactaagtataacaatcgagttggctcgagacccaatgagcgaggtgcctatctcgctatgggaaggctcattctagtaactttccccagttaacgtcagacatcttctcagtgatatttacaaatcccgacgagtcagaatttaacattcaaatgagcctcgagaaactcttttaacaacaattgcgattgtcccaaatgaagcgataagctttttaacaaagaagcaacaaggcatacattgtcgacctcggaaagataagaaaaaaggcttcagcttgctattactggaatcaagctcctgtcgagacattctcggacgtaacaattaaagacgtgttaaaacaca

SEQ ID NO: 55961 - DNA, 765 bp, Cannabis sativa
ttttttttgattaatcgggagatttattaattattttttaattcctttaaactatgtaaataattgctcatttgattgtatttggtttattttttgagataatttattaatgtgatcacgagacataatatgagtgcttatttaattaatttaaattagttggaattaagtataataacttaaaatatttaaatattaacttaaaaattacaaatactaagtcttaaatttaattattagtacaatcaaggggaagccggggagaggtggcttttgctgcagcgaatgtggtgcagcaggagctaactccaattgtggtggaactgctggccattcaagggggactacgggcaggtattcaaaggggcttgaggcggtttgcacttgaaacagattgtcttggagcggttcaattgattaaagacacgaaagaaggatgtcgagacattgacgggctgttattttaaattaaagaactgcttttgcacccctccgttatgggtttgtcttttatttttagagaggccaattatgtggctgacattttagccaatcaagctttgttatccaaagttagcgctatgtggattggggtttctcccccttgtgttcgtcatgctcttcgagctgaggagccatttcctttgtaatcatttggatttataaatgaatatcttttcaaaaaaaaaaaaaattaattattagagttctatttatgaaataattttttacttaaattctccaattataatatagggttatttg

SEQ ID NO: 55962 - DNA, 2247 bp, Cannabis sativa
cctcattctaagctcactttttttacttttttatattttcacataaactatttatttatcaccaccaaaaaattaaaatataaataaatagtgaaccatgaagttgataattctgatgcacaatgaataaaaaaaattacccctaaatcattatcctaacttaaatagattcttacaaactattaaatcaaattaacaattaataatatagaatgaaaatgaacaaattttaaattgcaatttcatagtgtgatggccccaaatttgagctatcaaataatttagattctagattttaaattctcacttttcgaatttctatttcttcaaataaactaaatataataaaataagaagattaagaaataaaaaaaataaaaaaatttgaaacacaataacaagaaaaataatttttccctaaattattaaccctagtctaaatagattattacaaataattaagtgagattaaaatatatataatatacaaacttgtttgtaattttccaattgtatctttaatctccaattttatattgatgtaattgtaaaattttaatttttttattttggaaaatatctctgcgttccgtaaccattccctccatttctctgcaagtgcaacaagccaaattacttttttaattattcaactttccacaagaaaagcattttcatttatcattttataaataaagtaaatattgtaaattgggcttttgtttgggcggctggctcatcattatttagttttttttattacaaattaaaatatgtgggggcttaaaaaatgaatgggtatgggggcttttatttaaatttacaaataattgaatggataattacaaatttaaataattaaatttatatagttttataataattttttttagtgcgggcttaagccccctcatccagtgcagtgtgttcgtccctgatcacgagcctaaacgcgacatcctacctgtcgaagacaggggcttgaagcagccaaaacttatagagcccacaatctcctttaccgaagaagatgctgctcatgtcagtttcccacataaagacccctggtcattaattcacaaatcgagaatatgactatagcaagatgcatggtggacgatggagcctcctccaactttcttttcaagtcaacatatgaaatgatggagctccagcttaccgatctagcacgctgcaatcaagtgatgtatggctgcagtttgtcgtaatcgatgtccatcacccttcaacgccatgataggctgatcagccctcaatgacttgaaagcattgacatccatctaccacttatgcctcaaatttctaacaaggcatggggtaagttgcgtgaggggagaccaacagtctattggacaaggagtgcacccaagtgctcaaagatgagttcaagaggccaacagcccatgacttcataacggaggcattctatccactatgggcacccaacctagtactggtgcgcaagcccaacaaaaagtggagagtatgcatccacttcaccaacctgaacaaagcatgtccaaaagactactttttgcttcccaaaattgaccaactagtagatgccacagttggccatgaaatccaaagtttcatggatgtgtattcagtttacaatcaaataaagatgcatccaccagattaggagcacactagctttatgatatatcaaggcatataatgcttcaaagtcatgcccttcgggctctaaaatgttagggccacatatcaaagactggtaagcatgatttttaaagatctcataggtcgggacatggagatgtatgtggacgacatgcttgtcaagtccaaaaatgttggggacatgtggaggacctagatgagtgcttcaaaatccttcgtagctacaacatgaagttccaccccctcgaatgctctttcagtgtaggctcgggaaaattccttggcttcatagtcaatgccaggggaatagaagcaaacccgaataagatccaagcccttttggacatgaagtcgaccacaaataaaagaagtacaaagcctagtaaaccacattacttagttaagcagaattgtgtccaagtttacagacaaatgtgtacccttctttaacattctcagaggccacaaaaaattcgagtggatagaggaatgtgaaaatgcattttaggagctgaagaaacagttggctgaaccaccagtgttgtccaataccctagacaatgaagagctaagcgtgtacct

SEQ ID NO: 55963 - DNA, 807 bp, Cannabis sativa
tgtacctgcaacataggatttttcgggagcttgttaaatggttttgcttctaatctttttttactctcgaaaacacaattaaacgtgattgataaatgaattgttatttcattaattttcatttatgctttaattcctacttattcttttgaatcagtaatttttttctattaagaaggttgggaagtatacataaccttttaactttgtgagccatgaaatattgatcaaatgaaacatggtgcacatgtatatttttttttcttccaggaaattgtcttatttatttgttagcattcatcatatactaataagttttatgtgtgattatgtgattaggtttttgtatgagatatagagtagtttggtttttgattgtatgtgtttagagcctaaatttgttgcttctgaaaattctaagctccatatctcctttgtgttttatgttgtaaggttatggtgaatgtgtatataagattctaatagattatatttttgacacgatatggtaagtattaaggagtttataaatcgaaaaactaatttaatagtagtgctcatttatagatggagtagtaatatgcgttttataataaattaatcactctatattaaaagattcatttagaccataataataaattaaaatatatatatgattatttcttgtatatcatttccaattaaattatatagtacttaacataaaactataactatgtatacgtgccttgcacgtagctttctcctagtaattaaatacactagaaaaataattcaagcaaaattatcatctatctagatttt

SEQ ID NO: 55964 - DNA, 1262 bp, Cannabis sativa
tgcatacaaactaagcatcaacatgccaccagcatgccccacaacatgcgccaccacttaaccaccacttcgccaacttgtggtcatcacttagcttgtaacatgacatcttagcacgcacgtaacactcttccccacttcaacatgtcgatgtcctcatcgacggaccgcaggcaaatcttcctgatctcgactcctaagcttacacccagcttctcctgaatcctaagtctgcacttgtccctctacctccgtagaaccaccctcttggtgacgatctccctcgcttactcttggacttgatcaaagactgtatgccattgtcgctattcagaaccacccatggagtagtgcctccacactagaatacttcccccaacatgaactcctccgagtccatcacaacgtccctccagtcaaccaagtagcccttgcaacactaaccctgaagctaccacatcttctgattgtagctcactcaccaatcgtccaatgtatactcctttcaacaaggactaagtatggtgcaccccacggggtgaggttcgcaaaccaaccgttcccaatggcacctacagaacacgtttccactgaagccaagtccctctggacaagtttcttcggaaactacacacgccaactctatggcgcaccatcctcctgatggcaatcgagcaagatactcattgcaagataaaatttggtgcgtcccacctggacaaggctcgcaagccaactgcactcaatgcagcaccaactgtactcttgcacataatttcttctcgaagttctcaacattggccctctggccctaccgcacacgcacggcttcatgcaataggccccactgacccactgcatacttgctcctctgagctcctgcttgtgtcggctcccaaaactgtgtcacaagctcatttcccaaaatcaaccctgcatcttctgagaactcgctaagttttgacaaacttgataacacccagtcttactcttaagacttgaagtcatcccaatccgctatctcccatcggtacatgctctctgaaccattcggcttacagtgtcccatacaacaccagtgtccccataaacacaaaacatgcccatacatgccgcaaactagcacagtcttgatctcagcctacgcccttacatattgtccatttgcagcttgcagcaatcatgcaagtcttcgcactgaacaacccatctgttgtagtgtttccctctggattcacacaccaaaactgaacaagtaccct

SEQ ID NO: 55965 - DNA, 1195 bp, Cannabis sativa
cctggtgaaataatttccaacagtacgtgctagtgtaaactatttataccgagcttaatgaaacttgggagaatatttacctcgcacatgagcaaaatgttacgttcgacaagctcaagtccatgaggaatgcgaggaacaaaagagatcctaacaggtattgtaaattccataaggatattgggcatacgaccaataaatgtcaccaattgagatgagatagaaagtctcatcgctcgaagtcacttcaaacagtacgtgaagagaaagggccatggacacaaccaacctagtttgcctaataacccaaacaaccaagggtgacaacctcttcctgttgaaggagaggacatcctggttatttcgggggggccacatatcgcagaggagagcaataactcccaaaaaagatatgtaaaaggataaagaacgagcagtcagcattcgccccaaaaccttctaacaaggtgaaaactaaggaacctccaatcatattcacggaggaagacgagaagaatgtgagatatcctcacgtcgatctgttggtcattactattcaactcgccaataaaagaataaagagggtgttaatagacaacggaagctcaataaacatcctttataaggaaacgctaaggaagatggggctcaaaaaagctaaattgaggccttttatggtaaatctttgtggcttcactggagacagcattgccagtctaggcataattgagctcgcattaaccttgggcgaggcacccctatccgccacaattatgcaagacttcctagttgtcgacctcccatcgacttacaacatattgttgggatgtccaacattgatcagactaggggcagttagttcgatcaaggccctacacttgaagttccaaacaccagaaggtgtgggagtggtgcggggtgaccagatgctggctcgctattgctatcgcatagagttgcagcatagggaagccggtcaccagttaatggcgatcttggcagaagaaagtgaaaggaaggacgaagatcttgaccctcaagttcaagatgaaagaaacctatttaaaccaattgaagaattggaagaagttattctcagccaaggaaatcccacaaagtgtgtatacgttgggaagaacccggacgagcaactcaaatagcagctaataattttcttaagggcgaactaggatca

SEQ ID NO: 55966 - DNA, 1768 bp, Cannabis sativa
gtgtacgtaacctttatatataattctgttttacacattattcatattattagaaaagcaaactgaaaattaggatatgcaaaacttgtgttcccattattaattttttatgtatcaactacacggctacataatataattcatttaaaatgcatgtccatgatcttttattttaacacatatgaattagttaattatcattatttttttaaaaattttaaaatgagtaagatataaacaaaagcatggattaatttgatttgtagtattccatatattaggtgcccataatttagtgtactattttaatatccaattattgactttatatttcttaatcatgtttaagagtatataatttctaataattaactttctctcactgtataaaaagtctatctaataaaaggtttaattagttaattgacactaattaagtttagtagaaatgagacaatataatattgggatatgataatataataaatataaagatgtatttatgataattaaatatataaattaataagaagaagaaagattagataataaccggaagatttatccattgagagctgaatttgtgttccttgattcaaagacaaaacatgatcaaaaccccacgtaactttataattttcatcaaaattactatcacttttttggcttttaaccaataataatcccttacaacttaaacccaacaacacaaacaacaccaacactgaaaaacccatttcaataatatttaattaattagtagtagcaatcaataatccaaatcaactaaattctctctatgctaatatgataataataatatatatacttgaaatgttatactccaatatttatggatttacacatatatataaggcaaaaagggtttgtgagccaacattattattattattattgatttacatttcccacacgctattgatcatgtttggctccatgcttgagagatttgatatatatttacaattgaaattaattggctgccaaattagaccaaatttaatcatgtcaatacataagaaatagacattattttataagtttgatatatgttttaatttaaaaaaggtgcaaatgcagtgcaagaaagaaactctcctatatattttgtgctatgaatttaattaagtgaagtgaataataccaaataaaactagctaacttaactataggcctcatgagtccattaatatgtatgtacaagaaaggttcaaagaatgatacataaacatgattgggtcactattgaaacttgaaatgaaagcaaaggagttgagttttcaagcttttttgactaattaatttatgatgatgatgatgatgaagaagtatggaggctatattatgggcttgagtgattacatcaaggtctttctggattgagctgtttccacacgttttattaggctaaaagggtatggggcccatttccttgccctaactaacaatacccttttctttttatttcaagaataacaatacattacctcaaaacttattattaggcactcatgtgcaatttgggaattgggaatgcttaacactagtttataataattattaaattaaaatatatcgtaatattatattagttataatattttatgatagtattaggaaaactccaatcacgctaagacagactaggctcgtgcttaaggcccaccaaaacttagagcccaaaatttttatatggtatatttttttatattgaaaaaaatgatatttttgtaaaattttgtgaaaa

SEQ ID NO: 55967 - DNA, 598 bp, Cannabis sativa
aagcaaactgtaaactctaatggtttaaccttgtgcccgtgcaagaagtgtgaaaattggaagttgcaaactacagatgtcataagggcacatttaataagaaatgggattgtgaattcctacataaaatggatctaccatggtgaggaagaattggaggaagaaatagaaaataatgaggacgtcccatacgagcatgacgacttgggagcaggattgcatgatgcaactggtgttgaatttgttaatattggctctacagatgagtttattgtagatattcgacctgctgctgaacaagctcgttatgagaaactatatgaagctttgaatagtcctttgttcaaaggatgtgaaaactcctctgccttaacttgtgttgtgaagttaatgaacataaaagtcctaaacaagtggagtgatagttcatttgaaatgttgttaaaattcttacatgaattactgccaaaggataataattgtcctacaaactactatgacgcaagaaagttactatgtgatgttggtttaggttatgagaacattgatatttgtcaatacgattgtgctctatttcatggcgaacatgccaccgcta

SEQ ID NO: 55968 - DNA, 1253 bp, Cannabis sativa
aaataattccaacacttactcccatagaatgatgattcttatacacgagtgcatcactctagctagttcctggactgacgactggcccctatgaaccaatccaagtgtttccaacgtggttttctccgactcgcatgcttcatggggaaatttcctgaatgaaatcaccccaagtcaaggatactcaaccatggagttccctcatggtgagctaccaaaacaagatacttcttcctaacataggtagtcccacgcctacataatctcaaaattactacacaatcgtcgccttcaattcatctaggattccagacaagactcataaattttcttacctttggtaatgctagatcacttctaaacaaaagattttgttatttgaatcaattagattgatgcctccattaattactcatgttctatattccactaggaaatatcaacaatttaactcatattgtcatctttctgccaatgatcatcactgtgatatgataaactcttttcatagtaaacggtaagttaatgaaagatgtttattacatatcggtccagtcatacattatctaattatacactgtttatttactatatgtccatctacatatgtgatccgaatcaaaatcacacacacacacacactagaagtatagtgtaaagtaaattgtacttagcagttctatgttaaagatttccagaactttaatgcactacctacttgttttattcatatggtataatcttaattctcttgtaaatccttacaagattataccttctccatatgaataagaaattttctgatatttaataattaatgtattatttatcttataattatatttgatatattttctaatattttatctattaattacatacctttagagcagaaatcccaatatttatttgtaagggcatgatgaaataagagcagtgatcatcaaggtctgattgcagtagtatacatgtggaccaacatttgggaatgttttgaaattgtttgtatagagaacaaattgtttaaaaatataaggggtttatttggaaatttggatgtcataattaaaatatttttttcgattatgaacgatgtgaattttaaatgtgcacacaaaaattttgaaagtcttaattttaatgactttgagaattattaagtagttaaaaagttcattttttctacattttttggagttgtaaaattctgggttgttactattggattttgtgccctaaataaaacccattac

SEQ ID NO: 55969 - DNA, 1249 bp, Cannabis sativa
tctaaaatccttgatgcaagctcagcaaagaagaagaagaagaagaagaagaaaaattttcaaaaaaaaaaattggctctaaaaagaaagaaaaaaaaaattctaccttgatgtataaatagttcttgaagaactaatgaagatgaaatccagaggttctcagagaagtcttgagcgtgggaagctaaaaggaaagtgaaaaattttgattgaaagctctcttatttataggtgagctcaatatcctaatcctaaagcaattgcgagtcttttaaatttaaagcacaaaaggaaaagataaataataagaaaagatgaaaaatattttcccttatccttttagcttagaattttgaaattcctatgcgaatatgaataagaattccaaatttaaaaggtaacaataattcttaatgctattgagattaaggtaaagctagagtttacaatgaataagataaataataaacaaaagatcaaaaaacgtttctcttcttcttttctactataaattttggatggcatttaaaataagagtaggatttaaatccaattaatcttaacgccataagaaatacatgaaaattttaagttttcaaagaaattttttttcctctttttctttgcttaaatttttttgaaaatcccctgatataatagaaagggaattcaaagttctaagtctattaggaatgcttaaaaatagaaataattgtctaagattgtcaaaattgatgcccatctggtagcttcaagagaaacgggctcggttcacatcattaagttagttccacacaagtgtaaagtttacttcgagggcaaatattaacccaaaaaatttccttggtggtttgacacgtggcaagaaagaagacatctcagagttgattagtcccaagtcgtagcagtcgacctaggaggggtccctagtcctacgcccagattgacttcgggaactccaaaatagaatttcggactttgataactcatttccaactcattatctttcagtattctgtgacatgaagacatggagcaaccaaatctaggccttgagagctgaaaatacatgaactagcacctcgaaggccaacttgggaaactagggtttcacccagtgcccaggtttttcccaagttgacatccttaactaaggtttcactttctaggactgtcttagtgaaaatgggtgaaagttttcattgggacatgaactagacatacaacgaacatattttaggcattagaa

SEQ ID NO: 55970 - DNA, 656 bp, Cannabis sativa
ggagtcactatcaagagccacaaaactgcttgagctcatatatactgatgtttgtgggctaattaacccaaactcatttggtaagagtaaatacatcctcctctttattgatgatttttcaagaaaagtatagtctcatttcttaaaggagaaatcataagtgtttgagaatttcaagaaatccaaagctccagttgaaaaagaaaagtggtcttcctattaaagccatgagatctgaccgaggaggagagtttacatcaaataagttcaacaaatactatgaagatcatggaattcattatccattaatagtgccaagatcccccaagaaaatggagtggcagagaggaagaattgaaccatacttaacatggctcgcaacatgctcaaaagtaaaagaatgccaaaggagttttggtctgaagtgatagcttgcatagtctacttgtaaatcgctctccaataagaagtgtacatgagaagacacctaaagaagcatggagtgaaagaaaacctagaattgctcaccttagagtctttggaagtatttcttatattcaagttcccaatcagaagagaacgaagcttgatgacagaagtgagaagtacatcttcattggctatgactcaagatccaaaggctacaagttgtacaa

SEQ ID NO: 55971 - DNA, 1066 bp, Cannabis sativa
ttaacgtacttaactacacttcctatgggatcgacctcactcctggtgagtctactacttgaaacggtacgtacacttgcgtgtgcaaattatcgcaacaacaaaccctctctcatgaaaaccctttctgaaatctggtcatcacagtgtcgatttccagttgtagtgtctgagcatgctgatggccttttctttgtcacttttgggtgtgaggggataaaggtagaattcttgagggacaaccatggcattttgctcaaagtgtcacggtttttgctgctcctgatagtgctttccctattcttccagagcagcttcactatgtccctttctgggttcaggtgtatgggattcctttcatgtgtaagtcacaggaacttgctaagtttatagcttctgagataggggatttggttgaggttgatcaatctactgttagggagggtattgggccgtatcttaggattcgggtgttacttgatgttaatctacctattaggcgtagtttgaatgttcgatttatcaaactggggagggagattattaagtggattgactttaaatatgagcaattacctgaaatctgctatttttgtggaaagcttgatcatactcgcaagtattgtcatgcttatcttcaaaaatgtgatgaatgtcctactcttcctccttgtccttttatgattcttcttcgtggtaaggaaaaaccagctgagaaagtccagccctttcagtatccgcaccctccttctatttctgtggttcagtagcctcagggggtttctctcttcctcctgtcacaaactttcctacaatccagttctcttctttatttcctcaatatttaactgctgatactcaatttgctagtgcttctatttctgatggtatcatgattcctacccatgttaatcctaacaatttgactctgaatactggttctatggatcctactttgcatgttccttcacctgtttatggggcttattctactgattctatccttgtggctgatagggcttcttgtgaaccctctgggggcatacaatctgttcagtcttctgtg

SEQ ID NO: 55972 - DNA, 1210 bp, Cannabis sativa
  modified_base (27)..(28): a, c, t, g, unknown or other
  modified_base (504)..(518): a, c, t, g, unknown or other
  modified_base (608)..(618): a, c, t, g, unknown or other
  modified_base (877)..(877): a, c, t, g, unknown or other
tatggacctaatagaatttataatcannaaataaatcatatgaaccatgcaacataaaataatttctgatctttattaactagtaaaactgtcgacatctatagatgtcctaaatgatggtgcggaccctactcctcttaattaaactatcattaccctcattccaaagatcaagaaggcacagacatgaaggatttcagaccaatcagcctatgcaatgtcaaactgtcgacatctatagggcaggtataagtagtatgagatcctccatatagcttgcaggcaacttgagcttatttgacttgtgtagtcaccagctttgttaatgcctccacctgggctgtcaactagttatggcatcgacttcatgcattcccgcaacctttttagttgggcctctctctgttgaccattgttgattagttatggccatctcttttctagtagcccatcacgaaataactccacagttaagcattcttaacctggggtaatttcaggatnnnnnnnnnnnnnnnaagttttctcaggaagcgtgcgagagtgttggtctgtagggtcagtcgtaattccataaagcagccagtgacgtactcgtgtataagagnnnnnnnnnnngtgggtgtaagggcccaatggaaggttgaagtggagacgttacaactttaccatgaataatttgaataattttcaaattagtaaaaggtcacaagaattatttaaaaaaaaatgtgagcatcaatgaaaatcatgtttaagattcactattttctttttatttttataatcgaacaacagtccattcttaagcataaatacatctattatgattaccctaaatgtaatgaccgcatattagaatatggattagtaaagncaattagcattaattattgatatttttataatatgcatgagtttagtatgttatgggtcccattattagaaatgggcataagagttataatttctcaatttcaaaaattttattaaactctaagagtattacttaagttgaatatgcattatgtaaattttataatttttgctcggcgacgacggaaaatgcaatggatggccgtaagagtcacatgggtaactctgaaacctttttcttagtggaataaatatttgagataaatagaatatcagttttgagcggggttatggcttttgatcattttatccctaggcttgttattgtttaact

SEQ ID NO: 55973 - DNA, 2007 bp, Cannabis sativa
  modified_base (445)..(450): a, c, t, g, unknown or other
  modified_base (742)..(746): a, c, t, g, unknown or other
ttagtagttttatgctttttttttctgaaaaaaaaggtccaaagttcaaatccttcccatttccaaataaaaaaataaaaaaaatgacatcaataataaaatgaatatgaataaatcatttatttatttatttatttattttgctaaacccacaactcatttattatgaatatcaatatagcactttttcttcttattatattttattttattgtattgtgtatttttgcattggtgttcggatgaacccattcaaaaataagatgtcctggtcaaccgggggttgaggacaggttgcattcaagggcttcacattatctttctattaattatatgggtcatcaaagaagtaactaaggaaagtaagaatgtgatatggatatatttttagtatttttatattaaatagttaagtttaattctcagttgtaaataaatacttaannnnnntttttagcagtaataatacttaagttatgattcagaaacttttgtaaatacctaactgttaagtattaagtaaattgccacgtgacaattcctgattggtccaagtcattaaatttttattttcttaaaaaaaattaatttaaatataccaataaaaaaaataacacgtggataatgacttaatatttaacagttaggtacctacagagtttcaaaaatataacttaagtattattatcgccaaaaattaaatttaggtatttatttgcaactgggagttaaacttaggtannnnngccgcaaattactctttaaattaatgtttattattggaataaaaaagaatgtcacaaaagaatgtcatagatctttaatatcttctctttcttcccattagaatattttagaacaaaaagtactaaaaataatgtgaaagaaaaataaaataaaataatatatttttaaacgatgtgaaagtttctgacactcttagagtatgataggcacaagaagttcaaaggtataaagtgaatatcattgtaacgaaatttattataaagagccatgaaactttaaagaactttaattattacatttaagccaacttgtggccttcgccagggagaccctctctccccttatctatttatttgggcgattgagatcttatctagacttcttgaaaatgtcttgggaaatggtagtatcaggggcattaacatttcccatggtggacctattctgtcccatatattttttacgaatgacttaatcttggtggaaagggcccctctggcaaaagctaaaggctactggaattgcctggagaagttttgttcttggtcaaggaaacaggttaataaacttaaatcttccattttttagtaggaataccccaaataacctgaaacaaggaatttgtgatacattgggtattggaggaccagaaggaaatgttaattatttggggctccccttattttgatgtagacaaaaggatggtaatttcaattttgttgtagagaacctcatctcaaaattgcaaggatggaaggcaaaaatcctttcgaaagtggggcatgctactttgatcaaatatatgggtctgtccttgcctatgtatgtgatgcaaaccactaagctctcaagtagacttgtctctaggattgatggtttagtgcgtgacatctggtggggttttgagaaagggaacggatgactctagttgaatgtctgggataaaatttgcctcccaaaatccaaaggtggacttggttttcgcaaaaccaagtagatgaatatggccttccttgttaagtgggggtggaacttattgtgtgggagtcagactctgtgctgtaaaattctgagtgcaaaatatctaaaggaaagaggtttctgaattgtaagttcaagaactctgattcttggttttagaagaaagtggtcaaagctagtaacattttgagagaaggagcttgtaatgtggtgaatgatggcagggtactaatatttgggaggatccatgggtagctcatggtaaatctttctacccta

SEQ ID NO: 55974 - DNA, 2357 bp, Cannabis sativa
  modified_base (38)..(40): a, c, t, g, unknown or other
ttacgtgattttgccgttaaaattctgcatagtccacnnntctatcttattagatttctctgatacaaaactagggttctttctctaaaggactttctgtcccttattcagtgtatccttaccctatttatagttacataggaaggcagttaattacagtagaattaatatttcacaacaacaatcccttgaaattgtgggatttgatttcatcccatgtaaaataaatacggttattatttgaaaattacacagatatgatttatcttcttttaccgggtcaatgctgaggtgggtttagatacactggaaaatgtatctcgttgggatatctcgctgggaacttgaatagcaacaataaccctggcagcgagctagagcttttctcgtgtctttttgaggttgataatgaaaacaccgtcattatctgacaatcacagctcttgatgagaaggtgaacttcatcaattaacatcatttgaatgtcagcttctatccgagagagatgactccacggagcagtggatctcattaaaagatgtctgaagctgaatagtgaaggtaccatgtgcatgtcttcttatagagagatggatgcgtcgctattcgttgttcagattcattcaacagttatgcttagtttgtataatgtatattatatactaagtgttctaacagtcaacatgcctcatctacatctcttcatacgtagcaaggttggtgcataactttatattactgatgtcatctttatgattgtgtcttcatgtacgaaatggtttctcgtcaatatgcaacttaaaagtttgtacatccgtgtctcgcttaaaactttacagtcaacgacttatagatatactctataagctttgcatttaatgagttattccatttcaatatcttctaatataattgtcattatattcgttgattcatttttcctcaagttgacacatgtcctcctctgaagtaccagtcgaattttgggtataacaattgccccttaaaaaattctttttaatgaaaagtgctttataaatgattatagagggtatttttgtcataatcccttttgaaaaaatgcatgtcctatgactttggtagttttgcagtttcaatgaacatcagcatttaatgaccatcctttccacttctgtttcagattctacctattggatcgattgtctccctaatctaacagagattaaccgaagagtataaaatgaaaaaaaggaaccacctttgcacaacttttgccatttcagaatctctaaaaacttttcaagcttttctgtagaaaataccatacccagattttccagaaaccttgcatgccatcgttgtcataaagatttttcttgcgagtttcgtctgatttaattttcaacttcaagcattcagggggatcttcacgctgttcgttgtttcgcagattgcaaagacgctaatcgtcccaaaaaccaactccaaacagtaagtgatttttctccttactttcttacatgcttttaatgttgtgtttatgggtttgattactaatttcctagttaacacctttgttgcctcatttggttttgcaattttagggctttattatatctgggtaaatgttagggtttaggtagaacataggtttttgagattctccaatttaccaacttctggtttgataaatttcttcaagaatttgggattgctttctccttccagcaatgtcccaatctggtttagaagtttatcgtccatagtatttagacaaagtgtcctactgaacttttcctcccatacaaacctagaatttcaaaacctaaatccaaattagaaataaatgatgcaaaaattagggaacaattagtgaaaacccaccaagaatatattgctagtcaccacatacgcctcttgcaagaaattacagaaggtagatgccgtttcttgcgggacgctgcttgtcctgaacctcccagtttttcttctattcctttggctaagcttttgtttttacccaaggtcacgattgcttttgaactagttgacttggactttgaaattatgtattccaacccacgtaaatcaaagactcctctggaccctaacctcacctttaaggctaagttaatagagtcaaaggtgcgagccatcagagactatgtggataatattttgaggacttgtggcgttgaatataagcaagactgtcgagttagatcaaggcgtctggcgagttcagttgctatccatcagtgtgacttactcgtgaaacatctaagggggctagttgcgagacccgtacaagtggttggaccaggataggtccttggagccttgaacacattagggctggagcaataatccccctg

SEQ ID NO: 55975 - DNA, 1780 bp, Cannabis sativa
  modified_base (1741)..(1754): a, c, t, g, unknown or other
ctatgtagattttggttacgaattaggatattccattggttgctatgtgtatttttgtaaaaataataaaaaaaaaaccgctttagtgtaaaaatacaaaatttcctttacttttttgtttagatatttatagaaagtctgtatatatatatatatatatatatatatacatatattgtttgtgttttgtgttatttgtatcaattataattacatattaaattagttatatctttttattatctttctccttattttttcattttttttagtatttgagttttacaaaagttattaattagatcatctattttattaaataataaaatagatcttgtattttttaaaatagtacaaataagaccatgagtttgtgatatttttttttaatataaccaacttgaagataatttttagcacgaatagatgcagaaaatataatcgattttgtcataacacctctagatagaattattattaagttttattttaacaaaaaaaattaattcagaatcttatttatattattttagaaaatacactgtctatttaattatttaacaaaataaaagattcaatcaataactttgtaaaatacagaatctaaaatggtatttaccgtattttttatgctttattttttttttattcttttttttttctttcatatgagttaatgtatgaattattatatgaaaaatacaaattgacactttattttaaaaaatacctccataaggtgtggacaacatttataccttttttgtgcttttaattaccaaaataactcttacactatcacttactatgtataccacctattaactttttttttttcaagaattcaaaatagcctgttttgattaattttggtcatcttcttaagtgaagtcgctagaattaatgatagttctctttctgtggttggattttatttcgattgcgttgggttgctggatggttgacccaaggttgaatcagacaaaggtttcaatctcagaaagcatggatcgtgggttgaaggtgtgtgtaagaggtatttgtttaatatttgtaatttaggatgtatatttgtttatttggccagctggaagttttttttggtaagattgaccccaatttttctccttgtggctaaaggtggtcgtcgtccagtgaagaagaagtcgaaggtgtctttgctagaaaaaaaatttcaacttcaacggttagaaaagaaataagtcaacttcaaggaaactgtgatgaaactgtaatgcaacagttatatctgttccgagccaactaacataaaatcacaaaacaactaattctgcatatttaatacaaacaaatattacaacaatcgtgttttatttgttcagatcgcgtatttgacaatttggagtcctatttttataatactatgatattgtagtagcaaaactattatttaactaacgtgtaacttaattgtaactaaaaatattaaatgtgaatgtgtatatgtaaaaaaaactatttgtcagtatttgtacctaatagtaatatgtggagaaataactgttagcacaatatttatgcagctgtaatacaactgttatgaagcattaaaaatcataacagtgtttccacgtacataactctatctacatgtctcttcgtgatttaatatgaacaaattcattattggaaatttagaaagcaataaaaatacaacaggataaatacttttactatactattgatgtaattttttttnnnnnnnnnnnnnnttggattgtttgggaactccagttca

SEQ ID NO: 55976 - DNA, 1244 bp, Cannabis sativa
aaaatacatgttaacataatcacttcaaatctcttaaattgataacagttttatttagggcacaaaacccaatattttccaccttaggaatgagagagataaccgtttcattaaactgaaccgaaatcttaccagtgttaaagaagtctttgatcgctaggcacacttcagctcttatgtctttccacatagccttaaaaaattcagagttgtagccatcagggcctggacttttcgaactagggatgctgaacaaagcttccttgatctccttgttagaaaaagattgaattaatctcagttgttggtttattgtcaatcggttgccatgctctagacactcagtatcaagccttctagtaaccgagctacagctgcccatgtagcttttaaaatgatcaatataatgcctcactacatcaggatagttatcaacaatatttccatgaagatcaacaaagctagctatcctattctcttcccttcttttcttgatacaggcataaaaataagcattattaccatctccttggtttagccaagttaccttactcctttggacaaggaaacttttcagcattttttcttgaagatgaaaactatcagcagcatctttttcctccattataaatctttcagctcccgagttgctttgagcttgtaatctggcttcaagaaacttatcttttgccttctgaaaatccaactccatattgcccaacctggcatgattaaatgactttaatacatgcttcagccgagaaaatttaaaccagatccccagtaagccagaagagaaaaccggtttttgccagctctccaaaaccagatttttaaactctctatgctctgtccaatagttaaagaatctaaatggcttcactcctatctccaccattacagccgaggatatgacaatagcacatttatctgagacctcttcccaactgaaataggctaaggaattaggaaacaaatccaaccaatcctcgttcttaaaagcatgatctatcctcgaatagattctatccttactcccttgattattagaccaagtgaagaaagatccctgcctcttcaaagagtccaccatgcccaaacttaaccaatcattaaattcctcaatctcagcccttgaaactggtttacctcctactctatccccaaaattaattaaggagttaaagtcacctaaaagaatccaaggcctaatcgggaacctcaaattggctaggcccttccat

SEQ ID NO: 55977 - DNA, 1511 bp, Cannabis sativa
  modified_base (55)..(68): a, c, t, g, unknown or other
  modified_base (939)..(946): a, c, t, g, unknown or other
  modified_base (1000)..(1011): a, c, t, g, unknown or other
cactctttccctacacgacgctcttccgatctaagtaaatctgattatattgaannnnnnnnnnnnnngggcacaaaacccaacaccaataactgaagttttcttttttccttgatgatatactttagtaaacagaattgatatactacaatattaaactaatatcatacagcaaaattaatatacacaatccaagttattttttttcttttttccaaatagtatactaatatccacaaaacagatatatcatagttaaaaataaaataccaaagacaaactaatatacattaattaactttaatatatcattgtacaaaaaataaatgtagcatttttgttaacattatatactgtgtagtcaaataatataccatagtgtaaaaagtagatacatcacttgttaaacaaatatactatttagtcaaactaatataccatagtacaaaaaagtaaatataccattttataaaacttatttaccataaattatttttatatttacccggaatcatattttgtctctaattttatctatacaaagttgtatatttttcaataaaaagaataaactaatcaccatgaaaaaataattatgtaatataactttataattgttgtatacctatttagctagagcttagtaaaagatgctatataaatttaacattagggtatatttattttttttgtactatggtgtatatcaatgttggctatagttcaggtaaaaattaaaaaatataatatattttactcaattaaaaagaaagatagagttgttggaaaaataaaactagaaaaaaattaataaagaataatgagagatcaaaaaaataatatagcacgcaaaagtaaggacacacacgtaattttagggaaattttatttgcactaaaaatttctaaagacactcccattttaataatttttattttnnnnnnnntttatatctttaattgtactaagtgttttaaatttttttcttccaattcatatnnnnnnnnnnnntacctatcaaataaaaataaattacattttaaatattatgacaaaaaaattaaaataaaatattatataaattttcttagaaaaaaataaaaaaaaaaatatacatgagttagaaaaaattatgaaattgaaatcaaaataagtattgaaattaatataaaataatgtgaagaaaaaattaaaaaaaaaatatttaggagtaatttttaaaaattatttaaatttatattttaataataaaatgtatttatcattttatgtgcaaatagaactctcctttatttatttggctaaaccattttagggtcattttcctgcccttctttttacatattccaagttacaagttacaatgctccataagaatcaccgaaagggatacaaggtgtcttacataattcacctaaattgtaacattattataataaggttaattaggatttttacccctgaactttgacatgtactaaatattaccccttaaacttttaaggtcatta

SEQ ID NO: 55978 - DNA, 1910 bp, Cannabis sativa
  modified_base (1394)..(1397): a, c, t, g, unknown or other
ggttccatcatatgacgagacatgcgggtatttgaatcctgaaggaaaaggggtattcattatatctggatgatacagctcaagctccttgtcagagtcatatccagatgctttccctaattcccccacttgatatctcatgaacttgtcctccagctcgtttatctgcaattggattggatcctcttgctttagacaaagttgttggcgaaggtcaggtttcttccaattcaagtgctctcgtagatccggtttggagtaattgctggcagaccttgtcttactcacagatcttgtcctactcatagacattgtctttaagtggctcacggatttacttgttcccatacattcttaatcattaacttgttgagtactttcttgtctttgagttgatcgacaataagtacttgatcgcctcaaggtcacacttccttcttcacgctctgttctttccccccgagagcggtttgtcataaatccccattagggtttgtacgagtcctcgctctatgggtttgggaagaatgttggagatttccggtaggtgacctccgttctcctaattgagtcccaagatcctcctcattggcttgaggggtttctcgttcatcagtttctggttgtctccagtctagttgttcgctctgatttatagggggtgtctcatgttccttgggttgttccttctgggcattttcctgtctccttgttcgtgaaccacgaggtctgcctcgtggtcttctcactccaggttcaagttcagtttgagcatttgttccttgtgccaccctggccgacgcaacatcacgttctaactcaacgtttcaacactgcatctcttccagacagcgtcttaggcggcgatttttcgtttcataagcgccttcttccatagactcggcacctccacgattgggcccttcatccgtcgtcccagggttctcaccatccccacgcggagttctattcgagcgtgttgtccacgcacacatgacaaacgttgggtcgagttctcccggtacgtgtggtccgtgcactggggccaccctcgggttgagtcctcctgcaatgggtagtccgtttggaccgcaggttggtagacctcctggagcccagaggctctttcccaggatgatggttagtttcctcatgtggggtgttaacatttttctggatttttcagcttttaaggaggtgatttttcttcaaaagaatgagctttttcacagaggctcttattgaaagcaccaaactgttaacgcatatttttgttaactaaatttgagcctcacagtagtgatttgacactataaaaataaaggctgtaaaaataaaaatatgaacacagggttttttacgtggttttgcagtaaaaattctgcatagtccannnntcaatcttattcaaatttctgattgtttttctcagggcctctctcgtatgagattttcctccccctttcatctttctttgtcactatttataattacatagtggacaattaattatagagttaactgtaatatgtttacaacaattatccctataattataggatttgattacatatcacgtagtgtaaatgcggtttatgatttgaaaatcatggaacaatgattttcccactttcactggatcaaaaaaattgtgcattaaacacgtctttaattgttgtatctgaagatgtctcgacagaaaattggttccagtgatctcaatagcgagctggggctattttttcttccgaggttatcaatgcatgtcttgtgacgaccgtggttcttaatgagttcttcagggctcgtttgaatgctatcttctgacttgtcagggttgtaagcctcgttgacgttagctggatgaagctataggaagtcttcccatagcgagacggacacctcgctta

SEQ ID NO: 55979 - DNA, 547 bp, Cannabis sativa
tatataaaattttgaataatgtattaccattaatttattttattggcatatagaacatatttatattttatgtttttgacattttaaattatttaaaattttttaaaaatttgtgcgagattttaaataattatattgcttgtcctaaaaaacaattaaataaaataggatgtgccaaaaatctaaaaataagtaattttgaatcttgttttatatgcacgtaaaataaattattttaaaatttatataactggtcgttaaaaaaaattatttaactataatatatactgtgtgttatcataacttttctaagtatctaaaacaaagacgctactaccggaccgaaagcttctaccaaaatttccagaaaaaattccattttttttatttggatatatttgtttacattatttggagggacaaaacatgacatctacttattaaaaaattgtagtataaaataaaaaataaaattacatagctaaaaattaaaagaaaaattacaaaaatatgttaacatgattttttttttttacgttttgaaatt

SEQ ID NO: 55980 - DNA, 1573 bp, Cannabis sativa
gagccctttgttttcggtaatttggtacttaccgaagacaaaggtgtgtatacgattcaccgcgcgagacccagtttattacacctcggccctttttgtcgaaacccttaacccacgaccctttcgctcaaaccctcaaaacccacaaccgtcaaaccctttctccgatcactacagctacccccgacgaggacgaggacgaggacgtacatctcttccccaactcttcctctaacgacgacgacgacccttcagttactctcttcgacaactggtactctctttcattctttgcaaagttggagagaaaagggtgttggccgagagaaccattgagactttgaagaaccatagcgaggcagagaaaagacgcagggcaaaaaaggttcgtgtttttcctatggtttccggtttgattttctatgcagcttatttgtgacattgttttttttttttaaaaaaattcaatgcatcaaaactggctccctcttttttttaacgaaactagatgctattaatttagaatttttatgtatatgtcattaaattttttgggttttcattttggggttttgtttgtttgaagtattttactataaagattctaagattgttataagggtattgggaggaagcctgatgatgctgccaatgtcatggcctctgtcgatattcaccaatatcattctcctcccaacataagaatatgtattatctttattattgttgttgttgtatcacttttatacatttttattcaattgtatttttatatatgtatcaatatatataactagggatagatcacatgctttgtatacacttcaaatgtttgacattgaaaaatagaattgggagtttgatttaaaaataattatttttcaaaaaacaattgtattgtttatttttttttttggtggaaataattatagagaataaataaattaatattttatttgaataagaggttaagagagtgagagaatgtggaaatgagaagtttgaaataagagaaaattcttaagataaagtggttaaggaaggatgcttttctttattgtggacattgttataaggatatatatacttttatttttgtgaaatgatatattttgtatgttttaaatttataaaattttatcctaaattttgatccttgatctgtctctttttgggtgcacatgcatactcatcactttaaaccaaaagccatatgcaaaaaccatatgcaagggtaagaaagaagacaattaatcaaaagcggaagctacaacaaatatgttttcaaattagaaaagaaaaaaaaagttattacatgtgaatatatagaaaccaaaccatccctcctataccaaaaacccaaatcaaacttatttaaaaaaacaaaaaaaacaaagatgtaaatgtagttatagctctcactcacttaagtgtattagacatttagtttttgcttattaattttttaaactgaaatgatcacttcatcaattaatggcttctttctctttatcacttttttctgtttattccaaagcagaggatacatcaataggaagcataggcactctgc

SEQ ID NO: 55981 - DNA, 634 bp, Cannabis sativa
aatcaaataagagtatttgttgttttcattctaaaagttaatcaaataatatagaggtcaagactaaaatattttggtcgattaacaataatagtgcatttctatttatacccctctttcttcccttaacactcttcttaataattaatcaatgtattaaatatgaatacaagatagagacttataattagctacattatttggtattggagacatatgaaattatatatttatatatatatatatatttatatatatgtaatttcatatgcttataggtaggaaaatgaaatgatcaaaacaaatggggaccaaattgggcatgagaagggagtagtgtggggcgagtggggacaaatgggacttcacgtgatcactactacccaatcaataattggagattatattatacatgtgctatgcttgcctttcaagacaaacaaacatgtttcaaacatacattacattcatatatacagtagaacatctatttaagaatatacttaaatcaatattctaattgaaagaatataactaaatagaattacaacaaaaaaaatcaaaacactaaaaaatatcaatataacaataaagaatctttaatactatatcataatagaattatttttgagta

SEQ ID NO: 55982 - DNA, 1734 bp, Cannabis sativa
cagttagttgatcttaggtcaataaatcttaatcctgatatagttaggttctgcttatatgtattatctatgttcttagagttgttcgttaaagtttggtcggtcgaatacttacatcttgggaatatgataatataattaagtgggagcgctaaatataaatatggaatttataacttttataagtgaaataatatttttcttcgagcttgacttaatcaaaataaatgattgagatcatttcaataattatattagtttactaatataaaaatgacacgtgaataatcactcacttaatgaccacaagtacctactggatacttacggaagtttcaaaaatataatttagtattgttttcgtcaaaaataaaatttaagtatttatgccgtaaattaattaaatttactaaattagcatttctctttcaaaaccgaaatgtaataatgattccattactaaacctaaaattttgattttcaaaaaaaattgagagttacagagttacaatacaacaaaaattcttactttttgtagactgtatctgagcttttggtatcatctgatacctgaaaacaatcttcatctcctctcaattgggtcatttttcttcttcggattcattatctcatctcaattgaatctagctttctctatattctcattgggtctccatgaatttgtttaaacatgcataaattactcaaaacccctttaaaccctaatttctctctctttcgccgctcatccggttggattctccgcccaattcatcaggtatctttacttgcctctttgatttctcatttctatgcaagcatgttggaaaaatgaagtctttttagttgggttttttcccaatgaatgagttgattatctttacattcacataagcctttgttaatgtaagaatgtacttttttgtgttgtgtgaaatttgattaattttagtgatacaatgttgtgttcaagaaactaaaaatagaaaaactctgtttaagaattcagtgatgagaatcagtttagtataaatcttttgctatgtctttgttttcatattggattccttatttatgtcttctcactctatctgttggatttttcaatgttgcagccaaaatcaacagtacccatttactgcatattttagaggatcagatacaatcaggttaggattttaatttttgtttaaaataaaaagagcttgtcttgaattttataggattgatttggatttgataaagaaagaatgttggatttgatatgataagtgtgatagaatgcttgaaacatgtattttttccaccctatgcttaaagaaattgaacttttattagaaaataagttgttctgaaacataaaagatagaagaatgtaaagattaaaaggtaactaagttcatatgataagagtactcaattattagcagaaattgatcaaattaaactatgataacttagagtatctcaatttaaaagttcatgtcgatgtcgaagtctgtctcatcatagtcataacgggagctcgaaccgttttgacgcatcagcagttcctgctcatatagctggacactctcaaggcaagcccttgctaagtcagcttcctcatttttttctttcatttcttccattttgtgtgtttggaggctctcttttatagcttcgtcgagtaaagctttttccttctcatccatctcctccacaacctctccttgaggaggtggtggtggtggt

SEQ ID NO: 55983 - DNA, 2344 bp, Cannabis sativa
  modified_base (208)..(212): a, c, t, g, unknown or other
  modified_base (1263)..(1285): a, c, t, g, unknown or other
ttattattattatattttttaatattttactattattttaataaatcaatattaatcaatttatatatctatctatataaagaagaagtatgaggcggtgatgtggctgtctaaaatctctccaaagctatttttcttttttctcctaaattctctcaatttttaatatttaattaaagtataaatttacaaattaatattttactannnnnttaataaattttctataaaaatatttgttttatgttaattattttaaaaaaacacataataattaaattaaataattattcaattatttatatatatgtatccataactatatatatgtgtgtaaagttttttttttactttgcaaaataatatagggaaaaaaatgtttttttttttttttttatatagaaaaaatatattatgaattgaacaaaaaaaatcaggtgtgagattatgtataaaaaaaacatgtgtgagatatgaatcaaatttatttcataatgcattatttttatattccacacatataaaattgatgtcatcattgtagttcctattgatattctcaaatttctaaacttattactaaatttatcgttctgttaattgatccataaagtgtcacatgtaaatataatattggtcaaactaataattctcttagaaaaaataattaaaataaattcatattattcaaaaaataaacattatatacatattaaatgaaataaaattaatttttccatcttcttccagccatattatctttacagattaataataatttttttttgtaaggggattaacaataaactttgattctcgattcaaatgctatttttcaattctattttcatatattcaaaattctcattccataaactttctactaatgtttttcaatcaatgaaacgaaaagacaaattttaattcccgtatgaaaaatcaaactttcaatcctaataatcaatagaaacaacatcaaatttcaagttctccaaatctataaaataaataaataaaaacatatttcaaaaatacaaactcaaacattagaaccccagtaaaatactaaaactcaaacattaaaaacacacacaataaaattcgaacccgaaatttaaaacacacatcagaataaaaattaaaccataaatgaggatttatgttactatatttcgaatttcagtgtttattagcaataaatttaatattttaagtatttatgtcacaactttcttaaaagtaaagttaaaattttaatataannnnnnnnnnnnnnnnnnnnnnnttaaaatatacaatttattttttttatatataatttatatatccatcgcgaagcgcgggatgtttactagtatctatatataaaaaaaaaagtatgagtcggtgatgtagcactttaagatcaagtattatatgttctctctttaattctctattttctttaattcttattagtttcataatattaattaatatataaaaaaaattattcactctttaattcattcatttttaatttttttaattttattttttaaaaaaataataactctaaatcaataatattttatttattagctttttaaatttacgttttggtctttttttttaaattattttttaaaaaattattaattcttttatatttatatcaaactaagatacattagttttttctacaagttgcaaattaaagaaaaatttaggagtttggtgcattttgatatactaatgagatatcttttctgtttttttaaatcttaattgttttttattatctactatcatagattttatattattatgatattgtataatactaatatgaattttagaattaatcggtgcaaggatgtttcctaatagcatactcaaatctatatatctatataaaggagaagtataaggcagtgatttgacactctaagatctctctaacgagtattatatgttctctccttaattctctattttctttaattttttattattttcataatattaattaatatataaaatatatttattcactcattttttatttttttttattttatttttttacaaacataataactctaaaacaataatactttatttattagttttttaaacttacgttttggtctttgttatgatttttcttttatttttatttttttgaataaaaatcataagatctattaattaataaattcgtttaaaacaatagaacacacttcagaggaacatacctccaagttgagcacacgacctgtagagaaacaagagtctcttgccaagcaatgagccaacttatttacagatcattttacaaaacacaaattgtgaaggcataaaa

SEQ ID NO: 55984 - DNA, 1325 bp, Cannabis sativa
ggttgttcttcctcagtgttttggagatttctttgatttgcaacatgtctcttggttcttgaaccttgagatctgtctcgtggccttctcactccaggattaggttgattctgagtattagttccttgagtcgccttagccgctgcaacctctttttccaactcagtgtttcgtcggttagattcggcaaagcgttgccggagttatctattttctaattccactaatggtacatacctatttggatcatatgcatccttacttctaggtacatatcctgtagaattattgatatcttcgttcctcccttctaagttttgattatcaccaccatagtttctccttgaacgtgatgttccagtagtatggggtctttgagaacccataggttctttcctagggcgatgtgtagtttccttagggcgatttccatcgttttaattgttataagccatggataaatttttgattgtaaggaggatttttctgagttttatcactaaggctttcaatgaaagcaccaaactgttaatactgattttcgttaaccaaaattaatgagccttgacctaataattattttatagaaataataattaataacttagaaattaataactccaaatatttttacgtggttttgcagttaaaatctgcatactccacgagtctttcttattaatggtattttgaatacaaaatacaatatcagggtaataatattattctctcaaaattccccgtccctttttttatggaatctacccctatttatgtgaatataggttggcagttatttacttaggaccagtttataatgtaattgttcatgaaacatagacaattctcacattttatttaattgcatgtaggataatatttgataactgatcaactgtcgtttgttcttatccttttcgatggttaatgctgatttagacaatcatatctcgcttaacccgagttattctccttgtccatcttgatgtggaaaaaaaaatactaagtgttagcagatgattcacctcgttaagtctctttatttgagttaagatcgcgaggtgaccgtctcactatatgtaatctgaggttgccatgattgtatttattctacttcgaataaatgaatatcttcttcgactacgtactccgaggtaggtgcgcgtgtctcgtcatataagtttcattagccttttatccttatctcgcttaagactatataatcagcgagttgtgaatattttctattaaaccttatttcttgacgagttattttatcttgcatttaatgatataactttattatatcaggtggttcatattcc

SEQ ID NO: 55985 - DNA, 868 bp, Cannabis sativa
gtaatacctaaatctgttcatcctataagatctaatagcccactctattcttaggtgttgaggctagcttagaagatcaaggtgtcgatttttcaatcaagttctaggattagatgttcgattattatatgaaaagaatcaatgataccctgatagacatcaagaggtaattgaatttcttcagtagttagatttaatcctatacattatattgagatccttgggcttacaattcatattggataaaaaatgttttatcaaaatttttgcttccccttttataactctaatatggaccattaaaagtaacaattagtattagagcaatcttcataataatatagattaaatactgtgttgagtgattatgcatttatatatatgttgatatattatgaatggattgaattaatttttttttatacataaacgtgaatcgttaattatatggtaaattttgggttagaaattttacaagttttactagaaaaattgtacactataattgtggtataggttttgatgtaatttttattttaatttatttgtaaataattttagttaaaaattgtaacatcaaaaatccacataacctccatagatgagtgagcttaggtttaaggagtaaaccccagcctcatcgagatgacgagttttagacctcaagtgatgagccccgaacctcaaagggttacgactacaagccatgaggctcaaaaaggtcaaagcacgtgtttttttcacgtgtgcatgctaagcatgcaaagccatgcacgtcgatcacaaagtgatcaagaagaggagacccaaacttggatcaggttacacgggtgggcatcgtggggaccgactggtcttgtggttggtc

SEQ ID NO: 55986 - DNA, 807 bp, Cannabis sativa
tatgctcaagagcccttgaatcttgaagatgaagctgaggaagagcaggtgactccgctcaaaaggaggaagaaactcctggcccagcccaggcctatcgaatatgcaattcgcattagggagcccagttcacctgctcggctgccttctcccgtgctaaagggaaagctgttatggctgagataagaggcttttcaagtgatgatggactttcgagtcttgctcgggcaatcatctttcatactactccgtcttgtttttaagcttcttgactattatgctttatgtttctgatgtctattttatcaaaccatgttatttttgttccatgtagacatgtctcagaagatgctcgaggctctgaagaggagagttagaggaagctcaagcgcatctcctccagccacgaaatccaggggcggtgagggaaccccttccaaggaaaaggtgcctaccggggaggttattgacctttccgaggagctaactattgcgaacccctccactccaaaagtttctaaatccaaggattctcgaggaagaagttcggacaggcctgagcaactaaaaggtggatccgagctgatcaagagtggtcccgagcagatgcgggctcctatcccacctttgtcagtgcttccagaggccaagaaaggcaaggagatgctagcccactacatgaaccggttggttcctgaagttagtgagcaactggtcggtactgacaacgactcttctttgaagctacttatgggaggagtcttgaaggaattcacaagggtaagtctttcttgaaagtttccttta

SEQ ID NO: 55987 - DNA, 1038 bp, Cannabis sativa
agaattcatgttatataactactactcaaattcatatttacaaaaatatgggtctataattttttttttgacattttttttaaaaaaaatgaacgattgtttttcaattattctcacattgttggtatatgaaatcaatgtaaaaatagtattatttttctaaataaaaaatacaagtaaaaatttattaaaattaaaattcgtaaaaatatataaaaaaaaaaccgtaaatatatataaaaaaagttttaagtattttgtgcaaaactatccttttctttttgtcatcgtcattaataaatgagcaatattattagccactaatacaaaccaagtggggctttgcaattaattagtttttataataatgattaattttttaaaaattaaaaaaatgttaaatccaaccttaaattacacaaataataataccaactcaatataggtattagactattattatcccccctttttcttaaactattattaccttttaccaattttataaatgcaaattaagatttttctctaaaacttttatatgtaccaaattatatttttttaacttttcatatcgttaacttggaactcttttccagtgaggagacagggccgaccagagggtgggccagccggggcctcggccccaggccccacaattttggaggccctgaaaaaaattaaaattaatatatatacatataaaaacatataatatataaatatttaactcaataaattgcatgaaaagcatccaacacagatggtaagtagagcttatgttagcctcgaggttcaaggttcaatattataacaatattataacttaaatatttatttatttttgaaaaatttagcatttcaaaaataaataaataataatattataacttaaatatttgtattacactatacaaaaaaatatattaaaggacttttaattttaaaatattaacgtacatttttaatgcaaaaaattatttattacatagagataaaagaattaaaattgatattgtgtcaaaatttaattaaaat

SEQ ID NO: 55988 - DNA, 1303 bp, Cannabis sativa
tttttttttaaatggtggtgcaaatattacagttatttaagatatattataaaattttaagaaatttaaaataatattttaattttttaaaattttgtaagatattttaaattactagagcgtaaaaaatttagattaaaatatttttctaattgtcaaaataaattaagaatgcatttgtatatacattttagagtagtggaccatacaattttccattattataatagagagttatttttataatcttacttcaattatgctttttaaaattaattattatactctttcgaaaaaaaattgattattataacaattttacaagaagacttattatctattttaattaagaagtgtctttagataatatgggtggagatgctatatattagattatcattactcaattataccaatcgatgtaatttaggtcattgctactgctttatgttctgttagggttaccgtaatccttattgtcgttgttgctcattctcttcatttcaaccagggctcattagtcatccatggccttgggcgtggccctagtcagggcctaatttattttcccaccatatctgacttatgcaccttgcttcttcctcttaatagattcttattttcttttctatggcagtttcttctttgggtgtaggtgtcggttatgtcggtgctttgctctgccggaggctacactttttcttcgactggattcaatctttcataatagatctggtagtggttggttggtgttatacctattttttggattgtttaatgaaatgtcaaattaaatgccacgtggcatagataataaattcttgcaataaatacattgtgggacaggttgaaaaaactcagaactcaacctatgaggtgacctcatctaaatataaggatcacaagtttgtgaaatgaggtattttagcatttttgggatgttattttggtaaaaaaaattcaaaatctctcgtaatacatacttagtgatgcatctcctcgtattatacaacagtgatgaatcacttcgtaataaatagttaatgatgaatcacctcatattacacagcagtgataaatcacctcgtaatacaaagcagtgatgaatcacctcgtaatacacaaccaatgatgaaccacctcataatacacatttagtgatgcattatctcgtaatacacaattattaatgctttgcctcgtaatacataaagttatgttcttgtctatgtcggaaataagaacatgtgccccatgttcatagcggacatgtgttgggttatgccctaaaagtaagtattta

SEQ ID NO: 55989 - DNA, 1255 bp, Cannabis sativa
ttttttttcaatttaatttctacttttttaaaaaataattttatattttgttggatttccaattattttctttaattcttaggatatgaatttgtaacacaaataagtttggtttttatcttcacaaaatattaatttgtttaaattatttattacatttttaataattttagtttgatttttaagatatgtgttaataaataaaataaagtttgaaaaatattcttttaagagtaatttaatttttttattttgaagtaaaatatttttatcaattttttaaatatatttttttaattttttcaaaattaatataaaattataatttttgaaattaacttttttttgataaaaggggcaaaatttattgttggtcaaaatttaaagggtaaaaatatcaatttttaacgcttaaagtaacaacaaaaaggacatggtcatgtaattgttatattttaaggagaattttcaacaaatcgtatattttaggggcaagaacatgaagtgttaaaattttagggtttaaaaatactaattattctttaaaaatctaatacatataataaaaatatatttcaaaacttaataaatcaaattatatatatattctattcttatatgatttatttttgttttgtacatacaatttaaattaaaattaaacctttgtttatatacaattttttttttcctttgaatttattattttttattttatgtattttcatttgttgttgcagatataaaataacaatagtttattttattttgttgttagtcatacgaaaaaatatatttttttttaataaatattaactaatttaatattaaaaaataaccaatccagaataaccgatccaatctgtatttttgtaaattggatatttgagctattctacgaattgaatcggatctaaaatatgaaatctgcacttagtgcaaatcgaatgtattgtgatcaaaataatactagttagattggacaaatattagcatattaaggaagctagcttattttggttagaaaagatgtcttatcagtatgatatgtggtattattatattggtactgctgataccctttaaccatattttttttaattaaaaacaacataattgattattgagtaaatactatttaagagcttgtattttgtaaagttatcaattggaccctctattttgttaaataataaaatagaccttatattttttaaaatagtaaaaataagacctgagctcaattttcaataat

SEQ ID NO: 55990 - DNA, 766 bp, Cannabis sativa
attatcttgcataatcatgcgagctaccttatgacgttgagttgtagtaagtgtagtggtcctttctaactctttcccgagctgcatatgcttttcattcattatgtcttggactgcaaccaaaatcagaaagctgttaaatcagttggcttaaagactcgctattattattcaaaaaaaaaaagacttgctattcttagcaagtgctagcctattgtttcaacacaagaccagagcatatgcaatatccatatatataaaagataatttcataaaaaaaaatccaaaattccaatggccagactatgtaattctataatacatgaggttatgaaagtttcgaaggaatctattaactacatagattactagcaattttgtaacagctaacctcctctgttaagagaggttatttatttctgccttagtttaaagtttaaatataaatatacaagcaattcaaacagattgtgaggctgaagaacttcaccaagatcaaaacttgatggattctcacctatacaaagaccaataatagattagaaagtagttaaaagtgagcaaaagattgacaaacataagtaaataaagaatggtcttaactaattaactcttgagaaatctgaagtaaaacaaatactaactgctggtttgtttgctaaagagaatatcttacagatcatatatatacacctataatctctgttgagaaaagagataacaaataaaatgaaataaaaattaagggaaataacagtgtttgtga

SEQ ID NO: 55991 - DNA, 2112 bp, Cannabis sativa
gtaggaaaggagattccaagttagccaccttcaattcgcagatgatacgttattctttgtcgatgatgggaaatcgctgcacaagctgttgagattagtagaagcatttggtgccatatgagttaaagtcggtcgttgggaatctgcatagatgagaatattgtttcaaggcttgcatttaggattgggtgtgaagtagaaagctagccatagcaatatctagggatgcacttggggggctcgcctagaaaatggagtttttaagaactagtattggacaagtgtgctaaaagactcgatggatggaaatgcgcattttatgtaatgggggtaggttgactctcattcagtcagttctatcctctctccctttatatttcctatcattttttaaagtgcctaagtcagtaactaaagcgttggagaagatgatgagagacttcttctgggaaggcaaggagtctacatgtggggatcatttagtggcttgggatgaggcttgtaggcctcgagatgagggaggtttgcctatgaagtggctgtggagattttctttagagcaaaattcgttgtggcatagggtggtggtaagcagaattggtaggactgacaatttctgggactctaagaaagaaagtcgtctgtctcctaaaggtccatggagggggatatttcatatcttcatgatgagtatttgggattggtacacttcaaaattggaagaggggataggattcgatttttggaagatgtttagcttaacaattctcctttgattagtgcattccctgatttagcagtgatttctaagacaaggaatgcttttataaaggaactgattgttgatgaggggttgccaagcggatgggtggagagttggaatttcatgtttagaaggaacttaatggatagagagatgccaagtcttatttcattaatgcaaaaggtggaacgtgtaaaagtgttgagtatttcagatgatagtcgaatttggaaatcggatctgtctggtgctttttcttgtaaatcagccttttgttggttgacatcaaacccaatggctaggggcttgttttggacgaagactatggaaaagttgtgttccatcaaaagttaaagtgtttggttggctcgtgtctttagacaaagtgaatgtccatgataagatgcaaaaaaggaagcctttccaatacatttcccctggttggtgtgtttgctgcaaaggcagtggagaagatgttggacatctgtttttggaatgcaaatttattcaacgtttatggataaatgtgctagtggagtttgaactgtcttgggttatgccaaggtctgtatcacaaatgatagcttaatgcagaacaaagatgtggcaaatagtgatcttagcaacaattggggctgtggctggaaagaaatgctagaatttttgaaggggctgctaaattagaagcggatgtgtgggagaaagttaagatttggacaaccacttgggtgtttagaaccaaacattttgaggacctgccttttctagatttatgcagagaacggaaaacaattctataaaggcagtaggtggctttgatagtttttttagtcctcttctggggccgttttggagagtgatatttatcttaggactttttgctttgctttgaattgtaaccatggttttcctctgccacaagtgaggctttttagtgtataacggggacggtcctgtctaataccaaatgatcttttctcttttttcaaaaagcggaggaaaggaagaagtttaagagtgaatggcaaaaactcactattgaagaggaaaggggtttgtggctgaaatctaagtgtaaatgggcctaggagggggatgcaaattcaagattgttccataagttgcttaatgcaggaagacattgtcaaagagatcatctcctttttctctaacttatacacttctgagagtagaaggagttcgggtatagatggcattaattggaaggaaatctctgaaaattcagcaaggcagttagaaaaaccttttgaagaggatgacgtaaaggctgttgtattcagttgtgaaggcagcaaggcgccatgtctggatggattcagcatggccgt

SEQ ID NO: 55992 - DNA, 2850 bp, Cannabis sativa
ggcaagaaccctgccgctgttatcgccggatttaatagccagttgccggggactcagtccattgccaccacattgttcggggccaccccacctgtgccggacaatgtcttgaccatggctttccaggttggtacaaaagaggttcagaaaatcaaatccagatttgctcccaaaatgtaatttggtaatgttgtgaccttttactcttcattttgttttttttatagaaaaataaattgggcgtgttagagaatgaaaataatgtatttatttcttttgtatgagaaattcttgaaattgtaatgtttgttcttcttcttattgtttaaaaataacacttcattatatacttttggatcacttttcttttttctctcttatgagtgattttcttttggtgacaaattgatgatagtagtacaatttttttttggataaaataatttttttttttaaagaagataaaataatattttggacaacgtgttttgtccagattagtagttggactttttttaaaattaaaaattgataatttgaatttattatttttaaaaatagtataaaataatataattcattttttatgaaaataaatttaataataatgtatatgaataaactaattacatattttgtttttgttcatactaaaaatgtgcttaaggttagtaaaattgatctaaacgtattatgatctaatattaaaaagtataatgagtaatttttataaaagagagaattcaaaatatgttttttcttttctttccataatatcttagttgaacatttctccatctgtacttctaaaaaaattgctttgtttaatcaacacatgatagtggataaaatataccaaaataatgacaaaagtattaatagagaggaagtgaggacttaaggggggttttaatttaaactatcatgagataaattttatttattggtcttaaacgtattattatatgttactaaatggagtaggtatcttgtatatatgtttatagtttcttactagtaataaacataaataaaataaataagaagcacatgcattttatttggatagattcccacaattattatcattataattgcttaatttgattaatttagtttctcttggataaacacacccataattctgcaaccagggatggccctattgaaaataacgttgtaacgttcaaattcttctgtactttaagctaaagtttacagatacgtacaaaaagagaaacatagtaaaactagattaattacgactttacaagtgcacaaccacgtgagcacattaaaataatgttccttaataataaaacccataactttgtgtgggtgaaaacggcagcctaaccatgaaatatatagagtaaaaaataatgataagctgagaatgacaacccaaatgtgtatattgatattatttagcacccataattaatgaataagatgataatgagtatttaagttgaggagtttgaataagaacattagtgggtcgtggctttagtcttgagaacatgtaatggtgaattttaaattaagtaaaggtaatacaataggtacacgtctcatgcttgcacatttagaaagaagaaaaaataaactaattaaaccaacaaagacttttctaattatgtttgacatcaaagttgacggctgtgcaaattgatcaatgtgttttcactatgggcctgtgtgtcaaactaacacaagtgacaaaaatcacaagcagaacagacaagttatgatgttaaaatattgtatgatacaatagataaacaatcctcaatgataacataatggaaaatgaaaagaacaactgctgtgctcactgctcacaaggctgaaaggcgaaatctttttacttgaaaccagtttgttggtctgccatctggaattggaaagtaggactacaggttttgagggcctaatgtagggagcatcacacctgaaatatcctttcctctccagctgcaatacatctcccctcttcagatttcgcatgttcgagtccccaagggctgcggtctcctttttagtgcacggattaagaacatcaaggaaatcctcaccttcttcaagctgcaatgataagtcaaaagtaccaatcacttgagttaaggtttcatataccatagccaatcatcaaagtccgaatatccgctaagtatatttgaaatttttaaatgtaattaattgattaacacataccttcttctttgtgatcaaataatcaaactccatcaatgagaggttaaccagctcatttatttcaggtaaccaggtaagcttcaacttggtagtcttcacagatccttccagatgcaaaactcccgttaactgcgttacctttccttcttggtccttttcaattcccttaataatggcattcccccaatccattaacgtaacttcctcctctgctgtaattaactcagcatcggcatagtctaaccatatcctctttgtaaatgttgtagccttgtctccagcaccttcgtatttcttatgcctaggaataattcggacaaatggttcctcaggtccattagttagggtcaacaacacacgcctctcttcaatgatagctgtatgcctaggacacacaggatcaattatcttcttatttatggaccaaagcttgtcccactccatgagattaagatttttggaagctccctataatggagaaaaaaaaaaataggacatttagattcagttgggtaagggggcagtaaaaaaaaatatctcgcgcaaatataagggactctatacaggaagtggaagtatgtaacggatacacaatgaaactctgatgactaaatgattctaactcgagacacc

SEQ ID NO: 55993 - DNA, 762 bp, Cannabis sativa
tgaacattaatttgatacacaatatccattatatatgcttatttagggcttaatgattcttggtatgaggtaagaaacctgttatagaattattattggaaagttgttagaatgttaatgaagcgtgagtgagtgtgccaaattataataataaataaataacttcacatgcactacaacgaactaccaccctggagaagtggatatttaattatcttccactaattattcttccttgaaaaattgataataactataattattatatatatgatgaacattttaatacttacattaaatatataattatgataaaattatatattataaaattttaaaatttgtttacttatacatatactagacaaatattacgtgcaatacttagttatatatatttagattttttttttttaaattatgtattttgatttttgaaagctaaaataaaaatattatatataatttaattaaataaataatattattttcataaaaaaaaatatttattttaaagctttataaaaaaaatataatattatatttttgaaaaagataaataaatacacatgctcagagtttttagagcaatttattttttttaaaaaaaattaaataatagaagttatttagagttgatcaaattcaagctaaacaaatccaattgtaggaacacaatgagtattaatttcttctatccacattatatatgtgagtgttttatagtaggtctttttcctctaaaattaatggaaagtttaa

SEQ ID NO: 55994 - DNA, 1987 bp, Cannabis sativa
ctctctctctctctctcaatatttgtaattttgttctttgaggaagaattggagcttgtgtttggaggatttcggtgtttaagcttggaggaagcatttgaggtagttaatttccttttagtttatttaagttttgggaaatttagtaatttaaattgaatttgttggttttgttgtatggtgttcttgctttgggtttttgaatttgagttgtagtgttatttccgtgtgttgatctctcttttagtcaacgatagtgagtcaattaataagcgattaaaaatataattaaaataaagcaaaacaacaaagtaataaagaacaccaaattttaaacatgtttggccccatgagtgtggtaatagcctactccccttgaattgtattaactcgagagaaagaacaaagtgtttttctctctaaaagctcttacagtgaatctctaagtaattcttttagatctctctctctaaagcaattttttcgatccctttcacagtgaggataagtcactatttatagggccttaatgcatgagggaaggtttcccttttgcttacaatgtataaaatagaaaattacatttattacataattataatacacgaaataggaaactagaacatgttgctatatttctctgattcaatcccacgattgtagggattgcctttgtgtcttggtatcacaagattactttaaagtgattaactttttggaagtagttcggcaagccagaattatactttctcaaatgatatgctcaagtaatcaaaggttatacatgctgacgtacaatatggagtctgttcggaacattcacctctgcccagatacaagaaatgcaggacatgtgtcacctgagtattttgccacgtcattgtgcaaaaaattggataacattttcccccaatgtttgggcaggaccttctcggttgcacgtggaatttactcgttctgaattcttttttgaacgggtggcatgtggccgttgtgtcgattgatcacccgatgtgactctgactaaaagtcccttcatttttggctcattaatgccaattgaaaattttacctcgaaccaagtttcaaattttgcctgtgacgatggttattttgcaagtaatcgagtgcataacgtacacttttggggggaatttgagaccttttaaaatttgaaatgattactcttcttcttcgatttgcctataaatagggttcaaaatcctaattaatcacttttagccatttttactcttgaagaatcagagcaaaaatcctttttctcccaattccttcgaagaattctcagaaaacaccgtccgatgtcgtccgagcaaatcaaaagcttcaattcagtgagtaagttcttcatttcttcctttttatatgtttgcatgtttatttttttgggtttctgcttgcgaaacttgattgttcttgaacctgttctaggagaaccatagaaattttagatttaagatttagaaatcttgattatgcttaatcacgttgcctgatcataactgcatttttatttcaacccaacgacactcattttcacttatccattttgggttttgtgagaatcagaccttaattcaaaattttgaacttcttgactaaaaattccattgttgtgcaaaaattctatttttgatcccttgatcgaacttggttggtatgaccaacttgtttccgctcgttaccccgaccaaattctcatcttgtgtcctaccttttgtagatgaaccctagtgagttctggggaggcgaacaccatatcgaccaggatctactttaagtcttatacgaggatcatcctcacctttgtgcgagtctgtcctcatccagtgacaatctttccaactctagcttcgaatattgggaaataagtagtgaacacacaccttccccagaacccgaggtgcaacaccacttttctcccttccagattgaaggtcaaggctatggactcttcatttgggag

SEQ ID NO: 55995 - DNA, 958 bp, Cannabis sativa
ttatagtaaatgcctaaaggactatggtaccatgtagctcaatatctccattttaagaaataattaatttacactattgaaatagttaatggtaagggcggtcaaaaaatattcaattcatacaatttaattcaatttagtttgttaagtgcatattggattgaaaattgtatcagatattgattgacattttgaagtaatcaatccaattcaatttatacaaatttatatatattttaaaaaaatatataaatatatacaattaaaattttaatgtaaaaaaataataatataaaaatcttatatatatatcataaatatattttacaatctaataaattaaatgtatattccattcttatatataagaaaaatataatctaaaataaaattaaatatttttttaacatacaattttttatcttcttcctttgaatttgttattttaatttattgttagaaacataaaataataatattttattttattttatcgtcgctaattatgttgtcaaaaaaaaaatacttttaataaaaattaaataattcaatattaaaaagtaacaaattcaaaaaactgatccaatctgcatagttgcaaattggattggattagatttgagctactctaaagattggggaatggatccaaaatataaaattcgtacttaatacgaatcatatacactatgagtaaaatagtacaagttaaattggataaacacccttaataaataatttagaaatttcacaccatgtagttaaatgtatccttattttaatgactattaatcactaaattgcctttcgtcaaataaaactcatattcttaaaggtaaaatgcggcataaatacctaatgttttagattttttacacttaaatacctaatgtttatttttggaggcaaaaatacttaatgttacaattctcttacacctttactaccacttccgtta

SEQ ID NO: 55996 - DNA, 590 bp, Cannabis sativa
ccgtaaaaatgcaaaaaaaaattgatttgaagtgtaaaaataaaaaagtccaaaaaatatataaaaaaaattattttaaaatgtaaaaataaaaaaccataaaaacgaaaaaacactaaaaaaaattaagtactttatttattttttaaatttaaaataaaatattattattattattattattttaagtcaataaaatattattccaatattacaatgtcactccttggctgcccatgtggtccaatcatataaaaaagatttaaacacccaaatcgtaagccctagaatcaaccttcattcaccttcttcttcttccttctcaaacaaattttcttatgaaccaaactgaactattacacaataacggcgcaaaatcttgacggaaattcttgataatggcagattacgaagctagatatgacggtaatggagacgacatggacagctacggtgacgatggttcatctccacagcctcgtggtagcagtcatggtgtccccgaggattatatcgactctaaatctcaggttgaactacgttcatacaacactgcttcttttttccctttagatttttttttttttttt

SEQ ID NO: 55997 - DNA, 2304 bp, Cannabis sativa
tcgtctaaagaaaccatagattcagggacaacttcaaaggtggagtgggaagccgattgacccccaataccacgacagcgcttaaggattttcctcatggagagagcatcacattgtcgcttgatggtaggggcaggaggagtgttttctttcccacttgcagcagcagtaatgctatggggaaaaactgaggttatggtggcagtagtagtgagtgaggaaaaggttggattcatgggtgaaggtggccatggtttggatgaggaaattggtagtgtagtagatgtggatggtggataagtagcaaaaatatttggagaagaaccaatagcacccgtatctggtacaaagatatgggaaaaatcagccactatattggaaggatgggggtgttgattgttaaaacttgcggatggcgtagaatggcctgagtagaaaggagtgtttatttttggatcaaagggagccccgagtatgtttttgcctttgtttaaaggcaaaggtggactgtgtgttatagaagaggaggttggttgggttatggaaatgttggtaggagttgggaaagaggaagatgtttggtcaagtgtgtgtttaaggcagggctgtgaagatgttgagattgtgggcatggtgatggttgtgagggggctagtggagattgcaaaggtgaaggggccttcattgacatgcagcgacttaggatgaggcttattgctggtgtgtagttgtggaacagcagaggtaagtgattggcgagccaaccgtgtcaaaagaggccaagcattggccttagaaaaatccgtacggtatcgatcatagccattcgttgggagtcttgcacccttaagccaaggcccataagggagatcatcatcatttccgttatccattctttccataaatttgggacaatgttcaaaggggtgtccaaggatgccacattcaaaacaaaactcaggcaagcgctcgtatcggtaatcaatccaaaactcatctttaatagttggcaatcggatcatttgaccacgcggaagtggcctagtgacacatagcttaactcggaccctaagaaaaggcccccatccttcattcgtagaatcctcaaaaacttccatgaattgcccaatggtgtttccaagtgcttcagcaagtgcagtggttttgctgaggaaaggtagcctatagatttgaacccagaaaggagtgaaaatcaaatcctccgttgagacattttgcagaacatctagcgtgagtaaaacgattaagtggttctgaaaatgccaaggctcctttgtaaggactcttcttctatctccttcacacccaaaagagacatgaaacatattaattttgaattcagtgatggttacaggaaaccggcctctccaatggccaggcatttgatcataaaaacctggtttgtaaattggctttgaggaaatgacacgggctatgagggagaaaggcgaggtattaggggtggaaaccgaaggtaaggagataatgtttctctcctcatcagtaagggatagggtggattgtagtgaatcagtaaagtggtccattgcaacaaaagtattgcgatcggaagcagagaaaaaaaccagaaaaaaaccaggaaaaacctggaaacaggggaagagcaaggcggaagagggaggagggaaaaggcgggagcagttaaggaaacttaggattcaaaaaaactagatggataacagttgaaaggaaaaaatatagttaaaaatacataactgatacagaccctcaaatgggcactagtactggatatgatttttaaatacataacaatcctttagtgaccaaataatttgaaacgatattttataataagaataattagtacgttcacttcttaaattttcgacactattattatgtctcatttattataaatcctcttaaaacttttcttcaaatatagtagttacataattaatttttttttttgttaggttcaatttcttttacccttaaaaattaatatttttacttctgaattttgactaatataaaattttacctatttttattaaaaaaattaattttaaaaattattatgttctattaattctaaaaaataataataaaaattattaaaaaacttaattaaaatattaaatttacttaaaaaaatctaaattattattaaaaaaatattttcaaattttatttatttataaacgcgtaccttaataatcaaaccaaaattattaaaaattcaataaataatttaaacaaactattttttttttgaaaaaagtaaataaataattaaaa

SEQ ID NO: 55998 - DNA, 989 bp, Cannabis sativa
ttattattattattaatgttatcaaatattacattaatttattggttttaagtcaaaactgttagcatagataactaatggatcctgtgtgtctggtccaggtttcggtttcgtgtctgagttcccgtgtccgtatttgagttccgattccgggtttggatctgtgtccgggtagagtttttattacaataaaaaaaatcaaaacattataattctattaatataaacaaaaagattaaataaatgttataataacatatactatatatatttatatgtatatttctatacatataagaaatgtagaataagaagaatatgtatagaaaacactcactctcaattttgagtgtagattagtggcgatcaatatgacttgaacaaggtattacacctttattcaaaactttatttttccatatctctaagtactaagagaactctctatatagaatatagaatgtgtacaaattatttctaaaaattattttgaagtgggaaaatgaaaacacttctaatgttttccatatagctaattaatttatatttaatacatttttctctataattaagtaatataataataataaactcattctatattgcaaaccatgcctatctccaggactggtcctgaagatacgtaggcgacccaggcatttgcctcgggtcttaaaattgtgaaaaaaaatattattaatatataaataaaatattaaataagaaaaaaatataataaatattgtttggtgtagtgataaaaggtcttatttaaagtcgaggtaaggatcaattcccaatttccacttttctattttttaaaaaactatttaatgtgagcttttttaaaagcattaccattacactaaaacattaaaaatacattttaataataattaaactatatataagaactttaaaatttaattttaccttaagtttcatataccgaccgacctttctatctcatcaactattttattatatca

SEQ ID NO: 55999 - DNA, 723 bp, Cannabis sativa
aaattcagaaatagcagacgaatcaaaaagccccactcaaatcagattatcattcattcgtgaaaaatgttctcgaccaagatagacaattggttatttattcaatcatttttttcaaaaaaatactaaaagactagcaccacctaaagtatcatatcactacaattcactattgactctcaatcgctaatcattttgcaagacatcaacgtgcctaataagaatgttttcttaaaaaaaataaatattcatgtgctgcgagtgtaatttcattttcaatatttttattatagattagattagattagactttagacttaagtattgcaatctataatgattattacacctaattatgatttgcgcctaaatcaccaaaccccacaaattaaaaccataatcagatgaagaaaatacaaataatcgaaagacctctttcctcaaaatgtaaatgagccaacactcgttaaatcaaccacatccaaattatctataacttaaatctttggaaggcctaattattgcaagatggtattgccaaaattagtaaactacaagttggtaatatttttgcagtaaaacaatgtcacaaatagaggtgctgaaaaattccatgccagtaacacagtgaagcatccaacaagcaaccttaatctattctgtgcagggaaaagatgtctactagctgactcctgaggcttgtttcaattcaaaaacaactta

SEQ ID NO: 56000 - DNA, 663 bp, Cannabis sativa
gtcgagttttgtctttggatccatgggtgttttggttggtttgcaaccaatgaagccggtatcctcgagaagttgcaaagtatattttctttgagacatgaagagaccttctttggatcttgctatctcaaaaccgaggaaatatcttaagtcacctaaggccttaagtttgaattgctggtgtaaagcgttttgtacttgatgtagggcctgtaggtttggacccgttaatattatgtcgtcgacataaaccaagagggctatgaaggtgtcattggttcctcttgtgaacaaggtgtaatcggcttgtgattgctgaaatccttcttggacaagagcatccgtgagctttttgtaccattgccttgaggattgcttaagtccatagattgacttttgtaatttgcagacaagaggaggaccttggtgatcagaattatgagcttgtaaaccaggtggcaatttcatatagacttcttcattgaggtccccattaaggaaagcgttgttgatgtcaatttgcaaggtgtgccattgttttatagtggatatggcaagaagcaacttgaaagtaaccatcttggccacgggagagaaagtatcaaaaaaatcgagtccttcttgttgagagtatccttgtgcgacaagtcttgcttttagtct

SEQ ID NO: 56001 - DNA, 900 bp, Cannabis sativa
aaaataatttccaacattagcaaccctaattaaattggattaatgataattcagtaactataatattatataattaattatgtgaaaattatttaagctttattcacatttaaaaccgcgtttacaagttagggtcattttcttaattttggaagaggatggtaaaattataatttttttatctatatggtgctaataaactatatctttatatcgtgtatttatattttcttattggagatgatttttgacaagttagtgaggtatagtcacaatcgtgtattttggcgcgaacggggttcgggatccaaaatttgtgagttatttgcttaaggaaataacatgatagatatatgaaattgtgcattatatatttgattttaaattacaaaaatacccttggtagttatttatgtgatttatagcccccaagggcaaagggatctttgaccaaaaagatagtaaaattgtatatgtttgtatttctgaaaaaaaaaaaaaataaagaatgaaatctcttttatgcttgagaccatatcaaactgacccccttctctctctctataatcttatggttttaattaaatattggtgatcttggttgattttaggagagattttggtctggattgtatttaagctatgagggaaagcatttaaggtagtagttatcctttaatatgctcaatttatgaattaatttctaaaagataatgatggaattgaattgcatgtgttcttgatttgtgaacttgaaattagtatttgagtgttgaactttttatgagtttgagaactccgaacttgttgttttgagttaagctgaatattgaatcaagtttattgtgtgaaattttttgccaattctttgagtttggacaagaaattttaacttagttc

SEQ ID NO: 56002 - DNA, 2558 bp, Cannabis sativa
atttatgatgtttaagtgggattggaataatggcaattcaaagttatcatcacagttaacaaagtttgacatgtgttaatgccaataaagtcaaaaccgttttgccgtgtggaatagtcaaccttatgtttgcttcttaattaaaataatcatttattattattattattacttattattctattttttttagatctattattttttatcatcatacatgttaattaattatccactccatgctatacacgttttgttcttctttatctttttacttaaggaaatgtaaataagaagttattttataaaatatattatatgcagcaaattattatatatttatcacatgcacttataaaattattttagataattatttaatattcaattactcgttatatacatttggtaaaaaaaaataaatataatatagtatatattaatggtaaatatcattttaagctatctttatcgttatttattttgttaaatattaaatttaattttatattttttaaaatagtattatgagctaaatttttgtgaattatttttttaatacgacaattataaaattaatttatagtacgaataaatgtaaaaagaaatacaaatagtttagtcataaaatatctagatcattttattttgataaaaatttaaaatactattttataccattttaaaaaatatatataactaaaattatcatttaacaaaataaattatctaattcataatttttataaaactaataataaagagtatccaaaatggtatatttactcaatacatcatataactttattagaacctattatttttaattgacattagaaaggcatgcactttcatactttcatttcatgcctttttttttttttttcctaatatcaattaagatattgtttttatggattttacacaatttgacataaattaacaacaaaaattataatatattttctttgtagggacaaaaattacaatattatttacacatgaattttgaagatttttggtgaagtagtagcactagtacttaatatctataataaagaaattaatataaaactaaaattcattcatgcatggtggattatttaattgttttaatatggaccaatttcaatttattttaaaaaaaataaataaaaaattggactaattaaactcaaatcaataaatcgttataagataatgtgctaccacaaaatttagtcaaaacccatttagaaatataataatgaaaaatttatatctattatttttttttaaataaaaaaaagtctatatctaactttagaaaagaaaagaaaagaaagtctatatctaatttaaattgtatttaagagtcacaaataaattgaataatgtatatatatggtatgtgatctgatgcttcatattattattattgagaaaaattattattattgttgttgacaaaagatgtgcttcctattattttactcaaattaaataaataaataaataacacgataaagtgcaattagacagttttggttcttaattttaaaaatattaatatatgtattgatcggttatacattatttgtttaagtataatttatatatatattcttgatgtgatcaatgcatgatcaaacacctcgcaaataacacaatacaaagaactcaattaagaacagaactaaatgactaaagttaatcaatgcaacagtgaacaagaacagtaaaaaccagttactgtaaaccagtaacaagaacttgaatatggcaataatggacaatcaatttaacagtaaaagaattaaagaagtgagatcaaacacaatgaatttacgaggttcaaacaagtaattgttgatcacctgcctactcctcggccagaacagcccctaaggcctttttctttattgatgctagatgagagaaaatacaagttgtttacaaggtgttttcactaacacattcactcaagaagccatgcttcaataacaactcatctcacacaaaatcttctctctctgaaacactgaactagctctctctaagttaccaaaagcatctcatctcaatgttgcagcagatggctatttatagccttatcccacaaggctcgatcctaactgtcataacagacagttaggtaaaacagttatgttaagttgagtaggatttagacttaggtgatgtgtcattcttctattagtgaccaacacaacaattctactaaattataaaattttattaatagcaattagctaaaattttagcttgtaattgggacatctctcgagttagagatatgatcacggttagaattaaaaaacgaactaaaaaattaatcacttaacttccagatcgtttcgcaaaaataattaaaataaaatcagatgaaaaagattgcaacatcacagttaaccttaagagcacttatattttgtttcatccaccgctcaaaatacacaacactagaatctgttgcatcaggttcaacctcatagcttaagcactcaactattgtgtaaggtatgtaactacactactatatatgacaaccctttagcaat

SEQ ID NO: 56003 - DNA, 950 bp, Cannabis sativa
tttaaaattctatattaagtgtaaattctactaaaactattttgatatgtatgcatataatccatttaaaaaaaaaaattaatatagtccaagtgggagaatgttagattttcacttagacttgcattaatcttttattgtttttattaaaatataggttgatgaatagtgttttgttattttagtacatatagttagtgagttgatgggcttgatatctatgtgaagtctagttgaagtagaagtaaagatttttctagttaaatgaaatctttgatgaagcggcacaattcaaatagagttttgttgcaaaaatataatttttttttgaaaaaaaaatgttattttatggaaaaaaatttaataaaaagttaaaagaaatatgaaaaccgcatgtaagggtaactaggtgcccatagaataactaaaaaggcaattagttactttatactgttttgctatattttttaatttattttaagaaaaaattctcataaaataactattttattattaaatcatatttttgtaaatttataccttaaaaccaataaaaataaaaaataaatatgcttttaaaatcacattaatattaatagaaattacattatatatagaaaaattataaaagtttacttttttatggcataaataaataatgctaaggggttatggattttttttgtttttttacatttatatgggtttttttatgccatatttttgtaaaaaaaaaaaagatggaaatttcatatttgtaaacaataataagtttttccggaaagttttcggcatcgaaaaaatcaccggaaaagtcatcggcgccggaaaagtcaccagcgccgagaaagtcaccggaaaaagttagtatcgccagaaaagtcaccgtcgccgaaaaaagtcaccgaaaaagtcatcgtcgccggaaaaaatcactggaaaagtcacaa

SEQ ID NO: 56004 - DNA, 885 bp, Cannabis sativa
aaaatctaattaaatgataaaaattgagcaaaataatcatgacaaaagtgctcatataaattgtgtttttctttatatatatagatagataaattattgtgcatatttatattttttaattattttaaacattattaaaaagttaagaatatttattaaaaaaaaacatttaaaaaaataaatttttttttagatatgttgcatttatctaaatttttttaattaattaagtaaaaatcatcaattatacatataaaaattataaattatgtaatattaattttatataaacttaagtaaataatgatctataaatagtctctaagtgctatactacattcatttctaaaaaatgtgagatttatttttttttaaaaaaaataacttactaaagagtgaaatcaataaaattttaaaaaataaataaaaaatgtaaaaatgagaaaaaaaataaattaaaatataattcatataaaagacgtcatatcaccaccctatgtttctatagatatataggtgataatggaactttttccttataaaataagttagagtttacaagtaaaattatatcgtcttccaatcaaagaaagccttctagtaaagtttacattatttaatatgaataacatattaaatgggttaaatgggttaatgttgtgtatctcaagggggatgatttttggaattatgagttgaaattagatacaagttggtattggaagaagttgtgtaatttgaggaagagcttttcggctcaagacataaaagctactagtgcgaaagggatttttagagcttccatgctctataactctcagattatttagcagccagacccagctgcaagggctatctggtgtggtccgaatgttctaaaacaga

SEQ ID NO: 56005 - DNA, 1096 bp, Cannabis sativa
aacatagaaaacaagcataattctgtcctaaaacattgaaaagcgaacataaaagtgatccaaaatataggctagaaatagcctaacatctatatatactttcaaatattttcatttaacaacaaaagcaatcatacacagaggaatctctttagaatgttcaagcatttggcatgtgttcctcttttcggtacccaagatgggtttctggtccaccctctggcgtcgtgtggtggttcacggtgtctcttcttttcgcacccttctaatcatttcactactaagcacattaattgtgcaattaatgcctctgatcttcaatatcccccaaatctatgcactcctccattttttttgttgcattaaatgcaacatctatcacctagatccatttttgcctccattttttttttattttctttctcttttcttttattttttcctaaccatcaaatcacgaaatctcctgaacatccactttctctcccactaatgggagcgaaaggaagaggtggctatcatgagactccaaaaacccatcccattatgagctctacctcctacgcagaggaggctatgaccagaaacaacagtagaggtatctcaaaaagcttttggttttttctatttaaagcgtgcatgagactctatctccaggtatcttcttccccgttctatattcttaattttctttttaatctcaaagtgtttttcgatatggaaagtatgcaacttttgtcctctcaacctatgacccttatccttgaggaaaatgacatctttactcttcaagatgtccctgatgactctacccccagtattagcctcttgctgagatttttcaccatccgtcattttagccgtccttctctcatgaaaactctgtcccaaatttggacttcctaatgccgttttccagtggtggtttctgaacattccgatggcctctttctaattacctttggatgtgagggagacaaatggagaatccttgatggacagccttagcattttgcttaaagcattactattttgcctccccagaacattcttttcccatctctgttgaatatcttcattatattcctttctgggt

SEQ ID NO: 56006 - DNA, 1635 bp, Cannabis sativa
tgccaaggttgaatttgctatttccctttcccattttgatttgaaaccgcgtattggactataaatagtacaaaaatcagtaaaaattcactgaatcaatcaaaagctccattaaagatcatcataaataataataacaataattcaagcttctcaatccatataatacgcaattaagaagaacaatgtcagtcaaaatttgaattatcaaacttaataaagaaggtgtcttgacctcataaagttaaacacaccaatagctatgcaaccaaaaaattatatatatatatatgctatatatgcatcatcaaagtcttgactatattaaaaaaaatgtattcctttcttcattatctcattatcagcataatcccatgttgtttaactattatggctcagaacagcaatggcaatggcactatcaaaattggtgctactctcacagctggtgataaggtcttctcatggctttctccttcaggtgaatttgcctttggatttcaccaacttcctgacaataaagacttgttcttgctagccatatggttcaacaaattacctgaaaaaacacttgtatggtatgctgacactcccaacagtcctatcccaaaggggtccaaactagagctcactgcagacagaggcctattgctcactgaccctcgaaatcaggagctgtggaagtctggcaccattgtaagtcaggcagatatggccattttcaatgatactggtaactttgttcttttcgacagaaaatctgagaagatatgggaaagttttaaccatcctactgacactttgttaccaacacaagtattggaaaagggagttgttgtgtcttcaagggtatcatctacaaacttttctagaggaaggtttcagctctctttgaagacagatgggaatgttggtctttataccatgaacttgccatctgagcatctcaattccaattactacacaaaggaaactactaatactggtaagcagctagtatttaatgaatcaggtagtttgtatatactgagagagaataatgaaatggatatgtttagtacagagagtgcttctattgcaaattactattatagagcaactcttgattttgatggtgtttttaccaaatatagttaccccaagaatcccactaaggatagtaattggtctgttgtttggtccataccagataacatatgcttacagcggtttgcgtatggaaatagtggggtttgtggttataatagagtatgtagattggatcaaaataagagaccactttgtgaatgcataagaggattttctctagttgattctaatgatgagtatagaggctgcaaaccgagttttcttcaaagttgcgtggaagattcaaagagttcagctgagagtcgttacacaattgaagagatgaaagatgttgactggccatcaggtgattatgagatacttcagccttatgataaagaaaaatgcaaagaagcatgtttgagtgattgtacttgcgcgattgccatttatagggagaatggttgttggaagaaaaggcttcctctcaataatgggaaatttgacaccactgctgaggcaatagctttcatcaaagttaggaaatctgattttcctcttgagaat

SEQ ID NO: 56007 - DNA, 1001 bp, Cannabis sativa
tttcctttaataacataattagcgagtagaacaatacattgagcaagattagcaaaaagatagaatgcctcttacaaattaatgtcattattagattttggtaaactaaaatatacatgtcatatctagagatcatattcagctactgtttcaagaataatagtcgaggatccactacgaccgacatattgtcctccctaagcagttggaaattttttccatttccaatgcataaaatctaaacttttgagcatcctggaaaacctcgacgttcaccaatgtagaatagtcttgcaacatcatgagtgttgggtaatcggtgatagtgggctccaaacacctcaacaataggacaacaaaatcgctttaagctttctaaagttgtagattctcctactttgatgtattcattgggaaagagttgaatcagagcaccacaaggatggaaaatttagtaataaacatcaaccagtaggatctttacaaactcgaatgctactattaacagtccaatttcacattaaggggatgtataaaccaaattaaaaataaaaatccaagtggtacttcaccaaaagaaattgtaagtgtttgtcattatagtttatttattattactattttattttcaatttttattgacgctattacttaatttatattttaacagttaattcaagcgaagatgttattagcctaagaaaaaaatacgacaaagactttaaacttgatcatgtgtggcacatcctcaaaggtattcaaaagttttcaaatgatgacaacatcaatgcaccacgtagtttccaacacgaagatcctatttttacttcatccaaatcattgtctcacaattttgagtctccaacatcagcatctactggtatgagtttatttgatctaaacatgaacaatgaaaaaatcaatactttataagaatatttttatttaaggaaatatatttctatttaaagaaataaatttctatttaaggaaataaataa

SEQ ID NO: 56008 - DNA, 2109 bp, Cannabis sativa
  modified_base (787)..(792): a, c, t, g, unknown or other
actgactgtgtattacgaggtaattcctcattaattgtgtattacgaggtgattcatcactaactctgtattacaaggcgattcattactaattgtgtataatgaggtgattcatcactggctatgtattacgaggtgattcatcactactatgtattacaaggtaattcatcactgttgtgtattacgaggtcattcatcactaactgtgtattacgagatgattcatcactattgtgtatcacgagctgatttattagtaattatgtattatgaggtgattcatcactactgtgtattacgaggtgatttatcactactgtgtattacgagtagctacatgatctttgtattacgagcagctacgagatatgttgaatgtttattaatataacatcccgacaatactgaaatacctcacttcatgaaccttgcgatctttatttagatgagatcacctcacaggttgagtcctgagtttttttcgacatgtcccacaatgtatttattgtgagaatttattatttaggccatctggcactcaatttcacttttccattaaatagtctaaaaaataggtataacacacgtgtcccttgtcagaaacacggataacaagttgtaatctaattggtttgtattttctttgaagcacaatatttcccaaaaattgcatacccttaagaaagataaataaaagaaatccattgaccggactaaactttgttacctttaatctaataacctttgttaattggttatcctgaaataataataataataatannnnnnataataataataataataatgagcatgagaagaagaatgtataaagaaggagaatatgcacttgagagcataaataaacttctagcaaaataacttaggttaaataaaatagaaatcttataccctctatttatagattcaaaatctaaaagataggtcaagagattactcacttactcctttaggagtatataaactgaaatatttaaataatttagaacttaattttaaatatattaaaaaaatatatataagacacttttttcatatcttgttgatttgttaatattttgttgatcaatcgcacatgttcttggtgtatgcttgataactagtcattgaactatcctgactataatgatcgcatacttagaaaataaattagtagacagtttgtattaattaattatattctgtgatgtgtgtccgatttttaagagataggcatttgcattataatttctcaattctataagttttattaaattctacgtgtattatgatgagcttgaattctaatatttttttataatttatgcccgataacagtggaaatatgatagtttggccattagagtcacatagatataatttagtatcttttattatatgggataagcatatagacatttggaatattaaagttatacgtgataataatttttgaccattttatccataagcatttaggttacttaagtgggaaggtaaacttttaatggaattactagatttttctaagtattattctaggctaattaaataaattagaataaacaaagtgtttgttagataaatataaaatcataaagaaatctcatttctcaatctccatttaatctctctctctctccatctttctaatctaaggaaccataccaaattccttcagtgtccaagctgaattccttgagtgttggaaagaattactagcaagagttcaaggtaaagccctagctagcttatcattttctttagttttagaagaaaatagtttggtttgagcatgaaatttatagaactaggttctgtatgagcttgacgagttttaggattgttttttaagttatattagaattatttaagatgattttgtaaaggttttgttggatattgctttggttgagttaggtttaagtttttaagctcaagtttgactcaacaatggtaaaatttattacaggggcttggtgatgtgtttatttgttggaatatgttcaatatagtgtaattaagtgttttgaaaggttaggggtagaattgaatgaggaaagttgagttttggtttttcaactagggaacgattaactatttcat

SEQ ID NO: 56009 - DNA, 1292 bp, Cannabis sativa
aagtcacaaaggctatgcaaatacatttgtttcacatcaaaacttagtttacccaattttagcattcttaaaactcactttttcagattttgaattaggatcatagagcatgcgaaaggtgatcaatcttaaacatataattaggcacaaatatggataaattcacaaatttgagagaaaaaacagaacataacattaactcatagagtaatcttaatcaacaatcatcatcttcccaaaagaggagtttagttcataatctacattagcaaatccaaaattaaaatcaaaatagaaaaataacatagaaagatatagagaagagaagaaataattggcagaattattttagattgcctccgcgttgctcttgaagtctctcctttgcttctaggtctccaattctgaataatctctcaaaaatcgcaaccccctttcattaaaatgatatttttagcccaaaattgagaaaagacgaagtttttcttgacccgtacaaagccggcactgtggcagccaatagccttgccgcgacagttgtagaaaagtgaaaacagtttctgtagtccctcgtcgcgaccaccaaaagtcttgcaccggtgacaacacgtttttttttctgcttcaacctctctcagtaaaatgcatgtaactttcacatacaaattccaaatgagctgattttggatgtgttggaaagctaaaaaagatatctaaaacttttttgttttgacttttcctaaaatctgaacaaaacattgtaaaatttaggcttgaagtttcagctttattttcttataaaattttctctattatataggccaccatttttcaatgtttgacaaatttaatttaaaaacccgaaaacctgaaatagagaaaaacaagtgtaaaactattctaaaagtaataacaaagaagaaaaattactatgaaaagtgacttggaacttaggctaaagttagcctaacaaattctcccaagctagattcttactcgccctcaagtaagacttaaaactaaagtctaacaaataaactaacaaacaaactgacaaataatcagccttccaaataatcaaactaccattgccacctgtgaaactttaatcataagttaaaccagaattttgatccaaaaactctaacaattaactcggacgctttctttgagaaacaatgtatagatacaaattacacttcagtatttgaaaaacatcacggtctttctactcttaccaactttccacaaactaattgtaacaccctaactaccataggcgtattacgtga

SEQ ID NO: 56010 - DNA, 1186 bp, Cannabis sativa
  modified_base (567)..(574): a, c, t, g, unknown or other
aataaacattggaaataattagcataccgacttcaagcatggttattgtttttgactctggaaagtcataagtttgctctggttctaatgtctcctctttacaaaatgtgtttagcgtgttcttcacacagaaactacctcttcaactcctcttaatagcaccttggtgagtcgtaataattctgcattgaaaaaaaaaacactattctaagtggatgcaaaggaggaaattgacaaggacctaattatgttagataaactaaacaacccaagatagaaaattgtatataatatagaacaaaataataatatacaatcattgggtatgcgtatgtaaagaccgcttaactttaatttgaaaattagtagataattacagtttaatttcaaaacttgcatattagttatgaattataattttacggacatttattggaattcagaatacattttatatgccatatatgcaattttatattttagcatcttttgtgcccgacaacattggaacgcgacgtttggctatttgaatcacattttagtatttttagtatagcggggcaatannnnnnnncattgggaatgtcgggattagtcaagattttagagttgaccaaaatacccttaggttgtttagtgacttttttgcttaagtgggggcaaaatggtctgttgccctatttggtgttttgtccatttgtgagattatacgatgttattaatctaattttatgctggatttaattagataaagacttaatttgtttttattataattttattaaaaattgaagaaaacacaaatacaccctctcttcatttctctctttctctctctcgaattccgtagaatcaagctagggtttggatctcttctattttaactaaggaattccagcaagtctttgtgatttcaagctcaaggtaatgttctaagcttgttcttattgagtttcttacagcttaagtatgttattcatggttttctttgtattttgttattcttgttgatggtgtttgagtttgttttctaaagttaatttaaggttattcatgttgttttgaggtagatttaacggcttttgtgatgttttagcaagctttgagttttagaacttaagcttggctcattaatggtggattttgattttgagcttgttaggttgttctgttgcttggattatgt

SEQ ID NO: 56011 - DNA, 823 bp, Cannabis sativa
gtacgggcgttagtgatatgaaattgcctggttatggcatagattaacaccattgttgggtttcttcctagcaacgtatcaggtgtaggtacaggcgtcagtgacatatgataagttccgggcgtaggtacgagctcgtctgattaaacgatgcgatatattagtgccaagttatggcacgggctcacttaattaggtgtcgcaatggtattaatatgatactgtattatgacacatgcttgcctgattaggcaatacaaatatgtgagcatatctatttccatgcataagatttgttatattacttattgttgaatggtatggtttaatcatttatgataatgaaatgtatattagctatttaatgtatcattctttattacttttcttactgagtctatgtgattcataggtgctctgtggtttaggtaggggcaaggaaaagttagaacaaccatgagatgacgatcttatccagcaatgtacatattgaccccaccagcctgtgtctcgagttgccaagagttgttttagactggctgcatccgatgtattttgaattgctatgcatatagtcttttgggtaaatatttcataacagggatccctggaacacgtttttactcccgttataatgtctatttttagtattcaatttagtcaagtttttgttatccccatttaataattaattaatatattattattaaattagttttataaaattacacagatgacgttcctatggattagagtgttacactaatactataaaccgtagcctatagtattaggtacggttataaaccgttgcctataccct

SEQ ID NO: 56012 - DNA, 1112 bp, Cannabis sativa
ccagtgatgtttcagcctcctttggtttttttttaaagaagtgaagtcattgcttgaatttttatgccactttagcttttcctcacggaagttaaagtctgccacttaaaaagtcaacatgactctcacatgcacgtagtttttttttggcttaaagatcttcgggggtatgaaacgtcttcaaccctcctactcgaaagacaaggttttgttgaagtctgtcacatgcccaatgatgtttcatactttggtctcttaaagcaaattcatcacttgaattttaatgcaactttagccttccctcgcagaacctgaagtctaccacataaaaattcaacacaactctcgcatgcacatagtttttttgtgcgtgaaagatcactagggatatgatacgtcttcaaccctccttcctgtaagtgaaggactacaagaagcctatcacacgccaagtgatgtttgaccctttggtcttttaaagaaaagtcattgcttgaatttttatgcaactttagcctttcctcgcagaagctgaagtctgccacataaaaattcaacatgactctcacttgcctgtagtttgtgtgcatgaaagttcacagggggtatgatacctcttcaaccctcattcccagaagagaaggactgcttgaagtttgtcacaagcctggtgatgtttcaccggtgatgtttcaccctttggtcttttaaagtgaactcattacttgaatttttatgcaactttagcattttttcactgaagttgaagtctactacctacaaattcaacatgactctcgtatgcacgtggtttttttatgcgtgaaagatcacttggggtatgatgcgtctccaacctccttcctggaagagatggactacttgaagtctatcacacgcccattgatgtttcaccctttggtctttgaaagcatagtcattgcttgaatttttatacaactttagcctttctttgcgaaaggttaagcctaccacataaaaattcaacatgactcatttgtgcacgtggtcttttagatacgtgaaagatcacttggggtatgatacgtcttcaatcttccttcctggaagataaggactacttgaagtct

SEQ ID NO: 56013 - DNA, 3310 bp, Cannabis sativa
  modified_base (923)..(928): a, c, t, g, unknown or other
  modified_base (1040)..(1042): a, c, t, g, unknown or other
  modified_base (1122)..(1123): a, c, t, g, unknown or other
tttgtgtattttgaataatctaaaaaaaaaaaaattacacaattttcttttattccatatttattacccaaaaatacctcaatttttaataggaacttacaaaaatactaaaaaaaaaataaggaaaagtttacaaaaatattagaatacggagatttttacatttttattgtaccaatttataaaaatactatgttaaagttttaaaattataaaaaatactatgtttcagtaaaataaaaaaaataactcaaaaataaccctaaaataactatagaacaattaaaaaaaaaaactacaaaacaagaaaaaaataacaaaacattgacctaattgcaataaaaattataatatcactattcaatatgtttttgcattacaaattttagtttagttaattttgacaacttgatttatcttttcgtattattatattatttttttcataaaatttgttgttacaattttatttttttattattttttctttttctttttgagttagtaatggttaaaatgataatttatttttaaaagttaaataaatggttacactaataatagaaataataaaatcttatgatttcaaaatgagagtatagtataatgggttaatatgttaatatccactaatgcccatcgcgtccattaaaaaaaaatcctatcattgtaattttaaaaaaaatgtgtcaaaaaataaactaaatatatgtatctataaagcaacacacatacaataacaaaaaaattatttggaataagctaaaaatatacatcataaaaaatacacataaataaaaaaaaaaacaactaaaataattgttcaacaaaaaaaaatatggaagccacttaaaaataactaccattttggacattatgttttgcaaaagttaccaaatggactctctgttttgttaaatgannnnnnggaccctgtattttctaaaatgatgaaaattggacactgagcttaatttttgacaatttttttaaatataaccaacttaaagacaatttttaacacgaacagatacagaaannntaaacagttttgtcataacatctttagatcggattattattaaattttattttgatacaaaaaatcaattcagggtcctnnttgtacaattttagaaaatacagagttcattttgtcatttaacaaaacaaagggtccaattggtaacttttgtaaaatacagggtccaaaatggtatttacccaaaaataacataaaaatagcaaaaaaaaaaaatacacatatataacttatcaaaaaaaaaaaatacacatatatacaacaaaaatattgtctagaataaactgaaaatattcacaataaaaaatacgcataaactaaacaacaactgtataaaaaaatcacataaaaataattataaaacaattatagaacatctaaacaataatataaaaatgactataaaataacaaaaagacagctataactcaataaaaaagaacaagacatcaatcttgttaaaatatgcaagtcattcataaatcaactctgaataaactacaaaacattcaatatatatatatactacttttattaatcatgtaagatatagaaaaatataagaggagtgctcttaatttttttgtaagaaaaagaaagagtgttaaaaaaatatgagaaaaaagataaaagtaaaagaatcgtattttagtaaggttaaaagaaattaattaagattttttttttaaatgtggttaattaaagaaaaatagtatgaaatagtttgattgtgaatagtaagaaaataaaaagggagaaaagaaatagaataagtgtttgtattttattttttaaaaaaatatataataaaataaaatttgtgagacagtgaaaaagtgttaaaagaacgagatataagaatatacacttattatatatatttatataaaaaataatttgagaaaaaaaaaaagagaattgaaaaaaaaatggagggaaaagagaaagagaaaaacaaaacaaaaatcaactgacttaaaaaaaaaaagaaagaaaaaaacaaatcagccaatattgaataaaaaaaagatttgaagaagaataaaattaagaaactttaataagttaaaaacagtaaaacaataaaaaaagaaaaaaataggtaagaaaaatataaatgtaaaaatttatttgttaaagtataaatgtaaagtaaagtttgaaaagaagttaatatttggtgtaaatattcataaaaaatacattagtaaaacatatattattttgtgaaatttgactaactatgcatttattggacaatttttttttttctaaacctaaactattcaatattggtagaatatgtcattttttcctaaaactctgttctacccctctcatttgaacaaccctcccccctctctctctgtaaacacgcacatagaggagcacacaatcgacccaccacccacaaccttggtcccttctctccacgaccatagacccaaggacccaatgaccatcgtggacccaacgacttctctatcaaccacggcttcaccatcgacaatgttgtcaaatgaataaattgtatgattaatgtttgttatctgtgagtagatgttagatttagggtcgaaaatggtcagatccgagttttgggcaaaaaactagttttttttttcagacctgatggtggtccaatagtgatatgatgccttcttgttgttaaaatgagtaaaggttgaagacgaagggtccgatgatagtctgatggtaacccaatgatatggtccgatagtggtccgatggtggcccgatgccttcctgacgggcttaatgacagtataaatgtagatatgttcagatggtggcccgatagtggtccgatggtcacttgatggtactttttttatgtataaaaatatataaaaaaaaaaaaaagtagcatcgggccaccatcggaccaccatcaatatagaagagaaaagagaaaggtataatggatatgaatataaagtgtgcctatttttttttttaattttagttagcttgtgttcaaaaatattttaatatacaccaaatgtatgcatataaattcaaattttcttttattatacttatgttaccttttagttattttcaaaactatcattcatatttctactatttatttttatcaacctatgatatcattctctattcatcaacaatatcaatcgtatgaaacatttcttaatgggtaatactcattgatgaacactaaaaaaaattaataaggtaacaatctaataaccttttatggtaagtttccaacaattatttttt

SEQ ID NO: 56014 - DNA, 924 bp, Cannabis sativa
tacaaatctcttgtgtcaaatgatcttattttctgctgttatttttatttttgctaactttattgttctagttttggtttgtttctgcagtaacagaattacattctactgctacagactgttactattacatttttaatgtttttctataataattattgacattagctaaaactcaatttttcaattttgatctatttacaaaatggtataatatctattgtcacttcgaacctttataaaattcgatcaatataaaattaatttgattaataattatgaatctcaaccatgaatggtcgaactctactaattacagctcagtcgtataattataatttttactaatctcaaccacatatagtcaagctcaactactctcagttgagccattttttaaaaatttgattaactccaatcttcttatacaatttatccaataacatctcaaatgtagtgctcaaatcatcgacaattatagattttccttattttatttggcgaccgcttatatgacccatgttcatcatttcactccccatcgtactgaacatagattactattcgagtcactcctgtataaaaaaatagatggttgacattaaaaaatagttaaaatatattgatgttaaaattataattaacaagcttaattttcaactaaatttaattaagtgttatcaatgtgtccatcaaagagtttaacaacaattgagtattaacactatcttgccatgttcggtcgagctagttgagctctattagaattatcatatttattgaatgtcactcttttagcaaacatcgatgaaaaaagtttaacaattaaaaatatatatcgggatcaaatctagttgagctctaccgtaacgtttgtcatctcaactaacagcagtcgaactctactaaaactgtaatctcaac

SEQ ID NO: 56015 - DNA, 1585 bp, Cannabis sativa
ggagcagacgagggggcatcagtctattggagcagacgagggggcatcagtcgttcgaggtagggacatgatttccgcacgggacccaggaaaattaagagaaatggcttccggacctgggagtcattaagaggtaataattaccgggagtggtctcctttagcaaggaatttgaacagcgatgtaggttctagaagctcaggacacgtcaactccttacaaaatggcgctccaaagaaggttacacctttttctaacacatgattagatcttgtcccctgtgccagcccatggtagtgcgcgtacgtaccctctagcacgctttctgcccaacaacctatgtagtgactatttcgtaaaggggagacctttgcacgacacgtgtcctaagccatacaaggcctctcatcagtcactctaaaccgcacgatgatgaaggttcccaccaatggatggtcagatcgtccttcccatggtactagctttagtaacgtgtggaagacgaaaccctaggtaggtaaagggcatgccctttaccccatgtgtgcgtatataaaccctggttctttcgaagaggaggggcaagacttttcatctgccgttaccctgcaaaaatacctggctgtaactctcaacataaaaaattcccatactgtaatacattataatcttatacaattcgccctacaaggctaataatattgactcgtggactaaggatcattaatgcctgaatcacgtaaaagcctactttcatactatttatcgcttattatttcctttattctctcaaaatatttagttttcaaaaaactcagtaaacaacctcgtataccagattgtaaatccagtcaaatatgaaagtattttccatcattaccatatcatcatgaataattaaggtaatcttctttacctcagtgataccactactctccctaacgttctgttatacattacctttgtaacatccctactttaagcctctattggcccttctcccatagaatattggcttttatatataggtgcgccactctagctgcttcttagatcgatgactgacccttcaggtcaactcgatcattcccaacgtgctttcaactgacccgcacgcttcttgggaaaactttcaggaactcatccttcctaaaatgaaatcaccttaggtcaaggacacctaatcgtagagttctttcgtgataggctaccaaaaacaagatacaccttgttgatataggtggccccaatcaatccattcaagtcccttacaacaatgtagtcccatacctacatagtcttagaatcatcatatacgaccttcacccatgcaatgtgggattgtatagctcccggtctattccttgcagatcacgaggctctgactgtcgtagtttgactcatgtcccttttgatctcatttttcctttggtagtaaatatattgacccacataatcgttgcctttaattcacttaagattccgagaaatactcataaattgtaccacctttactaatactagatcacttctaaacaaaagattcttttctttgaataaattaaatggttgcctccattggcta

SEQ ID NO: 56016 - DNA, 3904 bp, Cannabis sativa
gtttccttcgaacactgtttgataatacatgatgatcgtgtagtatttcatctcctccatttctattttttcctctcatatctttttgcaaacaattctcatctccaaggaccttggagactttttggtgctctaagataccttttagactttctcttcatagcgcaaaatgcctagttctatcgaatttatccaatttgaatctcgccattgatgacattcaaagttcttcaagaattgtagcggaatgaatcttgattctgcgttcttgatcgattaccaagctaatttgtggaaaaattacgactaataatgtagaataaaaaatgtcaaaactttaaacaatcaaacgattagcaatgacaatattatcaatcaaaaacaacaatcggatgaaaacagtggcaaacagaggaatgaaaataatatagaaaataataaatgcaaaaattgaagaaattaataccaagatatatactggttcaagtgctatagatcaatgtgatctatggctctactctagttttagaacaccaccgaaaatccttctttattgattaagaatatgtacaatacagtcgtgacgagattcattgttgagtccttactaagtgtttcaactctcacacttacacccaagagtcttcttcatctacagaatatttttcttacaaaaccccaaacccaatctctcttttttctctgcacctctctctatctctctctaccactcaatcgtttctctctcaaactctcaatctcatctgaactgagttctaaatctcatctcttgaaataacaagtcaatgtggtagttataggcttaggatcaagatcctaaagtcattggctgcaagaaacaagcctgttaagtttgttagaaataactaacttaaccaacttctctttgagcgaagtttccatgtcaccttgagtatcagagcctccaggaacatatacgagctttcagattcacggaccaaggatacttgctgatgatgcttctggataggattgtgcttgctggagtcgactatctggaactaccattccaagagggacaactagccaacaagaactccattccggaatgaggctagcattcctaaagattggacccagagtggatatgatggtcatttggggaacactcttccagactcgactatcattctacaagactctttctgggactggcttctatgagtaaacaactttccaaaaatgatatttgcgaagagcttttcatttagaggaactataccatagtttatttgtttgtttttctttttcttttttttgataaggtacaggtagagaagctgcattagctattaacaacagtgacagtttaaccggtaattgcacttgaatgcattgtgtttggcttgtctattactattactgcagtaatgacctgtaaaacgtcacagtaaaaaaatacttcataatagtaattatgtttttacttttcagacgagtgctaattccaatgtgtgtgaggaataaatattaataaattacagcagtttgtcacatcaaggcttagaatattgtcaactgcatacttaatacgacatgtacaatttaatttaattttggatgttatatatttaaattaagagaagtgttaaaaggcattagtggtgcttattagtagccttttatgtgtcaatattgttattggtccaattaagtattgggtcccatatagtttaatataataatttttaagaagtatcgctagctaatcacaaagcgacatatctagaacttctaagcaacattggtgcctattagcaatgctcttaaattaaaattgtaaaatttgacattccctattaaaatggttcgatatgtcatgttatataagtattggtagaatactcgaaagtttaggagtttttagctctattatctctaaattaggcatggctacgcaaactagtgtttgatttttttacttctttttagtagttaggtgcttaaatttactaaataatagcatgatttgtttagaattagtcgtggtgttggatttttcttttccagtaattaggtcgttaaatttactaaattatagcatggtttgtttaggtggtattttaggaagagcatcttggtaaaaaaaccaagttagcttaaatgttaaggacatccatggaactgggttgtctctccacctaaggtccttggagctcccttcctccgtatttctaatcagtactaaaaaatataatatgtggaaagccagctgtttattgaaatacctatattatactaaagcttttgcatgaattgttgtaaaaagaatctaaggagcatcattagttcatttggttgtaaggtctttctccaccgttccttctcaatcacaagtcattgctttccaacaattgctgttttgattgaaacctttctagccagaagattacagaaaatccaatcatggccggttatctaataacattattaaataatggccatatattagtcaatgtcataaatagttaatagttatatttagttgttccaactagaagagatcatgagtgagacaaaagttgaacaatgcatgtttgtcttcaaaagactttattaaattcccgcattgttaaggtacagacatatattaccatatataaaatgcagaactactacttttattgttaattaattttgagataaaaactcatacatcttaacttacaccttaccaaattctaaaagacctactatggattgcttactataattttgctctcttaagagtgtttacaactattgtttttctttttgaaatcgtgtacaactatttaaggagtattaaatgtcaataatgcattcatatctggatgtcacataatgaagattggaaatattggttttgcgcacaaaaaatattatataattttttttggtggggcagagaatgttgaagtgtcttgtaattgcaaatgttgtgcccgcataatgtggatatatattatatagacagaagttactcttgtggacctaatgggccttgggtcaattatacacgctggacaataataagaccaactcagatacaacaggcaaaaagaaaataaagtaggaagaaggggatgataaaatacaagataatgaaaagcaactccatgtaccaaacccaaagttgaaataataaaatatattaaatcttctaaaatgtatataaagttgatgccactactgctccagttattttcacctattgctcagtgttacagagagtataaacaaaacatatttaacctccaagacactctatatactcactaaaaagactgaatacataatttatcagtctctgttctaaagattcagaaattcttgcctttctttctgtggttaagattagaaactgtaaaaccattcttaaatatctatatataccaagtatcatatttctttactagatccatcgctccaactaaggggggaaggaaatttttccagtgtttgttcttctttaagcagtatgtacgtgcagaaaactgactgttcgacgaataaagattgaaaagaaaaaaggaagaagggaaagatagtttatatgtttcgaccgaagatgttgccttttgaatcagatttctaactctataatctgtgtgttgccagacctatgtaactgtagagatgccattagctctggaagatgcaaatggactatccgggagatttagtgcttgactgcacaaattgagagaaaattaaagaataattaggagtaataataagaatgattggccaaaacccaaggtccaaaatgaagtcaatacccttcttggtcagtattggtgtctgtatgcttgaacttatcatcacttgtagatccacagttaataacatcaaacatataactgaattgttccgaggatgg

SEQ ID NO: 56017 - DNA, 1015 bp, Cannabis sativa
tagaaaaatatgcatatatataatcaggaaatcattccaaacgaacctggacagaaaacagaggcattcgctggttgttatgaagattaaaagtaccactttcctactactgttactattactatacttcatcatctatattattcatgataataattcaactctaatcatcaaattcattcatttaaaaatttctattaattgttagacaattactaatcatcaaagtatgggtttcacatcctttttgtacgaattaagaattgaattcccctttgttttttttttttgtacagggcatgggcgccttctctgggttcactcggctataggtgttgccgtggtactcgagactcatggattctgtgaatataactttgaataaaattgtttgggtataatttatttactattcaatgtaattgtttgagttggatatgtttgtgagttgagaatttgttgtttgaactatgaaagtttgtatatcctaaaaaatattgtaaacataaaacataatatatgaatttatgttttatgattcttatttcattaatttttatttatattattattgtaattagataataatttatatatatattaaattagtttaaatgtatttttttttaatttatataatacttttgccaacagttataaatagtcatttaaatggattttttccaacagttgtaaactgtcatttaaaataactttttccaacagttataaaccgtcttttaaagttttgtatttttatgacacccacatagccaacggttttagaaaacgttgggaaatagtataaatgacagttataaaccgttgggaaaagctaattttgtagtagtgtaattttggtcgaggtataaccatttgttaaataataaaatgtactttgtattaatttttttaaatagtacaaatataaatagatttatgagtttaatttttgataattttttttaatacaaccaacttaaagataattttttatataaataaatataaaaaa

SEQ ID NO: 56018 - DNA, 1058 bp, Cannabis sativa
  modified_base (67)..(75): a, c, t, g, unknown or other
gttaaaaacatacttgttagtaactctagctcctggtaaaatatattccaacaactggcctcaaagnnnnnnnnnttgatttactttcaagaaatttgagcttaaaacggtgtatgtatgatttgaatgtgattcatgtttgatattttcaatttttttacgtaaaataatttaaattttattctggaattatttttgttcgatagtatgaaaaaaattaagcaattcatttttttttagagaacttaattttgactttatttgaattagttatgattttttaaaaaattgaaaatatctaaggggtggtgagacccacgtgcgcacgaggaactaagtgtcactcagtcagcacgtgcattcggacagcaccttgtgtcacctttagatacatacaaatatatttgactacttcaagtaacaattgtatttaagacttcctcaaaaagcttttcaaataattattttgtgattctttatcactttaaggaatgtaactatattaaatttattggattacttataaactttactataatatttgtaaattatatattcacttccaagaacatgcaaaactgaattaagtagtcactatatatacatatcttgcaccaataatagtttcatcaatatcattaattttaagaaataataaatatatattaatttgcttatggtatttctaataaatgtaaaatctaaatactttgaaatactatttcatgttcattcattctctttagagaattatttgaaaataatcttgattataagtgtgtctgttctacagatacgtgagtactgttctttaattccacacgtaaaatgtttatttcatgtactttgattatgtgtgctattttatttttttagtttcttctagaaatatttcaggagtaaatagtatctttgattatttaaaattattgcattcacttcatgtaataacgttgaacaaatagaacattattataattttttaaaaacctgttaattcatctataaaaatataaatttttttttagtatttccttttacaatattttaaagaatat

SEQ ID NO: 56019 - DNA, 548 bp, Cannabis sativa
ctatccatatatcagaggtttaggcagacaatcctgctaagcaagcccagatttctgagtaaaaaccgattaagaggaagattcaaatagtgtgtaataagtatgtgagatactgttgtatggattcaattcatagaatcagggagctaaatggatagctattgttgacttgattgtgaagtaaactaaacgaagtgattacaactagttacaaaatgcatcttaagtctatgtggaactagcttaagagtaatgatatgttatgtgcacccaaatatgcttggagaatacagaaatcaagaaaaataaaattatatttcaactttaattgtattgtattctagctttagaatccgtttgtgattagccatgattttagacatagttattgggatttatttgaattgtctttctacagtctatatatacaatttatgagggatgtgcaaaggcaatctagccaaactgatttttcttttcgtagttaattggtttattttattcaactttcaataggctttatctatacattttttgctggtaaattt

SEQ ID NO: 56020 - DNA, 1334 bp, Cannabis sativa
ttttttttttttttttattatcagaaaagagaatatatgaaaaccacaaaaatgacctcccaagagtttaaaacaccaaaaatattagcatgactaggggtgtttatctaattcaatccgcattattttgttcatagtgcatttgatctgtactaagtgtgaattttaaattttgaatccaattcaattcgcgtaatagtttaaatttaatccaatttaatccgtaaaagtgcagatcatatcagttattttggattgattattttttaatattaaattatttaattttatcaaattatatatattttttcatataacgaacaagaaaataaaataaattattgttattttatgtcttcaacaataatttaaaataaataaaataacaaataacaaattcaaatgatgaaaaaaaattgcatgtataaagaaaaaattattttaaattgtacgttgaaaaaaaattatacataacaatggaacatacatttgatcttttaagttttgaaatataattgtattatatgtattagacttttaaatgattattatctttacattttagttgtagatataattttttttttatttttttttttataaatatgtggattggattggatcgcttacttttacatgtcaatcaacatcctatccacacaagtgccgcttttgaattttccaatcattcaatccgcacaagtatggatatccacactttgtgaattagattggatcgtgcagattaaattgaatcggatattttataaacactcttagacatagccacgctataagatgctcttatttaaagaagattagctaaacccacaaaccttttctactcaagacaattatgatatcatgcgacattatttttgtaaagataggagaaaaaaatcaatttttttgtaaattttcctctctaaggatgcgattggaagttggattttaccaagaaaaagaaaaaaagtgtaataattattttttggaaatccataaaacatgagagataaaagtaataaaaaaaagttgaaatgtaaaatgactctaaatgtaaaaataaaagtggggaaatttacaaaaataccgacttttgacccaatttttttaaaaatactgccacacggcagaaattacttttatactgtcttggccaatttttttttcttttatactataaacaccaaaaagaaaatgaggcctctatcttctacacccacggacagaaccaccacaggaaggaacactaggacaatcgaaaaacaaccattaattctggtgagattgagaaaaataaagtaaaatctacgtcaaataaataatcatggcaa

SEQ ID NO: 56021 - DNA, 822 bp, Cannabis sativa
aaacacatatttaaatactaaagtgatactaaagttgtaagctcagtttcaattatctcaatcaaattgttattcactttcagtagtaatgaattctaatttacaatgcaaattcacatacatttgattaaaaaaaaaattcttcattttacaacaaacttccagtagtaatcttcttagcactttgtaaatgtcataaaactacatttattcgagaaagttaacagtactaaattttgtaacaaattacacaagtcacattttgcactagacttaataactcacaaaaaagaaaactaagatttctacacaaatcaaaataccaaatttaatacgtctgcacacttcattattcttacaacatcatcatctcttctctaaataataagttgcatctcctcaactttgtactcaacctcttctacccttctagctaatctttctaaatcattcacatgtctttcatttgggtttgtattaatctaacacaagaacccgcaaccattttccacatttttctgagaaaaataaggtaaattagacccaaaaagtttaacaataaactaaaatcaaacattaacaacaaatcttgtatcttggaaacccattaaaccttcttccccaatttcccattgtctttgcgagtcactttctaagtgacaaagacaattgggtccactccaattcaacatttcatcatatcttctatccttatttttcatggaattacttgagcaagacattgtgttgagttgccaaaaaaaataaaaactattacaactaaattttaaagaaactagatcattgaaattgaagaagatg

SEQ ID NO: 56022 - DNA, 1139 bp, Cannabis sativa
tttctctacaagttttgaaatgaggacatttactaacatagtccaataatttagagccatttgctataattttttgaaatgaggacacatactaacatagtccatttggggcaatttgctataattttccaaataaaatagaaaacttcattttaatacgtattataaaggaaacttttataaaattactgtaaaatggaagaaactttacaaaaatataaggacacgagatttttacattattactataaagtttatacaatactaagttagagtttcaaattataaaaatattatgtttcaataaaataaaaaagtaattcaaaaacaattttagaacaacttaacaaacaatatgaaaacaactataaaataataaaaagataactacgaagtaataaaaaaataacaaaacattgacctaattgaaatatgtaaaataatatcaacttcttaatatatttttgtactacaatttttgcttaactttttaacaacgtgatttatctttttatactactacattatttttttatggaaatcgttattacaattttatactttcaagttttttttctcttttactttttgagttagtgatagttaaaatgataatttattttataaaaattaaataaataattacattaataatagaaataataaaatatcatagtttcagaataaagtgtataatataatgggtaatatataattaatatgtcaatatttactactacatatcatgtctgttagaaaaacagaaaaacttatcattgtatttaaaaaaaaacatgtcaagaaaataaactaaatatatttatctattatctacatctacaaagcaacacacatacaacaacaacaaaaaaatagtcaggaataaactaaaaatataaaccataaaaaatacacatgaataaaaaaataattgttcaataaaaaaattatggaaatcacttaaaaatagctaaaaacaacataaaaataccaaataaatgcacatatatatatacaacaacaaaaatattatctagaataaactgaaaatatacacaatttaaaatgtacataaactaaacaacaactgttaaagaaaatataaaaacaacaaaaaataactataaaacaactataga

SEQ ID NO: 56023 - DNA, 908 bp, Cannabis sativa
aatttatatcaccttcataattatctcaaaacctaagttattcagtttcacgttattattttttcctttcaactctaattaatttatgaaattaatttgcttttatttaatttaaattttattgatatcatataattttatacatatatattttccttttatagttttagatacacttgatcctaggtgttttgaattttgaaattttttatttttactattgatatattattattttaacatatatctttataaaattaatatatattgtctatatatattgagtcaacgattaattttatttcatttcgattatttttactatatttatatatattagacaatatacttcatagtgtataattaatatttttattgtttttacttttttaattttagaatgacctttatttttacttgtattaattttcaagatatataaggtttttaattttaatatggttgtatatattatttatttattatatatagagttgaagaaatattaattttatattttatgtttttatagtttataacaaaacatatttctagagactttgttggtaattgactttgtgtcatatatgcactactacaaatatgggctttagaggcggttgttaagacctttcagcgtcggttttggcataattcgctaccgacgctgatccgagtaacgctaaaggggtatgaaagaaccgtcgccatagggatactatgacgtcggtcattataaaataaccgacgccatagggaccctatggagtcggttttaataaaataaccgattccatagggatttcctataattttttttacttttaattaatataatttttttttaacttttattaaaaatctaaatttatttttttattattaattaaattaaattaaagcataaa

SEQ ID NO: 56024 - DNA, 3141 bp, Cannabis sativa
  modified_base (3113)..(3115): a, c, t, g, unknown or other
tactttcatattatatattatagtttaacatatgtaacatggttttgctttgttttgtttcgttattagttcttttttgtattttgatggctccccatcaaatcgttgtcagtggttgcgaataacaggttctctgcaactgaatgggttgttagtagttcaattgcgtaccttgcacaatagttgagtgctcatgttacgagattgaatgaacctgctgcaacagtttctattgttgtgtcttctaactgatagatgaaactaaatataggtgctcttaagattaactatgatgcgcaatctttttaatctaattttatttttagtttttttgtcaaacgatatgggaatcaagcaattgattatttagctcggttttctaattctaatctttgtcgtgtctccaacgggggagctccaattagattgcaagttattattttagataattattattaaaaaaaattcattgtttattaaaaaaattatatattataatttctttaaattttagaaagaaaaaatcaaaaataaaaaaaatatgtattatttttgtggtttaaaaaattcaaaaacaaaaggctgcattctataattattgtttaaatttaaagtattttttgtttttgtaattagacaagtaaatttattttcaaaaaaatgtatttattaaaatttctttttttttttaaaaaaaaaaatgagaatcaaaatttcaaaaataaaaataaatcatgtttgactcataattttattatcaactaaatgagaactttaaatctattaaaaaaatgaataaagctttaaatggtgtagaaatactataaatgatgtttagtatgaggagtttaaaataatttattttattagaatattgtagagatgaatataattgtctgtaaacatataactgtatttagttatgcatgagaatatttagttagtgttatatttaatttttagagcaataaattatcagctcgagttatacaacatgtatcatgtatttgtctattaaataataactaagagttgatgtgtacatttaggtagtcagcttgtacttcatgcactagcttgaggccagtgattaagacttcatattcagcctcattgttagaggccttgaagtcaaatttgattgccccatgcaattgttgcccttaggtgtaatgagggcaatgcctacaatgaatagttgatcagtgcaatttccatcaacatgtaattttcatgtcaatttttcaggtctttgttactgctcttgctctcgcttcttctttggctcttgcttttctctcaaatcttgagagattccaggagatatgcttgtacattcatccacaaactctacaagagcttggtcttttatggccactctcggttgatatgtgatgtcaaattggtcgagctcgatggcccacttgagtagtcggccagatgacttaggtttttagaaaacctgtcgtaatggttggttagtgtacacccttatcgggtgagcttggaagtacaaccttagctttcttgatgctaagagtaagttgtatgtcagcttctccatgagtgggtatcgactttcagcatcgattagtcttttgttgatatagtctactggatgttgtataccattttcttctcttatcaagactgcactcacaacatgttctgtgacagccaggtacacacccaactctttattgtccaaaggttttgataggataagaggttaagccaattgtttcttcagctcctggaatgctttctcacactcccttgtccactcaaattttttgttgcctttgagtatgttgaagaagggaacgcatttttctgtggatttggacacaaatctgcttagtacaccaatacatctcgtcaagctttgtatttatttgattgttgtgggcgacttcagtccaaaagggcttggatcttattcgggtttgcttctattctactagcattgactatgaagctaaggaatttacctgagcctactctaaatgaacatttgagggggttgggtttcatgttgtactctaggaggatcttgaagcattcatcttgaccctccacatgtccccctatccacgtacacctccatattgtggtcaatgagatctttgaacattttgttcacaagtctctgataggttgcccttatattttttagcccaaagggcatgaccttgtggcagtataggcctaggttcgtcatgaaacttttgtgatcttgatctagtgggtgcatcttgatttagttgtaacctaaataagcatctatgaagcttaggatttcatgtccagctgcaacatctactagttggtcgatccttggaagcaaaaagcagtcctttggacatgctttattcaagtcggtaaaatctatgcagaccctccacttgctgttaggtttggataccaacacagggttagatacccaaagcggattgaatgctttagtgatgaagtcattggcactcaaccttttgacttcatctttcagcgcttgggcatgctctttatccagcaacctccttttctattacacaggttgaaagtttggatcaatatttagtgcatgggtcatatcggaggaatctatttcgaccatgtctccatgtgaccatgtaaagaggtcaaggtttacccttagaaattttatcaatacaaattttatttccactactaaacctttcccaatcttcaattttttggctggaagagtgggatcaatctccacttcttccagttattccacatgacaaaaactgtttgtaggatccccaaactaaggatctatgcctacctccaggctttgggctggacttcattgccctttctcaagctcttattcagagctcttcgtgggcatcttctctttcttggctttagataaagccaagttgtaacagtgataggcaaactgttggtctcccttgaaccatcctaccccatgccttgttgggaactttaggcatatgtggtagatggatgttaccgcctttaggtcgtacagggctggtcgacctatcatagcattgaaggttgatggcacgtcaattactaagaattgtgccatcagagttcttgtaaagaccgcttagttnnntttagaaattagcagttaatcatgtt

SEQ ID NO: 56025 - DNA, 1483 bp, Cannabis sativa
  modified_base (1258)..(1263): a, c, t, g, unknown or other
  modified_base (1423)..(1445): a, c, t, g, unknown or other
ttacttatttactcacttataacaaaatgtaaattttatgctgaaatagattagtaggatcataccacttattacatgatcaacccataatgtaaatataaaccctaattatttaccattagacttttcgggatattacaaccatcccccttatagaaattttgttctcgaaatttatttaaacaattcgggatattactccatatttatgattctaactctcaaattgttgtttctatcttactgtttttctatagcactttctcaactagtggagttgtctcattacatagtacttccttttctagtccaaaacctgaacaagatatttttctcatataaaacatcgtcgcagctcagaatatgggtcgagtctgatacatatttttctcagcatggagacatgaaacacattatatactccagacaacgcaggagttaaggctagctaataggctacttactctagtgaacatgtatctatatttctctcgtacgacacttattaaggtacctaactagtggtgcatttaattatcatttttaaataaacacctcgtcagggaagagattattctaagataatctaacctttatcaaatatgctcacaacatgtttataatattaatcaattgatcttctcaggttacccacctttcaagaataaaacattatactatttttgctttaatctccatggttctgaatgaccttctttaattcttaacattataaccaaaaatatcaaccttggaattttacaagattagattattcttttgtatgaattctacatcctcatttattgtataaattgtctacactaataaacaacatattaactcggcatgtccaaccgttactactcagtcaaaatcataagatcccacagtacataatttgtaattatgtctttatattccttctatgggatctcctaagctaatctactgacttaacttagtaaacagttaagtattcatttatgatagatattcaattagagcatttcttatttccacccactaatatatacttatctcaataacttgtaaatttctacttattaacacatcccttcctcttgataatctctggaatgactaccaactttgcatcctaatatgaatctttctagcgtactttgtcctcactcatacactttccgagatgactccccagaagatttcccatcttgagattaccccaatttaagtatacttaactccaaagtaagctcacggtgggttatcagannnnnntgcttctttgtcgttcctaattgtatttcttaattttattctttcgttaataaaattcaatttctatcactcccttcattaaccacttgcaattcctcatcagttttgttcacttaaacttcaagaattccactcttattgtcaacttaaatcttgttcnnnnnnnnnnnnnnnnnnnnnnntcaatttcccttgaattgacacaacttttaaatttccc

SEQ ID NO: 56026 - DNA, 1947 bp, Cannabis sativa
taattaattaaaataaatgatatatattttttatatatatttatccaataaatatttattataaattgataaatatgtaacaatgcataaaattatatcaataaattattcattaaatttatgattaattacgtagtgcaatataatttgttaaaaaaaatagtgtaatataatattcataatataaattcattttttattttcgataatatatgtatcaatttcaattttatttagaagatacatacttaaataataattaattttatattcaaatttatataatcaataattactttctatagttactttttataatttatatagttaaaaattatttatatgtataacttctatagttaatttttcattttttttactatcaaatttttgattttgtttaaaatttacaaataattaataataaaatttaagaataacactaaataaactttttttttctaaaaaaaaaagaatacatatacttttttttaaaaaggacgatacatatagtttatataaaatatatgtggaagatatatatggaggatatgtgaaagtatcattgtagaagcttctatataagtaaaatttaaaatttaataattttttaaacttaaatcaatttttattgccctacttcaaaaatgaaaataaaataatatattatttaataaataatataaaataaaaaagaaaatataattgacgaatatgtagatataaatataatactattaataataacaacaataataataataataataattaatatatcttttgatgtaaaatatatgataaagttttcactcttttttttcttcaataaattacatatgaaatatgagaatattaaaagtcccacaataataatagtaataatacatacacatacacattcatcttacatatataaaaagagtctatatatacactattcattcaaaacgtcaaccaaaactgtgcgttttgttagtgtataagttagtttcttacatatatataatgaattgtcttttagtgcaggtatatatatgacactttttcttttttctttttcattttatttttcaaaatctaaaatatatatatttttactttttcttttttcttcaatttgttaagtattttataatttttttatagctattataactgttggaaaattatacaatgcatttttaaaaaaaaagaagtgcatcgatatttcggtatttgagagattttttttatttaattttttttaatgatcgtgtacatttatatttaaaacattctgtcaaattttaaaaaatttaacacgccgaaagcagagtttaaatagtttattgcacgtttgactattttatttgatacgtatgtgaaagtgaaatagacaattgagcaccgctttttatattgtaaactattctaaattttttaaaattttgtaggatgtctcaaataattataacgtatataattgaaaaaagtagactaaaaaattatcttaatgccaaaacaaataggagtacatcagtatatctcttaaaggatacattgtaaaatcacctataattattttgttgagtctattatatcttatttataagtgctctaaacttacctaaataccaatactatcaacaaaaaataatttatctctaaacttttatttttttcccattgaacatatttccaccatactattttttattttacaaaaaaaaaaatataattaattaaataaaaactgttataatttatatttttttttttttgaaagaaagtagatatattaatttctaatatttagattttttttttttttgttttgggatgtccctctattttaggtaagttctaatttggaccctctactttaaatatatatatatataggtgactattcaatggttgtatttttattataaccatatggttacatttttctttgacctgtaa

SEQ ID NO: 56027 - DNA, 2036 bp, Cannabis sativa
gaaaatcaaccagataatccttccttcagcacttgttgagacaaataattaagagaaataacgaacagctttagattcctagttaaatctaagagcgcttgtcatgtctctagtctgcttgtggtatgatatattatggtatggtgtgcagtgacaaccctcctttaaggccactcatgcagttatattgtttaattaagtttatcttcaaatctttttctatatttacaaacaactcgcattttactttgcgtgctgttatattttgtttaatactatatatcaaattgttaggatagaaaccacttaactgtttttctgttaaattctgttataaagtagttagtctgttatgatgtaatctcttgcttttgtactcttcttgggatataaataaaggctttactcagttagttcagtggttctttaacacctctgttctagcttgtgtatgattcagaaactctctgtttcatcttcttcctctttcttacataatatcagattgcctctgacttgcgtcaatggagtcctcctcgattgatcccaccaccaactcggcttctactacaccttctgcatctatcgctccctcgattcctgcttggaatcctttttcgcattctctttcatcttccctcacgatcaagttggatcgtctcaacttcttggcttggaaatcacaggtggtgcctactgtgattggccatgaactcgacgaaatattgttctctggagttccgcctccctccaatctggttaatggaaatcccaaccctctgtttgctcagtggagaaagaaagatcaattacttctctcttggcttcgctcatccatgtccgaaggtgtgcttgcgtctgttgcgaacttctcctcctcttacatggtgtggaaagccctggagcaacgctttaacagtcaatctcgtgccaggcttcttcaacttaagaaccaattttctacaattcgcaaaggtagtctctcgatttctgattatgctgacaaagttcagaatcttgcagattctttagctgttacaggctatacagtcaatgatcaagatattctcttgcaaatcttgaatggattaggaccggaatatgactctgtggtgtcgggcatcgcggctcgaagtgatcttctctctatcgaagaagttcatgctctcctactctctcatgaaagtagattggaaaatcacagtgctgtaaatgaactagcaatgaaaatgcaggccaatttgacgtatggtaatccaagatcaaatgtttatcgcccacctcaaggcaccagacccacggggcgtggatataccaaaccaggcacttaagctacacggccccaatgtcaagtgtgtcttcgctttggccatacatcaccaacatgccattatcgattcgataaaacatgggttactcccaaaccaggcactgtcccccccgtgcctttattgctgagcaagaatgggactatgatcctcaagccttctcgacctcttttgtcccagattttggagatgatgatggttggtttgtggacacaggggccacgcatcacatcaccaacaatcctcagcatcttgagacatccaccagttaccatgggtctgaatctgtggctgtaggagatggtaagaagctggttatttctcatattggtaccacttctctaccctcttcttctaattctccattaaaattacattctgttcttcaagtacctgctatcaccaaaaacttagttagtgtgtcgcagttaaccaatgataataatgttttccttgagtttcacaaaacttgttgttttgtcaaggacaagcaaacggggaaggtccttctcaaagggaaacttaaaaacaagctgtaccagttagtagacacaactcaaagtcccagcctccaagacccatttcagtgtcatcatacctctgttgcaccagatagttgtattttgaattcttgtcaatgtattgatatgcaaaccttagcttgtaatgaatttgcaattaataaaatggccaactattcatttgatt

SEQ ID NO: 56028 - DNA, 1209 bp, Cannabis sativa
ttatttgtagtaaatatttgtgccatctaaaataatattttagctcatccctaactattccacttgggtgattaataaaaatttatgaacagcttatcaacattttgaggagagatattgaataatattatcacacatgattcttgtgagtatcattattcatcatcctagccagttgccacttccatctccatcctcttaaagcaccttaatatttaatattacccacacaaaataattctacccagctcttaagtaatatactaaatttgtaagcaaatttaaaatatctgacatttggatggaaagagagagaaagaaagaaagaaagaaaaagtcgtacatccacaaatactttagtaacttagttaggtagttccggtagaacatgaagagtggattaattcttgaggaagtccgagactaaaggagaaaactccaaatttagaggtggatcaatcctaacattattaagcttattaatttctttataaagggctcatgtaggttggcatagcaatagtatcgagagagagagacatatatataaatataattaaaatcaagagatatatataatagtatcgagatgggagatgtagagcgcattttcaaggagttggacatagataaggacggtcaaatctcgataaaggagttgggtgaggcactccaaaagcttggctcagttacagaggaggatgtccgacggattatgtctgagatcgacaccgatagcaacggctccatctctttcaaggagttctccgattttgctcatgctaacgctggcttgatcaacgatgtcgccaagatattctaattaagtgatcatcaatatcatcatcatcatcataaagtgcactcctgcacccattcatattccatattcattctttctgtctaccacctcatttttgtttcgcatattatatatcaaatatgtaatagatgtttttttttttggattaagtaattagtaaaaataagtgaataactcatcttctttttgttttgtttcaattaattattgtacgtgttacaattcatacgtacagataataaaacaacaatatctatacaaaaggaaacttttttaattttgtagaaaactagctagctataattcaactcccatatacaaaggtcgaagttagttagaactgaggtgtcatgcatactcaattataaatatatctatttataata

SEQ ID NO: 56029 - DNA, 855 bp, Cannabis sativa
gggaggagcccagggctctgaccatgtgcctgttgaagaatgagctgacaactcatattcagtggcttggttaaaggaacccaccagagctgtagcaaaagtgagtcttcatagggcaattgtcactgcatatggactcaaacctgggtgatatataatcaaaatagtctttcttatgatcttacgattgtgttaacccaaaaaattgacagagttgatttttgagattaatcaacaattagtcccagtggtcgagagacatcaactgtaagagtcggtcgaagaatgactaagtcaatgcatatggcctaaggatcactaatcttggaaatccatgcttgcaagtctcggattatatcctccatacaactcgaaagtctcaaaccccgtaacaactcatgagtagagttagtaagatcaacttactaagttacaataggattttcgtagtaatatgtttagaattgaatcttgctataagcataagattcaaaggtctctttctcatctctccaacacatcttgaatcgtccaatttcaatatatatcaagagagttgtggccaaaatactaagaatggttaattgtgacaacttggtatgtgagccatggctattgtgcgagcccatgggctgttgtgcgagcccatggctattatgcgagctaatgagtcgtcgggtgagctggagggaatttgggtgagacatggagcctttatacaagtggtggagcatccgttcgacccacggtggagcaccaatgctatttgttgtttagtcccttagtgatccaatgacaagagtgcgggtaaaaggagaggccatacatgtatggatgggtgccatgtgcctgggt

SEQ ID NO: 56030 - DNA, 2345 bp, Cannabis sativa
tatgtgtttatttatcgttttaggaatttcatatttaggatgttagattatagaattataatcaacatacctgttattaaatctagatcatggtaaaatagtttccaacaagcgtctcgtttgagcggctgatcctgcagcctttgccccccagtttgctgagtaaaccacctgattaggttggtagcctttctggattggcagtttatttcttcttgttgggctcccatagattaagccttgcgatccatccacccttggaattcacgtcgctactgtttgaatgcgtgattcacaacgatgcatgtttccacttggttgtggtggattgtgttagtatgtgtctggacttgtcttagtgcatccctcagatcctccaaattagagttgtcccccagataaactcggggctcttctacatatggctgatcagcgctaggcccagtctctccagcgtatgcctgactagtagtcctagcctcttggacaccaagaatgactccagtaagatgtgttgtaatcctagtggccttagggttaacattagcagggactataggttgattgcctcgaggtggaagccaagcgtttccctgggtcagtaggtgtttggacgttggggtccatcaccatatgattgtgcaattcagtcgacgaggatcttcttgtcaaaaccatgattgatgattcaaaggtggatgcaagatcgtaggttgatgagagctagataatacttcaatgctctcaatgaaagtaccaaaatgttgacctcgcttttagtcaacgatactgagtctttaaagtgataataactacagagtaaataataatgaaatgagaacaataaatagcacacaatatttataaaggttcgacctcttataacgataatagcctactccacttttagttgtattattatgaagaattatcaagtcacaaggtccagccaggtgagtttcttgataattcttaggaagtgtacaattatttctgcagagtgattgctcttttagaatgcaaaaaaaaaaaggatttctaaacagtgatgtgacctcactatttatagggaaatacaattatatttaccaagaattaataggcaataaattagagagatttgaatacagaatctataatgctcgtacttaaaatttaacaaattcaaaatttaaacatatttttattatatttataaaatttcgtaagtcaggatcccgaatttaaaaccactgttgaaaatacatatatcgtaattatagttacataatatttttttttacaaaccacagtgcggcaacaaaatatgactcaaaatacggtaagactgaaaccgtccaggatgtactaccgcaatatgtacaatccttgtcgagctccaactcaccgctcctccaccttagccttttccttacctacacagggtagcaaactgatgatttgacaaactcagtaagatatgcataaaacatatataagcaatgcgataccggctttgtacttaagccatcctgagcctaaatgcaaggctcaccaaatggttatgaacgctctcaacggaagtacgaccgttgtaccacatgcactagagtaccaactccgtactcgtgttggtagggacattactatacttttgagagttactgagtgttgtatcacatgcactccgtaccccctggtactcgtgttggtaacactttaactacccttaaataccctacattgtactaacacccttaacactatgactataccattgttagtagtggaaacaattaataacacacattcattcattcacatatatagtttatgctaatcttaccttgtttccgtgctcaggtgtgtcagtcagcctgagtggaacaacagctcgacgctttacaggaccctatatcacaatttttgtaattctgatgagagacacgctaaaacacttatcggggacttaaaatcaaaactaaagattttcctatcgatgaataacatggcaataccctaaatatcacaaaaacgggaaaaactagggttcacaaaattgtcccaaccggtagaccggttccccaaccagaattttggtttagtggggtttcctaaggaccaaccggtcgactggttccgcgcaggaaccaccaaaaatgtccccaacacttcaaattaaccctaaactctccaacaatctccggaacacatgtatataccataatgaacccaattcaagcaataagcctcaataataaactcagaaattcaaaacaccatttgagaaccaagttaagttctctagcctcaattttgctcaaaccacaccaaaatctgctaacacaactcaaaaaccactcaaa

SEQ ID NO: 56031 - DNA, 967 bp, Cannabis sativa
tcaagtggtcataggagggtgcgtatgtattagagatcctgggttcgagtcccaagttatacattataatatataaatgcttaaatcaaaaaatatttttcgtattttacaacatatcctaatcataatgttccctttaattacaagcaaaaaataaattatatgatgaaagaggatcatttgtggcgtttttgaagcttatatcaactcttggaagctttgtagattgcacattcactttgagtaaactttttatactcttctttacaatttcttaattagttgagaattgagattctatgaaatttttgaattaactttaacaattgagtatagctaaaaaattactttgtattgcctttagaggcatttgtgtaattttattcaatagagtaaagtctttttgctgctcttggtactgcatggctgttattgtaaatgatcattacactctctacactcattttattacttttttttacctcatctcatcgctcgtcttgttttccttctgtttcatacaaatattactttatttctgtttcactctacttgtgtttcttgcaaatattaccctactttcatctcatacaaagttagtaaggtactcctctctttcacccctaaattataagtattataatccattcaagattagagaataacctactaaacttgcaaccaagccattattaatttattatatgggtagacaagtttggttaatattaaaaaaattgtgttattataacttgtactaaagttatagcattatattgtagatacaatgtggaagcaatagtggtgatatataaggcattatatactcttacctcacttttgattttactataaaggatattttatatattaataattagaaagattttttatataacaatttacattataattctagtaagtatcttgtttaccttacaattattgcaagtcatatgaaatctat

SEQ ID NO: 56032 - DNA, 574 bp, Cannabis sativa
aaaaaagagataccctacatatatggccaaggtttctttatatttatacatttatataaattttaatcatatatataatatttattcaattatcaaaactcatagctatatttatacaaactaagcatataaagtttgcaaattttaaaatagacacaacacacataaagagatctaacactaaagcaaagcaaaatatgtggttggatcatataaggaaggatagatttagaggtactttgagctccctacaaaataatgtaaataacaattgattctttgttttttttttttaattcagacaaaattaaaagcatcccaataatgtaaacaatgtctttaaggtcccttaaactttggtacgtgtaagacaaaatccaacatcaaataaagcaaaacttgtaccttcctaaagtagtagagagccacatgggacctcagaatgaatgatttgtgcaaatgcaataatgtcatattatacattagttagctgtttaaagaaatatgctcagctgcctttttagaaatttcaacaccaaaacacattgtacttgtagtgagtagtgagtagtga

SEQ ID NO: 56033 - DNA, 851 bp, Cannabis sativa
tcaataattcgtgtccagctgttgcgtccaccatcatatcgatgtgaggaagtgaaaatgagtcttttggacaagccttgttgagatcagtaaagttgatacataccctccattttccattcttcttcttgacaactactacgtttgctaaccaatcaggatagtcaacctatctgactgatcctacatcgattagtttttgtatctcttcatttatcaccttgttgcgatcgggtgcaaatttacgtcttttttgcctgactagtgggtaattagggtcaacctacaacttgtgaacaataatgttagaatcaatatctgtcatgtcctcatgggaccacacaaagcaatgatggcgtttaattaagaacttgatcagcctagctcgaaactcaggtgtaagctttgttccaatctagacttatggacacgtcctttaggtcttccatactgggttcatctggtgctaaggttggactagactgctctagttgctataatgttgccgatttctcttttagtgagttttgataacaatcacacgcattttttttgggctccccatatttctttcactccgcacttggtggggaacctaatcacttggtggtatgtggatggcacaactttcatggaatggatccacggtcggcccaagattgcattgtataagctgatggagagtcaactataaggaactttgtctgtaggttgactccttctgcataaacatggagttcgacctcgccgactgagtgtttttgctttccacagaatccaaccaatactgtggacttgcggatgatggtggcctcatcgatccccatctccctaagagcattcaaaaataa

SEQ ID NO: 56034 - DNA, 941 bp, Cannabis sativa
cgattccaacaacatagagaatatttgactttttacaagttaggtagcgcgaacttccaacaaggcttttgaaaatagttggatccacttttcctcctttgtcatgctttgaaatttttattccacattctaatgctgtgctaactggattagaatcatccatcttgaacttcttaagtacttccttagcatagccttcttgtttgatgaaaatactttacttcttacaatacttcgatacatcaaaggtacgaccaattatgggctattttgttctgcattataatggtgtgctaactggattagaatcatccatcttgaactttttaattacttctttagcatagccttcttgagtgatgaaaatgccttggctttcttgcttcacctcaatgtcgaggtaataagacatgagcccaatatctatcatctcgaacttttttgctatatctttctttagctcctaaaaaatacttgagtggcttccagttaagattaagtcatctacatacaagcatacaatcaagatatctttactactacaaaaactagtttctgtgacccttattgagtgactctaaaataatttagtgacccttcacaacgcgtctgttggaaaatcagcattcttaattattacaattatacagtatagctatataataattctgtttttaccgtaccatatttttagggaattagtttagggattcattgtatctttattattagatatgtttctcgttataggattattgtacatgttatatatactgctttatatcagaaataaaataatacagaaaaaaacatttttgccctaaatctatcgacttggtatcagtgccagaaaaagaagaaaaaaaattcgtactctaccctaatcgcacccctaaccctaatcacctctgtcctatttgcaccatgtcagattctgagtc

SEQ ID NO: 56035 - DNA, 950 bp, Cannabis sativa
gcaaatttttctctaaatggtttttgtcataaacatttcgaattcttataattcttcattacacgtattccctcaacatatatcccacctgatcgaggtttaattatatgaagaagatgaatataattatgatatatacatatatttttttgtttgatgaataagatgaatttcattactccaacaatcaattacaactctacaagcattctcaactaaaaaggagaggaccttaaaatactatactatttacaataaagagtgatggacaatggtcttgctacgatcctatcaaactttacgattttttgagatgtgtagggtgagattttaggaaaataataaccagtgtaacagtaaggaaaattttgttaaaatttaccccgaaaactataacgttttcaaattttaattagggaggttattttaaccaaatttaacgaaaaaaacaatctgcatatccacgtcttagtagtataaaataattgtgacttgtgggaaaaaatattttgagatgggtccgagccacatttcacaaaagggtatcactatcagaaatgtgagatttttaatatttcgataaaaataattgttagtacttgaaaattaatttttctctcaacatgaccaatagaaaagtgatgaacaatggtcatggctacgaccctatcaaatttcatgattttttgagatgtgtagggtgagattttaagataataataaccattgtaacagtaaggaaaaacttgttaaaaatttacgctgaaaaatagaatgtttttaaatttttaattagggggtcattttaaccaaatttaacgcgaaaataatcttcatattcacatcttagtagtataaaataattgtaactggtggggaaaaatattttgagatgggtccgagccacatttcacagccacatttcacaaagggataccactatcagaaat

SEQ ID NO: 56036 - DNA, 1079 bp, Cannabis sativa
atcccacagctcgcctctagttgtcatgagaacagtcgtgatccctgcttgaagagcagtaagctggatattgtcattcaagtttctaaccctcgcagcagatgtactgaagcgacttaagtaggccttaagcatcttgcccgtctactactttatgttagtaagggaagacgcttcgggtcgcctatttctcgctgcctggaacgatttcttgaagtccttagatagcttttcccaagaggtgatcgagtgatgggtaaatttgttgaaccagctgctcgctgccccaactagcaaggtagggaataaaatacagtgtaacttattcgttacattgctggctcgcatgatagtattaaaattatttaggtgagcgaccaaactttagtcgcatcgtatgacgagacgtgagggtttttgaatccctaggggaattctgcgctcataatgtctagatggaaacgctcgggctcttcgtccgagtcataaccagacaatttcccatattacccatcttggtacctcttgaatttgtcctccaactcaatgattaacaattggataggatcctcttgcttttgattgagttgttggcgtaagtcaggttttttctggttcaattgctcacgaagatccgactgttgtggatcatagttacttacagaccttgtccttgagtaactttcagttctagttgtgtatgtactctctcgatcaatactacgacgagttctatcctctcctcaggtagatcgactatgggttcttgtacatcccgagcttgaacttgcctcgtcacgtactggccttctcctttgggaacgggtcgatacatgccccctgctgggatttgtatgtgccccttccctattagtttaagaaggacgttggcggtgtctcggtggcaacccacctgccctaggttgagtcccaggatctctcttgtcaccacgagggatttcctgttcctagtctggggttgccttgtgcttgcattcctgggagaggattttggtaaatcatggtttccattcccctaggctataaatccctggggtctacgtggtacttcttcacga

SEQ ID NO: 56037 - DNA, 1674 bp, Cannabis sativa
  modified_base (1624)..(1640): a, c, t, g, unknown or other
gtaattttcaatcttatgagctgcaaataattaagaaaaattgtgagataaaagaaaagaaagagaaaaattaactaatcttaactatacatatatacctgaacgatgatgaagatgagtccgacagaaggggtgggaatgtcgacaacagtggaggcggtgggaatgtcgttgcgtagtcgaaacggtgggctagtcaacgatgaacaaggggaggtgaataagggttttgatattgaggatgaagtaggagagatgaatgtttctggtcaaaaatttggggatgaagagggagacgaagagggagagataaataaggatactgatatatatataaaactattaagggcggagatccgcttgtaataattaaaagtaatattttaaatattattagcggtggacttccgctggtaatagtccgctgctaataaatttaaatattatttaatgttattagcggcggacttccgccggtaatagtccgctgctaataaatttgaaatttaatatcgggaaaattcctgcacaaagtaattccttcaatattattacttttattttaaaaaatgatactattaccggcggatttagtccgcccctaataattctgccagtaatagaacattttgttgtagtgaggaaactcaatgatgagtttgagatgaaagatcttggcaaaacaaagagaattcttgggatagacataaagagattaaagcctagcatgataatactttctcaagttggctacctacagaaagtattgaataagtttggcatggtctcgtgcaaaccagttacaacaccacttgcttaacacttcaagttgtctgcatcttaatcacccaaaacagatgccaaaagaaccaagtgagcaaggttccatatggaagttgtgttgggagtctcatgtactctatggtgtgttctagacctgacttaactcgtgctatgagtgtggtcaataggcacatttcagattgtggctccacattgggaagcactgaaatggataataaggtacctgtaaggtattctaaacactagaattatgttcagtaaagagaaccagtttaagtaagaaatcactggttatatggactcaaattttacagcaaacctagacactagaaggagcctaacatagtttttgttcactgctcttaggggctgcatcagctagaaatctaacctacagaaagtagtagccttttcatcaacagaagctgaatacatggctgctacaaaagccatcaaagagggaatatggcttaatgggttaggtttcaaatctgaggatatcacagtttattgtgatagtgctttgcacctcatgaaaaatctaatgtttcatgagagatcaaagcacattgatatcaagttacacttcataagggatattgtgtcatcaaagttggtgtaagtgaagaaattaagcacacatgataaccctacagatattttcactaaaagtgtaactagagacaagtttaggcattgtctaaacttgttgagcattcaagacatttaatgtcctcactcatttcttttggatcaaagatcaagttagtctagtctggtggaattgttgggattaaatgttgggtttcatgccctaaannnnnnnnnnnnnnnnntaatcagatttgcttattaatatagatcagaaat

SEQ ID NO: 56038 - DNA, 1042 bp, Cannabis sativa
  modified_base (35)..(35): a, c, t, g, unknown or other
ttcattttgtgattaaaaattaaaaaacaaaagtnttaccaaacggcaccttagtaaatttacaatattatttttataaatataaatataatcactttttaaaggaataattattaattactttttttttttttttttacaattcttccaaagttggaggttgaatttttaaagtttggagggagaatgtctttcttcatctcttctctccctcatttaatactattttttacaaaacaagtgatttaatcttttcttctatcactctccatccacccttcttcatccttccatcttttccttaccaaactaatttaatgatgggaaagattttttctcttagaccatctccagtgggagatataaaagttgtgctatatttggcacaaaaaatgacattattttgaactagttaaccctgccccaactcagtcaacccgaacccacagacccgttaacatgcgagctcgaaactcgcgaacccaaaccatttcacgacccaggtccgggtacagttttttgaacccgaaatctggtcaatctacccgatgtttattcctacccctaatgatgtaaagcaagggggatcggtcgaaaaactctttatgataaatactctcattaatacaatgactcgtggactaaggctcattaatgtctcaaccacgtaaaaatcttttgttataacattcattaattacttcatacatctctaattgttggttgtcaaaaacttcggtcaatattttggtgctttcattcagagttgtaggaagctttctaaaagaggaagtggtaaataatcttttggtataatagtaaagacaagaaacacttcacattgacaacaaccagatgacccaaaggatcctaaagaggaagaagtagtttttagggtggatgctgaaagagaaggagaaactaatgatccagaaaatttaaaccaaaaagaatatgaagactacgatgaagacaactatacagaattagttgaactaaggcaaaaggttgttgaccatgaggttgagttggcaaaacaaaa

SEQ ID NO: 56039 - DNA, 1614 bp, Cannabis sativa
ctgggaatgaggtctcggctgcaggaaatgggatcctctgatgcgagaaaatgggatcttctgatgcgaggaatgaaggtccctactacagagaatgagatctatgcagcgaggatcatagagggacatattactaaatcagtaaattaggcaagtcctcttacttggagccagtctttctcgagccctcctgtcccctataatgaaccttgtaatcttttaggaaaatggccaaatggtttgcccttggtggcacttttgtaaggacaagtttgtaaaccaacttagctttcttcttatcttaaatgccttgtacttttacattcaaatgtaatatatttgtgtttgcttgcgtttttattcacaatgtaaccaattatatattttgatcaaatgcagagtacttttggtctttccattgcatgtaattttcctatttaagtagttagtaatctactatgtgtgcgggcagtttattatctaccagacttttgatctacgagcagttattaattctgcctcgcaataacagttataatctatcttaagcaaacttgaatatacttttaatgatctcatcactttatacatttttgattacttatatgaatagtttgatcatctattcatacgttaggtttaagtacttttatcacgacaccttgatgtctcctttaatactctcctatcttgtgcgaaccattcatattcagctttgtacgcaagtttatgagttatatctcatttataacttttgattttcctttctcatcagacaggtttaaataataaagttatgatggtttgatccccttctcgtcagaaagttctgaccaaaaactttaatttttttttttaaagttgtgggtttgcattatatcatgtatttccagatgagttccggttaatcatacacaaataccccttaagtaattttaaagagtaagactttataattacttaaataaaagattctctttattcatgaatgaagtttaaaatattacattagcaatgtgagttacatcattaatttactggtagtagggtcgcaaatgttccacattctagtagttctttattagcgagccatttagtcgagccaatttgtaactctaattcctactactactttgattacatatggacccacccagatcgagttgaatgctcatgcagacgcatctctcgtatttgcaaatactcgccttagcaccaaatctccaatgttgaatagcctttttttgacttttttgttgaagtatcttgtaactcggtattgatacgctgcattagtgacttgcgactcagttcgtttttcattaagaagatccaaatataactttaggagctcttggttttcgtcttgattatataactctcgtctatgagttgatatgttcacttcaacaggtaacattgcttccaagtcgaatgctagcgagaagggagtgtgcccgttgctgttttttcaatagttctgtgagcccatagtacttaaggtagctcgtcgacccacctccctttggcagcatctagcttcttcttgatagtatccttcaaggttttattaacaacttccacttgtccattcgcctgaggtctggatactga

SEQ ID NO: 56040 - DNA, 3062 bp, Cannabis sativa
tgtagaataatgtgtttatagaataaattggatcatatttttttttttaaaaaaagtttggtttgggcggtttaaatcgaccaaattcgaagttcaaaaatgtcagttttaagataggttctggattggctagttggttttcgaattgcaccaatccaaatagaaaatcaaattctgaatttttatttagaaaaaaaccgaccaaagccaccgatattcagttctaatctgcacaaagtaattcattttttcttaaaaaaaattctcttttacccaaaaaaaaaaaaaaaaaaggaagaaaaataaaaggacaaaatcttctcttatcgagtttgtacaaagcacacgagtgaggagtaaatggtctttttcttctcttttgtctagctctgactctggctctggttctggcgggaagagaggttagcatcaacttagcacagagctcagaagaagaaatccataaaccctagacaaaccttgctctcctcaaacaacatagtctccatctatgtgaatcattctcctcgattcatcaacaacatgtattggatggccacgcgaaacgtcgtcgtttcttctcctcgttggcgctcgctcgctctgcttcttcgttttcctccttctcgttacagctccttcactccctctccagtcgccctgtaatctctctctctctctctgtttgatttgttttgttgaagctgaccgagtttcctgtgtgcatttttgtttacacttatgcttaattatgccagttttcttctctttgttttgatggaaaatgtcatcttttttataaaaattgtagtgagaattgtgttaaatattgtccaatatatatatgtgtttttgagttttggtttgcttgtattgagtttcaaaatttgatggggtcttttaattttccaccagactatttttgtttggatattgaattgcagaaacgatggaacttaagttaaatccttgttgtgctcaatgttatacgaatgtagtttgtttccctttgtggaaaaagcaatagtattctccttttgattagattagagaggggtgccttagttaactatgatatagaataacagtttcatttgtaattgattgcttccttcagttgcatattcattgttgctaactcaaatttaacttctaacattacttggtcttggtacaaacaacaaaagaagagcatttgggaagatttcttgtttcaaagatcaaaaggttttgagacgaggtgcaagaaccgtgaagaaagttaagcctttggacagtgttctgagtgaaaaggagctttctaatatactttggtggaaggaggtatgttagctttacatcttttgtgcattgaaaatttagagagctaactgttaggtcttctaataggcattctttaatcgcagaggatggaagattgcagaaagccttcaactgttcagctaattaaaaggcttgagtattccaatttgctaggcttggatgttagcttgaaaaatgggaagtgagttctttgtctatctaaataatatttttatgtcttggaatcctgccatcttttgggtgcttcgaaaacaaaatgtaaagacggaagatttttaaaaaagttgaggatgctgaaaatttggtttgttaccactaggaagtaaggttccactttcattgattttatattatgatcttattttggaaaaggtgtcttgtatttttcattctttaggtggtataggtattggaagtcttctcttctctaaacttttatttgataatatttcattgtttctgaactaaaaaagaaaaattaatataagtcatgtaattgtctatttgttgtattgtcattaaaatgaaatacattgaccatcgattaagttaaaccttgcattgtcattttattgacagttgtttcataagaaatatatacagaaatacatttgaagtggttaaaaaggtgagttggtcaagcaattgctcttataggtgtgttgcatctgatttaagagaaattttcttattatattttctgttatcctcgatttgtgctgtccctgtgaatttctatacttagttttcatcatttctttgcttaatcttatcttctctgaaagaactggatttttttttgcctgtagtacaaacaacggtattcaaccagccaactatatcctctattaagatgtttttctgtgactgtgaaaattaacctcccctgtttcttaaatcattgtagagctaatttccttgtttataaatcactaataagaaatgtattgccttagtttgaaagaggggtcactcaactgggagatcttgcaattcaagtcaaagtttccacgtgaggttttgctctgcagagtatgtattgtcttttttgccatattgttggtggaagtttttttaatttgtctcacgtcagtgcgaatctgtgtgatttgtggaagtctaacttttttcattcagtgatgggtgcataattatttttttaataggttggtgaattctatgaagcactcgggatagatgcctgtgtcttggttgaatatgctggtttgaatccttttggaggtcttcgttcagatagtattccaagagctggttgccctgttgtggtaattaaatttatttaatatgcatcttgtgtttattttattgcgattataggtttatcctaaatggtttgtaaccatttgatcataacatttgcagtatgttatatatttaggaaatgattagttgagagacttcttcaatagtttggtatatcaagattgtttttagtctttgcaattttgtttttccacaatgactcctttcttgtgtaccaactaccaagttcaaccattaaacccaaaataaatatacattttacatgttaagtttttttacagtgaattccttacatctatttccttattccttaactctgtttctttcaatgcaatgtatttgcagaacctgcgacaaacattggatgacctgacacgtaatgggtattcagtggtagggtaacatgttatgcggttattcttacttcttctatgaaaatgttggcatacttaata

SEQ ID NO: 56041 - DNA, 1511 bp, Cannabis sativa
ttaaaaaaaaaataataatttactattaccgacggtttagaatcgtcgggcaaagtattggccacgattttaaactgtggcccatactttgacccacggttcaaaaccgtcgggtatgaggctaatgaaataaaaaccccttctctcatcaagacatcccaatactcaaaccctattacgcctatctctggcttcgctctctctctctctctctctctcgctagccgttcttcgccccaaacctcaacaccaccgtcgccgacgatggtccccagccttcaaaacccataactctttctctcttctctctcccgagcccctatctctaatttccctctctctcccgagcccctatctctggtttccctctcaccggtcctctcaggtccgatcgaactccacgcatcaggttctttctcatctcttgctatattttctgtttatatgtatttcttttttcttaatttgaatgtgaatgagcgagcaatatcattgaaaacagaaaacaaagacgacgaggatattaagctcgaccttgatcactaccggtcctggaccttgcccagagctcgataacaagaacattgtattcggttcggtacttgaaggtaggtttcagacgaattatctttctcggtagtcgaattttgttttcatttaaactgattttgatgtgttcttatagtgtaaatggattttattcaaaactaaactagaaatttgtgtattaccaaatttgtttataactttattgggttctgtgtatataaattttcattctattaatgggttttggttaattagccaaattatagatgaactttgagtttgtcttttgtatttagccagcaaaaatgacctggaagtaagcagtgtgcaagatatgctaacgattaatggcctagtgtttataaactcgacttgagtttttttttcaagtaatgcccatatctgtttgacgcaattgatatttgtttagtcaattagattttggtatgaaagcttgtgaaattaattgtcttttattctcttaccacaccctcaagtttttatagcaaggagtagttggataattttaattccttctctgatgttttgttgaagtgcatcattttttttatagctattgttgaagctccattgctcatcatccatttggattataggtaaagtatatgaaagaaatcttcttttttggcagtgatgatggaggaattattgggaaaaattcccgtcgtatgatgatgcacttatcaactcccgtagatgacgatctacaacagacattagcatttttggaaaaggtttgatatctgtctttccaataaagtgtgatgcatttacttttgaaactggactatgtattttggtatatagtagtggttttcattatattatttttcattatgcaatatatggaggtgtagcatcatatttctgcaagatagtgctccaaggaaaataaaataatcaatatgtttcttcatctgtaactctttccaagagaatgt

SEQ ID NO: 56042 - DNA, 899 bp, Cannabis sativa
gcaataatttatttgaatttaagggaggaaagagtgacaattttattcaatgtaatgtctctcagtctcaggctggaaccaagtctgaagcattggatgactttgatgcttggatggatacgatttgattatgttctaatttgatttggttttaattaacaaaaattatgttttaggaagtatgtgtcattatgtatacatatgtttataaataatttttgaaaaattgtttcttccatatttaaacggttttagtcctttttccctcttttttttcagtgactattatattatgtgactttttttaaggatgtatttttattcattctcagctgtaaaatgatttgtgcaaatagaattcacacaaacttacacacatttattggtaattggtaactaattttaactgatcattttgtttaagatgggttctaccaatgaaaagttagttaccacattggtgtgtgatgtttttgtgtgatttatgtgtgcatatatatcattactcatttctcgcattacatgtatcaccaaattatattagaaataactaaattattgaactaagcatgaaaaaaaatcctctttgtgtaaagttattattaaatcctttttctcttttaatgtataatgttattatatgatatttatagataagaattatataggattttataaattttcatgtatttgtttgtttcccaaatagattgatataatatatttgggtttcaattttgttgctattttgatgaaggatattagtaccaaaaaatatagtaatatggttttttgttgtagaatttcatctaggtctgaatttttggcattgatttatattacacatagactaaaaatttcagtcatccttgcaattttgtatgaaatatagagaaact

SEQ ID NO: 56043 - DNA, 1540 bp, Cannabis sativa
ttggaattagagtaatagttgtagtattaatctcttttaaaaattttctcgattttaaaaaagataatactgcctctactacctcatcccctaccaatttccaattttcttgaaaaaatgtacttccatactcatctggtcccggggccttatctctatcaatagcaaagatagtgtcttctacttccttccttgtgtattcagccaatagaatatcattgtgaatgcttgttaccttaggtcccaaatccacaatttcttgaacaactttccttctagctgatattgtagaccccaaaagcttttggtaataatctaggaaggcatgctgaactttttcaggagtatcacaccaatttccatactcatcctcaatcgagaaaattctattttgaatcattctcaattttagagaagcatggaaaatgtgtgaattttcatctgcatatttggcccaactcaccttagctttttgtgccatgaaactagaaaaactttactaacttctgtaaatttattcctcagttcctgctcttggttcatcagttccacatcctgtggctccttgttcaatttagcttgtagctcagccaaggcttctcgtgtagacagcattgtcttttggctatctgtaaacccggtttgatttatgctcttcagcaccagcttcaccctctttaatttctgcactatacaatacatttttgtccctgtgatgacttcctcccaggccttggttaccactttgtcatactcaatagcttttttccacatattgaaatatctaaatggtttcctcccacagaacctatcttcatagatagtcaccaatataggactatggtcgaaacttagttcaggtaggaaaaccacttcagaacaagggaaggcattgatccaatgtgcattgaccattgctctattttggaaaaaattctctcttcaggcttttgcttgttgttccatgtgtaaaaggaccctgagtacttcagatctgccatgttacagttctccatacagtcttgcaatctctgagatggaatgcagtgggctcttcttcctattctttcatccccattcattatctcattgaaatctccccattagaatccatggctcatttattttctttgccaattcctctaagtctgcccataacttttctctctttttctcatcattaaaagcataaatcagtgacacaaagaacttccctgcttgttgctgtgattgcacataacagtgcattatttgactagagaaatatttaatatctattgaatagacatttggttgccaagctataactattcttcctttgtctaaccaaggattattgtttgagaaacaccaaccttggaagaggcttgtatagagagttcccatattcttattctgaaccttcgtttctaggagactaacaaacccagcttgctttgagtacattaattgcttgatttcattgtgtttattctggctgttaatccctctcacattccagcataaaaacctatccatttgaggaagagggatctccctc

SEQ ID NO: 56044 - DNA, 3005 bp, Cannabis sativa
ttttatatatatgtcttattactatgacaattaaattttgaattgttatatttatataataaaattaagcctaaatgatggctaaaaaaaattggatagatctaatttagtcttattaaaattagttaatgcatctaaggttggaacattattcaatccaatgctttcattggattagttgactcattcaaattgattggattggttgacaaaatccaacatttaataaataattgaattgaattggattgatcaagatttattggatgtgattcaataaacacctaatactgtaccataaggtgtcctattcatataaaatttctatgcgtctctcatatctattatccactaagtcatgtttggaaaaataaaattggtgctctcaactttttttttttatatttttttaatgatcgatttttttttttacaataataataatttttaaaaccatttataaaaaataaatatatatttttcaacaacaataagcaatcctttctacattttacaattttacagcatttttattttacttatttttgtgtggcaactaatattaaatatagttgcatataaaacaagaactaatctaatataatttatctaaaccaatgtatattattgttgtgatccgaataccaacagaagaaaaatagaacaaaaacacacaaatcaccaaatagtagaaacaataatgcagcaagaaataaaatgcaaaaaagaacaagtaaatacacatagcttttacaaggtttgatccatgaacatgtttagttcatagtctactcttcagcggaaatcaaccaataattgcttggacttttattgctcttcaatgtgtaaatgcacatccttcgattacaatggatatggtgtttaatttaggattttatgtcctaaaaagtctgtaaggacaattctaattattaattgttatccgcgttttcgtgaacacgacacatgggttttaataaaaaaaggctaagaagtcattagctgaccaacctcctcatttgatgctctaggaagataaatgccataactttataggaagagttgtcgtgataagaaattccctgattactagcaacacggagagtatccgtgaaccaaagtttcccaccgttctaggaaccaaagccatcgactcccaagaagagtaaggattttccaaaaagggccatggcattttgagacacattaatccaggccatgcctttagcaagcataaactgtgcctatacgtgtcagcctacggacctactgaccagaattttttaggcatgacgtcagaggttgtcttccacgacacgttatcgtactatgcatgcatgtccttgtgtacctgaccaaatgatccaacagctagggatcagggaaattcaaaaaggagaagccctgggatgacatgcatccaaggccagcttgtacgacttgacgcccttaaataccatatgagaaaaatgccacatattaatcgaacggtcggattttgccccaactgtgtgatccatctaaggcagcacatgcaaagaatttggcctataagtactcctaaaaaaacacaaggggagagacccttttttgggagagatagaagactcattcttcatcgtcttaagaaaacacattttgtaaccatacaactaggggtgtttatccaatccaattcgtactattttgttcatagtgtatcggatccgcactaagtgcagattttattttttggatccaatctaatccgcgcaatagctaaaagggaaattttattttttatgcttacatatacttaaaattttccccctaaactcataatgtttaatatttgtgggatatgacacatttataatatccctaaaataccccccatttacattaccccctctctcttcttctctctttcttcttcactactgccgagctcccctaccacaaaatcaacatattttttttttctcttcactcattctcttcacttcactacactataatctactacactacaagctatactacatattttctctcatttttggacagagcatcatacacggagcaacatatgcaagcaatgggtgattttatttgtttgtgtaatcttatttgttgttgttatatttagtttagaatgttgttttgatgcttgatctgtggattgttgctgttattttggtgtttttgtatgttaaaatgcttgctgtctatgaatactacatttttcctggtttttgcaattttttttcgtttggtccaatagggtccgatggtggtccgctccctgtcaaagttggttggcagggatgaaggtccgatgaggggcccaaaaattggtttttttgtttaatttgtgggatcaggttcgattggtgttcgatggtttacatatttattgcattttcaagattttggataacttttctgcgagatttttgttctaaattgtaattgtatttttttaaatgtatgtgacaggttcaactgttaatgcctttgttatgtataatggtgtttgggagcttgagggtagagattgggtttataaccgggtcaaaaatttgacatttgacattgatccaaacgtaagctactcaggcttggttgatcttttgtatgaagaactggatgttgacaaagtggagtatgacttgaaattgaaagtaaattacaagtgcattaaaaggcttaatgtatcgccctgaagttattggaaatgaaaagcgtgcaaggtactttttttctacacttgtcaagaagccaaatgaatttactccattgtttgtgactttgttaaagaagaatgtttgtgtcgatcctagtcccacaccaaaatctgttaaggaaaatcgtagtgaggttgggagttttgttcaagaaataaatccagagctgttggttgccaatgtattacctgaattaaacactatgatgccgagtgctgatattgtagcacaaatgcccttcattgatggttttttatggtccaggccctgaatgttatg

SEQ ID NO: 56045 - DNA, 808 bp, Cannabis sativa
gtattttgggcgaatttaggagcaacagtcttcaagagatatatgttctaaacttgtattttattgttttgatttaatgtacacacatttgaagattcaatgggctatggtacaatgataattaaataatataaattctttccctagatacctaatttagtaccataaaaccaacagaaaccagggtcttgattattcgtcttgttctctttcttcgttgatgaaactgttcatgattcccatatctttgctagagattccaatatcaggatgaagattgggataaggttgcagaccttctcctggacaataaagattgggatatccctaaacttcatcttctgtttgatcaagaaacaattagcaacattttaaaaggatgtaaaccttgtggcaatggtagggataaataggtctagaccaaggattcaaatggcttattctcaactaagtctgcctacctagttcaagtcttggaccacgcgtctcagtgcactgtttctccagccttatggaatagactttgggaatctaaagtgttggagtgccataaagttctctagtggagcattctttctattgcccttcctgtccgtgctctccttgccaaaagaatacatattgaagatgtctcttgccctttttgtggggagggtgaggaatcaatggagcacactttcctttactgtaactttgcgtcccacatgtggcgttcctcctcttgggggatcatgccggttgttgactccggtgcgagattatgggacagagtcaaatttctttagagtctgaagtctagaggggttga

SEQ ID NO: 56046 - DNA, 1295 bp, Cannabis sativa
aatattaaaaattatttttattaaatgcatataaatttatactgtaaaaaaaaataaaaattttatataacatatttatatatatataaatttgtgattatggtgaactagattaaaatattatcactattataatagaatcttaagagctcgcagcactttaaaatttataatttaccaaacactcagctcagttttttttttacagttttgctacaactgttttttcttacaacacaactacaactattttccccacagtacagctgtgccaaactgaccctaaattgttaaattgttggtaaggaggactgaggaggggtcattatttattcttttcacaaatacaatattgtaattttctttaatttagacaatgtaattaaattcataaatattatcacaaatgcagaagaatggttatgttatgtgcagaagtaaaataacttaattaaaagagtactttttatcaaatcaaatcaaatcccctttaataaactcccttaggaatcctctttcattataacaataccaagaatacaatctgtgatcatttactttacaagtcacttcaccatacaatgaactctcttctctctctatctatattccaaaatgtaatggaactaagactataaataggctaccaccactgatgaaacctttacaataacagaaacaaactaacataactaacttaactaattcttggttaaaatcttgtcttcatgatgtggcttgatccaacttgatcacttgcatcccatgtacattaaaatgaactggttttatttagctcaaaataaacaacatgatttagtaactcaactaataattagttatcatttgtttgttgctttagctaagaataagcactatgatcctctttaaggttttataattggataaactcaaatcatgagttgtttcctagtttcagagtgttcagtgttttgatttgtccaacgaggccttgtgcctaatattgtcacatattcaatcttgattcatggttaagaatctatttggtttgtagataattaattaactaatatagtgatgaaaatggcataatcatgtaaatcaaaacatagaaaacttttttctaatttctgataactacttcatttctatcattaatgttgaaataaatccacacatacactgtaaaatcagcatttaacaaagagtacacagcagtaaaaacctaagtggccttcggcctctaacaacctatagttagaaccaaaagttagttgcaaagtttgttacaacaaactctcagctctctctgg

SEQ ID NO: 56047 - DNA, 1481 bp, Cannabis sativa
taagttctttgcgtaatgtttcttttcattttgtaaaacgatcagcaaatgtagcagctcattcctttgcgagggcctctatatctcaccctgatcgcattttcaagttggacattgttccaattaaattgttgcctaatttggtaacagagattttcgtttaataaaatgactttcattttcaaaataagaaaaaagaaagattgatattttttaaaaaaaaaaaattgagtaaaaccgagtgaaatttattatatatatataacggagatttgaaaaaaaaaataaaagagaaatttgccaaatatagaataattttttatatctctatgtacaattaaaaaaataataaaatctaactcaaactaataaagatatgtacaaattaataacaataatgttaaaggacacattaatgtgccaaacactacaaaaagtatcataccattattattgcattttaatatcatctcacaattttttttttaatagaactcacaaaaattttaatttaataaatgatttgaaaaaaggctaactaattattgggtaacatcgatattgaacatcttaaggtatcacatagcaataatagaacaaataatcatttaccataaaaaatagtacaaagatcattcataacaaaaaaaaaataataataaataaataaataaatttgcaccaagttttgcagttgtgcatcggaacataattctaaaaattgatgcacatatatcacaaagtctttttttttaaatatagtacaatttttatatatctcattgaagatgttcttgcaaacttatatataaaaaaaaattctaataaaagttaataaagatatgtacatatatattaataatgaaatgttaaaagacacattaaggttccaaacaccacaaaaagtagcatactcttattggtacatttcaatatcaactcccacaaattttaatttaataaataatttagaaaattgctaagtaattattgagtagcacatcaatataaatatcattcataaaaaatcaaaaacaaaaaacaataagaaaaacataatcgagattaataaagatatgtacatattaacagcagaaaatgttaagaggcacattaaggtatcaagcaccacaaaaggtagcataccacgttattagtgcatttcagtatcagttcctagaaattttaatataataaatgatatagaaaactgcttaattggtgtaatacatcgatatagtattgagcatcttaaggtgtcacatagcaataataataaaaaaataatataagatcattcatcaaaaataaataaaaaaacacaaaagaccaaaaaaaaaatgttaaccaatatttggtaccttattggtatggataaaaaatcatttaatatactaaataatacataaaaatatatattaaaaaacataaaagatatatataaaaaaaaaaaaaaaggacaagaaaataaagaaataaaa

SEQ ID NO: 56048 - DNA, 711 bp, Cannabis sativa
atcatctctatctttaatactagtgaatctaatgaggaaaacaccataagaaatcatacctatcttgtctactttgtccttccagatccttcgtgcaaatccctcaagaactgaaagtggtggattggcacttagaacatagcagacaatagcagatttccagtacgcaacctcctcctctatgtcatccattgtgatcttcactttcctctctttcttcgaactattaaaatctgattccaggttacgcatcactggttctgctcgaagaatcgaaggcgtagtttgaattcctttggagatagaattttggcattccctattagcagctaagaaatagccaaaatcagcagttatctcatcttttcgcttcaataatctcaatgttgaatccggagatacaggacgctgatcttgaagcaacacatcaactcctgccctgtcttcctcttcatccgagaattccactagttcaacaccaagaatttcctccatggatttggtcttccttacatcagcagatgaattcagacctttcttcttggaattcttattcaaaatttgcgactttgccacagtcttggacctcgttttcgccatggcaccaactcagaggagagttgcaagtagcgaagagagagagagagagagagagagagagatcaaacgagagggaaagagagaaatgggaggctgaattttttgggtttg

SEQ ID NO: 56049 - DNA, 2027 bp, Cannabis sativa
aaggtcacacaatctccttcataatcccacccacaaccatatccaaagtggagcatttgaatcgcttcccaaagctcataactttctatccaatcacttatcccaacgtggaaggtcttccattgggggctgagaccactaatgatgttcctgtttcctcattacatctcatttccactgccatggacaaaacacaaaacgaaattgaatttcttctacgaaaacttaaaccccatttcatcctttacaattttgcttattgggtttccaagttggctcgtcccttgggcataaaatcgatgcattacacgaatgcgagtgctgctgcaacagcttacaatgtatcctctgctactcaccacaatctcaaaggaatgaagaaaattactaaggctgagttgatgaaacctcccccgggctatcctgattcatcaattcacctccattttcatgaggctcgagaccatcttatgatgagaaatgttaagcctggagccattaatatgtttgatcgcttgtatatgagccttgcagagtgtgatattatagggattaagacttgtagagaaattgatggtttgtttattgatttccttgaaaaagattttgggaagcctattttgcttacaggatcactgccagacccaccaaccgatcctctagagaagaaatggcttgactttctaggccaattcaagcccaactctgtcatatactgttgtttaggaagtgagtcgattttaaccaaatctcaattccaagagttggcgttgggtttggagctttctgggtttccatttttagctgcattaagaacaccttcaggggctgattccattgaagaagctttaccagatggatttcaggagcgaattggagaaaggggggtgattcatggtggttggattcaacaaccacaaatcttgaaccacccctctattgggtgctttatcacacattgtggcgggggatctttttctgaggcattggtggccaaatccaaatgtgtgcttgtgctactaccgaatagaggtgatcagattttttatgcgaggatattggagaagacatttaaggctggtattgaggtggagaaaagtgaagaagaagggttgtttactatagaaggtgtcttcaaagccattaagactgccatggaagatgacaatgaggttggtaaagaggttagggccaaccttgccaagttacgacaaccgattcttagtgacaatttccaatcttcttattttgatgatttcgttaacaagctcaaagctctagcttttgggatgaaataataatagatattgattacaaatgttggaatgaacattataatcaccatgcttatgtaagctttgtttatatcttttggtttggttatttctgattttaaattgttgtttcatttactttcaaatattgttatcttcttcttcttcgttaaggccacttattagttagcttgttatgttcaaatcttattactctttttttaatataataaataatcacttaaaaaaatatcatatataataatgaataaacaaatagcctggtgtaggaaaaatttaaaatgtttcacaaattagtcaataagactaattaggatttttattactgaactttgacatgtatcaaatcatgtcccctaggggtgaaaatcgctcggttatggtcagtttttacaattttataaccgaccgtttagaaattataacgatttttggcggtttttagtggttttttgatttggcggttttgggtgatttattgctgtttttagcagttttgacagttttttagtttaatcatttttttatttcaaaaacaaaaaccgaccgccatgtcaaaaaaatcgaaactgaaaccgaccgccaaatttggtgatgacgtggaaccaaaaattcagttacagtctggtcggtttcggtttatcggttttatgaacacccctaatgtcccctgaactttttaagccgttaaaaattcatataatatttaaagaataattagcaattttgtcc

SEQ ID NO: 56050 - DNA, 1083 bp, Cannabis sativa
tctgtaaggtcaatcatcactccatgaagcaaccatagtgacgtactcatgtataagggccatttattccgtaggtgtaagggcccaatggagacaagaagtggggacattacacatgccatgctaggggtttgtgcttagtttggtacaaatccaaagtttctaccaaactgatgatgaatgtgttttattgtagttttgaggcttgacttccaatgggtcaaatctacctgaaattattcatattggtattttggcttgcatgatattttaatttgatttgattagaatatttttttgctttggagcacttgaaaatgtgttaaaatgagcatgttatgattcttacaaaatttttggttaaactatttttctggaatcctggttaagcattacttttgtaaaaataattaggaacatgtaaactgacttgaaaatcttgagaaatttatagtagacgtttaatatgttatatgttcctcacagtttggtacagttttttatgcaatgttagtgaaaaattttgtctttggacaacaatattctttaattgtaaaattagtttggtacaattatacttgtcctaataaattaaaaatttacaaagagtaacttttgggtgtgttgacctcaaaattttatcaaccgataacggagtcatatagacctgatgtttgcctgtgttacacaattagaatgggaaagtaaaggacacacagatttgttataagggttcggccccttttgatagggggtgatgacctactcctcttttttttgtattgataccaagagttaataccattcagatcactataggtgggatctgatatagcaccctcaaggatacaaagtaagaatcaaggttgacaaatctcaagtgttgagaaagcttgtataggcgtgtgagacagagtgaggaagagagtaatcagacttgggcttagagcttggagacttagaatcaaacttagagactttttgacttaggttttctaggttagagttaaggcctttatataggaaagcttaaaccctaatttacaacataaaccctaggatgtttatatataaaattagtta

SEQ ID NO: 56051 - DNA, 1350 bp, Cannabis sativa
aattaagcatagaattttaaatttctcttttattattcgctatcggaccaagatctaatgatttaatatatttaaaattaatatttattgttaaattcgtttattacctattaataagtaatacccatttagagatattccttatatattttcaatgagtattaatgatattattgacttttatagttagtttgtaccttgtgcattggagcacaaatacaaaaattggaccaaatatagttttgtggtatcttttagactaaatttaaccttaaatatacaccatctattggagatggtcttacttctattggatttggagtgctcttaatttgttaagaaagagcacaaaataaggtccgaacactcctactcaatcatttaaaatacttttgttacaaaaagaaaaaccatttaaaataccttattaaaattatatatatggagaaagttttaatggttacatcaaatatgtaattattatagttacatttatttttggtaattggatcactattgaatgattctgattaatatatatatatataaataaataaattaaaaacttataacctgatagtaacttcttactttatttctttataaaattttaattaaaattaattttattaaaaattaaattactaataattattaattaattttttttttacaatttattactaaataagaatatgttagaaattaattttttttcacttaaattattgaaatatttataatagctccttataattcaaaattattacacccgtagccttaattaataaaaaaaaaaagtaagaatgacctataattatatgtaattatatactcaatcttattatcaatactttaaacgctaaataagtgtgtcagtccatgattggtccaagtgatttagtttttctttcaaaaaaataacatgaaataaaaaaatttaaatataataataattataaaattaaagatatgtttttgtcgcactcgacacatctgtacttcattccaccctctgtcatgtaattctattttctcaaagaaccgaaattgctttactcttccttctttgcagttttaaacatactgaatatgtatcacttaatcggagtgaaatcataaaaaaatttgcaaaagtttgaaaattattaattggtattggttattgatcttgaatatagattattgaaaggtttaaaagttattaatgttatcgatcagttattaatcttgaatacgttttattaaaaaaaattaaacgttaataattattattagttattaatcttgaatatgtattattaaaaatttgaaagttattaatttttattggttatggatcttgaacat

SEQ ID NO: 56052 - DNA, 2698 bp, Cannabis sativa
gctgttaattgtttcaaaaaaaaaaatgaaaagatatgggaggggacaaaatccagtcagcagatcatatagaatagttgttagttaattatttgattcgatataataagtactattataggtagtttagtttcagttcgagagaaaatgtcctacccatctacacgtcttgcctatataatcctttaattaattttatataattcatttaattaatttcctaatgtgtgtgtggtttttgttttttaaatatatattattatttttttttatatgtgaatccacattttattccaccgcacgttctcttcaatgacagatgtcattctctctttcttctttattttttatttttgtcttttcttctttcaagtatttcaccaaacttttattctaataataaaagaaaacttattactttaggctagggaggaaaggtgagtgaatggagaggagtgaaaagatttaaaggttggtttaattgggaggaataaaattaaaatataaaaataagaataggaataggatgaaataaaatttaaaatttataagaaaattattaaatttttttctcattatgtatttgaatggtttttactttctattttaaaatagaataatcattctactaaaatggtagaaacatcattccattagaatgacattttcttactttaatatgcaatcaaacaaaggaattgaatgaagattgtttcatatgcattttattatttccaaccaaacgtcacttaagagataaagtgataggcggaatgatttgtttggtaaaggaaaaagtcttattcctccaaactcaaaatgttcatcaatccctcctaaaatgaaaaaatctaagtacatataatatgtcatatttatcatgaaaaaataatattagaaaggatacataaatttagtaattcatttaccttttgtcctttcaaacaacattaagggaagatacattcctcactatcattcctattctctatcttaaaaagagaagaattagtattacatactattaatattattatgagatacaaattattttaacaagttttttaataattattaaatttaaacatatataattaaagtttaatactaaattacaatagcagtacgtattatgacaataatagacaccactgtgatttttaatatttttgtttaaaaaaaaacatgattataatttgttaaaatctcacattgttaattggttttaaaataaaacttcatacatctaaaacacacaccttacgtactaaattctaacatagctacactgttatattgaaattttaattatgattaaagttaaattagtgaaaactaatattatttttattcgcaaataagttttattattcacaaaaaagaatttatattgttactaaaaaaacccatcactaattgttaatactcacagctttaccagcatgatctatatggttatataactaactttatatgttatgttaaggggatatatatatataatgatggtaatttaaaaacatggcatagtcattcctaacaatatatatatataaatccaccaacaactgcacatttgtttaagtgagtaaacgtttgctcaaactggtcccctctctgagctgtacagtactccatgccaactgtttgggaagaaattaaactttggttttataatttaattaataataatgtcgacagtattataaatacattcacactacttgtatatatatagatcattaattgagatatacttctattcttacatatttattagccaaaaaaaaaaaagaaagaaactaaaacccttttctctctttattacatatatatgatggagcatatgggagctgaaagacaatggagctcacttagtggagttcatacagctgaggaagcagatttcatggctttgttgctcaatagtaatactaatcctcaattgatgagtagtagtggaacacttccaccattgtggtctggtcatcatgaatcatcatcatcatcaccaccatataataatggaagtagtagttattctcattattgttctttagaaatctccaactctaatttattatacactaattttaataatgaacaagatcatcatgattattgcttaaaaaatatcaacggccaagaattaatgatcagtagtgatgaaaacttggaagaagagaaggtaatttcaaaatcaataatcccagcatctcataatattaagaagaataattctatgatgaaaaggcctcgaagcaacaatgcagaaaataatgtgagtagtatatatatatattttgttaatttttttttttttgaggggttgtaattaattaattaattataatgatattaatttatgcaggttaaagtagaaaagaggtgtaataataataagaagaaacagaagttggtgtcaaccaagcttaacaatgttatcaaagaagaagaagaaggtaataataataacaatataaatggacaaagctgtagtagttattgtagctcaggagatgactccattgataataatgggtatggctcacaagatcagatgatgattatgagtccaaaagagaataatagtagtagttcaactttcgattctcaaggcaaaacaagagccagaagaggctcagctacagatccacaaagcctttacgctagggtaagtatatatttatctacacaa

SEQ ID NO: 56053 - DNA, 2530 bp, Cannabis sativa
ctcaaaacattcataatgcccggcgggcctgagaaccagaacccgccccaaaggagtttttttggttaaccccatcattaaagcccatgtttacatcctcatcttcggccccattagcatccccaaccggcctaacacatggcccagtaaaatcatcaatttcctcctcaatataatccccttcaataattgttttacttcttttcaaatcaacaacctgaatactaggcaaaatattattctgggttgattctgtggccaactcattcacctttgactttccatgtatatcaatattgcttccagtaaaaagattggtaggatacttaccatatcctctattcatgcttggattattggctggcaaaatctccaatccctgatttctctccacctcattactttgctgtcccctctcaccaccgtgggagcttgaagctccagtctttgacgcgactccagatcggagccattgagcgcccatattgtaatgtcgtcgtctcggggttgcctttaactccaagccatacggcttattgatcaagtgaagaggagtttcaaacaatctatcacagaagcgctccgaatggccaagcacaccacaaataaagcaaaatgttgggagatcctcatatttgaataagataacgcagaaagccccactctttttttccaatcgcatcttctgttcgagaggtttatccacccgaagtgtgacgcgtaccctgagatagtccctccacacaccagcaaagttgtttggatcagactttacaaacttaccaatgtaattgccaacatcacgaaccactctctcagacttaaaacccgaagttatgtcatgtaactgaacccaaaaatccagttggttcaactgaattgatccacgtgcacagcacgtataactttcactagtaaacttaaatgtgtatttgaatgaaagagagttgtttgtagaagtataaaaatttacatagtatagaatgaaaagtactatatactttcgtccttatttttgtcccatttaacattttaaaagtgcataactatcatcttctctatcttatttcacgtttagataatgaatctttgccaaattaagatagagtaactcactcacttcaaagccctaatcccgaaagaataatgtgcattttcaggtctacatattataaagactacttatagtatttgccaggctcgatcctaatcataggcagattaagcttgtgcttaaggcccacctagtttaggagcccaaaaaaagaaatttactttttaaaattacacatttttttcttactcattttgaaaaatactatatttttttttttctaaataagaattcacaaatatttttttccggtaaaaaaaaaattcagggctaaccctggtattagcaaatttcttttatattttgtattacactttataatagcttatatattatatcaccctgcaaataagataggatttcaatccaacatattaacacttattggctaaaatgaatactaaattacactaatatcattgtcatgttttaaggtgacttataacaacaagaaaattgattgcaagataagccattaaatgctaaaataggttagaaataaaataagaaaaactaaaatcatactctatatatttatatatataatatatatttcaaagtcagaatttgattttatattaaatcttactataatggtattctatcttttgcacgaaagataaagtaatgtatattgtttggccagcttgtattcttatgttttaataatcataatgtttttatcattttaagagtgacatttatgagtgttttttttagataagaaaatagtttatatatattagggttacatattgaaattttcaacttttttttattatgggacaaatttttttaaaaaaatactgtgttttttttataaaaaattccgtataaattttataatgtgtattgtgttaagctttcattattattccacgattattttttagttgttctactattatatttaattgttctattttattgttttacggttattttataaaaaaattgtatttttataaaaattctgtatgacagtaaaattgtaaacttttatcaaaaatctaatatttttataaaaacccatatatattatagtttatagtatttttatataaaattggattaaaatttagcctacctcttattataacaactttttataattgttttctttgtattgggaacctcaagaatgaccatatcatattaaaaaataaacaaaaaataaacaaaaaatgtgagagagattgagtacctactctctctatcccaaagaatcaaagatggagccacatggttccaaaaagccatcttaaattttatttttcagttttttattattatttattattattgtatgtttttatatattaacatatttggtatattaattagttttattaaaataattgtataagaatctttcaccaaaagaaataaaaaataagaggagtagctaattaggat

SEQ ID NO: 56054 - DNA, 683 bp, Cannabis sativa
  modified_base (297)..(299): a, c, t, g, unknown or other
  modified_base (369)..(370): a, c, t, g, unknown or other
ttgcattagttcaatcgagggagagggattatcctttatttgagtagaagataaatgaacatttgttggagttaattctgaaagcatttcctctaatactacattgctttgtggcttgtagtttttaatatggtaatcttcaaggaatgtggcttttgtagaaataaacactttatcatccttgtgactataaaatagtccatccctagtctctttagaattctcgataaacatgcaaacttctgtttgcttttctaacgtgacatctttctttcttaagacatgagcaggacaccnnnagattctgtaatggcttaaactaggtatacggcaattccatatttctaaaggtgtcttagggactgattnngatggaacaacatttaaaatgttagtttccatatgaattgcatatctctagaaggacgtaagcagagttgaatagctaagcataaacctaaccatttccaaaagagcattacggagctctagatctcggtgttatctccagcggttgtctggacatttgttgctgaaggaaccccagcactggaagtatttagatcggctgctgaacttgtatttccagtctcttgcacgccggtgtgattccagccaaggagacgtcagaccttgacccgcggttggtggttgcgtgattggttgttcaggatttgtggctg

SEQ ID NO: 56055 - DNA, 998 bp, Cannabis sativa
  modified_base (27)..(32): a, c, t, g, unknown or other
aaaatagattacattgaaatggagttnnnnnnagggcataaaacctaacaaaggctatagctgaggagccgtgagagcgagcaggtggtgattgtacatgtcgcggaggttaggcctggagcgtacgatctttgggacatcagagcttttgctgtatagtcgcttggcgacaaaatttttgtatatgaatagtaaacttttgtaaacgtattttgtaacgggatcccggtattttgtaaatgtattactttaagtttctaagtaaataagaaaattttaattaatcacgtttttctttaatctcgtcgattagcaacgagtgcacagtacaaaaatcatgttaacacgcctatattagttagggtgttacacatataaccacagttatttttcattgtgatgactgatgacatcattataattgtgaataactatatgttcagggtttaatggacttatatattaaacatataatcatgaaataaatatgcgcacaaagcatatgacaaggtcagtatatatattttttttatctttattgataataaataagattagattaaaattgaattttattttagacataaaatctcaacacacgtgtcttatttctttatttcaattttttagtttattgtattaagtaatttgcatctacgtttaattattggttttttttaatgtaagttggttttaagttttgaattttaattttgttattttaaataactcaattttttgtattagtttttattttagttgctttagggaaccagtttatctatctcagatttttaattacttgataaatgtaattggtttttttgtatcatattccaacgtccaactttaacatctaactatggtgacgatgacaactctaacaactttttctacactaataactcagtgactttttcagcgacaaagataaattatggtgactttccaacgtgacaactttcggcaatttttcgagcaacaatgactgctgctcc

SEQ ID NO: 56056 - DNA, 829 bp, Cannabis sativa
tcctgaagttgaggattgcatggaaaaattggatggacttggatgggaggagcctttgtatagtgcaactattggtatactttgtgaaggcgatagctatagaaaaacatggatgaacatgaaagatgtcaacatggatggggggagcctttgtatagtgcaactattggtatactatgtgaaggcgatagctatagaaaagcatggatgaacttgaatgacgtcaacataatggagaattaggttaaggcaatggagaaaaaattaggatattttttatttagttatttaagatataattatgcttagataacttttatttggtacatcatgtcatgaatatattttttcttttgtgtatcgaactttattgatttattatagttatctatgaatgttacatttttaatcctagtattgtccttctaaagtggctataattttttttaatagatttaatatggaatttgagaatcaacttttacccttaatgattttctattgatatgtacatcgtaaatgcaactatttacttagaggtaaagataatacttccactctatcttgtacaagatacactttggagttgctatgcggctcaaatcaacaatgtatagagtggatcttgatatgtcgtgatgcatttgttcttttgtgcaatcattttagacagagagaatggattaaagatagtaagcatgtatcagttgaagaaaagatagaattatttttaaccttcatagcacataataagcgatttgttgacataaagcgaaaaattcaacgctcttcacaagctgttcacaagtattttcatgaggttcttgaa

SEQ ID NO: 56057 - DNA, 894 bp, Cannabis sativa
tcttatatgtgttgtgtcctgtttaagactataacataacagagtttgtactgatgaaactgtaagaaaattaaagtttataaatattgggtacttatgccactagaaaaaattattgagtttatgcctcttacaaatttaaaactttataggtacttatgtcactttttacccgataagaagaacattaaacctaggccattgttggtggtattattattgcagctttgcaactttaattatgttttggtccataatatagctaaatcaatggtctttgtattctaatgcttatggtgatattagtttggtttctatcccttaggaggttcttaatgataccactgagtggactaaattttttgttggtttattgcatgacaatattgatcttaaatatttttgttggtttattattttgagtaatcgtaatatatgtatttatgcttaacaatggactgttgttcgatcacaaatataaaaagagaacagtgaaccttaaacatgattttcattgatgctcacatttttttttaaataattcttgtgactttttactaatttgaaaattatttatggtaaagtatctcattttctgtatggacacctaagaatcttttatttattgatacagaaactaaaaactcataaactcatggtttaagcttaaaaaaaaaattaaacagataatcaggggaaaaagaagggaggaaagagaaaataaattatagttaattaatttataaataaatattttttaaaaaaatattattaaaaatttaataaataatctaatgcaattcaaatattaactattatcatatatctgttataaaataatataaaattgtataaagtagatgagaagaaagaagaagatgaagagagaaagag

SEQ ID NO: 56058 - DNA, 1271 bp, Cannabis sativa
tacaattcgaattgtgaaaaacttgcgagtctgtaatgattgtcatgatgcaataaagataatatctagaattgctaacagagagattgttgtgagagacaggagccgcttccatcatttcagagatggtagatgttcttgtaatgattattggtagcaagtagcttcagcattggaggtaaaaagtcaatgaatatctcggattggaaacaacaaatatggtttctcattttgtttttcttcttgttagataaaattaattaatggtataataacaattggaaagcttgcggcacccctactaatctttacactacactctgtgatgaaaggatttttagggtacctaaaatagttcatctttaaattcatgctttacatgtagagataatttttttaagtttttgggtttcttcatatattttaatccatttttttttttatttttctatttttatctgaacattaattatttgtttgttattttctctttctttttttttttgttattttaattaataaaaagtattagatatataatattataatgttgtaaaagaaaatattaaaaattatgtatagtttaatataaaagtgtgagctaaatagataaaattgagttttaatgaaatattttgcaaaataaagtagagatgctaatatgaatgctcaaggtaagagtgattaaattctaaatcaagttattttataaaagtaaactgtaccttgtccaatatgtttctcgatcagtcttgagtattgaaagattatttttggcaatattagttgcaaaaataatttttattataatgtatttatttttactaaatatatttaaattagacactcttattacacaataataatgtatatcaatatttattcaaaaagtaaaaaaaaataatgtatatcaatattaactatttatatcatgtagggaccacatgacttgttaattgtgtgattgggattcattatacatctcaatatctcaattattatgtttcatagccatggagaattttttttgaagtcaaaatgaattcggatgtgtttaagtccaaattcattcatccattcctcagatctttcaactaatacaacaacgttaatcttcatttattaatgttttcttctgtattcaaacctgctaaagctgttctcagggatttcttcttataaaacatcagtcaagagttatcttgcttgatgttgtggactaggagtatttgaaagaatacatactaacagcatgtaagatttcttctgtg

SEQ ID NO: 56059 - DNA, 1836 bp, Cannabis sativa
agttggtggcttgtagaatattattcaatctcacaatatattaaaaatacggtgggaactcttgatttgatctcaatcattctgaatctaacaaagatatgtattgctatacttattatgtcattatactcctttttctttctttctaaaaattgatgagtgtgtgcttaacaatttgcaactatattatgttaattattgtactttagatgaattataaatattgcagtttttttgaagtagtacattccattgaggaaagaatttgtaatttgaagatgttaatgaatttaattttctcgaccattcgcttggttggagcacaagtgtcacaacaaatataatatagaagatgatacacatgctttgcaagatatacttctcagtctcatactctttggtacaactacaagccatcttctgtatgatgtcattaaacaatttctttgcccaatttttattatgtgcgcttgctgtacaattttattggattgcagttagtaaatggtctgattgcaatgctgtgttttttttttctctcagaaattctctttaccaaatgcttatttttttttcgttgatagatcattcgattaaacgttaatgtgtttatttttaagcatgattacaagtctagcatcttaatcacccaatttaatattttctttttttaatttaaaagttgaaataggaattttagacttttgttagccttcatttatcctaattttcatgaatttacgactatgggttttttaaaaaaattacattcaatattctaaatgacatactattatctttaagttttctaacttgcatgttgttttaatttttcttcagaatttgaagagcaatggaaaatcaaatctgttaggaaaatgaaagtgaagaaaatggacttgtatcatatttacatgtgattcatcttgattattataacccagttaaagaactttaactgatagcaaacttgtgcaatatattgtaataatttatatatatctatataatttttttattagggtatgtgaagtggcgtctattttttaatgttataatttttttaatttgtggtttttttaaattaattactattttctacattttttttcattaatataatacgtaacagtagctaatttataatagtaacataattgcatattaatgcataatttatcatataatgatttaataagtgcacatacacttatttttttcatatcacttctctttatattaattgtttttataagttatatcataaatatttaaaatagtacttttttaaaaaaaaaaaaaaaaaaaaaccaaaaagctaaccctaaataaaattaccccaacaatttttgtactaacgtataggtattagagagactaataactaataagagtcaattactcctataattaattatcacatcagtttttttttttttttttaaaaaaaaactattgaagtactaaagagactaatggaaataataagttcaaataactcattcaaaatcagctcatataataaattaaaagaaatatctaattttaatatatattttaaatatggtgcaaaaatttagtatctctttattacatatatatgaatataaatggtttatatgattttttagttgcaagataactaaaatatgttttatgattaaaaaaaattaaaaatataattaatgcacacattagtatcaaatatatccaagctatatatatgtttcttgaatattgacacatattatttatatctaaaatttcctacaatatatacgtccatacattaaaaaagaaatatgacatgtttcaaaagacaattttttttttttt

SEQ ID NO: 56060 - DNA, 514 bp, Cannabis sativa
ggcataaaacccaacaaaaggtacagcaggagatctttgttgtttgaacctctaaatttcctcttcatgtcattgaattatagcttccatctctgcgaatctttgttccaaatttaatagagctcgtggtggataatcatcactcttgccagaagccctctaatggctgtcacctcgattacagggacaacttttattctattctctctaactgttactagtcctgaccatgttattctgactctccatattgcaccaagtgtccattctatagaactaacctgtcaattagtaagtcaatctgctcaggcagcgtcttaatttgcaatcttaccactgcacttatggattttaaggaaacgcattttaaaaaacaattataaactactatgcttcctatcatgctttactaattacatacattactaaacaagtaaaggcttattgaaacgtgagccaagcttttctgtgatgatgattatacatgtcttgacaatctttggtagacaaacct

SEQ ID NO: 56061 - DNA, 663 bp, Cannabis sativa
ttgaagtcctccaacaatagatcgatactcctgcacattgtcaatgggatcactaccatatgcagataattttgttccgctagtcatcggggttgcagaaggtttggcattctgcattttggctctgcagagaagatctttggcatacttctcttgggaaagatgcattccctcagtggtataattcacttctatccccaagaagtaattcaattcaccaagatctcgaagtgaaaactttgcattcagatcagtcacaatttgagagacaacttgagagtcactccctgtaatcaaaatatcatcgacatacactaagataagtgtaatagagtgaggagctgagcaaatgaacaatgactggtcagacttagaagaaaagaagccaaaattcagcaagcattgatgcaatttctcaaaccaagcccttggtgcttgcttgagaccatacaaagccttatggagtttacaaacaagattaggggctgttggatcttcaaatccaggtggctgtgtcatgtaaacttcctcctgcaagtttccatttaagaaggcattatgaacatccagctgttgaactttccaccctcgagctaaagcaatggtcaaaacaactcgaatagttattggtttcacaatcgggctaaatgtctcagtgaaatc

SEQ ID NO: 56062 - DNA, 795 bp, Cannabis sativa
gtattttgctgagactgattattgtcagaaagtgcttcatgagtgctgaggatgggatctctatcagtttgaacatggttgttactgtttggtttggactgtgtttcaggtgttggaacatttaaagatacagaccaggaagggagttggacctgaactggtttttcagtttggaaattgttgagaaatccatgcttaaatggaaattcattttcattaaagatcacatttcttgagatatacactctccatgtactgcttaaacatttatagcccttaaagttttcactgtaacccaagtttacacacttagtggaatggtattgaaacttgtgtctttgataaggtcttatacatggataacaagcaacaccaaaagttttaagatatttgtaatcaggtttcttggaaaatagagtttcaatgggagaaatgtttcccaaaacaggtgttggtaacctgtttataaggtacacagcagtaagaaaagcatcacaccaatactttaaaggcatgcttgcttgggcaaggagagtaagacccatttccacaatgtgtctatgttttctctcagctctatcattttgagctgaggtatggggacaagagtgttggaaatcaatgccactttcaataacaaggttagtgaaaggttgatactcaccaccataatcagatttcagcctttttatttttctattaaagtggttttcagaaaggtttttgaactgtgtgaaagcttggaaggcatctgacttggcttttaatgggtaaagccaagtatacctgctgaaa

SEQ ID NO: 56063 - DNA, 1483 bp, Cannabis sativa
ttagtgattgataactaacttgtttgtagctataaatatattaattatgtttagtcacaagtaatttttttgctgtgactaaaagtcacatatttagtcataatttgttttttttgttgtgactaaaaggttgtcactaaaaatgatctttttttgtagtgacttgtacctatttatagtcatattcaaaatttacattatataataaaattcctttttaagaatcatttatttaagaataagctctaatttatttttataaaatttaagtcttaatttagacaaattataaaaaaaaataacttgtaagtcttcaacattttattggaaaccaaataataatgctctaataattgtatcattagtaattttggatcaaatatattattaattaatgtttccttcgagttaaacaagttactattatttttttttttaaattaaatcatcaatttattaactgcaatcctttaagattacattatgaaaatcagaagaaacatcattacttctgataacacgatcaacaacagaataggatgctttagccaagtaatgagcaacactattcgcagattgtctaataaaaagaacagaaacatcattcaaaccttctaacagagttttacaatcagatataaaagtcccaaagtaaaacaacattgtaagaggactcctaattgcttgcagaactatgagaaaaacaaaattttagagtgaaagagggaatctaatactgagaaaaataaaaaagacaatgaaatgggggttggaggttgttgtggatattgtcccacacatagaataaatggtagaaaattaaaccatatataagaacatgggttacgctactcattgattttgagttgaaaccccatgattctcaacagagctctataatatactgttatctacacattacttattgtgagaatcacaaagtcattataatctatagtccaaaaagtgtcggtattctatggggacaaaaccaatgtcaccacattagaagtatcctatatataattaattagtgcatgtgttcaagaaatattttatgtatatatatatatctatatcaaatttactgaaataatagatgtgttcaagaaatattttgtggtcaagaaataccgaaaagaaaaaatatctatatttattgatagaatagaggtagttggactctagactctatactactgtttgtaattggattaatttttcttgtagtactgttgtttgtttggggcctcattgatgaggtgctttctttattagttgcagttggtacgggtttttattgtatttcgcgttctgagaattgtgtttcaggtaattttttgtcataaaaagtagcgaaaatacaagtaaattcggggaggaaacagcaattctaagagcgtatcaaaattgagccagcgcctagattaacaattaacctggtacacgagtttcgattactcaaatgcaaattttgctccaa

SEQ ID NO: 56064 - DNA, 1154 bp, Cannabis sativa
ctagacctggtcccgacccgaactcgcaatccctagacccagcctagaccgaaaatgaggagagagaaaatagagagaaagtgatgagagagaaaataagagagagaaagtgtgagaaaataataagagaaaaagccataagagagaaaataatgtgaaaaaatgatgagcgagaaagcgatgagagaaaaggagagagaaaatgagaagtataatgatatgagataaagtggagaaaaaatattgactaaaagtgaattattttttaaaacacaaaacaacattttgctagtcttaaaattcttatttttgtaactttgttttttaaaatttattttcaaaatacaaggttaatcatgttaaattgtttttaaaaaataattttctatttttaaaagtaaaaaatagtttttttaattatatgcacttaattatcttaaactgcacttaattatcctaaactcttttcattttgaatttttttttgggtgtaacatgcgtagtctaggagaaatgaaaaatccaactagctatacaaagtctaaagtagaccctatacattgttattttggattagaataatgatattcattcatatatatagacacaaatccatatatgaataaatgtgcatggggccttcatcatatatctgatttatttatttattttggaaattggcctaactataataataataataagccacttagttctcatgatctcttctccaacttgttcttatattgcttggcttggaaatattcaaaggtttgtatatctaaatggtttttgtttattcatattattattaatatatataataaggccactttaataacgccgccaggcggctacactataaaagtaacattttttcagtacttgatcatgtggttttcttttttttcaacacccatcacaaagttctctaggggaaaatatatatttatatatatatatatatcctcaaagaactaacttcgattcaaagctatggaaatttaaaagttaaaaggatcaagtttgtgtcaaaaatggacaacagtttgattacttactagttaccaaattttatatcaaaaataaattgagttataatgaggtacttacctctttttacatatgtctagagtattaattaggggatttta

SEQ ID NO: 56065 - DNA, 1246 bp, Cannabis sativa
gtataggcatatatgccaaataaacttatgagcaaggaatttaatcatattcaaatttttgacaagtgcatatattgttatctaggtttactatataagacatgttaccgtcatgtgctttgtatacaaccagatttaatgtctcaacttgaagaaaaaaaaaaaataggactaattagtttgttattttatagacacacattgtgtttgaaataaaaaataaattgttgttcctatatacacgaaaaatagactaataagtttcttggtgtatatcattatgtttcattatagtttactctcttattacaaaaataaaatgttcctccccaacaaatgataaatagtaagtttatttacatatataattgtaggctatatgaaatgaaataaattgttgttttaatatacaaaaataaaaataaaatttgtttcaatatgtcaaaataaactaatagatttattagcataactaatagtatgttttatgtattaattatttagtatgatctatgcttcttttgtatatcagttttgtaaactaatatcatgaatatattcaatatttagtttgaaaataaaaagaaaattataagtaccattaataattgtaaacatattagtttaaaaaatgttaattgtgaacatcttgatatgaaggcaacaaaaaatattgaaattttaaggcatgctattatcaactaatcaattactttaacagtatgtttagtatcttgaaaactaatatcaaataataataaaaaataatatttgtaaattattaaggttatattaacaaaattatattattctaaaaagtttagtaattattatttttattttgtatactaatcagtttgtatattaatgtattttaaaataaatctagttcacaatattatatcaatattatatatatgagatatatgaaaggtaactaattagtaacttatatatgaaatgttataacgtgaccaataaatagaactaaagaccaataaaaagtctttaagctgagataaattgagagagagaaggaatttactctcgtttgtgttataacgtgaaattcaataccttagtctacgttatttatagatatttttgaaattacgttatattttttagagtataatgactaacgacatttctgtaaattagatcataatttagtgtgtagatgtaattttctcaaaaaaaaaaaatgaaaggaaaattaaaggagttgatatctcataaaagtttt

SEQ ID NO: 56066 - DNA, 1421 bp, Cannabis sativa
gtcttcttgatactcgaatgagaaaataacaacatgcaagtatagctactattgaaactactttaaatgcaggaacattggtcgtcactctgtttcctaatttcaacatgtctctcagagataattggttgactgatgcttttaaagtagaagtgcaacaataagagtagaccaaggtccaacttctcttggcgacccactccattattagatgccatatcgactccaatcatgctcttgatcttaacatctctcaaacacaagacgctttacttatctcaattgattccaaacaagtaccgacatgtcccaaagcaaatgaccactaaagaactcacaaagcttttatccaaatcgtgggtcagcatatgtgaaaagcttcacaagccacagcccgtggttcaaaccacaaccgagccttcctaccacacaaaagaagatggatctattgaaattgtttttgacagaagccaaacaaaactacctagcaatttttgcacccaaaatggcatcacacccatccagccaacagatgaagagattatgtacttcgattcccaaggaaagccaatttatgcttttgaatcctcaaacggacataaatgttgggatgtttgtagctacaaaagttgtctagaagatgatgagcccttcgggcgtcccactccaagaaagcaactcaagcaaaggctaaaaaaaggcgacaaaaacatcagtctattaggctaaccatccagaaaatttgactatatagtcaaatactctacactaaagagctacaatcagcctactagaacccatcagatgggattcagatgattcttcaatagcttcactgccacaaatagtcttgccttgttacaaaaaaccatcagttcgatcacttcctaatccaaacataataatccccaatacatccattgattatgatgtacatttccctcttctcaagtggtttgaaaaaactaaagagcaaggtaccacttcccaccaactaaaatttaaaatcctacaactagaaatgttaatggaactctacaaaaggtctcttcatcagaagaattatttaattggcaaatagaaaatataattgcccataaccatatcttaaaaagggtagaaaaataaatcacccacacggagaaaatggtcaaacaacaatcacaagacatgatcattgaaaagttgacaaacgcattacgaactcatggccatcataaaaatcaaattctattccgatgttatttttcttgggaaaagaaactgaaataaaagccctaaaaacccaatatgaatctctgaaaaagctattttttcaaagagaatcatactctacagggtctcgatcaacactttttggaggaaatacaatgcttttaagagcaaatacaacatcggtgccatggtagttttcaacattg

SEQ ID NO: 56067 - DNA, 626 bp, Cannabis sativa
aaccaatcttttcactccccaaaattttctcaaccaattctcacaaattaacacctctatatagaattattaacacataatagatactcaatttaacatattacatgcattacaatcccagaattcagattgcaaaagccatctcaaaatcatgcataaacatggcacatcaagctctttgaacaagagcatcatcttcaactactcaaactattttccagcaattaaacaccctagaaacacatggatccaagctaaaaacataccataaaatctcagccaaagttcaatttcaatacaaagcatcaaacatacaaaggtttattcaagaacatactcaaattaatctcaagaacacaacatgcaattaaaagaccaaatcatccttttccaagctttttccaacataagtttcagcaactaaacaagattaaaaatcataaaaagctaccttgatccacaataaagcaagagcaatggtctttcctccaaactcaagccaaaagcaagctttttccctcaacaatttaagctttaatttgacaaatcaagttgaaaatatcaaaaggggaagagagggtgagagggttcgggtgagaggatgaacaaaccagaaaatcaatcct

SEQ ID NO: 56068 - DNA, 867 bp, Cannabis sativa
gttgtcaagaaaagtggtgaattatgctgcaggcatgcccttgggtcttaaagttataggttcatctttgttttcgaagaataaaaaagattgggataaagctataaagaagtttgaaatatatttttccaatctaaagattcaagatgtgttgagaataagttatgatggactaaatgatcatgaaaaagatgcatttcttgacattgcttgttttttaagaggaaaaagaattgaggttgttgaagaaattttggatggttgcggatttgagggtaccataactaatctcattgatatgtctctcattagtgttactaatgagaataagatatggatgcatgatttggtgcaacaaatgggtagggaaattgttcgtgaacaaagtcctaaagagcttgggaagcgtagtaggttgtggcttagtgaggaagtatgtcgtgttttgcaacataatttagtaagtactacttaaaaatttattctatcattaatgttttagttttgttttaatttataacattgcacacatacactacagaaaactgttacttttagtgaattttttaatcacaacataattttttttatgactaaatgtaatttatagtcacaacaaaatgttacttgtgaaaaatagcatttagattcaagttgtcactaatttagttttggtcacaataagtattgtgactaaaaatacatttagtcacaatagattggaaattttgtgactaatacttttagccacggaactttggtcacaacataggaatgatgatttataattagtcacaactttttcatttttagtcacaagttttgttgtgactagaagtaaatttttttgtagtgatagggtatggg

SEQ ID NO: 56069 - DNA, 720 bp, Cannabis sativa
aaacaaaatcctataatttatccccaaatcccacccaccccgatcctcctcctcttcttcttcttcaaagaatttatcaatgttccaggaaaaaaacatctaattaattaaaaaacctaatacagtacatcacttactggtttggtacatgaaacctcagtgtttcatcaaccatttcccacatatcaaaatgctcaaaacgaaaatgggattttcttgttcatgtttggattggattatggatgtcttgttttgcgtcttctcaaaagtttggctgagtttttggagcaaagtacactacaattccctataggcaactggaggtaatgcttatacatatatttagctcaaccaggattacttgcattttcatatgctttctttttattcatctggtctccatactgttaactttcaagataaataagctttggttatgattctatcaattaacagatgatagcatcaaatccatggctccggtcatcaatgactgaaaccaactccaaatccgacaatgggtccctttggtttcgcaaggtggttaggctccggtcatcgactacaaaaaccaacccagatccggttcattgaccttcaaatctcgacttcccggcgaaaagctctggaacgatatcggcgtggtaccgatctcaaatatgagcatggtgtgggtgaggattttttttattattattgtgggaaaactgtaggagaaga
